United States Patent Application Publication US 2005/0228172 A9 - sequence listing, part 125

SEQ ID NO: 583618 - DNA, 571 bp, Homo sapiens
atctaaagtaggcaaagatttagatgaagatttccccgttgctttcctagtcaaatcagctaggggtcagataagagttatctgcaggctgaaaacaacaacaacaacaacaataataatgacaatgctagtagtcataaactaaaagtccacactttaaaaatgaataaaacttgtcaggtgcagtgtctcatgcctgtaatcccagcactttgggaagccaaggagagcagatcacgaggtcaagagatcaagaccatcctggccaacatggtgaaatcccatctctactaaaaatacaaaaattagctgggcatggtggcgtgcacctgtagtcccagctacttgggaggccgaggcaggagaatcgcttgaacctgggaggtggagaatgcagtgagctgagatcacaccactgcactccagcctggcaacagagcaagactccatctcaaaaaaaaaaaaaattaataaaactaatacaaaaccctttagctaataaaagattacagtaccaaaaacatctgattataaataccaaacwctgtatattataagagaagatgaatcc

SEQ ID NO: 583619 - DNA, 598 bp, Homo sapiens
aggatcccagatgccaatgtcaggcactcctgctccaaatgggtcaccatggaaatgagctttgaattaagacagattggcttcaaatgcatttattttccttattattaaatagtccatgggtttttcccctaatacaagagaagagatttttatctttactgttagaaagctcagtatattctgtgtaagagagataggtttaaaaaacttaagargaaatattttaaaaaccaaaactcagtaagaaatactattctcaattataatggtaatcccgggaccctagtgcagctctactttttaaatccatttttactggcttccacttaaatggctacttaaaattattttttattttagacaaaatataaatcggaaataaaaacataatggcttatcaatagaagttctcatactgatccatatggattatttctggcataatacaagccaataagtcacttgcatccttaaggaagagcactgaggagaaagatgtactgtctgcaatattcataaattatccaactataaccaggaataacctaaaaaggcttctaggcattcttatgggcagagaattatttgtggtata

SEQ ID NO: 583620 - DNA, 542 bp, Homo sapiens
catatgttctaccaaaaaatcaggctctcatatataataaaaattgctaaaaagactcacaatacctgcttcaagaatttttccaacatgtaytcatttaaaatatgtttgtatataattttcccagattattaaccaaatagataattggttcacaagactgctaaaactaaattattaaaagaattcctatctatattcttattaacttcatggatttcagtgtttaaaactgacattttgggtatgctaaagttctataaacttaacaaacatactgagatagttcataataaaacttcaactaaaaaaaatagtttaggatttgctattctaattgagaaagccaaacttgtaatgaacatttgttgacacataatcacctgcgtggtgacaaagggacatgaaatcatgaaagggtcagcctctacctattgaaagattactcataagcaaatttctgaagactctctgaatggtagtgaatgattcatggtgggaagcaaaacatgttattctgtaagctgagagatattgccaat

SEQ ID NO: 583621 - DNA, 542 bp, Homo sapiens
catatgttctaccaaaaaatcaggctctcatatataataaaaattgctaaaaagactcacaatacctgcttcaagaatttttccaacatgtattcatttaaaatatgtttgtatataattttcccagattrttaaccaaatagataattggttcacaagactgctaaaactaaattattaaaagaattcctatctatattcttattaacttcatggatttcagtgtttaaaactgacattttgggtatgctaaagttctataaacttaacaaacatactgagatagttcataataaaacttcaactaaaaaaaatagtttaggatttgctattctaattgagaaagccaaacttgtaatgaacatttgttgacacataatcacctgcgtggtgacaaagggacatgaaatcatgaaagggtcagcctctacctattgaaagattactcataagcaaatttctgaagactctctgaatggtagtgaatgattcatggtgggaagcaaaacatgttattctgtaagctgagagatattgccaat

SEQ ID NO: 583622 - DNA, 576 bp, Homo sapiens
aagaatttttccaacatgtattcatttaaaatatgtttgtatataattttcccagattattaaccaaatagataattggttcacaagactgctaaaactaaattattaaaagaattcctatctatattcttattaacttcatggatttcagtgtttaaaactgacattttgggtatgctaaagttctataaacttaacaaacatactgagatagttcataayaaaacttcaactaaaaaaaatagtttaggatttgctattctaattgagaaagccaaacttgtaatgaacatttgttgacacataatcacctgcgtggtgacaaagggacatgaaatcatgaaagggtcagcctctacctattgaaagattactcataagcaaatttctgaagactctctgaatggtagtgaatgattcatggtgggaagcaaaacatgttattctgtaagctgagagatattgccaatgatatttcctttcacttcccagtcacagatgtagagaaagacagataagtcaggctaatataattgaaaaggagaactctgaaggaagtggcaactatcaaatgcc

SEQ ID NO: 583623 - DNA, 595 bp, Homo sapiens
gtaagctgagagatattgccaatgatatttcctttcacttcccagtcacagatgtagagaaagacagataagtcaggctaatataattgaaaaggagaactytgaaggaagtggcaactatcaaatgccaactcttctagagatttcttacatttttgagatacagaaatttatatattgcacttatctattctggggtttttaatcaagagtgtatcccaaccttgaaggttttttgtttttttgtgggtttttttttttggctattattgttgttagagacaagagtctcactatgttgctcaagctggattcaaactcttaggctcaagctgggactacaggaatacaccactgtgcccagcttcaagaaaacatttttaaacacgttcaggccttaataggtctattacatcaaaatcttcaggggaaagcctacaattgtagatttttaacaaaatgtcctcaggtcactgtaatgcacaattctgagaatcagtgcagcagacaatcacttcagtctcacctctcacccacatggctaattcctttatcagttggagatgtggccaaaaagagaaaagagtaagagata

SEQ ID NO: 583624 - DNA, 530 bp, Homo sapiens
aatttatatattgcacttatctattctggggtttttaatcaagagtgtatcccaaccttgaaggttttttgtttttttgtggktttttttttttggctattattgttgttagagacaagagtctcactatgttgctcaagctggattcaaactcttaggctcaagctgggactacaggaatacaccactgtgcccagcttcaagaaaacatttttaaacacgttcaggccttaataggtctattacatcaaaatcttcaggggaaagcctacaattgtagatttttaacaaaatgtcctcaggtcactgtaatgcacaattctgagaatcagtgcagcagacaatcacttcagtctcacctctcacccacatggctaattcctttatcagttggagatgtggccaaaaagagaaaagagtaagagatagtgtcatttattaaaactccagttaagtttcctggctatgggtagaacagggacaagtaaactcaaaatcccacttgattttgctatttacaagctccttat

SEQ ID NO: 583625 - DNA, 552 bp, Homo sapiens
tttttgagatacagaaatttatatattgcacttatctattctggggtttttaatcaagagtgtatcccaaccttgaaggttttttgtttttttgtgggtttttttttttggctattattgttgttagagacaagagtctcactatgttgctcaagctggattcaaactcttaggctcaagctgggactacaggaatacaccactktgcccagcttcaagaaaacatttttaaacacgttcaggccttaataggtctattacatcaaaatcttcaggggaaagcctacaattgtagatttttaacaaaatgtcctcaggtcactgtaatgcacaattctgagaatcagtgcagcagacaatcacttcagtctcacctctcacccacatggctaattcctttatcagttggagatgtggccaaaaagagaaaagagtaagagatagtgtcatttattaaaactccagttaagtttcctggctatgggtagaacagggacaagtaaactcaaaatcccacttgattttgctatttacaagctccttatctcccac

SEQ ID NO: 583626 - DNA, 552 bp, Homo sapiens
tttttgagatacagaaatttatatattgcacttatctattctggggtttttaatcaagagtgtatcccaaccttgaaggttttttgtttttttgtgggtttttttttttggctattattgttgttagagacaagagtctcactatgttgctcaagctggattcaaactcttaggctcaagctgggactacaggaatacaccactgtgcccagcttcaagaaaacatttttaaacaygttcaggccttaataggtctattacatcaaaatcttcaggggaaagcctacaattgtagatttttaacaaaatgtcctcaggtcactgtaatgcacaattctgagaatcagtgcagcagacaatcacttcagtctcacctctcacccacatggctaattcctttatcagttggagatgtggccaaaaagagaaaagagtaagagatagtgtcatttattaaaactccagttaagtttcctggctatgggtagaacagggacaagtaaactcaaaatcccacttgattttgctatttacaagctccttatctcccac

SEQ ID NO: 583627 - DNA, 552 bp, Homo sapiens
tttttgagatacagaaatttatatattgcacttatctattctggggtttttaatcaagagtgtatcccaaccttgaaggttttttgtttttttgtgggtttttttttttggctattattgttgttagagacaagagtctcactatgttgctcaagctggattcaaactcttaggctcaagctgggactacaggaatacaccactgtgcccagcttcaagaaaacatttttaaacacgttcaggccttaataggtctattacatcaaaatcttcaggggaaagcctacaattgtagatttttaacaaaatgtcctcaggtcactgtaatgcacaattctgagaatcagtgcagcagacaatcacttcagtctcacctctcacccacatggctaattcctttatcagttggagatgtggccaaaaagagaaaagagtaagagakagtgtcatttattaaaactccagttaagtttcctggctatgggtagaacagggacaagtaaactcaaaatcccacttgattttgctatttacaagctccttatctcccac

SEQ ID NO: 583628 - DNA, 608 bp, Homo sapiens
agaatcagtgcagcagacaatcacttcagtctcacctctcacccacatggctaattcctttatcagttggagatgtggccaaaaagagaaaagagtaagagatagtgtcatttattaaaactccagttaagtttcctggctatgggtagaacagggacaagtaaactcaaaatcccacttgattttgctatttacaagctccttatctcccaccttcccactaagacattctagatttgagaggaggctttaggttcttatctaagtggctgtttctgccaggatgagcaataagtcagttaataatttgttccaccttctgctgaagtgtttctcacttcgtcaccacatattcactgccaatctggtttcctcagagtcctcctaaaattcatctctaggcaagttgcaattcattctttttcaaaccaaaaattattagacccaaagctaaacagcaccttgtctcaacacataaaacaaacttwaaaacaaaaaaaaagtcttcctggcattttccctcattatctaatatccaagtgacctgcatatttctgattgctctctttctcccctcccatttttccctcttaagccttgccactgaa

SEQ ID NO: 583629 - DNA, 567 bp, Homo sapiens
tagcagcaacagcaacatgtccctttattgtaagttgctttagttttgtttgagttttaagataaagcctawttccggggaatattttctttcctgtgttgttttacattaattaagaaaaaaaaaaaaaaaaaagaataagcctgtgtagaaaaaaagttgaaaaggttttacctttaacaaattcacaaatattttccaaagtgcattttataaagctgtgccctttaatgcttctttaaaaatatcaatatttaaaataaaatcttagacaattaagttatttcaaaataacttaatttgtatttgcattcagggaatggttgagcttccaaatataaaaaattgacccttacctatgtcaatgttaaaacaaatattttggaaagaaagttgattgacctataccttgtccagtgcttcaatatgtgcaccatgggaaagcagtttttctgccagtgaggtgctctcactatacacggcataatggagagcagtgttgccgtagatatccttaaggtttggattggcgccatgttccagcagaataacggcacaagcctcttc

SEQ ID NO: 583630 - DNA, 567 bp, Homo sapiens
tagcagcaacagcaacatgtccctttattgtaagttgctttagttttgtttgagttttaagataaagcctaattccggggaatattttctttcctgtgttgttttacaytaattaagaaaaaaaaaaaaaaaaaagaataagcctgtgtagaaaaaaagttgaaaaggttttacctttaacaaattcacaaatattttccaaagtgcattttataaagctgtgccctttaatgcttctttaaaaatatcaatatttaaaataaaatcttagacaattaagttatttcaaaataacttaatttgtatttgcattcagggaatggttgagcttccaaatataaaaaattgacccttacctatgtcaatgttaaaacaaatattttggaaagaaagttgattgacctataccttgtccagtgcttcaatatgtgcaccatgggaaagcagtttttctgccagtgaggtgctctcactatacacggcataatggagagcagtgttgccgtagatatccttaaggtttggattggcgccatgttccagcagaataacggcacaagcctcttc

SEQ ID NO: 583631 - DNA, 632 bp, Homo sapiens
gtatttgcattcagggaatggttgagcttccaaatataaaaaattgacccttacctatgtcartgttaaaacaaatattttggaaagaaagttgattgacctataccttgtccagtgcttcaatatgtgcaccatgggaaagcagtttttctgccagtgaggtgctctcactatacacggcataatggagagcagtgttgccgtagatatccttaaggtttggattggcgccatgttccagcagaataacggcacaagcctcttcctggcaatggacagcctgtccgtgttagaccaagaaacagactgtaaattccaagaattcaaaatacacattccacaggtttcaccaactagttatatgtaaatgagatcaatttattttaattctatatatgtaaatcaaatccatgtcatgctaaaagagttggctctaatatacctgtatcaaaggcgttctgttttctttgtcacagacatcaatctggcattttctgttaaccaggagagtgaccacttgcacatggccactggcacaggccaagtgtagagcagttctatgagagtaagaggattttttaagaaactgtagtacaatatctcaaaacatacaatcattcatgtaatgtaaa

SEQ ID NO: 583632 - DNA, 212 bp, Homo sapiens
agcttccaaatataaaaaattgacccttacctatgtcaatgttaaaacaaatattttggaaagaaagttgattgacctataccttgtccagtgcttcaatatgtgcaccatggraaagcagtttttctgccagtgaggtgctctcactatacacggcataatggagagcagtgttgccgtagatatccttaaggtttggattggcgccatgt

SEQ ID NO: 583633 - DNA, 212 bp, Homo sapiens
agcttccaaatataaaaaattgacccttacctatgtcaatgttaaaacaaatattttggaaagaaagttgattgacctataccttgtccagtgcttcaatatgtgcaccatgggaaagcagtttttctgccagtgaggtgctctcactatacacrgcataatggagagcagtgttgccgtagatatccttaaggtttggattggcgccatgt

SEQ ID NO: 583634 - DNA, 567 bp, Homo sapiens
tagcagcaacagcaacatgtccctttattgtaagttgctttagttttgtttgagttttaagataaagcctaattccggggaatattttctttcctgtgttgttttacattaattaagaaaaaaaaaaaaaaaaaagaataagcctgtgtagaaaaaaagttgaaaaggttttacctttaacaaattcacaaatattttccaaagtgcattttataaagctgtgccctttaatgcttctttaaaaatatcaatatttaaaataaaatcttagacaattaagttatttcaaaataacttaatttgtatttgcattcagggaatggttgagcttccaaatataaaaaattgacccttacctatgtcaatgttaaaacaaatattttggaaagaaagttgattgacctataccttgtccagtgcttcaatatgtgcaccatgggaaagcagtttttctgccagtgaggtgctctcactatacacggcataatggagagcagtgttgccgtagatatccttaargtttggattggcgccatgttccagcagaataacggcacaagcctcttc

SEQ ID NO: 583635 - DNA, 634 bp, Homo sapiens
tgttttctttgtcacagacatcaatctggcattttctgttaaccaggagagtgaccacttgcacatggccactggcacaggccaagtgtagagcagttctatgagagtaagaggattttttaagaaactgtagtacaatatctcaaaacatacaatcattcatgtaatgtaaaaactgaatagcatgtttttcctctgccttcaaaacaaataaattttttgaagaaagtacaatacttactagctcttattgctcactgccttaatgaaaacagcagcctatttgagtagaaagagctcagtctttggattcggttcaactagggcttgagtcctactttaagccttgacacttaccaactattgcttagcctttctgtacctcaacttcctcattaataaagatgacaatagtagctatctcataggacaccatcgtgatgcttaaatgagaagctatgtaaagtatgtagaacagttcctacgacaactcaataattgtaagatttttgttttttgagacaaagtctcactcttttgyccaggctggagtgcaatggtgtaactatacctggaactcctgggtcaaatgatcctccatccccagcctcctgagtagctgggactacagatg

SEQ ID NO: 583636 - DNA, 584 bp, Homo sapiens
ccagtctgaccagtgaaaccccgtctctactaaaaatacaaaatgagccaggcrtggtggtacacacctgtaatcccagccacttgggaggctgagacaggtgaatcacttgagtccaggaggcagaggttgcagtgagctgagaccacaccattgcactttggcctgggcaacaagagtgaaattccatctcaaaacaaaacaaaaaacaaaacaaaaacactgtatggctataatatcactttacctgccctatattccataaaattattcttcatattatttatctaagattataatttcatatagaatgctttcaaactatgttcagttgaaactgaaagtaacatagtttatagatttgtttctttgatatgccataacagatgtttaaacaattattaaatatttactcttaaaaatacttgacttactaattctgtacatttctgcagatataagaaactcctggaaatgacaataaatatgttaaatgtatttggaaatgaagactttgattgccatggagacttaaaaacagatcaactgaaaatggatattctgattaagaagctaaaacagaa

SEQ ID NO: 583637 - DNA, 559 bp, Homo sapiens
agggtggaaactgcagcttgtgccatgatccctgtgcaagaaaagtagtaagaaattgaatggtagaaatccagtatcctaaactcacatccagagctgtgagagtttttcactggctggcaaattgtttttttgcatcagagaaaaaaacaaaacttggtaacttggtattcgatttgcccaaaactctcatcagatagaaagttagsggatgaattctctatctagtattatttccatgaagttagatgaatatcactcccaaaataaatccacgtggcaaccagaatcagtgcatttctcccaagaggaggtggccaagctcccacatctgtaatcccagcatgttgggaggccgaggtgggtggatcaggaggtcaaaagattgagaccatcctggccaacatggtgaaaccctggtctctaccaaaaatacaaaaaatagctggatgtggtggtctgtgcctataatcccagctacttaggaggctgaggcaggagaatcacttgaaccagggagtcagaggttgcagtgagccgagatcgtgccactgcactc

SEQ ID NO: 583638 - DNA, 584 bp, Homo sapiens
ccagtctgaccagtgaaaccccgtctctactaaaaatacaaaatgagccaggcatggtggtacacacctgtaatcccagccacttgggaggctgagacaggtgaatcacttgagtccaggaggcagaggttgcagtgagctgagaccacaccattgcactttggcctgggcaacaagagtgaaattccatctcaaaacaaaacaaaaaacaaaacaaaaacactgtatggctataatatcactttacctgccmtatattccataaaattattcttcatattatttatctaagattataatttcatatagaatgctttcaaactatgttcagttgaaactgaaagtaacatagtttatagatttgtttctttgatatgccataacagatgtttaaacaattattaaatatttactcttaaaaatacttgacttactaattctgtacatttctgcagatataagaaactcctggaaatgacaataaatatgttaaatgtatttggaaatgaagactttgattgccatggagacttaaaaacagatcaactgaaaatggatattctgattaagaagctaaaacagaa

SEQ ID NO: 583639 - DNA, 346 bp, Homo sapiens
atggctataatatcactttacctgccctatatkccataaaattattcttcatattatttatctaagattataatttcatatagaatgctttcaaactatgttcagttgaaactgaaagtaacatagtttatagatttgtttctttgatatgccataacagatgtttaaacaattattaaatatttactcttaaaaatacttgacttactaattctgtacatttctgcagatataagaaactcctggaaatgacaataaatatgttaaatgtatttggaaatgaagactttgattgccatggagacttaaaaacagatcaactgaaaatggatattctgattaagaa

SEQ ID NO: 583640 - DNA, 346 bp, Homo sapiens
atggctataatatcactttacctgccctatattccataaaattrttcttcatattatttatctaagattataatttcatatagaatgctttcaaactatgttcagttgaaactgaaagtaacatagtttatagatttgtttctttgatatgccataacagatgtttaaacaattattaaatatttactcttaaaaatacttgacttactaattctgtacatttctgcagatataagaaactcctggaaatgacaataaatatgttaaatgtatttggaaatgaagactttgattgccatggagacttaaaaacagatcaactgaaaatggatattctgattaagaa

SEQ ID NO: 583641 - DNA, 536 bp, Homo sapiens
caaactgcccccagtacacatcctctgtccttaaagatctgagctactaacatggaaaagattgaaaaacactgtcttcaagtataaataaaaatatattacatttcggtaagaatacattgtttagggggaagggaagcagatgctcatctattttgtcctatctattgataactaaattcagaagctgtactaaaagtcaaacaaaagttataaatacatctcaatttttaaagagcaatgattacagtcagaaaaactcatktggtggctagtattcttgaattaaaagtgccataccaaagtgaaatctttttggttttcaacacctagctttttcatgtcacaattattttgggattcttttccacttactgcatattgtgaaaactcacctgaactcaaaactctaggtaaatctataaacctgtaactcagaatccacctttaattcatttgtaaaatacactttctctgcacacatttcctctctcttcttttaaccgtaatatttggatttagggagcatcaagttc

SEQ ID NO: 583642 - DNA, 536 bp, Homo sapiens
caaactgcccccagtacacatcctctgtccttaaagatctgagctactaacatggaaaagattgaaaaacactgtcttcaagtataaataaaaatatattacatttcggtaagaatacattgtttagggggaagggaagcagatgctcatctattttgtcctatctattgataactaaattcagaagctgtactaaaagtcaaacaaaagttataaatacatctcaatttttaaagagcaatgattacagtcagaaaaactcatttggtggctagtattcttgaattaaaagtgccataccaaagtgaaatctttttggttttcaacacctagctttttcatgtcacaattattttgggattcttttccacttactgcatattgtgaaaactcacctgaactcaaaactctaggtaaatctataaacctgtaactcagaatccacctttaattcatttgtaaaatacrctttctctgcacacatttcctctctcttcttttaaccgtaatatttggatttagggagcatcaagttc

SEQ ID NO: 583643 - DNA, 610 bp, Homo sapiens
catccattgggacaacagggccggtgtcaatgtaagcaatgattctgtagttcctctttgttctttcaaaatctaaaataaacaattgaatttatattatatgctaaatctaaagaaaatacatcttgttgtacttgaggccagaagagatagaagtaaggcagtcaagtttgggaacattataaaaaattcaaaaaaagtaataaatgcataaaacttacagagtaacaagtgstatttcagaattcttctaaatactaagtattcacatgaccttatcaatatttgcattactaaccatacaataagaacctgacttctgactgttctgagataagggataaatgtgtactttaccttaaatgggaaagtgcatcatgtacccacttcgagattcacaacagggaaaactgatttgaaaaattgttgcttgtgaagttcatttatatgttaaaaaaaggccaatacattttcccttttccacatagaaaaggaacactatacttataaatactaaaacacagtctgtggaatacaaggaaccaatagaaacagtatgtaggaaaatggaagtgaaaagattatacattgcaaagacttcagtagaagg

SEQ ID NO: 583644 - DNA, 610 bp, Homo sapiens
catccattgggacaacagggccggtgtcaatgtaagcaatgattctgtagttcctctttgttctttcaaaatctaaaataaacaattgaatttatattatatgctaaatctaaagaaaatacatcttgttgtacttgaggccagaagagatagaagtaaggcagtcaagtttgggaacattataaaaaattcaaaaaaagtaataaatgcataaaacttacagagtaacaagtgctrtttcagaattcttctaaatactaagtattcacatgaccttatcaatatttgcattactaaccatacaataagaacctgacttctgactgttctgagataagggataaatgtgtactttaccttaaatgggaaagtgcatcatgtacccacttcgagattcacaacagggaaaactgatttgaaaaattgttgcttgtgaagttcatttatatgttaaaaaaaggccaatacattttcccttttccacatagaaaaggaacactatacttataaatactaaaacacagtctgtggaatacaaggaaccaatagaaacagtatgtaggaaaatggaagtgaaaagattatacattgcaaagacttcagtagaagg

SEQ ID NO: 583645 - DNA, 500 bp, Homo sapiens
atagatttgtttctttgatatgccataacagatgtttaaacaattattaaatatttactcttaaaaatacttgacttactaattctgtacatttctgcagatataagaaactcctggaaatgacaataaatatgttaaatgtatttggaaatgaagactttgattgccatggagacttaaaaacagatcaactgaaaatggatattctgattaagaagctaaaacagaaggtaatttaaaaaaawtattttatcttaaggtctagattacatgtgtgagacgtgcaggtttgttatataggtaaacgtgtgtcatgttggtttgctgcacctatcaatccatcacctagatattaagccctgcaggcattagctattgatcttgatgctctccctcctgatcctaacaggccccagtgtttgttgttcccctccccgagtccatgtgttctcatcattcagctcccacttctaagtgagaagatgcagtgtttgtttttt

SEQ ID NO: 583646 - DNA, 518 bp, Homo sapiens
tcttgtccgcctgtcttaattcagaaacataatcttcaagctctgagattctttcctctgccttgtctattctgctattgatacttgtgattgcattataaagttcttgtgtttttcacctctatcaggtcagttatgttcctctcttaattggctgttctggctatcagctcctgtattggtttatcatgattcttagcttctttgcagtgggtttcaacatactcctttaactcaacaaagttttttattacccactttctgaagcctccttctgtaagttcagccatctcagcatcatcccacttctgtgcccttgctggagtggtgttgtggtcatttggagcagaagaggcactctggctttttgagttttcagcattttgtgtcaattatttctcatctttgtgggcttatttgcctttgatctttgaggttgctgacctttaaataggatttttgttgrgtttttattgttgatgttgttgttgttgttttctgtttgtttttcttttaac

SEQ ID NO: 583647 - DNA, 633 bp, Homo sapiens
tgggagactgaggcaggataattgcttgaacctgggaggcagaggttgcagtgagctgagatggagccactgcactccagcctgggcgaaagagctcagtaaaagaaaaaaaattactagtatgcttaatgaagatttgttcaggtttaaatgagcagttaaggctaggcatggtggctcaagcctataatcccggtgctttgagaggtcaaagggggaggatcacttgaggccaggagtttaagactagcctgggcaacacagtatgaccctgtctctacaaaaaactaaaaatttagcagggtgtggtggtgtacacctgtagtctcaactacccaagaggctgagacagaaggatcacttgagcccaggagtccaaggctatagtgacttataattgccactgcctatcaacctgggcaacagagcaagaccctgtctctaaaaaaagtaaaataaaataaaataattaaacgagccattaagatataaatgatatatgcatgctgtgatttagtctatggatttattctaaaattgctaaaatgtcaccatgtagtgaccatgaaaawcccttcaaaaaatcaatgaatccaggagctgtttttttgaaaaaattaacaaaatagatag

SEQ ID NO: 583648 - DNA, 415 bp, Homo sapiens
ctacttgtgctttccagaatactcccattctcgggtctcttcattttccttcaaactcattctctctttgactccatgtatccaggtcacactgatgcaagaggtgggttcccatggtcttgggcagctttgcccctgtggctttgcagagtatagcccacctcctagctgccttcatggactggcattgagtgtctgtgaattttccaggtgcacggtacaagctgtaggyggatctaccattctggggtctggaagatggtggccctcttctcacagctcaactaggcagtggcccagtagggactctgtgtggggcctccaatcccacatttcccgtctccactgcactagcagttctctatgagagccctgcctctgcagcaaacttctgcctggacatccaggtgtttcc

SEQ ID NO: 583649 - DNA, 417 bp, Homo sapiens
aactacttgtgctttccagaatactcccattctcgggtctcttcattttccttcaaactcattctctctttgactccatgtatccaggtcacactgatgcaagaggtgggttcccatggtcttgggcagctttgcccctgtggctttgcagagtatagcccacctcctagctgccttcatggactggcattgagtgtctgtgaattttccaggtgcacggtacaagctgtaggtggatctaccattctggggtctggaagatggtggccctcttctcacagctcaactaggcagtggcccagtagggactctgtrtggggcctccaatcccacatttcccgtctccactgcactagcagttctctatgagagccctgcctctgcagcaaacttctgcctggacatccaggtgtttcc

SEQ ID NO: 583650 - DNA, 597 bp, Homo sapiens
caaccctggttactatggactagtgagcttcatttttattttgagcagtctttatttttaaattttcttaattgacaaataattatacatattcatggggaatatagtgatgtttcaatccttgtatagtgtttagatcatagtaattagcatatccatcatctcaaacatgtatcatttctttgtgttgggaacattcaatatctttctttttttttttttttttaracagagtctggctctgtcacccaggcttgagtgcagtggcgtgatctcggctcactgcaagctctgcctcctgggttcatgccattctcctgcctcagcctcccgagtagctgggactacaagcgccggccaccacgcccagctaatttttttgtatttttagtagagacagggtttcaccatgttagccaggatggtctcgatctcctgacctcgtgatctgcccgccttggcctcccaaagtgctgggactaccggcgtgagccaccatgcccggccacattcaatatctttcttctagtttttgagactatgtgatactttattattaaaccatagtaattctatagtggtctagaacttatttct

SEQ ID NO: 583651 - DNA, 549 bp, Homo sapiens
tatacttaaagtctatggaaaaagtaatgttctgatgttagctctaatattgtctgaaatactctaagaatgtaataaatttggtaaatttttttatatcagtgttaaaatagtgattttatttatttcatttttatacatagcattcatcaacaacttttggaatataaacaaaagatatctaaaaattctcaaaatagtaatccaggtaagacctctgatagtaaactactcttggtggtgctaccataagattataggagtgttaatcacaaaagagctattagaaaagcaatgtgtaagtagcatgtgtttacatatagacctatatgtaagtgtttttttatatacaaagctttgatttaattttttagtttataattcagaattcattaagaatttagttgtaggtagtttataatctcaaaaatattatctgaaaaaatatttgtttaattgtggtccctaatatcctatataatacttttgtataaataagtaaaacaatttttaagtttatctatwgtatgtttcccaaactgtcataaa

SEQ ID NO: 583652 - DNA, 605 bp, Homo sapiens
gtctttaaggtgctcataatacagtagagctgtctctgttgaatttcttcatttttccaacagaatttcctaactatgttttctatttgtgtatccacttgtccacttaacaaataactgtcargtatctttaaggtactaagcatctttcttgttattatcattgtcattttttattatttactactttattaagttactaagcatttttcttgttattatcatcttttttattatttactactttatttagtgcttactctgtgccagaacccctttgggagcttataactatcacttattatgtcattaccatattcagtatgtgtcagacattttatatccaacgtgaagaattaaagctttaaaaagtttggtagtgtccaggagcggtgactcactcctgtaatcctagcactttggaaggccaaagcgggcggattgcttgagcacaggagtttgggaccaccctgactaacatggtgaaatcccatctctactaaatacaaaaaattagctgggcctgggtggcatgcatatgtaataccagctacatgggaagctgaggtaggagaatttcatgaacccaggaggcggaggttgca

SEQ ID NO: 583653 - DNA, 605 bp, Homo sapiens
gtctttaaggtgctcataatacagtagagctgtctctgttgaatttcttcatttttccaacagaatttcctaactatgttttctatttgtgtatccacttgtccacttaacaaataactgtcaggtatctttaargtactaagcatctttcttgttattatcattgtcattttttattatttactactttattaagttactaagcatttttcttgttattatcatcttttttattatttactactttatttagtgcttactctgtgccagaacccctttgggagcttataactatcacttattatgtcattaccatattcagtatgtgtcagacattttatatccaacgtgaagaattaaagctttaaaaagtttggtagtgtccaggagcggtgactcactcctgtaatcctagcactttggaaggccaaagcgggcggattgcttgagcacaggagtttgggaccaccctgactaacatggtgaaatcccatctctactaaatacaaaaaattagctgggcctgggtggcatgcatatgtaataccagctacatgggaagctgaggtaggagaatttcatgaacccaggaggcggaggttgca

SEQ ID NO: 583654 - DNA, 633 bp, Homo sapiens
taaccaggatggtctcaatctcctgacctcgtgatccacccacctcggcctctcaaagtgctgggattacaggcatgagccactgtgcctggccaacgttgtccagatatttcaaraaagttacaaaaattagaagattgggaaaactgacttcaagtgaacttcaatgagaagtgaacctcaagtgaagtaacctcaagtgaacctcagagagactcaaaaagtatctgtgaagagagacgaagaaaagcgaaaacaaaagacaaaacttatgttattcaccttccaacagatggctccaaacccatgtacccctaaacagagcttccagtgggccagaaactataaaggttccaaaccctcctttaaaggacccaagcctccattgggaggatcaaggctctcgtctaccagtccatctaaatagcatgggggagtaaaatcaaagaatcccagaactgagagtggggaagggcaaggtaggcactacaaatgtggaagaacaggccacttcaagagagaatgtcccaaattagaaaaggaaaaagaagcccttccactcatggcttttgaggaagaataatggtgtcaggggttctgtctcttttatcttgagtcccaccaggagccctt

SEQ ID NO: 583655 - DNA, 466 bp, Homo sapiens
taaggaggaaacaataccccattcccctagagggyaggatacggttgaaacctataattgaaggtcttattaaagatgggcttcttgggccctctatgtccccttataacaacccaatattgccagccaagaaattagatgggtcatatcggctggtacagcaccttagggctattaaccaaatagtccaaactacccatccaattgtcctcgatccttacaccattctcagcaagattccatataataatcaatggtttactgtaatagatttgaaggatgctttttgggtatgtctcctggctgaagataggccagatatatttgcttttgagtgggaggatccccattcagggtagaaacaacaatatcgatggatagtcttaccccaagggttcacaaactcccctaaccttttcagtcaaattttagaacaagtattagaaaaagttatcatcccaaacaa

SEQ ID NO: 583656 - DNA, 610 bp, Homo sapiens
ctggctgaagataggccagatatatttgcttttgagtgggaggatccccattcagggtagaaacaacaatatcgatggatagtcttaccccaagggttcacaaactcccctaaccttttcagtcaaattttagaacaagtattagaaaaagttatcatcccaaacaaatatgcctgctccaatacgttgatgatattcttatatctggtgaagatatagagaaggtagctggcttctctacacatattctcaaccatctgcagttcgaggggttatgagtctcaaagggaaagcttcagtatgtagaacctgaaattaaatatttagaccacttttaagtgcagagaagtgaagaatagggcctgaacgagttgagggaatcgtgtccctacccttgcctcaaacttaaacaagaactcaggaaatttttagggttakttggatactgctgcttatggattaactcacatgcactaaacagtaaaattctatatccaaaacttgcccaggggaagactgaccatttcctgtggacttctgaggaagtccatcaggttgaagagctgaaaaaaggcttataacagcccctgtcttagccttaccttcccta

SEQ ID NO: 583657 - DNA, 610 bp, Homo sapiens
ctggctgaagataggccagatatatttgcttttgagtgggaggatccccattcagggtagaaacaacaatatcgatggatagtcttaccccaagggttcacaaactcccctaaccttttcagtcaaattttagaacaagtattagaaaaagttatcatcccaaacaaatatgcctgctccaatacgttgatgatattcttatatctggtgaagatatagagaaggtagctggcttctctacacatattctcaaccatctgcagttcgaggggttatgagtctcaaagggaaagcttcagtatgtagaacctgaaattaaatatttagaccacttttaagtgcagagaagtgaagaatagggcctgaacgagttgagggaatcgtgtccctacccttgcctcaaacttaaacaagaactcaggaaatttttagggttatttggatactgctgcttatggattaactcacatgcactaaacagtaaaattctatatccaaaacttkcccaggggaagactgaccatttcctgtggacttctgaggaagtccatcaggttgaagagctgaaaaaaggcttataacagcccctgtcttagccttaccttcccta

SEQ ID NO: 583658 - DNA, 586 bp, Homo sapiens
atgtataataatcaacaagatacatttaaagtawtactaaaaaaagaaacaaaacatatatgggataacagatattagatttttcagcctagtctcagattttaatataattatttttaaggatacttgccttattttataaagatgaatatttatgtctaatgaatatgtaaacttgtttacaaaaagtaacgtcattttaattagttaactctaaatgatctgtccttattgaggagtaattttgactgttatatttttaaaataataattttcaacttataattttactggataacttccagtattcttttccataactgttgttgaagttactggtaacagaatctttctaactagaagatgttctttctcattatttttcaagtatgtgcatcatttggaagagagttcagtaataaattaaatacctcagaactagaaagaaaaaacatattcaagaatatagaaattttactggaataataaaccaatatacgaagaagtagatctcaaagtgaattctatgttctaacaaaatgaattttaagataagtatatttaatggcagattgactttaaacca

SEQ ID NO: 583659 - DNA, 354 bp, Homo sapiens
cagcctcaaactctggggctcaagcagacctcctgtctcagcctaccaagtagctgggaccacaggtgarcaccaccacacttggctaatgtatttcttcatagcacttagtacatccatcactttagtgtgcaactgtttacgcatttatgttctatctctgtcactgtactgcaagctccataaagacagaccttctctctccagttcccataatactacccagcataaaataggctgtaagtaaacatttattgagtacataaaagaagaatcttattcatgtcaaggctgtaatctatgttagactcaaagagatagtctcctgactaaatggaagtgtttctttattga

SEQ ID NO: 583660 - DNA, 354 bp, Homo sapiens
cagcctcaaactctggggctcaagcagacctcctgtctcagcctaccaagtagctgggaccacaggtgagcaccaccacacttggctaatgtatttcttcatagcacttagtacatccatcactttagtgtgcaactgtttacgcatttatgttctatctctgtcactgtactgcaagctccataaagacagaccttctctctccagttcccataawactacccagcataaaataggctgtaagtaaacatttattgagtacataaaagaagaatcttattcatgtcaaggctgtaatctatgttagactcaaagagatagtctcctgactaaatggaagtgtttctttattga

SEQ ID NO: 583661 - DNA, 371 bp, Homo sapiens
aattaggaaggagtcccactttgattttttggaatactttctgtagaattacagccaactcatttttgtatacatgataaaatcatgctgtgaatgcatctggtttagcactttttataattggtagwttttttttatcaccaattcaatttgcttgcacatttttggtttcttcaagacttctgtttattcctgattcaatcttgggaggttgtatatttctaagagtttattcatttcctctagactttctagttggtgtgcacagagatatttatagtagtctgcaagtatcctttgtatttttgtgggattggttgtcacaaatgtaacatttaaatagatgcataatgaaagtgtaacaatatctc

SEQ ID NO: 583662 - DNA, 371 bp, Homo sapiens
aattaggaaggagtcccactttgattttttggaatactttctgtagaattacagccaactcatttttgtatacatgataaaatcatgctgtgaatgcatctggtttagcactttttataattggtagtttttttttatcaccaattcaatttgcttgcacatttttggtttcttcaagacttctgtttattcctgattcaatcttgggaggttgtatatttctaagagtttattcatttcctctagactttctagttggtgtgcacagagatatwtatagtagtctgcaagtatcctttgtatttttgtgggattggttgtcacaaatgtaacatttaaatagatgcataatgaaagtgtaacaatatctc

SEQ ID NO: 583663 - DNA, 371 bp, Homo sapiens
aattaggaaggagtcccactttgattttttggaatactttctgtagaattacagccaactcatttttgtatacatgataaaatcatgctgtgaatgcatctggtttagcactttttataattggtagtttttttttatcaccaattcaatttgcttgcacatttttggtttcttcaagacttctgtttattcctgattcaatcttgggaggttgtatatttctaagagtttattcatttcctctagactttctagttggtgtgcacagagatatttatagtagtctgcaagtatsctttgtatttttgtgggattggttgtcacaaatgtaacatttaaatagatgcataatgaaagtgtaacaatatctc

SEQ ID NO: 583664 - DNA, 384 bp, Homo sapiens
atagaatcaacatatgtgtccatcatccaatgatgaaatacagacactatggtatatatatacaatcgaatactgtattttcaacagaaaatcttatttttaatcayaaagataaacctaaaggacactatagttgttgaaataaggcacagaaaagttaatatctcatgatttcactcacatgtggattctacaaaacatatcttgattacataattacagttgaataagaaaaataagttcaagagattataatgcatgtattgtatttctgaaaaaatactgacagtaaatattgtcttctcaccacaaaaataataactatgtgaggcaaagcatttgacaattagctaaaattaggcattgacaatgtatatttacttc

SEQ ID NO: 583665 - DNA, 384 bp, Homo sapiens
atagaatcaacatatgtgtccatcatccaatgatgaaatacagacactatggtatatatatacaatcgaatactgtattttcaacagaaaatcttatttttaatcacaaagataaacctaaaggacactatagttgttgaaataaggcacagaaaagttaatatctcatgatttcactcacatgtggattctacaaaacatatcttgattacataattacagttgaataagaaaaataagttcaagagattataatgcatgtattgtatttctgaaaaaatactgacagtaaatrttgtcttctcaccacaaaaataataactatgtgaggcaaagcatttgacaattagctaaaattaggcattgacaatgtatatttacttc

SEQ ID NO: 583666 - DNA, 555 bp, Homo sapiens
ccaagccaaaagctgaagctcataaatcagtgtgtctaagtgttcactagttatatacctttttgtagtttaagctatctttccaacttcctaaatcatcaccttcatttgaccttgtttttttccactatcacttctttattgactacataaagaatataagttcttattttgttattgttcattttagtctaatttcatcaaaatatcataatcctttaatttccttttaatttcaaagattaaatgaaacctacatagaaatgagtgtaagatttgcatttgcgttattttggtattaatttgctatcctccctcatacacatagtgatcacttccatgtacgtgatttcaaacatccaagtgcagtattaaaagcagttgtaaattatggttctgattttcatgatacaattactatataaayttcctcttgctgctgtaaccagttaccacaaacttcatatcttacaataaagtgactggtaatcctacagtactggagctcagaagccttaaatgagactcacagggctaacatcaagttttgggcag

SEQ ID NO: 583667 - DNA, 555 bp, Homo sapiens
ccaagccaaaagctgaagctcataaatcagtgtgtctaagtgttcactagttatatacctttttgtagtttaagctatctttccaacttcctaaatcatcaccttcatttgaccttgtttttttccactatcacttctttattgactacataaagaatataagttcttattttgttattgttcattttagtctaatttcatcaaaatatcataatcctttaatttccttttaatttcaaagattaaatgaaacctacatagaaatgagtgtaagatttgcatttgcgttattttggtattaatttgctatcctccctcatacacatagtgatcacttccatgtacgtgatttcaaacatccaagtgcagtattaaaagcagttgtaaattatggttctgattttcatgatacaattactatataaatttcctcttgctgctgtaaccarttaccacaaacttcatatcttacaataaagtgactggtaatcctacagtactggagctcagaagccttaaatgagactcacagggctaacatcaagttttgggcag

SEQ ID NO: 583668 - DNA, 616 bp, Homo sapiens
tcaccatgttagccaggatggtctcgatctcctgacctcgtgatccacccaccccggcctcccaaagtgctgggattaggcgtgagccaccgcactgggtcctcattcttgtatcttaaaagtcagtgatgttgagtaatttctcatgccaccacctccatggttgcctttcttctgccttcttctttcacttataaggaakcttgtgatttcattgatcccacccaattaagataatctctccatcattttattgcaaccttaatttcacttgaaatctaatttcccactgccatgcaacctaacatatttgtatgttagactctgggaattaggacatgaacatttttgggaggccattcttttgtctacaccagacataatctatttacctgcagattaaagtgttctttatttttctgcctccctctcttaattttttaaagtaatatgaattgtagtaaagagaaagaaagaaaagaaaagaaagaaaaaagaagcaaggaaagaaggaaggaaggaaagaaagaaagaagaaagaaaagaaggaggaaatgagaaaaggaagggagggaggaagggacaaaggcaggaagggagaaaaaagaaagcaaga

SEQ ID NO: 583669 - DNA, 381 bp, Homo sapiens
aaattaaagagctgtttgcttcttcaaatttatagacaccggggtaaggctacatggttccattgtcaatgtttctattttaacatagcagtgaaagtactttgcagaagaattagtcaagaaaatgaccctaaaaatgacattcaaattgaggaaaaaaattaaaakgttgctgtttgtaggtgacatgatcttataaatagaaaaccataaacaatacatcaaaaaataacaaatgccctcagaaaattagcaatatataacattaacatataattatcagttatgattccatatgctaacaacaaaccatctgataaaaaaggaagaaaacaatctcatttccaatagaattaaaataataaatttctgaaaaattaa

SEQ ID NO: 583670 - DNA, 381 bp, Homo sapiens
aaattaaagagctgtttgcttcttcaaatttatagacaccggggtaaggctacatggttccattgtcaatgtttctattttaacatagcagtgaaagtactttgcagaagaattagtcaagaaaatgaccctaaaaatgacattcaaattgaggaaaaaaattaaaaggttgctgtttgtaggtgacatgatcttatawatagaaaaccataaacaatacatcaaaaaataacaaatgccctcagaaaattagcaatatataacattaacatataattatcagttatgattccatatgctaacaacaaaccatctgataaaaaaggaagaaaacaatctcatttccaatagaattaaaataataaatttctgaaaaattaa

SEQ ID NO: 583671 - DNA, 554 bp, Homo sapiens
agccaccgcactgggtcctcattcttgtatcttaaaagtcagtgatgttgagtaatttctcatgccaccacctccatggttgcctttcttctgccttcttctttcacttataaggaatcttgtgatttcattgatcccacccaattaagataatctctccatcattttattgcaaccttaatttcacttgaaatctaatttcccactgccatgcaacctaacatatttgtatgttagactctgggaattaggacatgaacatttttgggaggccattcttttgtctacaccagacataatctatttacctgcagattaaagtgttctttatttttctgcctccctctcttaattttttaaartaatatgaattgtagtaaagagaaagaaagaaaagaaaagaaagaaaaaagaagcaaggaaagaaggaaggaaggaaagaaagaaagaagaaagaaaagaaggaggaaatgagaaaaggaagggagggaggaagggacaaaggcaggaagggagaaaaaagaaagcaagacatggctttccaaaaccttgtg

SEQ ID NO: 583672 - DNA, 534 bp, Homo sapiens
aattgagaccatcctgactaacatggtgaaatccggtctctactataaatacaaaaccaaaattagccgggcatggtggcctgtagtcccagctactcaggttgctgaggtaggagaatggcgtgaacccaggaggtggagcttgcagtgatcccagattgygccactgcactccagcctgggcgacagagtgaaactccgccctgaaaaaaaaaaaaagaagcaaaattgattaataacaacaaatagtactgggtaaactggatatccacaggcaaaatataaagtttgggcccttaacttacataatgtacaaaaataagctaaaatagatcaaagacttaaaagtaacaactacaacccttaaactcttagaaaaaaaaacataggagaaaatattctttatgttagatttaacaatgatttcttagatatgatatcaaaggtacagggaataaaaaaataacaaaaaaattagtttcatcaaaagtaaaagttctgtgcattaaaagtcaccattgaccaggtgtggtg

SEQ ID NO: 583673 - DNA, 555 bp, Homo sapiens
gatgcatatgtggtggaatcctaatgaaaaccctggactcaagactgactgagcttccctagttggcaacaagttcacacatgttgtctcacaccattgtaaagaaaattagtcagtgtgaagtccccactatgaaaggacacctgtaagctcacatctggtttgtcctggactcaactttatgtgcttttatgcttctgattattttaatctggtttctttcactgttagaaactataaccacaaaaaaaatcagctttcttgagttatgtgaatcattaaaccaaagggggacttggggacmcccagtaaaaagtatatacattcttaaaaagaaacagaaaactggccacagcagatattgttgatgacttgtcttctatctcctggactcaatgtgttcacctgaaattcacctgtttccaactaactgagagctccccacatcatgcctgtctttctgatttttgggcctgcctgcaagcttcttgaggctaaccagtgcttctcaaccacacataggaacaaagaaggagttaggggtggagagttaat

SEQ ID NO: 583674 - DNA, 555 bp, Homo sapiens
gatgcatatgtggtggaatcctaatgaaaaccctggactcaagactgactgagcttccctagttggcaacaagttcacacatgttgtctcacaccattgtaaagaaaattagtcagtgtgaagtccccactatgaaaggacacctgtaagctcacatctggtttgtcctggactcaactttatgtgcttttatgcttctgattattttaatctggtttctttcactgttagaaactataaccacaaaaaaaatcagctttcttgagttatgtgaatcattaaaccaaagggggacttggggacccccagtaaaaagtatatacattcttaaaaagaaacagaaaactggccayagcagatattgttgatgacttgtcttctatctcctggactcaatgtgttcacctgaaattcacctgtttccaactaactgagagctccccacatcatgcctgtctttctgatttttgggcctgcctgcaagcttcttgaggctaaccagtgcttctcaaccacacataggaacaaagaaggagttaggggtggagagttaat

SEQ ID NO: 583675 - DNA, 595 bp, Homo sapiens
ccaggatttaaagccctgtctgcaggattttcaagctcatgtttttatcataagtcactgtgcttccatgtgttttaaatctaatcctcattcctctgcttttacaccagagaattcatcactgacttatttttgactgaccttatagagctgtcaagtacacaatttctgctgtgacctttctcttagagttcagtcatatagcctctccctagatatcatctcctcttatctttcataataatgaattgtcagttaaaactcaacatttttaagattgagcttaccatctacacacaccattattggtgtattctcatagccttgaaacactaatgtcaygttgatgtctgccttttctttctctgctacctcatccctcatccttagattattctaaaagattcaattagatcaagttggctaattatatttttaagatcctctctacccttaccaattttttgtttaacaaattttaaaaatttctggcaggagactgtggaaatccccatggatgactgtggttttactattttacctttcagttttaataggttttatattatgtattttgaagtaatgctattgtatg

SEQ ID NO: 583676 - DNA, 590 bp, Homo sapiens
acatgttctcacgtgtaaatgggagttaaacacggggtactcatggacataaaaacgtcaacaatagaaactggacgctgctagagggagaggaagggaaggagggaggccggggttgaaaaactgtctgttaggtactatgctcagtacctgggagatgggctcaaccgtaccaccaacctcagcatcacgcaatatatccatgtaacaaacctgtacatgtattccataaatttaaaataaatgttcaaataaaaaaacaaatattataactgtctatccattttctctctacagttctttgccctactgtcatagggttttcctcctttctttatatatattttgaatgccacagaaataattgttattttggttttaaataatccattacctttaacattacttaaaacatgaaaaaacgtcttttgtatgtattgtttctttttccwtttttttttttttttgagacggagtcttgctctgttgcccaggctggagtgcagtggtgtgatcatggctcactgcgacctccacttcctgggttcaagcgattctcctgcctcagcctcccgagtagctgggattag

SEQ ID NO: 583677 - DNA, 404 bp, Homo sapiens
agggggaatattacttagcaaaatgcatgtttgctttgccaaagcctgaracttttttctttttaagcaaattgaaaatctcaaagatttcaacattttttattacttatcccagcaaaatcattcagaccacttatttttaaaattaaatagtcactgatttatttcacttttatgcagttaagataggaagtggaggtcaattggaaaatagaattacaggaataggaccatcatgaaatgattttttaatttattaccattcagaccatctatacttttttgtcacacattcagaagaatggaagaaaggagggtagagaatgagtcatatgcattgaaaattgttattcagttttaaaatgagtgcccaaaactatagacactgtaagaccctgaatttg

SEQ ID NO: 583678 - DNA, 483 bp, Homo sapiens
agcatagctctttcataaatatactttccagccattcagcattacctatctttaggtttcttttgctttgtgtttccrctccaatatcatttctggaaaaaaattacagtaacaaatttattgagagctggcattgtgaatggtgcctaggacttaattcataaagagaaggtgaattctgctgaaaggtgcttaatacactgccccccaaatcaagagaaacaggccattctgggacacacatagcctgtctcacacaggggtcaggaagcagggatatcagggaattgggactatgtctttatgatagatatggttaggctttgtgtacccccatctcatcttgaattgtaatccccaggtgttaagggagacacctggtgggaagtgattggatcatggcgggtggtttcccccatgctgttcttgtgatactgagtaaattctcatgaattctgatggttttataaatggtagtttttt

SEQ ID NO: 583679 - DNA, 483 bp, Homo sapiens
agcatagctctttcataaatatactttccagccattcagcattacctatctttaggtttcttttgctttgtgtttccactccratatcatttctggaaaaaaattacagtaacaaatttattgagagctggcattgtgaatggtgcctaggacttaattcataaagagaaggtgaattctgctgaaaggtgcttaatacactgccccccaaatcaagagaaacaggccattctgggacacacatagcctgtctcacacaggggtcaggaagcagggatatcagggaattgggactatgtctttatgatagatatggttaggctttgtgtacccccatctcatcttgaattgtaatccccaggtgttaagggagacacctggtgggaagtgattggatcatggcgggtggtttcccccatgctgttcttgtgatactgagtaaattctcatgaattctgatggttttataaatggtagtttttt

SEQ ID NO: 583680 - DNA, 483 bp, Homo sapiens
agcatagctctttcataaatatactttccagccattcagcattacctatctttaggtttcttttgctttgtgtttccactccaatatcayttctggaaaaaaattacagtaacaaatttattgagagctggcattgtgaatggtgcctaggacttaattcataaagagaaggtgaattctgctgaaaggtgcttaatacactgccccccaaatcaagagaaacaggccattctgggacacacatagcctgtctcacacaggggtcaggaagcagggatatcagggaattgggactatgtctttatgatagatatggttaggctttgtgtacccccatctcatcttgaattgtaatccccaggtgttaagggagacacctggtgggaagtgattggatcatggcgggtggtttcccccatgctgttcttgtgatactgagtaaattctcatgaattctgatggttttataaatggtagtttttt

SEQ ID NO: 583681 - DNA, 483 bp, Homo sapiens
agcatagctctttcataaatatactttccagccattcagcattacctatctttaggtttcttttgctttgtgtttccactccaatatcatttctggaaaaaaattacagtaacaaatttattgagagctggcattgtgaatggtgcctaggacttaattcataaagagaaggtgaattytgctgaaaggtgcttaatacactgccccccaaatcaagagaaacaggccattctgggacacacatagcctgtctcacacaggggtcaggaagcagggatatcagggaattgggactatgtctttatgatagatatggttaggctttgtgtacccccatctcatcttgaattgtaatccccaggtgttaagggagacacctggtgggaagtgattggatcatggcgggtggtttcccccatgctgttcttgtgatactgagtaaattctcatgaattctgatggttttataaatggtagtttttt

SEQ ID NO: 583682 - DNA, 553 bp, Homo sapiens
caaacttgaaaacaccatggcttaaatttggtgggaagaagcctgtgggacaaaaaayagtggtgccaaaagaattgagccagctgggtgtggtggctcatgcctgtagtcccaggagtttgggaggccgaggtgggcagatcacctgagatcaggagttcaagaacagcctggccaatatagtgaagccccatctctactaaaaatacaaaaaattatccaggcatggtggcaggtgctgtaatcccagctacttgggaggctgagacaggagaatagtttcaacccaagaggtgaaggttgaagagagccgaggtcatgccattgcactcaagcctgggcaacaagagagaaactccatcaattaaaaaaaaaaaaagaattgagccagaataaaatgtatttaagggttattaatgggaatgtttctagcacataagtatttgttccacttcttattatattatattagtaatatcctttcatgtaatatcagcttctccaagatagggatgtcaaagacaaactaagacaagtgcctaatatgtcatag

SEQ ID NO: 583683 - DNA, 553 bp, Homo sapiens
caaacttgaaaacaccatggcttaaatttggtgggaagaagcctgtgggacaaaaaatagtggtgccaaaagaattgagccagctgggtgtggtggctcatgcctgtagtcccaggagtttgggaggccgaggtgggcagatcacctgagatcaggagttcaagaacagcctggccaatatagtgaagccccatctctactaaaaatacaaaaaattatccaggcatggtggcaggtgctgtaatcccagctacttgggaggctgagrcaggagaatagtttcaacccaagaggtgaaggttgaagagagccgaggtcatgccattgcactcaagcctgggcaacaagagagaaactccatcaattaaaaaaaaaaaaagaattgagccagaataaaatgtatttaagggttattaatgggaatgtttctagcacataagtatttgttccacttcttattatattatattagtaatatcctttcatgtaatatcagcttctccaagatagggatgtcaaagacaaactaagacaagtgcctaatatgtcatag

SEQ ID NO: 583684 - DNA, 404 bp, Homo sapiens
agggggaatattacttagcaaaatgcatgtttgctttgccaaagcctgagacttttttctttttaagcaaattgaaaatctcaaagatttcaacattttttattacttatcccagcaaaatcattcagaccacttatttttaaaattaaatagtcactgatttatttcacttttatgcagttaagataggaagtggaggtcaattggaaaatagaattacaggaataggaccatcatgaaatgattttttaatttattaccattcagaccatctatacttttttgtcacacattcagaagaatggaagaaaggagggtagagaatgagtcatatgcattgaaaattrttattcagttttaaaatgagtgcccaaaactatagacactgtaagaccctgaatttg

SEQ ID NO: 583685 - DNA, 390 bp, Homo sapiens
tcatataaagggcagattagtcaatatatggttcagaaataattatgtaatatttakaagaaaattaaaaatttagatccttaactcagataacaataatccaaattaaaatttgatttaattacataatttaaaatgacaccagaatactagcaaaaatgtagataagtttatataatcctttttagctgtggaactttattagcataaattcaaatacaggaaccaaaataagattgagacctatagtcaaaggttaaaatgtacacattatagtggcatgattaaactaatttaaagcataataacatggagaaatattgcaaaacatacattttactgaattaattgttaatatctaatcattacgtgagaacaaaggtaaagagt

SEQ ID NO: 583686 - DNA, 390 bp, Homo sapiens
tcatataaagggcagattagtcaatatatggttcagaaataattatgtaatatttataagaaaattaaaaatttagatccttaactcagataacaataatccaaattaaaatttgatttaattacataatttaaaatgacaccagaatactagcaaaaatgtagataagtttatataatcctttttagctgtrgaactttattagcataaattcaaatacaggaaccaaaataagattgagacctatagtcaaaggttaaaatgtacacattatagtggcatgattaaactaatttaaagcataataacatggagaaatattgcaaaacatacattttactgaattaattgttaatatctaatcattacgtgagaacaaaggtaaagagt

SEQ ID NO: 583687 - DNA, 390 bp, Homo sapiens
tcatataaagggcagattagtcaatatatggttcagaaataattatgtaatatttataagaaaattaaaaatttagatccttaactcagataacaataatccaaattaaaatttgatttaattacataatttaaaatgacaccagaatactagcaaaaatgtagataagtttatataatcctttttagctgtggaactttattagcataaattcaaatacaggaaccaaaataarattgagacctatagtcaaaggttaaaatgtacacattatagtggcatgattaaactaatttaaagcataataacatggagaaatattgcaaaacatacattttactgaattaattgttaatatctaatcattacgtgagaacaaaggtaaagagt

SEQ ID NO: 583688 - DNA, 517 bp, Homo sapiens
tatatatattatgtaaactccaagtgcatagttgtgcacataattatatccgtaaaccttttttcctgttaattgagtctattgtttgatagactcaaataattaaagcttcaagggaaatataaagaactaattaagttagcacctacttttcaaatatcgcattttttcacagacctattaaataagacaaataacatttaaactttatttttaaatttgcagaatagtatttttcagcagatggtttattttagcaaattccatcttcacattgtgctatgcttttatgagttccagctgttaacggataatattttactgctgaatctatcatgtgtgatataattgctcattatgtgccttaaaacacargcgatatagttattttcaacttggagcaaattaaaatcttatcagcaatttaaaaagtctagagtagtcttcttctggttaattattttaacttgtatttttctctttatgtttttagtgagttgtcttatcaaggagaaga

SEQ ID NO: 583689 - DNA, 517 bp, Homo sapiens
tatatatattatgtaaactccaagtgcatagttgtgcacataattatatccgtaaaccttttttcctgttaattgagtctattgtttgatagactcaaataattaaagcttcaagggaaatataaagaactaattaagttagcacctacttttcaaatatcgcattttttcacagacctattaaataagacaaataacatttaaactttatttttaaatttgcagaatagtatttttcagcagatggtttattttagcaaattccatcttcacattgtgctatgcttttatgagttccagctgttaacggataatattttactgctgaatctatcatgtgtgatataattgctcattatgtgccttaaaacacaagcgatatagttattttcaacttggagcaaattaaaatcttatcagcaatttaaaaagtctagagtagtcttcttctggttaattattttaacttgtrtttttctctttatgtttttagtgagttgtcttatcaaggagaaga

SEQ ID NO: 583690 - DNA, 477 bp, Homo sapiens
tgctgggttctgagcgtttctctatcacatgagattctggaacactgctaaaatgtaggaatgtttgtccctcacaaagagtccagagcaccgcttgtgggttctgagtgtttgtccctcacataggattgcagaacacagctgctaggttctgagtgtttgtcccaaacataggattccaaaacactgctcagagggtctgaaagtttcttcctcaccaaggattccagaacactgctgctgggttctgaaagtttgtccctcacatacgattccggaacactgctatgagggtctgartgtttgtccctcaaagggattccagaacactgcttttgagttctgagtgtttgtccgacacaaaggattccagaacactgctgctggcttctgagtgtttgtccctcacataggatttcagaacactgctatgagggtctgcatgtttttcccctcagaaagcattctgtatcactg

SEQ ID NO: 583691 - DNA, 372 bp, Homo sapiens
agaacactgctgctgggttctgagtgtttgtccatcaaatcggattccagaacacagctgctkggctctgtttgtttgtccctcacaaaggattccagagcactgctgctggtttctgaatgtttgtccctgacataggattccagaacacttctaagaggctccgaatatttgtcctttagataggattccagaacacagtggctgtgtgatgagtgtttgtccctcaaataggattccacaacactgctttgagggtctgaatgtttgtatctcacaaaccagtctaaaacactacttctgggttctgagcgtttgtcattcactaaggattccagaacactgctgctgggttctgagtgtttgtccctc

SEQ ID NO: 583692 - DNA, 375 bp, Homo sapiens
ccagaacactgctgctgggttctgagtgtttgtccatcaaatcggattccagaacacagctgctgggctctgtttgtttgtccctcacaaaggattccagagcactgctgctggtttctgaatgtttgtccctsacataggattccagaacacttctaagaggctccgaatatttgtcctttagataggattccagaacacagtggctgtgtgatgagtgtttgtccctcaaataggattccacaacactgctttgagggtctgaatgtttgtatctcacaaaccagtctaaaacactacttctgggttctgagcgtttgtcattcactaaggattccagaacactgctgctgggttctgagtgtttgtccctca

SEQ ID NO: 583693 - DNA, 372 bp, Homo sapiens
agaacactgctgctgggttctgagtgtttgtccatcaaatcggattccagaacacagctgctgggctctgtttgtttgtccctcacaaaggattccagagcactgctgctggtttctgaatgtttgtccctgacataggattccagaacacttctaagaggctccgaatrtttgtcctttagataggattccagaacacagtggctgtgtgatgagtgtttgtccctcaaataggattccacaacactgctttgagggtctgaatgtttgtatctcacaaaccagtctaaaacactacttctgggttctgagcgtttgtcattcactaaggattccagaacactgctgctgggttctgagtgtttgtccctc

SEQ ID NO: 583694 - DNA, 372 bp, Homo sapiens
agaacactgctgctgggttctgagtgtttgtccatcaaatcggattccagaacacagctgctgggctctgtttgtttgtccctcacaaaggattccagagcactgctgctggtttctgaatgtttgtccctgacataggattccagaacacttctaagaggctccgaatatttgtccttyagataggattccagaacacagtggctgtgtgatgagtgtttgtccctcaaataggattccacaacactgctttgagggtctgaatgtttgtatctcacaaaccagtctaaaacactacttctgggttctgagcgtttgtcattcactaaggattccagaacactgctgctgggttctgagtgtttgtccctc

SEQ ID NO: 583695 - DNA, 436 bp, Homo sapiens
acataggattccagaacacttctctgaggatcttaatgtttgtccctcacaaaggattccagaacactgctgctgggttctgagtgtttgtccatcaaatcggattccagaacacagctgctgggctctgtttgtttgtccctcacaaaggattccagagcactgctgctggtttctgaatgtttgtccctgacataggattccagaacacttctaagaggctccgaatatttgtcctttagataggattccagaacacagtggctgtgtgatgagtgtttktccctcaaataggattccacaacactgctttgagggtctgaatgtttgtatctcacaaaccagtctaaaacactacttctgggttctgagcgtttgtcattcactaaggattccagaacactgctgctgggttctgagtgtttgtccctcacat

SEQ ID NO: 583696 - DNA, 655 bp, Homo sapiens
gacctcagtctctcctttgacaaaatggaagctcttatagcagaaaacagcaccacaaataagacattttatggagatcttactttactctctacccatataattctataaagtggaggggtaatttactttgaagaatacatttgcacatccaaagattcaggtccataaatgtattaaataatgcttacatactttcactgaggcataaatggtcaattgtattaaaagcagagacaaccagaaactttctcccaaaaaataaaataaattacctaattcttgaaacccataatgtaacacaaaataattaatgtggaaataattaaagaaaaacagattcaaagatttaaatataaaattactgattatttcttatataatttattgtccatatatgtgcattgtattttaaattctaatttagttttctgaaaatatgtttttatattcttgaatacagctggaaattagagagcactaccatgtttrcaaatatattctgatatggaaaaggcacaagattctacataatccaaaaacagagggtcttgcatccattttctggatagttcagctgaatacagatttgcttttatttttgagggtaacactttcataaactaaatagactttaattccacctgtgatatat

SEQ ID NO: 583697 - DNA, 595 bp, Homo sapiens
tgctgatctcctttagttcaagtgctatcatcatctctaggaattaactttactcttttgggtctcagacttcagaggaataactacaaacmaaactattaatgcatgttcaagaaactaatcaaatgcagaatggtataaaggaggcttgcagctacataagagatttattttacattagtaagagggaccttactaatgctgaaactgaagattcatacttcacatatatgcttcttctgattcatttttctattgttcctattcctcctaatatgtcctataggtagcatgaagactagtgcataattacttgttttattctgtttactgatgacttcactctcagaaggcataaacaatgttatctttgactacatccataaaaatggtccattcgtagaactataataagaaataaaatagcacaaaacaaaataaaaatagtattcctttattcccatctattataaaacttttagacaagaattttcagaatctgaccagtatgaataatttgcagattaagttttaggctctatgaaatttgtattttaaaaaacgtttattatttaccttaagaaaaatttaaata

SEQ ID NO: 583698 - DNA, 494 bp, Homo sapiens
caggaacaagaaagaaaacttatactaacctatattgtgtcatacgttgagatacagatgtttactttttgtagttagcattacctaagtaaggctaacaagataatgttttttgtttttgtttttgttttttacaattaatttcctttttctcccatactccctgcattttgtgaaaatgtgtcagtagcagcaacctcttggtttgattccctaaaatttgggccatagctttgggtgttcatttttcatcttcagatgtgatagcctgtggaatggtagtttccggtatagacataaataggtccactagagtgtggtagggttgtcagtactcccatagtgggagtctaattatgaatttttctggaagtcattgcaatggacccaytcacaattcttttcagccttttcaacaatgtgtacattcttaaatcctggctattaaatttattcctgcttagtatatatatatatatatatatatatatata

SEQ ID NO: 583699 - DNA, 682 bp, Homo sapiens
ggtttattgtattttacatttrgaagaaatgattcataaggtttctgccattctcagaactagaatacctgtttatcagaatcatctaaacagctacagggcatcaatttggtacttgaatttttgtctgtacaaatagcagaatttttgtatagtaaaattttaagttatcaaaataataggtacaacctgctactatttctactgctattgtcagataataataaaacatttaacatgcattgagagcttattacatactaagcaagtttgtaaccatttttcatgtattaactcttgtgaaccacataaacaatatgaagaacataacatacacatatctattttataaaggatgaaagtcaggtgcgtcagatgtatcttgccaaaggttctacagtaagtggcagtgttcaggtttcaactcgattgcttgaactctaaagttcactcagtacgaaatattatggtcagttttattcttcaatgaataagtaccatcattaaaggcttagtggctgcctgaattaattgtggcagcgtttctatggatagcatttgctctttcagattacctctatatatcatctataaattttcaagcctataaaatggaaatattcattaatatcagtgatagtactcaaaatttcagtccatatttctgattaatctaaatgaa

SEQ ID NO: 583700 - DNA, 682 bp, Homo sapiens
ggtttattgtattttacatttggaagaaatgattcataaggtttctsccattctcagaactagaatacctgtttatcagaatcatctaaacagctacagggcatcaatttggtacttgaatttttgtctgtacaaatagcagaatttttgtatagtaaaattttaagttatcaaaataataggtacaacctgctactatttctactgctattgtcagataataataaaacatttaacatgcattgagagcttattacatactaagcaagtttgtaaccatttttcatgtattaactcttgtgaaccacataaacaatatgaagaacataacatacacatatctattttataaaggatgaaagtcaggtgcgtcagatgtatcttgccaaaggttctacagtaagtggcagtgttcaggtttcaactcgattgcttgaactctaaagttcactcagtacgaaatattatggtcagttttattcttcaatgaataagtaccatcattaaaggcttagtggctgcctgaattaattgtggcagcgtttctatggatagcatttgctctttcagattacctctatatatcatctataaattttcaagcctataaaatggaaatattcattaatatcagtgatagtactcaaaatttcagtccatatttctgattaatctaaatgaa

SEQ ID NO: 583701 - DNA, 682 bp, Homo sapiens
ggtttattgtattttacatttggaagaaatgattcataaggtttctgccattctcagaactagaatacctgtttatcagaatcatctaaacagctacagggcatcaatttggtacttgaatttttgtctgtacaaatagcagaatttttgtatagtaaaattttaagttatcaaaataataggtacaacctgctactatttctactgctattgtcagataataataaaacawttaacatgcattgagagcttattacatactaagcaagtttgtaaccatttttcatgtattaactcttgtgaaccacataaacaatatgaagaacataacatacacatatctattttataaaggatgaaagtcaggtgcgtcagatgtatcttgccaaaggttctacagtaagtggcagtgttcaggtttcaactcgattgcttgaactctaaagttcactcagtacgaaatattatggtcagttttattcttcaatgaataagtaccatcattaaaggcttagtggctgcctgaattaattgtggcagcgtttctatggatagcatttgctctttcagattacctctatatatcatctataaattttcaagcctataaaatggaaatattcattaatatcagtgatagtactcaaaatttcagtccatatttctgattaatctaaatgaa

SEQ ID NO: 583702 - DNA, 682 bp, Homo sapiens
ggtttattgtattttacatttggaagaaatgattcataaggtttctgccattctcagaactagaatacctgtttatcagaatcatctaaacagctacagggcatcaatttggtacttgaatttttgtctgtacaaatagcagaatttttgtatagtaaaattttaagttatcaaaataataggtacaacctgctactatttctactgctattgtcagataataataaaacatttaacatgcattgagagcttattacatactaagcaagtttgtaaccatttttcatgtattaactcttgtgaaccacataaacaatatgaagaacataacatacacatatctattttataaaggatgaaagtcaggtgcgtcagatgtatcttgccaaaggttctacagtaagtggcagtgttcaggtttcaactcgattgcttgaactctaaagttcactcagtacgaaatattatggtcagttttattcttcaatgaataagtaccatcattaaaggcttagtggctgcctgaattaattgtggcagcgtttctatggatagcatttgctctttcagattacytctatatatcatctataaattttcaagcctataaaatggaaatattcattaatatcagtgatagtactcaaaatttcagtccatatttctgattaatctaaatgaa

SEQ ID NO: 583703 - DNA, 511 bp, Homo sapiens
atgacttcttctatacccaggctttcaaatcattaagtaatcttttctgaatagagggttatttccaaaaatacatattttcttgcctttatctttcatttgcccatagatgtttttagttctcctttacagaagttaacatgttcttcaacgacctgatttactttctctaacatcttgaaacaaactaaacataccatctgaaattcagaactaaagcagggacctgcttataaacactaccaagaggttatatgacatgtctcaatactcccaaggcactagtattctgactccatccacacaaaaaacagaaattcatgaaagcacaataaagttgaacccagacagatctaacggatgctctgaacaaattagctgcaaactgaattaatgggctatatactgggtaagcaatttactaaacaagcttggcaccattttcaaattgatgttttattcaatatttttaaatgatgcttaaacccawtagaagcctgaagtcaatcct

SEQ ID NO: 583704 - DNA, 336 bp, Homo sapiens
  misc_feature 330, 331, 332, 333, 334, 335, 336: n = A,T,C or G
taaggagaataatagcaaatttgcattatgaacctgatcctatctacatccttttgccctcaaattatccacaaacttcttgtcaatgcttccatatttctgtatgttttactacatattaaggccacctgcaaaatatttactgaacacctattctatggcaaagaaaagcatggcttcaccaatgtctctatgggaaataaggtgctacattgaaagaatgaactatgaaagtagtagttcttctttattcttgcttcyctttctttaatctttctgatttcctaggtataaaaatgatgcctttcctttatctatttcatcttgccnnnnnnn

SEQ ID NO: 583705 - DNA, 578 bp, Homo sapiens
atttggtttttgaatgttgaatttatttaatcttactactacctgagtttcgaataatgaaaaaaatccaactcgaattcatttgtttaattaacagaaatattaaaagagtgacttcttggaaggctgacctttcaamgaatggtcagcttcctgaatttgcaggaaaacactttgaattccacaattatatactcatagagaatatatttcgtaaagagggtagaattgaaaacgtacttttcaataaaaaatttcagttagcagagtgttaagatgtcattccttttgttctgtgctttcattaattggccttaattgagactcgaaactagcttaactgagtttagagtagtaacagaacctcagaaggccctcacagcaataaacttgggattttatttatgccttctattttttttcaacatgtattcagattgaaaaaaaaaacactaaacactgaatgaaatgaagacttttattgcttatgaaagaacaacatgccagttgttgctaaactttttgtataggcttttgattaataattaacataaaggaaaacattggcttttcatttg

SEQ ID NO: 583706 - DNA, 573 bp, Homo sapiens
cggggtttcaccatgttggtgaggctggtcttgaactcctgacctcctgatctgcccacctcagcctcccaaagtgctgggattataggcatgagtcatggcacccggtttcttgtatgcttcttagcagtgttttatatttttcttcacatggtttctgaacatttgatttggatttatctctaggaatttcactgtgctattgttgctatcacaagtaatatattttcttcccatattttctagcagattatggtttatatacaggagaccatgaatatatgcaggttgattttggcagacactttgttkctaatagatcatctacctgttctctgagggtttctaggcaaatgatgaaaacttctgcaaacaatgatacctttgcctctttcccatacaaagttaaaagtgtcaagaatagacatccttatattctcccaaagtttaaagaaaatccttctagtgtcttatgaagaatcatttaacacatgaaatatgattatattagttttctattactgcataacaaattagcacaaactcagtggcttaaaacgacatacttttatt

SEQ ID NO: 583707 - DNA, 553 bp, Homo sapiens
taaatggaattaaacagtaatgtacacttttgtgcctagcatctttcactcagcctgcacctgtggtggtgtctgtattgattgttctttgtattgctgaatagtataacattgcatgaatttgtttatccatttttgtgttgattgacatttgggttgcttccaatttggggctatcgtaaataagacttatgagcattcctttttttaacttatgttttcatttctcatgggtaaatacccaggattggaatcctgggttataaagtagatctgtgtttaactttttaaaaatctaccaaacaattctsaaaaattattatgtcacactattttatattcaccaacagtatgagtttcagttgctccacatcctcaccaacatttggtgatatcaacctttgattttagcttttctagtggatgttaaatgttatttcattgttattttaatttgcattctcctcataactaataataccaagaatctttcatgtcgttattagccattgtatatcttttcttttttcaagtcttttgcccgtttttaaat

SEQ ID NO: 583708 - DNA, 575 bp, Homo sapiens
tccttctcatgctgctaataaagacatacccaaggctactgggtagtttataaaggaaaaaagtttaattgactcatagtttggcatggctggggaggcctcaggaaacttacaatcattgtggaaaagtaagcaaacacatccttcttcacatggtggcaggaaggagaagaatgagagcaaaaggggaaaagccccttataaaaccttcatatctcatgagaactcactgactatcatgagaacagcayggaggtaagcacccccatgattcaattacctcccaccaggtctctcccatgacatgtggggattatgggaactataatttgagatgagattttggtggggacacagccaaactgtatcaatctctctgacctcaagatacttacatgttattagaaagacaggaaaaacctggaacacatgaactattagagaacatcaagaactaagctaggtggtacagaagacaagtaagctagagaaaaaagatttgtagagccaatttagtaaaaactaaacaaaacctcaaaaataaaaaattcatggaaaaggctgttaagacaggc

SEQ ID NO: 583709 - DNA, 579 bp, Homo sapiens
ggtctggatctcctgacctcgtgatccgcccgcctcagcctcccaaagtgctgggattacaggtgtgagtcaccgtgcccagcctcattttcttaaaatctcacacacccacagtcaaaattggcttgtaagaaaccccaaaaaagaaggctagccaacatatactgctctgagttaaagcattacttatgataattttcatggtacacgtaaaatgtaagcaaactttgattttaaaggtgagatagctacagcaagaaatctatgtgtcctacacataacaaagaattcccagttcctagtaaaatgctgcaacaggccatctctctaaggaaactcatctcatgcctttgaaaaattatgctatagtacttagttacaacttatagacaaaacacaaataaaaaaactcatagaactctcataccacataaaactattataagagaaaatctgttacacattttccatttcgtctcttgctttgttttcctcagcatttgtttactgtttactatttaaaatttaccaatatgaaaytatgttatatgtgaggcaattaagtataaattggaaaaa

SEQ ID NO: 583710 - DNA, 608 bp, Homo sapiens
agcctacaagaaattataaagaaggatgtaagaattatctgtatgccaatacctaaaagtaatccttgttaatattttggtgtaggaccttctagcctctccaaatgcaaacacacatgtgtgcatgtgtatgtatggtttaacatattcacaattttacattctgattctttttaacttcatacttttttgatatagtaaatatcttctaaaatttagaacttggtaaaaaaaaaaatggtcttgggttcaaatctcagacccagtacttactatgtgactttgggtaatttacttcaactctctaaactttttcctcttctataatatggggataataaaccctaaggtctcaggatcactgtgagaattaaacaggagagcatatgttaaattaattgtactttgcctggcatgtggtaaatatttaataaatactagatactttatttaaatgtctgagagatgattataaagtttrtattctggaggactactgaaaaagataagccattaaattatcttcatttttttttgttctgatcactttaaactaaaagcaaaccaattttgcattttgattttagtacctgaaagccaaaaaaatg

SEQ ID NO: 583711 - DNA, 608 bp, Homo sapiens
agcctacaagaaattataaagaaggatgtaagaattatctgtatgccaatacctaaaagtaatccttgttaatattttggtgtaggaccttctagcctctccaaatgcaaacacacatgtgtgcatgtgtatgtatggtttaacatattcacaattttacattctgattctttttaacttcatacttttttgatatagtaaatatcttctaaaatttagaacttggtaaaaaaaaaaatggtcttgggttcaaatctcagacccagtacttactatgtgactttgggtaatttacttcaactctctaaactttttcctcttctataatatggggataataaaccctaaggtctcaggatcactgtgagaattaaacaggagagcatatgttaaattaattgtactttgcctggcatgtggtaaatatttaataaatactagatactttatttaaatgtctgagagatgattataaagtttgtattctggaggactactgaaaaagataagccattaaattatcttmatttttttttgttctgatcactttaaactaaaagcaaaccaattttgcattttgattttagtacctgaaagccaaaaaaatg

SEQ ID NO: 583712 - DNA, 543 bp, Homo sapiens
tgggaacagcacccactctacgaagccaccatggagacgaaagagccaatcgtctacacgggcagtgtagaacgggcgcctggtgagtgctcagggatgaccctcctcggtagctgccccacagaggccaacaccgcccgcaccgtagccactgcccccaagtccgcctggagggaagagagcaggtcacgctcacctgattctgatgaatcagctggcctgggtcatgcctctcagggagaaaacctttgagtccacagagctgctcacagataccactgcctgtgtgtaactgctgtagaccactgaggcagaccagagagcagataggtgctaagcaccagtgacattctgaggtcatggcacgaatcacagtggggccttgcccgggtcagcagcrcccagagtcagggtcctccgctgcctgaggtgtcaacatgcctgcctgcaatgtgtttgtgcacgtgcgtgcacatgtgtatgtgggtaaacacatctgtgcacgtgtgtgctgcttctctggccaggcccggctgccccact

SEQ ID NO: 583713 - DNA, 637 bp, Homo sapiens
caaatcattggtcttccctatagctccttacaaaattatgcaatcagtgttccatttggagtaaacatttagtgtcttatcttgatagagtaattggctacatttctctttctatgcatgaagttgtgtaaaaggaccaattcacatgtataattggcagagagcatgrattctggacttaacattttatcccattctcactacttactaattttatgacactggacaagttatttagcttctcagcctcagtttcctcatctgaaaaaatgaggacaatatctacttccaggtttataaatagttatatatattttaaaagcactgtgcacaatagcacatatcaggcatttaagaataaatgtttgtttcctttcctgttcttattttcacatattggtagtttgagactaagttaataactttttaggcagtcaccctaaacatgactttcaagagttattttaggattagtctgccttttactttagtaagtactgtattctctccattgccaggaggaatatttgaaaaaggaaggaatgatttgaacattgtaaatagctaactgaatatagtgtcttgaggacatatttttggtaactgtgtttaacatctccataaaagtgttttttat

SEQ ID NO: 583714 - DNA, 554 bp, Homo sapiens
attctcttcttatgtatgcggaatttttttttttttttgagatagagccttgctctgttgcccaggctggaatgcactggcacgatcttggctcactgcaactgccacctcctggtttcaagtgattctcctgcctcagcctcccgagtagatggaattacaggcgtgtgccaccgcacttggctaatatttgtatttttagtagagatggggtttcaccatattggccaggctgttctagaactcctgaccttgtgatccacccacttcagcctcccaaagtgctgggattacaggcatgagccactgyacctggcctatttttgtttttactaatgtttcaagagacccactttatgtacagaattctggctacaacctaacaaatgagttgctctgttcatcagttatagccaatttaagtaattatgaaaagctcaacaatactttaactggcaatgaaagcgtcaatatctcacatttaccaccacaacttaggatttcttggtagctaaataaaatgcttctattttgtggggggaaactgtcacata

SEQ ID NO: 583715 - DNA, 554 bp, Homo sapiens
attctcttcttatgtatgcggaatttttttttttttttgagatagagccttgctctgttgcccaggctggaatgcactggcacgatcttggctcactgcaactgccacctcctggtttcaagtgattctcctgcctcagcctcccgagtagatggaattacaggcgtgtgccaccgcacttggctaatatttgtatttttagtagagatggggtttcaccatattggccaggctgttctagaactcctgaccttgtgatccacccacttcagcctcccaaagtgctgggattacaggcatgagccactgtacctggcctatttttgtttttactaatgtttcaagagacccactttatgtacagaattctggctacaacctaacaaatgagttgctctgttcatcagttatagccaatttaagtaattatgaaaagctcaacaatactttaactggcaatgaaagcgtcaatakctcacatttaccaccacaacttaggatttcttggtagctaaataaaatgcttctattttgtggggggaaactgtcacata

SEQ ID NO: 583716 - DNA, 534 bp, Homo sapiens
ggggggggggtttgtcttttggaagttttaagtatttctctatagccttggagctttaaaaatttaagatgacacttctggattatttttctttttttcttgctcaacacgtagtagactcttaaatctgaaaatgtatattttccatcagttctgaaaaatttgcaattatttattwgaataattcttcccctcttttttctctgttatctttagaaagcttataggaaaaatgtccaattacctgtcttccatgtcatttactttctatctcataattgtcattactttatattttagtgctatatttagggagaatttcttgggtcaatcttacacttttactgaatccatccttccattcagcccaattatgtaagtttttatttcatcaatcattaacccatttatgcctgaggttgcaatttttttgaatttttgcaatcaaaaaacaaccttgagcagtaggatataaataattcccacatgcttagcgttccaataatggaacactaggcataaatgggttttaat

SEQ ID NO: 583717 - DNA, 534 bp, Homo sapiens
ggggggggggtttgtcttttggaagttttaagtatttctctatagccttggagctttaaaaatttaagatgacacttctggattatttttctttttttcttgctcaacacgtagtagactcttaaatctgaaaatgtatattttccatcagttctgaaaaatttgcaattatttatttgaataattcttcccctcttttttctctgttatctttagaaagcttataggaaaaatgtccaattacctgtcttccatgtcatttactttctatctcataattgtcattactttatattttagtgctatatttagggagaatttcttgggtcaatcttacacttttactgaatccatccttccattcagcccaattatgtaagtttttatttcatcaatcattaacccatttatgcctgaggttgcaatttttttgaatttttgcaatcaaaaaacaaccttgagcagtaggatataaataattcccacatgcttagcrttccaataatggaacactaggcataaatgggttttaat

SEQ ID NO: 583718 - DNA, 490 bp, Homo sapiens
tagacaaactattagctagactaagagaaaagatccaaatgaataaaatcagaaacaaaaaaggagacattacaactgatatcatagaaatacaaaggatcattagagactrttatgaagaactacacatccacagattggaaagcctaacagaaatagataagtttctgtacacatacaacctaccaaggttgaaccaagaaaaaacagaaaaccataatagaccaattatgagtaacaacatcaagtcagtaaatacagagtctcccaccaaagaaaagtcaagtacctgatggcttcacttctgaattctaccaaacattaaaaaacaaacagctaataccaattcttctcaaactcttccagaaaattgaagaggagtgaatttttccaaactcattctacaaagccagcattaccctgacaccagaaccagataaggacaccacagaaaaagaaaattacaggccaatatcaccgatgaacatag

SEQ ID NO: 583719 - DNA, 490 bp, Homo sapiens
tagacaaactattagctagactaagagaaaagatccaaatgaataaaatcagaaacaaaaaaggagacattacaactgatatcatagaaatacaaaggatcattagagactgttatgaagaactacacatccacagattggaaagcctaacagaaatagataagtttctgtacacatacaacctaccaaggttgaaccaagaaaaaacagaaaaccataatagaccaattatgagtaacaacatcaagtcagtaaatacagagtctcccaccaaagaaaagtcaagtaccygatggcttcacttctgaattctaccaaacattaaaaaacaaacagctaataccaattcttctcaaactcttccagaaaattgaagaggagtgaatttttccaaactcattctacaaagccagcattaccctgacaccagaaccagataaggacaccacagaaaaagaaaattacaggccaatatcaccgatgaacatag

SEQ ID NO: 583720 - DNA, 513 bp, Homo sapiens
tggccttgaactcctgggctcaagcaatcctcccaccttggcctccaaaagttctgggattataggcatgagccactgtgcctagcctcgtttcactattgatggacatgtaaattatttcggttattagttattacaaataatgctcctataaaattctttgaaaatrtcttttcatgaacactgttacgcattgctgggtcataggacacacatttgttcagcttaaattgatgctgccaaactgtttctcagtgtggttctaccaatttacatccccaccagcagtgtatagagtagcagttgctccaatctgataacatttggtataactagtctttttcattttggacattctggtgtgtgcagcagtatctcaccaggctttgatttgcattgccctgaagactaatcaagttgagcatttttttttaatgtgctatattggctattttgatattctgttttataaagtgctgttgaagtcttttaccaatttactgcaaaatattt

SEQ ID NO: 583721 - DNA, 522 bp, Homo sapiens
ggcctgagatctaagttagtgtacggcacaaggggggaactcaatacatatttgttgattgaaagaatacataaaagaagtctggagttagtgatcttttcccggtctggttggggagatatcatgcaggtagccaggattgtgctggattgtgacatggtgtaataaaggtatacatggtgtaataaaggatgtgggagcacaaatccataggaatttgagagtttaggaattgtatttattattcaggcccttcactctcagactaccctgctctatttgaataatgaggcttgtggtggtctgtggaaaagtggacagagtagaatttgggcagctgctgaaggtttggtctctrgaatgagtccacgttaccctaaggacggtaatcccaaattgagacaaaaactttaagaaaaccaatgtttggggccaagcaatggggagcttggccgacctcgttttttagtgattttgaactcaatctttaaaatcctggaagagaaggaaaaaaagggtgta

SEQ ID NO: 583722 - DNA, 522 bp, Homo sapiens
ggcctgagatctaagttagtgtacggcacaaggggggaactcaatacatatttgttgattgaaagaatacataaaagaagtctggagttagtgatcttttcccggtctggttggggagatatcatgcaggtagccaggattgtgctggattgtgacatggtgtaataaaggtatacatggtgtaataaaggatgtgggagcacaaatccataggaatttgagagtttaggaattgtatttattattcaggcccttcactctcagactaccctgctctatttgaataatgaggcttgtggtggtctgtggaaaagtggacagagtagaatttgggcagctgctgaaggtttggtctctagaatgagtccacgttaccctaaggacrgtaatcccaaattgagacaaaaactttaagaaaaccaatgtttggggccaagcaatggggagcttggccgacctcgttttttagtgattttgaactcaatctttaaaatcctggaagagaaggaaaaaaagggtgta

SEQ ID NO: 583723 - DNA, 522 bp, Homo sapiens
ggcctgagatctaagttagtgtacggcacaaggggggaactcaatacatatttgttgattgaaagaatacataaaagaagtctggagttagtgatcttttcccggtctggttggggagatatcatgcaggtagccaggattgtgctggattgtgacatggtgtaataaaggtatacatggtgtaataaaggatgtgggagcacaaatccataggaatttgagagtttaggaattgtatttattattcaggcccttcactctcagactaccctgctctatttgaataatgaggcttgtggtggtctgtggaaaagtggacagagtagaatttgggcagctgctgaaggtttggtctctagaatgagtccacgttaccctaaggacggtaatcccaaattgagacaaaaactttaagaaaaccaatgtttggggccaagcaatggggagcttggccgacctcrttttttagtgattttgaactcaatctttaaaatcctggaagagaaggaaaaaaagggtgta

SEQ ID NO: 583724 - DNA, 559 bp, Homo sapiens
actccagcctgggctgcaaagccagactgtctcaaataaataaataaataaaataataattataataattttgtggaactgcttgataaggaattgaaaataaatgtgcttaggatacttaaagagataragatatttcctccattaaaaaagaacaagcaaataggaagcaaaaaaaaatctattatgcaacaagaaataggtagatctgaaagagaaacaagtagaaatttaaaaatagacattaaaattaaaaaatcaattgaaaaaatgaactctaggctggatacctttgaaaaggggattactgaattggaggggaggacttcacacaatcatggtcaaagacaagaataacatgagagaaccatgaaggagtattgacgttagactgtgaggattccaggagaaaatgaagggaaagttaatttttacaaaagcgtgttacataccaaaaggataaagaagccaaatcattacagaacaattttaaaacatcaagaacaacaagaaaatcttaagggctatcagagataaaagacagattaggagcaaagga

SEQ ID NO: 583725 - DNA, 595 bp, Homo sapiens
tttctgcaaatacaaatgggtatacaagtgacacacttctctaagacttcagtagcaactatttttaggggatatgataagawttattttgagtaaattcaatttgaaacctcaaaattgaaataggtttggcattttctcatcactggcaaccacccatgttattaaataagaaacctgagaactattttttccatgaaatttttgaaatacccacaagtggcattaaatgctatttggctgtgccaacacagtcttgagtctctcttggctgaaatgctatccaaggacaaatgatcaaatgatgccaatttgcctatatgaaggttcatcccccctatccctgcttttttcccttcaagaatatgtacttgagatcagtcctaaggagtcttctttaaagcagtgccaaatggccatgtttcaaaaaaaatgtgctatatattgcatgtgtgtgtttaaatatactccaaattcttcttttcatgggatagtgctaagaaattatgttgctctagttcgctgaagactttccataagtggtaaggctttgctgttttcatcagctactataaaaaataaatatctttaaatc

SEQ ID NO: 583726 - DNA, 387 bp, Homo sapiens
gtcacccaggctggagtgcagtggtgcgatcttggctcactgcaacctccgcttccagggttcaagcaattctgccacctcagtctcctgagtagctgagactacaggtgtgtgccatcacaccaagctaattcttgtatttttagtagaggtggggtttcactatgttggctaggctggtctcgaactcctgacctcaagtgatccacccgcctcrgcttcccaaagtgctgagattacaggtgtgagccaccatgtccagccaagctttcttagatataattgtagatgtaatgtcttggttgggtcccctgcactgcctaaaagcagtccttgagacaaagactgtatgcaaagaggttatttgggaggtgcagaaataccaga

SEQ ID NO: 583727 - DNA, 618 bp, Homo sapiens
ctaacagagtaaacctcaatgaattccaacaaataaaaataagacacatcctgtggcacgaygcaattaaactggaattttctaataaaaaattgtaagaacagcaacactaaatctgggaaatttaactacatgaaattaacaataacaccaaaaatctcctgaagaactgagtttaaattgggaatcaaaactgcaattacagaccattcctaaaataacatttagaatattgtatttcacaattcctgggttggggccaaaaggatgttcagaagagaatttcgggctttaaataatgatgatgatgatgatgatgatgatgacgatgacatggtggcaataaaaccacccaacaaaccatgctaagaaatttacatccaggccaggtgtggtggctcatgcctgtaatcccaacactttgggaggccgaggcaggtggatcacgaggtcaggagatcaagaccatcctggctaacacggtgaaaccccgtctctactaaaaaaaccacaaaaaattagccaggcgtggtggtgggcgcctgtggtcccagctcccctggggaggctgaggtaggagaatggcgtgaacctgggaggcagagcttgcagtgagct

SEQ ID NO: 583728 - DNA, 457 bp, Homo sapiens
gtactccttaaaaaaaagaacaagagagctcaggttctgaattggacaatgcccctctctgttgtcccagttcatccctgcctcaracttgactccactgtgctcatcacctcttctgccacccccagcaaattcttccaagcccctgtgagctcctgcaagcccctgcgagcccatatccctctgcccattcccacctcttaccaccatccagactggtttcctggaatatcctgctttcaacagccacctcccccaggacgcccctccccacactgtctgccctcctcggtgtacccatgatttccctgacatgtctttgcctgcactttggccacatcagaaataagaatgatccagtttgtccctgtctccctcattatcctctgagcattgtcaactataactcttacacactgtctagcacattgaagggactcaataaatgtgtttgaat

SEQ ID NO: 583729 - DNA, 457 bp, Homo sapiens
gtactccttaaaaaaaagaacaagagagctcaggttctgaattggacaatgcccctctctgttgtcccagttcatccctgcctcaaacttgactccactgtgctcatcacctcttctgccaccyccagcaaattcttccaagcccctgtgagctcctgcaagcccctgcgagcccatatccctctgcccattcccacctcttaccaccatccagactggtttcctggaatatcctgctttcaacagccacctcccccaggacgcccctccccacactgtctgccctcctcggtgtacccatgatttccctgacatgtctttgcctgcactttggccacatcagaaataagaatgatccagtttgtccctgtctccctcattatcctctgagcattgtcaactataactcttacacactgtctagcacattgaagggactcaataaatgtgtttgaat

SEQ ID NO: 583730 - DNA, 457 bp, Homo sapiens
gtactccttaaaaaaaagaacaagagagctcaggttctgaattggacaatgcccctctctgttgtcccagttcatccctgcctcaaacttgactccactgtgctcatcacctcttctgccacccccagcaaattcttccaagcccctgtgagctcctgcaagcccctgcgagcccatatccctctgcccattcccacctcttaccaccatccagactggtttcctggaatatcctgctttcaacagccacctcccccaggacgcccctccccacactgtctgccctcctcggtgtacccatgatttccctgacatgtctttgcctgcactttggccacatcagaaataagaatgatccagtttgtccctgtctccmtcattatcctctgagcattgtcaactataactcttacacactgtctagcacattgaagggactcaataaatgtgtttgaat

SEQ ID NO: 583731 - DNA, 527 bp, Homo sapiens
aaatgaacttgtgggtctgggttgccataagcaaaaatctgatgagtatgaraaaatggacagcacaagtacttaaaagacctggtgatattcacgcttttgatagcttttggtcattttgtaagctttaaatcttgcagaggaggttggccccagagaaactaaatacagatatctggagcaggtttaccctgaaacttgcagatagaatggagacacattaacgttagcctggcctcataatggggtgggaaacctgttttactatatggcagttctgccagtaagtacccctgttatcttggtctaaaagcattttatacttcaattaaaaaacacatatttgccgggcacggtggctcatgcctgtaatcctagcactttgggaggccaaggcgggtgaattacttgaggtcaggagttcgagaccagcctggccaacatggtgaaaccccatctctactaaaaatacaaaaaaaatttagctgggcatggtggtatgtgcctgtaatcccagctatcaggta

SEQ ID NO: 583732 - DNA, 598 bp, Homo sapiens
caaaaacacacacatatatagctaaaacaaaattccacaaaataatttaactgtatgatatcagacacattcggacattttctgttctattctgttttgtcccttaaaaagtgttggttgaattctattaaattaatttcagcattcactaaatttcacaaaaatgttatcatttgaaaaacactgcattaagagaacttgcagtttttaagaaattctatagtcataatcaaatagtcctttagtatgttaattgccatctgatttgtttctgtgccaatttaaggttttgacataatggatcttttgaagctacgcttacctctatttgagtaatgacaatctgaagacgactatacaatatatgttatacatttgaacagcataatagtatataatgtgaagattgcttaagatgtaatttttaatgaatgctttgcagttgctatctcaatttgatgagcaaagtgtgtagcctatgggtgtccccagtcctgctacctttgcgtttcagtctccttaggctgatccatacttgacyttctatacattagatcatttttaggagaacatcttaaaaagcatctctagcaatatt

SEQ ID NO: 583733 - DNA, 292 bp, Homo sapiens
tactttgcatccttcaatccaatcaagttgacactcagtattaaacatcatatatgcctatatagtttaattgggaaaattcatatttgccttggttcttataatagcaacaaaaatgatgaaaacattgttatkattgtataactctcactgaggacaacattttttaaaatagataatgggaatttgacacagttgcaagagaaatagcttttaatccaaggaatccccaaagcacaaatcattctatgaaaatgttaggaatctgaggctcaaagaagagacttgaagc

SEQ ID NO: 583734 - DNA, 547 bp, Homo sapiens
caaaccaaatgatagcaacttcaaaaaaraagtgccagctccctctgatgagagggaatcagcacatgaactctggcaatacaaaaacccagagggttttgtcacctccaaaagactgtactagctccctagcaatgaatcttaaccagaatgaaatgtctgaaatgagaggtgctgaattcagaatccaacacaaagaaaacaggaaaacgatccagaatctgaaagacaacatagctatataagaaataaccaaacagaacttctcaaatggaaaaattcacttaaggaacttcaaaatacaacagaaagccttaacaatagaccagaccaagcagaagaaagaatgtcagagctcaaagaccagtccttcaaatcagttaagtcagacaaaaataaagaaaaaagaactttttaaacatgagcaaagactttgagaaatacaaaattatgtaaagtgaccaaacctacaacttgttggcatttctgagagagaataagagaaagtaagcaacttggaaaatacatttgaggatataattcaaaa

SEQ ID NO: 583735 - DNA, 515 bp, Homo sapiens
ctgtcacccaggctggagtgcagtgttgagatctcagctctctgcagcttctgcctcccaggttcaagcgatcctcccaccttagcctcccgagtagctggggtcacaggcacttgccaccacgcccagataatgtttgtattttcagtagcgacggcgtttcaccacgttggccaagctggtctcgaaatcctgacttttggtgatccacccrctttggtatcccaaagtgctgggattacaggcgtgcgccactgtgctcggccatgaaacttagattgtatctgtagaaggattgccttctgtgtttgaggcctgtctgatggcaagactgggtaatgggatttggaaagagaatactggtaaaactctcgggccatagaaacgtccctatttaaaagttgcaccttctcttgcaactaagttctgcatacctttggagagagattaaaatacttgctgaagttaagtcaatattgtcaactagattctaggcctcttgaagatgtgcaccg

SEQ ID NO: 583736 - DNA, 559 bp, Homo sapiens
tttctgagacataagaatttacatattacatttatgtattgagtggttcttaagcaggagtgtatccagattttgagaaaattgttgttgctgttgttgttagagacagggtctcattatgttgaccaggctagactcgaaytcctgagctcaagcaatcctcccacctcagcctccctagcagctgggactacagccatgcaccaccatgcctggcttcaaggaaacattttcaaatatacatatccaggatttattagacttactgtatcaaaatattcagaaaaagcctagacttgttgattatttaaacattttcctcaggttactgggatgcacaattctagctgaaagctagtgcaacagacaattatttcagtctcatttctcacccacatgaccaattccctttctcatttgaagatttggccaaaaagagtaaggagtaggagagagacccatttgctgaaaacaccacatgattttccccagtaagagaagaacagggtctagtcaactcaaaatccaacttgattttgttacttatttatcttctacc

SEQ ID NO: 583737 - DNA, 362 bp, Homo sapiens
cttttctgaagttttgctcatttccaacaaggaaggcaagttttcctgcttccatgacaaaggagagcaggcacctcctttcctgagtttcagcttgcttctgacaggsaaggtgagtgtaagttttttccagcatctaagatggcagagaacaatcaccagcctgagccttatttccaggtaagtagctgaattagagtttgtcttaaaatttttccttaatgactaaaatttaagatgacccaccagctgcttttaatttctccttaccattagaacactcagtaatcatatgaattgtgcatttgtttgttttgcttaactctttttgtttatgtttggggtttattgttgctgtttca

SEQ ID NO: 583738 - DNA, 362 bp, Homo sapiens
cttttctgaagttttgctcatttccaacaaggaaggcaagttttcctgcttccatgacaaaggagagcaggcacctcctttcctgagtttcagcttgcttctgacaggcaaggtgagtgtaagttttttccagcatctaagatggcagagaacaatcaccagcctgagccttatttccaggtaagtagctgaattagagtttgtcttaaaatttttccttaatgactaaaatttaagatkacccaccagctgcttttaatttctccttaccattagaacactcagtaatcatatgaattgtgcatttgtttgttttgcttaactctttttgtttatgtttggggtttattgttgctgtttca

SEQ ID NO: 583739 - DNA, 362 bp, Homo sapiens
cttttctgaagttttgctcatttccaacaaggaaggcaagttttcctgcttccatgacaaaggagagcaggcacctcctttcctgagtttcagcttgcttctgacaggcaaggtgagtgtaagttttttccagcatctaagatggcagagaacaatcaccagcctgagccttatttccaggtaagtagctgaattagagtttgtcttaaaatttttccttaatgactaaaatttaagatgacccaccagctgcttttaattyctccttaccattagaacactcagtaatcatatgaattgtgcatttgtttgttttgcttaactctttttgtttatgtttggggtttattgttgctgtttca

SEQ ID NO: 583740 - DNA, 497 bp, Homo sapiens
taaatgaaagcacattataaataaacttacctgattttacaaactaacctgtaaagggatttctactaatttttctattgcctgcattgccctttcttctacatccaatttatatttttgtacttcaccaatgtgtcttcaccaatgtgcagtttccatgttttttaagatttaatattacttyttccaacatctttttatcctcctcaagttttttatattctggttgtacttttttcatagataataactcctgttgaataacttcttcttagtcaaatagacatattttgaagatacagcttccagctttgctgtaagatcatcaaactacattaataaaataatatagcttgataatgaaataggctgagaataatctcatacaaaaccaataacaaattctgaaatacatttacttgcaataaaatgttatctataatgtagattctttaaatgttaactcgtactcaaaaattcaagaacaaagtaaaagc

SEQ ID NO: 583741 - DNA, 497 bp, Homo sapiens
taaatgaaagcacattataaataaacttacctgattttacaaactaacctgtaaagggatttctactaatttttctattgcctgcattgccctttcttctacatccaatttatatttttgtacttcaccaatgtgtcttcaccaatgtgcagtttccatgttttttaagatttaatattacttcttccaacatctttttatcctcctcaagttttttatattctggttgtacttttttyatagataataactcctgttgaataacttcttcttagtcaaatagacatattttgaagatacagcttccagctttgctgtaagatcatcaaactacattaataaaataatatagcttgataatgaaataggctgagaataatctcatacaaaaccaataacaaattctgaaatacatttacttgcaataaaatgttatctataatgtagattctttaaatgttaactcgtactcaaaaattcaagaacaaagtaaaagc

SEQ ID NO: 583742 - DNA, 497 bp, Homo sapiens
taaatgaaagcacattataaataaacttacctgattttacaaactaacctgtaaagggatttctactaatttttctattgcctgcattgccctttcttctacatccaatttatatttttgtacttcaccaatgtgtcttcaccaatgtgcagtttccatgttttttaagatttaatattacttcttccaacatctttttatcctcctcaagttttttatattctggttgtacttttttcatagataataactcctgttgaataacttcttcttagtcaaatagacatattttgaagatacagcttycagctttgctgtaagatcatcaaactacattaataaaataatatagcttgataatgaaataggctgagaataatctcatacaaaaccaataacaaattctgaaatacatttacttgcaataaaatgttatctataatgtagattctttaaatgttaactcgtactcaaaaattcaagaacaaagtaaaagc

SEQ ID NO: 583743 - DNA, 497 bp, Homo sapiens
taaatgaaagcacattataaataaacttacctgattttacaaactaacctgtaaagggatttctactaatttttctattgcctgcattgccctttcttctacatccaatttatatttttgtacttcaccaatgtgtcttcaccaatgtgcagtttccatgttttttaagatttaatattacttcttccaacatctttttatcctcctcaagttttttatattctggttgtacttttttcatagataataactcctgttgaataacttcttcttagtcaaatagacatattttgaagatacagcttccagctttgctgtaagatcatcaaactacattaataaaataatatagcttgataatgaaataggctgagaataatctcatacaaaaccaataacaaattytgaaatacatttacttgcaataaaatgttatctataatgtagattctttaaatgttaactcgtactcaaaaattcaagaacaaagtaaaagc

SEQ ID NO: 583744 - DNA, 412 bp, Homo sapiens
caggaaaacaagctcagggctcccactgattctacattttggtgagttatataattatttcattatatattaataataatagaaataaagtgcacaatgaatgtaatgttcttgaatcctggaaccatcccccacctcaggttcctggaaaaattatcttccacaaaaccagtccctggtgccagcatggttggggacacctggttaacagatgtgagacccctttgccttgcttggaataatgtgcasatatacattgtgtgaatgacatctgatggcgccatcttgccctgtagatcattttagggacacctccagtatttcatgaaaattaaaatttcttctaatgatgaacaaaatgatactcagaagcaactttctgaagaacagaacactggaatattacaagatg

SEQ ID NO: 583745 - DNA, 165 bp, Homo sapiens
actctaaaatgttatgcaagcattccaggcatgctttggaaaaactrttaatcctacaaaagatgcttatgttattatatagactaacagaccaagattctccaggacacttactttgttaagtgtctgaagtaaaatacaatgctgtatataaaatgtgacctc

SEQ ID NO: 583746 - DNA, 432 bp, Homo sapiens
aaaattacttatttcttgaggagtaagaaacttcttaaaattaaggagcttcttcttaattttaagaagctttctcagaaatcctaggcaataacttccttttacatcttactgtccagaaatatttcatgtggttcataatatactttttgttttcataatttgccactagcaacagtatcatartactttatgataaagaaaaatgtgaaagtatattattcaggtaaccagaaatcttatccatagtcattaagaggcaaaggtaggatttgaaacttggtttgtctaattccacatgcatgcatatgtttattgcagcatcatccacaatagcaaagatgtggagtcaccctaggtgcccagtgatggtgggctggattaaaaaaaaaaaaatggaaaagaaacacacccatgaaaaagaaagaaaat

SEQ ID NO: 583747 - DNA, 497 bp, Homo sapiens
gctgtgcttctcaaattcttacacagaggcaattttaatctttgtcaatatataagtccaactctattagattctgaaaaaaaaaaaaaagygtaggtcacagtttgcaagcatctctgatggtttttattacatgggccgaagcacagaagttcagctctgttgagtatcaacattaagtatattttacagatccggataccctctaattgctttaaaatgtcaggtgttccaagaaggagcaaaggagcacaggcactggggaactaattggtattgggacatgaagcttttctaggttagcggtttacattagtctcaggtcagtaataactcaaattcattctcttcgggggcaaagcgctctatgagaaatcaggactggatgcagtccaggttctgctggatggtatgtgaacatcaaaaccaaagtgcacctgtcaatttttttacattagaggttattcatcattgagatatttaacttcaatgttcaa

SEQ ID NO: 583748 - DNA, 572 bp, Homo sapiens
ccacaaaattcaaaatatataataaataaactatttgggaccattaaaataacaaaaacaaatgcagttttagatggatatttcaaaatgctattttcataattaatatataattatacaaaatatcagttagaatatagaatatttgaaaaatactattaactaatctgatataattaacatttatagactaactcacccaaaattcagtaaacacatttttctaggtgtaaatggaacattaacaacagaaaaaatgtttataatataactctctatgcatttaaaaaaattgcaacttccaaaatagttactctgtgccaagcagaattatattaaaaacttaatgtctaaatttcctgatattttaaataaccaatgaatcaaagaagaaatcataatgaaattggaaaagatttctgattgkatgataatgacaatataataggtaaataacaatgatgcaattagagtgatgattaaaagataaatgcttgtattagaaagaatagatatttaaaaagagttatctaatatttatcataagaacctggaaaacaagagcaaaatgg

SEQ ID NO: 583749 - DNA, 562 bp, Homo sapiens
agctatcccctgaaccaaaaataaaagttgcaaagaaatagataaaataaaaataagaaaataacatgaagggagaagtttttaaaatatactaaaatrtctgttaaaattttgtaaaatatagaaacatggaaaatgcccaaaattaaatatcaaatgatatgagaagtatttcatattctagaagtagatgtttgctaattggttaatttattgtatatgtttcatggtaaatacttttcttctcaattttaaaggcctaaaacattaatgtatactgctatagactttacaaatactgtatacttaccctatgttaaatttattacaaaatttgttcttcaataagaaattaaccttggcttactgtaactttttttactctatacacttttaattttaattttttgattcttttgttataaaatttagtttaaaatgcaagtatattgtacagctgtacagaaattttttatatcccttattttataaccttttcctgtttttaagtttgttatatattatttacattttaaattttttaaattaaatacaaaggtac

SEQ ID NO: 583750 - DNA, 569 bp, Homo sapiens
taacacctgttctcacttataagtgggagctaaacattgagtacacaggagcacaaagaagggagcaatagacaccagtgactacttgagggtggagggtgtgaggacgatgagaattgaaaaactacctgtcaggtactatgcttattatctgggtgacaaaattatcctagtgtcaaactccagtgacacacaatttattcatgtaacgaacttgcccagctatcccctgaaccaaaaataaaagttgcaaagaaatagataaaataaaaataagaaaataacatgaagggagaagtttttaaaatatactaaaatgtctgttaaaattttgtaaaatatagaaacatggaaaatgcccaaaattaaatatcaaatgatatgagaagtatttcatattctagaagtagatgtttgctaattggttaatttattgtatatrtttcatggtaaatacttttcttctcaattttaaaggcctaaaacattaatgtatactgctatagactttacaaatactgtatacttaccctatgttaaatttattacaaaatttgttcttcaataag

SEQ ID NO: 583751 - DNA, 612 bp, Homo sapiens
tacttatacaggaaccaataccagagccagactaggcttaggaaaccttaatggtacatttagatagataattgccatagcagtgaaacagtagaaacttattttttgtcagtgcaaagcaggtttactaattaccagtcccaagagargactcccattgcatggggaatagcaaagatcatccttaggccaaccaccaaaaactcaaccaagggttttccagggttgcagacaagtcaagagagtggatatgatgcctcagtccgcaccatcattagctccagagggaaataggacaatgcgtgtttttagttccctagatatgtatttctatactttaatatttctgtgaatgggtgttgccatttggtgtaatcttttaggaaaacagattgtgtggctgggcgtggtggctcacgcctgtaatcccagcactttgggaggccaaggtgtgcggatcacctgaggtcagaagtttgggaccagcttagccaacatggtaaaaccccatctctactagaaatgcaaaagttagtcaggcatggtggcgtgggcctgtaatcccagctgctcaggagactgaagcaggagaattgcttgaacctggaaggt

SEQ ID NO: 583752 - DNA, 612 bp, Homo sapiens
tacttatacaggaaccaataccagagccagactaggcttaggaaaccttaatggtacatttagatagataattgccatagcagtgaaacagtagaaacttattttttgtcagtgcaaagcaggtttactaattaccagtcccaagagaggactcccattgcatggggaatagcaaagatcatccttaggccaaccaccaaaaactcaaccaagggttttccagggttgcagacaagtcaagagagtggatatgatgcctcagtccgcaccatcattagctccagagggaaataggacaatgcgtgtttttagttccctagatatgtatttctatactttaatatttctgtgaatgggtgttgccatttggtgtaatcttttaggaaaacagattgtgtggctgggcgtggtggctcamgcctgtaatcccagcactttgggaggccaaggtgtgcggatcacctgaggtcagaagtttgggaccagcttagccaacatggtaaaaccccatctctactagaaatgcaaaagttagtcaggcatggtggcgtgggcctgtaatcccagctgctcaggagactgaagcaggagaattgcttgaacctggaaggt

SEQ ID NO: 583753 - DNA, 612 bp, Homo sapiens
tacttatacaggaaccaataccagagccagactaggcttaggaaaccttaatggtacatttagatagataattgccatagcagtgaaacagtagaaacttattttttgtcagtgcaaagcaggtttactaattaccagtcccaagagaggactcccattgcatggggaatagcaaagatcatccttaggccaaccaccaaaaactcaaccaagggttttccagggttgcagacaagtcaagagagtggatatgatgcctcagtccgcaccatcattagctccagagggaaataggacaatgcgtgtttttagttccctagatatgtatttctatactttaatatttctgtgaatgggtgttgccatttggtgtaatcttttaggaaaacagattgtgtggctgggcgtggtggctcacgcctgtaatcccagcactttgggaggccaaggtgtgcggatcacctgaggtcagaagtttgggaccagcttagccaacatggtaaaaccccatctctactagaaatgcaaaagttagtcaggcatggtggcgtgggcctrtaatcccagctgctcaggagactgaagcaggagaattgcttgaacctggaaggt

SEQ ID NO: 583754 - DNA, 557 bp, Homo sapiens
tggtaatattaatgtgaaaatcttctcttaaatttctctccatgaattcacatttgttgtttcaatgattattttatctcatggtctcaaaaaataatccttgacaagttatcccaagataaaccttccctgacttgctttctgtcagcatctggttctacagtgagaattcttctggaatgtgcttttattatatcctgccatttaattgcttttcagtataagaaatctaaatgttcttcacattytttgtctttatatacgatgcttaattttgcccagtctgctcaaatttggggcacaaagaagtagcttatttttatttaaagtttaatgttaaaagaaaaatatttatagacaatgtagaaaatgtaaaaaaatgcaaagaaaaatcctctactcaattatacctttaacatttttggtaaattctttatataccagagattgtgtatagtgagttttaattatgtttagtgaataaactaatccatgctaattcacttaaaatatcaagcttcttttttttacaaaaaaaagaatacttcgttgatttt

SEQ ID NO: 583755 - DNA, 588 bp, Homo sapiens
tcccttataccacaatataaaatgtggtaaagaacagagaattgaaactataacatcttgtcctatgggtcaagattctagactgtaacttaatgataatttctgaatgaaagtgttacttgtttgataagaaaggcaccccaagggatatagttcactctaatttttatttcaatagtakattctgttcccaaaaatgagtcctaaggaaaaaaaaagaaaagaaacccaggtataagagaatttcgagatagatgtaagtctatcagggtaaggacccattaaatagggacaataaagaaaggttataggccgggcgcggtggctcatgtctgtaatcccagcaatttgggaggctgaggcgagcagatcacaaggtcaggagaacgagaccatcctggctaacatggtgaaaccccgtctctactgaaaaaatacaaaaaaaaaaaaattacctgggcgtggtggtgggcgcctgtagtcctagctacttgggaggctgaggcaggagaatggcatgaacccgggaggcgaagcttacagtgagccgagatcacgccactgcactccagcctgggtgacagagtg

SEQ ID NO: 583756 - DNA, 588 bp, Homo sapiens
tcccttataccacaatataaaatgtggtaaagaacagagaattgaaactataacatcttgtcctatgggtcaagattctagactgtaacttaatgataatttctgaatgaaagtgttacttgtttgataagaaaggcaccccaagggatatagttcactctaatttttatttcaatagtagattctgttcccaaaaatgagtcctaaggaaaaaaaaagaaaagaaacccaggtataagagaatttcgagatagatgtaagtctatcagggtaaggacccattaaatagggrcaataaagaaaggttataggccgggcgcggtggctcatgtctgtaatcccagcaatttgggaggctgaggcgagcagatcacaaggtcaggagaacgagaccatcctggctaacatggtgaaaccccgtctctactgaaaaaatacaaaaaaaaaaaaattacctgggcgtggtggtgggcgcctgtagtcctagctacttgggaggctgaggcaggagaatggcatgaacccgggaggcgaagcttacagtgagccgagatcacgccactgcactccagcctgggtgacagagtg

SEQ ID NO: 583757 - DNA, 490 bp, Homo sapiens
ggtacagggctgctgggagcgtagccacgtctgctccaaggtggcttgaatgaggcagtgcccaagtccttttgactggctgaggtgagcctgtggctcagtcacactttgtccctctcgtaataagtgcatttcccagacagcagctccttggtgtcatgcaactgaggaacctaattgtctgggtgggttgttcccatccaacttccacctgtcacgaaggwtgctttttcagatcagtctccacagctaccatcttgtcgggcacagagccgggcatcaacaagtgtatgttgaataaagaatgaattgatgaaatgaagtgaatggaaaacattgattcaacactccttcatacttattatttagtcctacgtgaaacactagaggaagagaaatcctagtctttacccatgaagagcttagaatttggaagggatcgtagacacacacacacgaccattagcgatcctgacacggtcccaccagt

SEQ ID NO: 583758 - DNA, 585 bp, Homo sapiens
agaaacaatcaacaaagtgaagagacaaacctatgacaagggattaataaccagaatatttaaggagcttaaacaactcaatagcaaaaaattccaaataatctgatgtaaaattgggcaaaagatctgaacagatatttatcaaaagaagacatacaaatgactaagagatatatgaaaaaccaccatgagatatcatctcaccccagttaaaatggcttttataaagaggagagggagytgggcaccacagtggctcatgcctgtatcctagcactttgggaggccaaggcaggcagatcatctgaggttacgggttcaagaccagcctggccaatgtggcgaaaccccgtctttactaaaaatacaaaaattggccaggcatggtggcgcatacctgtatcccaactacttgggaggctgaggcaggagaatttctcagacctgggaggcagagattgcagcgagtggagatcgcaccactgcacaccagcctgggagacagagtgagattctgcctcaaaaaaaaaaaaaaaaaaaatgacagggaataacagatgctggcaagtatgtgcagaaagggca

SEQ ID NO: 583759 - DNA, 574 bp, Homo sapiens
actgaccagcatgccatttgagtaaatattatttttattccacatactgttccatgtagaagatgtcaagtttacttaggaacattaatgttaaatattattttttaagtggaacgaatatttcttcattattggcccacattttctaaggtagaacatatttaatacttaattttttatcttattttstgtattaaattcaatcactgtgccatcttttcaaaactgcgcttgtagtgaggatggttaaaaaaaaaaggagaagggtaacctgagttcccagagggtagtagttttatattattcgtcgttgtatttccagtaccgaggatacaagaggtgatcctgaatggccatgctttgaataaccaccagaagctacaggagcccagtgcaaccacccaagcttactctgagaagcacaaggcaagggggtatgagctaagtaagccctgcttacaggactctggttcaaagggcagaataatccaggccagtgggcatcctgagtgctttctcatcaaggtcccagtgggatttgtaaccatccacttagaaagataacgcctccaaa

SEQ ID NO: 583760 - DNA, 361 bp, Homo sapiens
tatggtggcagctgattcagttcctggtggaaactgtcttcctggcttctagacagtagacagtagccttcttgctgtgtcctcacaaggcatttctttggaacatgtgcctggggaggaagagagggacagaagaaagacagagatagagacagagagaagaaagaaagaatttctctactgccccactttttttttttaagacagggtcttgctttatcacctaggctggagtgcagtggagcaatcacagctcactgcagcgtcgaactcctgggctcaagtgatcctccagcttcagcctccctgggtrgctgggactaccggtatgccaaattatgcccagctgaatctcttctta

SEQ ID NO: 583761 - DNA, 562 bp, Homo sapiens
attgtacaaccatgttcacagcagcatttttcataattgctaaaacacagagggaactgtgtccatcgacagatgaataggtaagcaaaatattatatatacctgcaatggaatattattcagctttaaaagggacagaaattctgacatatgcaacaatagggaygagccttgaagacattgtactaagtgaaattaaccagtcacaaaaagacaagtggaatcatacaattccacttacatgagctacttacagtagtgaaaatcactgagacggaaagtagaatggtggctgccaggggcttaggggaaagggaatggggagtcattgcttagtaggtatagagttttagttttataagatgaaaagagctctggaaatggattgtggtgatggttgcacaatatagatgtacttaatctcactgaactatacaattaaaaaatggtcaacatggtaaattttatgatacgtaaattttaccataatagaaaactgaagaaaaaagtaaatttaccttctatgagcatttaattaaagtactccaacattgttgagagg

SEQ ID NO: 583762 - DNA, 562 bp, Homo sapiens
attgtacaaccatgttcacagcagcatttttcataattgctaaaacacagagggaactgtgtccatcgacagatgaataggtaagcaaaatattatatatacctgcaatggaatattattcagctttaaaagggacagaaattctgacatatgcaacaatagggacgagccttgaagacattgtactaagtgaaattaaccagtcacaaaaagacaagtggaatcatacaattccacttacatgagctacttacagtagtgaaaatcactgagayggaaagtagaatggtggctgccaggggcttaggggaaagggaatggggagtcattgcttagtaggtatagagttttagttttataagatgaaaagagctctggaaatggattgtggtgatggttgcacaatatagatgtacttaatctcactgaactatacaattaaaaaatggtcaacatggtaaattttatgatacgtaaattttaccataatagaaaactgaagaaaaaagtaaatttaccttctatgagcatttaattaaagtactccaacattgttgagagg

SEQ ID NO: 583763 - DNA, 562 bp, Homo sapiens
attgtacaaccatgttcacagcagcatttttcataattgctaaaacacagagggaactgtgtccatcgacagatgaataggtaagcaaaatattatatatacctgcaatggaatattattcagctttaaaagggacagaaattctgacatatgcaacaatagggacgagccttgaagacattgtactaagtgaaattaaccagtcacaaaaagacaagtggaatcatacaattccacttacatgagctacttacagtagtgaaaatcactgagacggaaagtagaatggtggctgccaggggcttaggggaaagggaatggggagtcattgcttagtaggtatagagttttagttttataagatgaaaagagctctggaaatggattgtggtgatggttgcacaatatagatgtacttaatctcactgaactatacaattaaaaaatggtcaacatggtaaattttatgataygtaaattttaccataatagaaaactgaagaaaaaagtaaatttaccttctatgagcatttaattaaagtactccaacattgttgagagg

SEQ ID NO: 583764 - DNA, 421 bp, Homo sapiens
agtggaatgtatgccctacgccaggcccatggaatcggagcttggttttaggaaaaagcacctctgcagttcagaagccctggtccaaccaccactcacctctccccacacggtgarcagtgaaccttggtccacaaaccagacccccagaatccgtttcatgtcccaccacggtgtgctctcccaggctgtgcctgaggcccaggctcctgtgcgcagcagaacgtggggaaaggggatagagtgtgtgcaagtgttgggtgggtgggggaaggctggacggtggggaagggagtgaacagtagtagcgggaggtggtggggggaggagagggtgctgatacaggcagcaggtgtaggggtggtgctgggggctcagtgccatcccccggccagccatgcatgcaacagttgggggcctg

SEQ ID NO: 583765 - DNA, 430 bp, Homo sapiens
cacagccatacaccagacaaccacaatggactgcatttatgacggcagtcccataagattacactggagctgaaaaatccctactgcctagtgacttcatagcggtgatgatgttgtagcacaatacattactcctgtgtttgtgatgatgccggtatgcaaacctacttgctggctgttgtataaaagtctagcacatacaattatgtacagtacataatattggataatgatggctgggtgcaatggctcatacctgtaatcccagcactctgggaggccaaggtgggtggatcacctgaggtcaggagtttgagaccaccctggccaacatggtgaaaccctgtttctactaaaaatacaaaaattarccgggcgtggtagcgggcacctgcaattgcagctactcaggaggctgaggcaggagaat

SEQ ID NO: 583766 - DNA, 410 bp, Homo sapiens
actgcactccagcttgggcaacagagtgagactttgcctcaaaaaaaaaaaaaaaaagaaaagaaaagaaaagaaaaaacaatcctgaaactcatatggaaccacaaaaaaccccaaacagccaacagattactgtgaaagaaaaagttggaggcatcacacctcttgatttaaaattgtattacaaagctatwgtaatcaaaacagtatggtgctggcataaaaacaaaaaaatagacaaatggaacagaacagagacctttgaaataaatccaaacatatactgtcaactaatttttgacaagggcaaacaagacaacacaatggtaaaaaagatagtctcttcaataataggattttcacatgcaaaagaataaaattggaccctgatcatacaccatacacaaaaa

SEQ ID NO: 583767 - DNA, 410 bp, Homo sapiens
actgcactccagcttgggcaacagagtgagactttgcctcaaaaaaaaaaaaaaaaagaaaagaaaagaaaagaaaaaacaatcctgaaactcatatggaaccacaaaaaaccccaaacagccaacagattactgtgaaagaaaaagttggaggcatcacacctcttgatttaaaattgtattacaaagctatagtaatcaaaacagtatggtgctggyataaaaacaaaaaaatagacaaatggaacagaacagagacctttgaaataaatccaaacatatactgtcaactaatttttgacaagggcaaacaagacaacacaatggtaaaaaagatagtctcttcaataataggattttcacatgcaaaagaataaaattggaccctgatcatacaccatacacaaaaa

SEQ ID NO: 583768 - DNA, 593 bp, Homo sapiens
cattgtgtaaacatcatagagtgacacgcaaacctagatggtacagcctactgtgcacctgggctctatggtatggcctattgctcctaggctacaaacctgggcagcatgtgactgtactgactactgtaggcagttgtaacacagtggtaaayatttgtgtatcgaaatatagaaaaggcatagcaaaaatacaatattgtggaaccactgccgtatatgtggtccatccttgactgaacgtcgtgcagcatgtggctatatgtatacacatagtttttgctgtgagtttgcatccatctcataggaagacatatatcaaaataaggaccagactggagagtgtgtaaattacttttcaatactaatggcttattaatttgatattgtcacaagtatgttgcaaaaataaattccaccagaatgtgagttccgtgagagcaggaactgggttgttcaccttgttggcacttggagtagagccactgagcatcgtgcggcataaaattgcttggaagaaagaagggagggcattccaggtaaccgaagcattgctatgcaaagtactgagagatcccctcataatttcccca

SEQ ID NO: 583769 - DNA, 584 bp, Homo sapiens
tgacatgtgcagtagttatcatcaccagtacttctcaccagtacttctcatcagtgtctgggttgttatgacggctactaataaataatgtctgcctagagtaccaatgtgtaataggcctaaatgtgtacagaagctatacctttgtggttcatagttacattcatgtggtgcctctttaataagtagtgtgggtgaatgaacacgaaaagtatcaaaaaaggttgttctaaaataggtaaacattgcactctgaactcgatagtcattcacaggggctgggtcacaattattatatatggtcaaaagataaatatagtaccgcagatcaatattttgaacaatgctgtcactgagactgaacatctggaccacctccttggaacaagttgtaatattgtcatctacacgacaatatgaattggaacattgaacgtggccttttatattgcctctatgagaactatacagccaattagatatcctgggattcatgctgtcatttgcttcagagaacagggggtttgtctcctcattgtcaccatctctaaatgtgggccccrttgcgttgggctcggccacta

SEQ ID NO: 583770 - DNA, 267 bp, Homo sapiens
tttactaattgattttaactaatatttataagagccagttggattgatatatattgttgaacctgaaaaatatttattatatacatgtttaaaatacacacagaaataaatagyaattacactaggcatttgaaactgtactaaaatataagctgtgaatattttgtgatcattacaaattcttacactaaataaatatttttattttacaatattaatatgtttgatacctgtgtacttttttacaatgtgttattttatttttgt

SEQ ID NO: 583771 - DNA, 273 bp, Homo sapiens
acatgaatttactaaatgattttaactaatatttataagagccagtaggattgatatatattgttgaacctgaaaaacatttattatatacatgtttaaaatacacacagaaataaatagtaattgcactaggcatttgaaactgtactaaaatataagctgtgaacattttgtgatcattacaaattcttacactgaatatttttatttttataatattaatatgtttgatacmtgtgtacattttttacaatgtattatttttgtcataca

SEQ ID NO: 583772 - DNA, 594 bp, Homo sapiens
actgtgttcttactgcctgcagtattcagtacagtaatgtagtacaaaggtttgtarcctaggagagagaggctataccatataacctagacgtggtaggctgtacaatctaggtgtttgtaatattctctgtgatgtttgcaaaatgaagaaattgcctatggatgcatctcttagaacgtatccctatcattcagtgatgtgtgactgtactaaaatgctcaatgtaagtttcaatgccctccataaaattgttgtactgtgaaatacaaatctctcacccatggcctgaatatgtttgcaaactaagcagatcatgggaaggagaatgtgctggcatcgctgggatgattttctcacactacatgaataatatctccagacttcgcgaatatgagccacttgcatagagttaaagtaggcatctctttgctgggaaatttatcaaatggcagtatgaagtgtttttaaaagatacttgtttgtttgtagctggtaggcctacagtggctcatggcaatggatgaggttgctaagatttggtggaaggaggtaaaatgaaatggccacttatatggtatatgggtcacttgt

SEQ ID NO: 583773 - DNA, 517 bp, Homo sapiens
ggattttggatctagcaaagaaatagctgtaacwccaaaaacatgagcaacataataaaaattagatatttaaaatttcttaaaaattaaagacattggtgtttcaaaggacaaccaagcaagtcaaaaggcagctcaaaaactgtgagaagatatttgaaaaacacgtatctatatgtctgtatatatatgtatcttgaatatagaaaaattgttttaactcagtaacaaatatcccaactcaaaactgataaatgataggaatagatgtgtttcccaagaagatacacgaacggtcaataatcccataaaaagatactcaatagcatcactcatcaggcaactacaaatcaaaaccacaattagatactctatggctaaaactggccactttggaaaatagtttgttggcttctaaatatattaaacatagaattgtcatatgacccagaaatttattcctaggtatacacccagattattggaaagaggtgttcaaacacaaattgtacacaag

SEQ ID NO: 583774 - DNA, 584 bp, Homo sapiens
cccatgtagctggggccacaggcacacgccaccacacctagatgcttacacacattactactaattctcaacaaccttgcaatgagagactgaaaaacagttactgtttttttgtttttgtttttgttttgtagcgatggggtctcactttgttgcccaggctggggcttaagcaatcctcccactttggcatcccaaagtgttgggattgcagggatgagccactgcatccagcaacccttgaagtcttaaactaacaaaatagcagtggtggaaaggatcatttgtaagtcacttatttggaaactaaattgcatttctttccccacaaaaacaatgttatatatgatggttacccaagaaagrctactgtattttggatcccatttcctcctgccttcacaggaactttacattattctttatcaatttttctcttgtctgtattcaacctcttcctctcagtttggccctttccatcagcatttatgctcatataaaaataaagcaaatcctccctcaccccttcacatccctccacctgctgtcctgtttcccgtcacatcacagtgacattttcaaaa

SEQ ID NO: 583775 - DNA, 554 bp, Homo sapiens
ttggttatttctttagtgtgtgacaaattttcagaaaataaagacagaagaggtcagtggaraataagtatgttgccataattcacagtttaatttggggaacattatcagacataagaaagtggagaagaaacctgacaatttgtccttccttgttcctttccttttccagaacagttcctgggttggcaatcaggtgaagagaaatgtaagatacttgggttagagggtgaggaaattccaggacagctttgacatctgcagtagcaaaggggagaggaaggggcagaggacggggtaggaaggggcagaggacggggtgggaagtggaacacttcaaaacctgggaagaaggagtgtccatatcaatgcaggggcatatgtaagctgaaactggctgaaacttaaatacattgtgaataatagtatgatgggtcaatctccacctagcagacagtgcacctgtacctggccaccacgaagaattttccataaaactcctttctgtaaaacatagctaatcaagcaaatcatcaaatggctgagcaattttc

SEQ ID NO: 583776 - DNA, 470 bp, Homo sapiens
atagtgagatcttgtctcaacaaaatatttttaaaattagctgggggtgtttctcccagctacttgggaggctaaggtgggtggatcacttgagcctgagaggttgaggctgtggtgagccatggtcacaccaccgcactccagcctgggtgacaaagcataagagaccctgtctcaaaaaaaaaaaaaaaaaaaaaaaaaaagactgaggcaggaattgaacctggcaaggtacctcacagcatgctggtcgtgcttcctcactcttcagaggcrgcatgttctagttggcctcctgaaggaaactactaattttgttttctctgccattcagtgagcatctagattgagagccccacataggtcacttcctgagcaagatgtcaggagctgggttagggttgtaattcctttcctagcttgttgtacagcctcgagcaaggagaagatttgagaggcagaaaggtagc

SEQ ID NO: 583777 - DNA, 599 bp, Homo sapiens
tagttagccattcatctaatattttttcaaggtttttagcttctttgcgatgggtttgaacgacctcctttagcttggaggattttgttattactgatcttctgaagccttcttctctcaactcgtcaaagtcattctccgtccagctttgttccrttgcttgtgaggagctgtgttcctttggaggagaagaggtggtctgatttttagaattttcagttttctctctggtttctccccatctttgtggttttatctacctttggtctttgatgatggtgatgtacaaactgggtttttgtgtggatgtcctttctgtttgttagttttccttctaacagtcaggaccctcagctgcagttctgttggagtttgctggaggtccactccagaccctgtttgcctgggaatcaccagcagaggctgcaaatattgcagaacagcaagtgttgctgcctgatcgttcttctggaagctttgtctcagaggggcacccgcccgtatgaggtgtcagtcggcccctactgggagttgcctcccagttaggctactcaggggtcagggacccacttgaggaggcagtctgtccattctcagat

SEQ ID NO: 583778 - DNA, 599 bp, Homo sapiens
tagttagccattcatctaatattttttcaaggtttttagcttctttgcgatgggtttgaacgacctcctttagcttggaggattttgttattactgatcttctgaagccttcttctctcaactcgtcaaagtcattctccgtccagctttgttccattgcttgtgaggagctgtgttcctttggaggagaagaggtggtctgatttttagaattttcagttttctctctggtttctccccatctttgtggttttatctacctttggtctttgatgatggtgatgtacaaactgggtttttgtgtggatgtcctttctgtttgttagttttccttytaacagtcaggaccctcagctgcagttctgttggagtttgctggaggtccactccagaccctgtttgcctgggaatcaccagcagaggctgcaaatattgcagaacagcaagtgttgctgcctgatcgttcttctggaagctttgtctcagaggggcacccgcccgtatgaggtgtcagtcggcccctactgggagttgcctcccagttaggctactcaggggtcagggacccacttgaggaggcagtctgtccattctcagat

SEQ ID NO: 583779 - DNA, 551 bp, Homo sapiens
ttctctgggtcatagtttgcatggaatatctttttttatctctttacttgcagccaatatgttcccttaaaagtaaaatgagtttcctgtagccagtgtatagttgaactttgtgygcaggtatgtacaacacgctttaatccattcaccactttatgtatgattggagagtttaattcatttatatttaaaataattactgataagataggatttactattgcaattttattaatacttttcagttagtcttgtagctcttttgcttgactttttctctctttctgtcttccatcatgttttttataattatatgctttgattcttttctcattttatgtacctcttataggtatgtgttttttctgattaccttatgcttacaaaaaaaatcttagttataatgatctattttaagctaataagaaactaagttcactgtcattaaaaatttacattttaacttctcccctaccttacacactttatgttggtggtgttgcaatgtatatctattcatattctgtatcttttagcatattttaaaatta

SEQ ID NO: 583780 - DNA, 551 bp, Homo sapiens
ttctctgggtcatagtttgcatggaatatctttttttatctctttacttgcagccaatatgttcccttaaaagtaaaatgagtttcctgtagccagtgtatagttgaactttgtgcgcaggtatgtacaacacgctttaatccattcaccactttatgtatgattggagagtttaattcatttatatttaaaataattactgataagrtaggatttactattgcaattttattaatacttttcagttagtcttgtagctcttttgcttgactttttctctctttctgtcttccatcatgttttttataattatatgctttgattcttttctcattttatgtacctcttataggtatgtgttttttctgattaccttatgcttacaaaaaaaatcttagttataatgatctattttaagctaataagaaactaagttcactgtcattaaaaatttacattttaacttctcccctaccttacacactttatgttggtggtgttgcaatgtatatctattcatattctgtatcttttagcatattttaaaatta

SEQ ID NO: 583781 - DNA, 551 bp, Homo sapiens
ttctctgggtcatagtttgcatggaatatctttttttatctctttacttgcagccaatatgttcccttaaaagtaaaatgagtttcctgtagccagtgtatagttgaactttgtgcgcaggtatgtacaacacgctttaatccattcaccactttatgtatgattggagagtttaattcatttatatttaaaataattactgataagataggatttactattgcaattttattaatacttttcagttartcttgtagctcttttgcttgactttttctctctttctgtcttccatcatgttttttataattatatgctttgattcttttctcattttatgtacctcttataggtatgtgttttttctgattaccttatgcttacaaaaaaaatcttagttataatgatctattttaagctaataagaaactaagttcactgtcattaaaaatttacattttaacttctcccctaccttacacactttatgttggtggtgttgcaatgtatatctattcatattctgtatcttttagcatattttaaaatta

SEQ ID NO: 583782 - DNA, 551 bp, Homo sapiens
ttctctgggtcatagtttgcatggaatatctttttttatctctttacttgcagccaatatgttcccttaaaagtaaaatgagtttcctgtagccagtgtatagttgaactttgtgcgcaggtatgtacaacacgctttaatccattcaccactttatgtatgattggagagtttaattcatttatatttaaaataattactgataagataggatttactattgcaattttattaatacttttcagttagtcttgtagctcttttgcttgactttttctctctttctgtcttccatcatgttttttataattatatgctttgattcttttctcattttatgtacctcttataggtatgtgttttttctgattaccttatgcttacaaaaaaaatcttagttataatgatctattttaagctaataagaaactaagttcactgtcattaaaaatttacattttaacttctccccyaccttacacactttatgttggtggtgttgcaatgtatatctattcatattctgtatcttttagcatattttaaaatta

SEQ ID NO: 583783 - DNA, 479 bp, Homo sapiens
cactttggcctcccaaagtgctaggattacaggcgtgagccaccctgcctgaaccccagaccttctgctttttaatccccctctgaagtgtgagtagataaccaagggcatwagttacacaaggaaaacttctaacatgaaagagaagaaacctaaacaaatgaaaagacaaaagccgcttgggaaattcaatctgtgcaggaaggaaaaaaagttgctccaaaaaatcattaagcttcttagggagaaaggaaaagacactgacactataaaacaaaaaccagaaagaaatagacacacaaaccacacacatacaaatatatatgtatatattcaggcaaccaaaaaaatagagattttgattttaaatattcatgattacagtcatgaaaaacttatttttggcccagtcaaaaatagccaatatctgaacaatatgagcttctcacagacacagaaaatagagggggaaaaattac

SEQ ID NO: 583784 - DNA, 532 bp, Homo sapiens
cactggctagcagagccagaactaactccaagcttctaactgccagttcatgtttcactgtgccctggcgtggcaacatacatgaattagcaacatcttgtctctcccatctcaaaaccctccaaaatctgcctgttacttaaaaaacaaaaacaaaacaaacaaaaaaatgaatttgcccagctctctggcctcctcccctcccatgcccaccccattccacctcagttcctttccctctctgctgttctttgagcaataaagcatttcccacctccctggggtcctttgtactcttggcttctccgtggcctgccctgctcttcctaagktctctattccctacctacagaaacagcaggcaaggccccatctctctcatgcggctttacttttctcatggcagggggatatttactggtatctgtacgttgtctgcatctcccctttagaaggtaaattccaggagaacagggcatttaccttctatactattgtgtccacagagcctacaacagtacttggcacaaag

SEQ ID NO: 583785 - DNA, 435 bp, Homo sapiens
ccacctcagttcctttccctctctgctgttctttgagcaataaagcatttcccacctccctggggtcctttgtactcttggcttctccgtggcctgccctgctcttcctaaggtctctattccctacctacagaaacagcaggcaaggccccatctctctcatgcggctttacttttctcatggcagggggatatttactggtatctgtacgttgtctgcatctcccctttagaaggtaaattccaggagarcagggcatttaccttctatactattgtgtccacagagcctacaacagtacttggcacaaagtaggtgcttaaaatatttttgtcaaatgaacagattcaagtaaaaaagaattgggggtggtggctaagaaattcaagtagagatgtctgtgggtgccttccaagttagataggctgggtttg

SEQ ID NO: 583786 - DNA, 500 bp, Homo sapiens
caggaaatactaaactaaaacttattttagtttcaggattrtaagcaaaagttaattgattgatattcttatgaaaacacaaagcaaaatgaaagtagaaagttattctcaaatctattccatttactattttttttgcagaaccaaaaaagcaataataaatttaagtgatgtgtttgaatgatattttatttcagttttaaatactagatgtaaatttggtactttctggcggttcttacaaaaatgatcatgctctaagccagaaatagtttgtttctgacaacacattacaagttatttggacacctaatgttatgaaaaaggaagaaaattttcttaacctcaagcctactttataaatggggatccagacttggaattatgagttgctggaatgcattacatcatacatgattgtgaaatctctttctttaatgatttttaagaggggataaacaaccaagtttctggaatggttttggctcattttgccaaaa

SEQ ID NO: 583787 - DNA, 500 bp, Homo sapiens
caggaaatactaaactaaaacttattttagtttcaggattataagcaaaagttaattgattgatattcttatgaaaacacaaagcaaaatgaaagtagaaagttattctcawatctattccatttactattttttttgcagaaccaaaaaagcaataataaatttaagtgatgtgtttgaatgatattttatttcagttttaaatactagatgtaaatttggtactttctggcggttcttacaaaaatgatcatgctctaagccagaaatagtttgtttctgacaacacattacaagttatttggacacctaatgttatgaaaaaggaagaaaattttcttaacctcaagcctactttataaatggggatccagacttggaattatgagttgctggaatgcattacatcatacatgattgtgaaatctctttctttaatgatttttaagaggggataaacaaccaagtttctggaatggttttggctcattttgccaaaa

SEQ ID NO: 583788 - DNA, 500 bp, Homo sapiens
caggaaatactaaactaaaacttattttagtttcaggattataagcaaaagttaattgattgatattcttatgaaaacacaaagcaaaatgaaagtagaaagttattctcaaatctattccatttactwttttttttgcagaaccaaaaaagcaataataaatttaagtgatgtgtttgaatgatattttatttcagttttaaatactagatgtaaatttggtactttctggcggttcttacaaaaatgatcatgctctaagccagaaatagtttgtttctgacaacacattacaagttatttggacacctaatgttatgaaaaaggaagaaaattttcttaacctcaagcctactttataaatggggatccagacttggaattatgagttgctggaatgcattacatcatacatgattgtgaaatctctttctttaatgatttttaagaggggataaacaaccaagtttctggaatggttttggctcattttgccaaaa

SEQ ID NO: 583789 - DNA, 500 bp, Homo sapiens
caggaaatactaaactaaaacttattttagtttcaggattataagcaaaagttaattgattgatattcttatgaaaacacaaagcaaaatgaaagtagaaagttattctcaaatctattccatttactattttttttgcagaaccaaaaaagcaataataaatttaagtgatgtgkttgaatgatattttatttcagttttaaatactagatgtaaatttggtactttctggcggttcttacaaaaatgatcatgctctaagccagaaatagtttgtttctgacaacacattacaagttatttggacacctaatgttatgaaaaaggaagaaaattttcttaacctcaagcctactttataaatggggatccagacttggaattatgagttgctggaatgcattacatcatacatgattgtgaaatctctttctttaatgatttttaagaggggataaacaaccaagtttctggaatggttttggctcattttgccaaaa

SEQ ID NO: 583790 - DNA, 343 bp, Homo sapiens
cctaaagcatactgttgaacagaaatttcaatataaatccaagaaatttactttgaacaattgtactttatttgtataaccaaaagttgaagaacaaagttatctaggtatttcagaagttaaaatatgtctgtttccaacatttgcacaaataaatagacttaattayaagccaatccttcatcagtatagtttttttttaattttgagaaaatggtaaaatgttatcagtagtaacatttctcataccagaagcatatctattaaatttcctggaaaaaatgtgcactgtagaatgcttattgtattatgtatgggttgcatgacatatttcaaaattaga

SEQ ID NO: 583791 - DNA, 343 bp, Homo sapiens
cctaaagcatactgttgaacagaaatttcaatataaatccaagaaatttactttgaacaattgtactttatttgtataaccaaaagttgaagaacaaagttatctaggtatttcagaagttaaaatatgtctgtttccaacatttgcacaaataaatagacttaattataagccaatccttcatcartatagtttttttttaattttgagaaaatggtaaaatgttatcagtagtaacatttctcataccagaagcatatctattaaatttcctggaaaaaatgtgcactgtagaatgcttattgtattatgtatgggttgcatgacatatttcaaaattaga

SEQ ID NO: 583792 - DNA, 337 bp, Homo sapiens
ttaccttggaaatacttacgttgcatagctatctgcatggcatagagtatgcacattttcaggaataggtatgcattacctctagagtcatacctatggaaaggcttccttgatccctccattacttttttgttctctcctcctgcccaatttggaataggctggacctactgtacactcccagtacaacttgtgcytccaccttcacagagtttatcacactatgttttattgttatatgtatttatctctctatccctctttcttcttctagtagatgagtattgtgccaccaagatacagaacattatctgatacataattaaggtgctggata

SEQ ID NO: 583793 - DNA, 560 bp, Homo sapiens
tacatttaactggtgtgctactgaggtcatatgctagttaggtcacttcagcatgtcctctacaatgcctgatatgggatagactacattttattggcataacaccaaccaaaattctggaatagattatatgatattctctggaaataatcttttggatcaaattaattaatgagtatgctattgcctgagctgcaatgtcaaaaatcacatttctttcttttcttttcttttcttttcctttccttttatttatttatttttattttttagacagggtcttgctctgttgctcaggccaaagtgcagtggcacaatcacaactcactgcagcctcaacttcccaggctcaagtgatcctcccacctcagcctccagagtagctgggactacaggcatacaccaccatgcctggctaatatttgtaattttgtgtagaaatggggttttgccacattgcccaggctggtcacaaacttctgggctygagtaatctccctgctgggcctgccaaagtgctgggattacaggtttaagctaccatgctcagccaaaaatca

SEQ ID NO: 583794 - DNA, 546 bp, Homo sapiens
gccttggatgagtatttaatgaaaattatagagaagggataaattctgactatggtcaccatcggggcagaggtaaattatcctcaagaaagaaagattgaagccccaaaatccatagaggtagggagtaggagtcagaagtgatcacgaagccacatgcactggcaggagtttgaagcagttttaagaaggamgttgcacttcccataaaatatgaaagttgggtttgagctaatctgatctacatctttaagggccaagagacagagaattgaatctaagatacacaaataaatggccaaagcatcagtctccaaacaaacgtattcaaatagaaaaacaaaggaaataaatactctattttgaattttctattagtgccaccagagaaagcatcacagatgttttccggctatctcctaagctgttaaagaatatgattctgtgaaacagacctgagagaattgccttctcttttggtacaaaaaaaatctaaagtttcattttctgaaatctctcacgaggtgaagtcagtgtagaatacca

SEQ ID NO: 583795 - DNA, 678 bp, Homo sapiens
tatacatatactctattcattctgtccttctggagaaccctgaaaaatacagatttcggtaccaaaatctgtattatgttgtcttttatgataacataaaagagaataatttaggtttccagaattaaaaacctgtgttgctattctacactgacttcacctctagagaaatctcaaatttctctagagagaaatggaattttaaggatggatttctttagttggttttggagtttctggagttctctgtttaaactgattagacgccaaaatggtaaggactctacttctagtagtatggagaatactgatagtccttggcatgaactgtgtagacatgctcaaagtaaaggctttgagtgctgaatctttttcaaactatttcagttgaagactttattttgtgtaatgagcccagaaaacatatcagtcatagtataatagtataatagttaaaagcattggctctagagctagaatgaattaatccaaatttcaactctcccactgtgtaactggattaacccatttatgcctgaggttgcaawtttttttttagtttttgcaatcagaccttggtgatgacattgagcagtaggatataaataactcccacatgcttagggttccaataatggaacactagggataaatgggctaatagctatataacataga

SEQ ID NO: 583796 - DNA, 563 bp, Homo sapiens
tctgtgtgaccttggtcagaaaattgaacactcttggatgtggttttctcaactgtgaaatcaggagttgatacctgattttgtctaatggggttctggttctaattttctagagcccaaacatacctgcaatttgcattcaggaatcagcagcaggcacggcaacctgggatgtttctaacaaggggatgttactgtttgtgttgcattatcagcccaagcccattgcatgaagttttgctactagtccaataattagagatttcttattaacttatttggatcacagtgctaagggcctagggtctggcaaaattaggcccattgatgatttagtggagagctggaaacagcagatgtggctgtagaagtattatagaatccgtgagaatggccaagatgggggcagtatatcagctgcttgttaagttagtgggtcagggtgagaatatgaggatttatmttatgtaacattgataggatcttgagacaaaatatcctagataaaaaattgaagaaaactacgcttatttatttaagattgaggatctacaaatttggat

SEQ ID NO: 583797 - DNA, 395 bp, Homo sapiens
ggaacatggtcaccacagtgacccaaggctcctgtaatattgaaccaaagaagttgttatacagaagactgaaaaatcacctcttctctattaatccttcatgaacaaaagaagctagggcagatcaatgacagcatattctcaaatctcattttatttactgctgtcactggattaaaagctagaggtctgcactamtttaaaacatatatttctattttaaactaaatcgaaacaccccaaaccaatcagggaaatacttacgcataatttggtaaaaagaaaaagaagggccaggtgcagtggctcatgcttgtaatcccaacactttgggaggccaaagtgaaaggattgcttgagtctaggagtttgagactagcctggacaacatagtg

SEQ ID NO: 583798 - DNA, 583 bp, Homo sapiens
aggcagctaataaagatacgagccattgtttagttgtatagaagaaaaaaagcrgttaaaaattaaaaacaaaagaataaaacattaaatgttatgctgccattcagtgctcatggtcattatcctgaatgtggtatttagatctgattgttcatttcaggacttttattttggaaataaaaccaaagaacttggagaagaatatggatagaagaattgcaaagaggtcatgtgaaaaaagagaaaaatataaaaattatttgtagaaatactttaaactagtgaatgttaattagtaggaattataaaaacttttcaaactagataatatttatgcaattcttactatgtgccagggcagtacactgacctatttaagccttacaaggaggtataatgtttgcatgtttatgtcctaattttactaaaaatgaaatggcagcttagataaatgttcccaaatatatcttatcaacattctagaataaaatgaaaagtaatcgaatccttgggagcactctgacacatgtaaattaaagatccagggaaaagaaagtccttaaaattaatgaaaagtaatgta

SEQ ID NO: 583799 - DNA, 491 bp, Homo sapiens
aagcttgaagcctggctttcttaaataagacaggtagagaagactagagaaaaaaagaatgaaaaggaatgaacaaaacctcygagacatatgggattatgtaaatagaccaaatgtacaatgtcttggtgtacctgaaagagatggggagaatgaaaccaattgggaaaacatatttcaggatatcatccatgaggatttcctcaacctagctagacagggcaacacttaaattcaggaaacgcagagaacctcagtaagacactccacaagaagatcatccccaagacatataatcttcatatgctccaaggtcaaaataaaaaaacaaaatgttaaaggcagctggagggaaagtccacatcacctacaaagagaagcccctgactaataatggacatctcagctgaaactctacaagccagaagagaatgggggccaatattcaacattcttaaaaaaaaaagaatttccaaaccagaattttatat

SEQ ID NO: 583800 - DNA, 544 bp, Homo sapiens
gaaaacatatttcaggatatcatccatgaggatttcctcaacctagctagacagggcaacacttaaattcaggaaacgcagagaacctcagtaagacaytccacaagaagatcatccccaagacatataatcttcatatgctccaaggtcaaaataaaaaaacaaaatgttaaaggcagctggagggaaagtccacatcacctacaaagagaagcccctgactaataatggacatctcagctgaaactctacaagccagaagagaatgggggccaatattcaacattcttaaaaaaaaaagaatttccaaaccagaattttatatctggccaaactaagcttcataagcaaaggagaaataacatcctcttcagacaagcaaatgctgagggaattgttaccaccagacctgccctacaaaagcacctaaaggaagcattaaagatggatagaaaagattgttaccagccactacaaatacacacttaagtacacagaccagtgacactataaagcaaccacataaacaaatctgcaaaataat

SEQ ID NO: 583801 - DNA, 646 bp, Homo sapiens
aaacccacaaccttccagtgtgggtgttatggccatcaagaacatgtcacagtgctgcagagattttgtttatggccacttttggggccagtttatggccagattttggggggcctgttcccaacaataacaaagaacaarattatgtcctttacagggatatgtgttaagctggaggtcattatctttagcaaagtaacataggaacagaaaaccaaataccacatgttctcacttataagtgggagctacattatgagaatacatggacatatagaggggaacaaaacacactggggcctactggaaggtggagggtgggaggagagagaagatcaggaaaaatacctaatgggtactaggcttaatacctgagtgatcaaataatctgtaaaacaaaccaccatgatacaagtttacctgtgtaacaaacctgcacatgtaaccctgaacttaaaagttaaaaaatgaaaactgctcttttgaattaattcagtaagagaaaaattttaaaaaccaaaatttaaaaaggaaaaaaaacctaaatactggattatgtaaagtgaacaaacctataacttataagcattcctgagggagaagaagaaaaagaaaatcatatttgatgggcaaacttaggaaaatt

SEQ ID NO: 583802 - DNA, 612 bp, Homo sapiens
ctccccattcacacctctcacrtccaatcataattaaacactctgtgttctcataacactttgtacatatcactaatatggaatttgttatagctgaatatgctaaaactggatggcaaaattcagggaatcgaaggcttctgttaggtttctccctctaatgcttcaggtagtgccaggaaataataaacccccaacaagtatttatagggatcaatggattaatcttgaaggggcttttttacttaaaacgtaataaaattaacatggttaaaataaaagctgtcatatgacatgtgctgaaggtattttatattctatcctttatctactttatcttttggggagcatactcactacattctttttccatatggttaaaagagagtgattcaaactctctgccttaggggtgagcatgtgattcaggacttttgtagtttctttttcacccaattccccagttatgagggccaatgtattcctttattttgcttttgataattctaacggagtgtcacacacattcaatagcttcctggctaaaataacatctgcattttagaatttccccataagaaatatttatcaggttcaggttctttagaagtt

SEQ ID NO: 583803 - DNA, 568 bp, Homo sapiens
attggacagtcttacattttagaagaattaatctggcttttcctaaatctagattgtggagaatgagggtataaggagtctattgtgataacccaggggaaagctgatggatgcttggatcagagtgaaagcagggaaggcagggacacatggttctattctaagtgtatttgttttgaagacataagaaacatgaatatcaatatgtaaaatattaarttactatctacttaatatgaaaattatctccatatatgtgacaggcttttattattaccaaaaacacaataatcacaaaggcttcttcaactctaaaacagttaagaaaatatttcatatatttttcattgacatcaaacatcaaaaaggagagaggaaaaactatctttgtgattgttgtgtgtccaatctatgtgttggcacataaatacatttactttacttataatatagtatctgatctgaaaaataaactgttggaatatatgtggatgtttgtttccttctaatcatttaaactgactgtgttattgaaatcaaatttataaactgcctgcctatgtagaca

SEQ ID NO: 583804 - DNA, 410 bp, Homo sapiens
ggggaaagctgatggatgcttggatcagagtgaaagcagggaaggcagggacacatggttctattctaagtgtatttgttttgaagacataagaaacatgaatatcaatatgtaaaatattaagttactatctacttaatatgaaaattatctccatatatgtgacaggcttttattattaccaaaaacacaataatcacaaaggcttcttcaactctaaaacagttaagaaaatatttyatatatttttcattgacatcaaacatcaaaaaggagagaggaaaaactatctttgtgattgttgtgtgtccaatctatgtgttggcacataaatacatttactttacttataatatagtatctgatctgaaaaataaactgttggaatatatgtggatgtttgtttcctt

SEQ ID NO: 583805 - DNA, 561 bp, Homo sapiens
ttttcatttgcaaattactgcataacatactacttcaaatttattagcttaaaacatgaagcacttatgatttctcataagtctcaatggatctcagctctgcttcttcccttgtctgaagtttgctggcaggytggtaggggctagcccgtctaggatagtcttagctggtatgactcagctctgccccttggattcttctcatagtgaaggtgaaagtacatgggacaaagtgaaaaatgcacatactttttcaaacctctgcttgtgttaagtctgataatgtcctattggccaaatcaagtcacctggccaagcgcacattcatggtgtgggggtaaaaggtctctgattatttaataaaaagaacttcaaaatcacaagaactttaaagagcaaacaaaacaaacagcctcaaccacaaacacaaaaatcattacaaccatcatatctgtgacaagtgtcaagtttggaagacaagcaagtttggttaaggccttattccaaattctgaccttttgttgttcaccaaaatgtggttgcagtgcctagaacagaaaa

SEQ ID NO: 583806 - DNA, 496 bp, Homo sapiens
aaaagccaacaacattaagaatttattttgttattaccaaaaactacatataacatttcctattatccttgattcaacgcttttgccagttaggactccaatatgtacttacccatatcccaaagacccgtattctgtatcctgatgcctctttctcttcyttccttgattaatcattgctgtaactgctgtagctgttctatagcagttctctcttttctgccatagatggaagccattttgaaaattctaacttccagttgagtagccaggaatttttgctattaataaatttctttcttgtggaaggtgtatgtgtgtgtgtgtgtgtgtgtgtgtgtgtgtgtgtgtaaatgtgtatatctaaaactttaattttcctatcttattattttcttccccttagacaaatctcagtttgttattattgtacctagagtaggagctaagaataatggctagtttagagatggaagtctgaaaaattcctgaatct

SEQ ID NO: 583807 - DNA, 619 bp, Homo sapiens
gaattatgttacatagtttctgctatggagccaactttcattctttcaacaagtattataccagggactatggtaggtacaggagatacaaccagaagcaaaacagagttctttctcttatggatcttgccatctaccacgagaagcaggaaaaaaaaaaaggataatttcactatagaagaaartatataaaggatgtaaaggtcactacgatgggcacataggaaaaacgcttcttctggctctaagattaaaggaagaggaggcaggtggttcctggaacatgaggtgtaactaatctttcagtagagtaggggagaaaatatcttaatccataaaaatagctaaagatgtgagagagaagaatgggcatgcatctttattatcctgccatttgttatctaaagaacagtgcaaacatttttaattttcattattatgaagggctattgtctgtatattatatttatatgtatgtgtatatatatttatatgtgtatgtgtgtatatatatgtgtgtgtgtatatatgtatttgaaatccaaaatgttttcaattgagttttcttattagaatgcaataatttaaatattttagagcataaaaattaagctaatat

SEQ ID NO: 583808 - DNA, 432 bp, Homo sapiens
aagaattatgttacatagtttctgctatggagccaactttcattctttcaacaagtattataccagggactatggtaggtacaggagatacaaccagaagcaaaacagagttctttctcttatggatcttgccatctaccacgagaagcaggaaaaaaaaaaaggataatttcactatagaagaaagtatataaaggatgtaaaggtcactacgatgggcacataggaaaaacgcttcttctggctctaagattaaaggaagaggaggcaggtggttcctggaacatgaggtgtaactaatctttcagtagagtaggggagaaaatatcttaatccataaaaatasctaaagatgtgagagagaagaatgggcatgcatctttattatcctgccatttgttatctaaagaacagtgcaaacatttttaattt

SEQ ID NO: 583809 - DNA, 585 bp, Homo sapiens
ttggtgtctgatagccaagagagaaggccattgttgtggaggtgatgaatggggaggcaatgaggaggggtcattacagaaatagcaagcagttgtggcagttttttgagttaaattttacaaagaatattttgaaaacaagatgggccaaacagaaccaaaccatctgtctatcttgggtctcaaagctgttggggaagagacagttattgagaaaccatatccatcccaaagatcttaaattggaagcatagtcaaggggttataatgccttcttyggttgacaagttctaacccgcttcagtctattacaatctcagatgttgtctgtaataatgcttggtgtcctatgtcgttggatccagacatcgttggaataaccaaccatgtcccagaacagtgcttaatggaaacaactaagtgagtctaggattaggtcagggtttgatattatctatgctatttattgactaaaatatttcaaatgcaatctagcctggaatagaaaggtagacaagtcaatctagaatagaggtaaaaattattcaaattaattttgcaagtggatgttttaaatgcatgtct

SEQ ID NO: 583810 - DNA, 583 bp, Homo sapiens
agtatcttttaccttaaatatattctaaattggtatgaaatatttcagtatctcatccaaacttgtcataaagttcactttattattttcattttcttatttaatattctcttctgataactgcaacattcgtggtgaatgtgattcagagttttcagtggctgtgaaaagtccagttagtcatagaattggtagctatggaagaactttggagaatatttcagattcttatagtgtgttgagaaatataaatcattgcattcaaatattaactaaattactgctcacctctgactgtgaaggagtcggggggggytcagattgtattggatttactcaatttattctaaaagtgccaaatgcatgtttggacagtagttcattttaaatttctttaaatatctctagtgtcatatataataacaaatgaattataatgtatattcaatgactatatttagtgtcatcctgcttttccttctttagaattttattagaccaccttacataaaaacagcatcatcaaattctgatgtggtatgattttctctgttgaataaatatttcaaaaaagccaggggca

SEQ ID NO: 583811 - DNA, 491 bp, Homo sapiens
gatttttgttctgattagtgggtagtgttatttttatattaaaaaaacagataaaatctcagtccataacttcagggacaaaggaaatataatttttaaaaattttctaagtgataaaagactatacattgggtacagtatacacaggagatgagtacaccaaaatttcrgaaatcatcactaaataacttatccaggcaactaaataccacttgttcccccaaaaactattgaaatgataattttaaaaagagctcccagaaaaagaatatctaattttttttttttcttttcattgtaagcctctaccacctggtaggagaaggtaatagtaaatttggtatcttctccgttttcttcccagggagtatttccacatgctactgtgttatagatgccaaacattagagaaaataatttagtccttggttcatctgactacactggcatccattaaaagtctattatttctttggttatttgtcatctat

SEQ ID NO: 583812 - DNA, 545 bp, Homo sapiens
tgccttttacatttaggtatataattcattttgagttaaattattgtgagttctaataattttttattgctgtttctcatttgtattctgattttaatgttaagttctcaaaggggcctttcctaatcaycctagctaaagcagtccctcccaaccaatcactgtttgatccattattctaattttcccctagcattgccattatctaaaattatattgttctttatttattttcattcttactttttatttctctataagtcctacgtgagctgagactcagtttgttttgtttactgctctacccccagggtctaagacactacttgaaaattatttagtgaataaatgaatgaacaagaaatgcatttaacaaaactcacagacacataatgatatatgttcaagtccttatctatgagtgtctttgtaagtaacaaagacagacaactaataggaatgaaaactagggtagcgaagaggcagcaacattcaaacaaaagtattactattttgtttgttttgcctgtagcatgtattaagtc

SEQ ID NO: 583813 - DNA, 563 bp, Homo sapiens
atttttataaatacctttcagcatccagtttttaagaagtttaagaattataaaatgttcacattataatcaaactggaccatgtttgtgagacatcagtgctcctgatcgtttaaacaatgagttagtccaattgcatgataaaaagaggaagtagttaagaataaaggtgaggcaggaaatttttgtcagaagacagacamggatttgaatcatggctctaccatccaggtgcagtgagactttggccaagttacttaacctctctgtgcctcagtttcccaggaataaaaattataattcttttgggacatgtaaagattaaatgagaccacatttcaaggctcagactctggcatattgtggccattactatctagcaacaagcacacagtagaatttgatcagcatttgttgagtgtatttattcaaacctgcagttggactataataaactaagataatttaactgccttttggttgctcgagtcatctcagggcaatagtatactttttaagtgcaattcaaactattaacttagctacatgaagtcatataatgt

SEQ ID NO: 583814 - DNA, 541 bp, Homo sapiens
gtatataaatcaatgcaacagtaccctgtaatagtatcttaacctggagaaatatcacaagactataaaaaaatgcttttagcaaaggtgtcaactttgcccctatatcatcgatgaaatgtcagcttgaaagtctaggtatgttggaaccattagagagaaaaagaagggaagacagatkaaagaggccagaaagtaggcaatttaaaatgaaaagtttaggctgggtgcggtggctcatgcttgtaatccctgcactttggggggccatggcaggtggatcacctgaggtcaggagttcaagaccaacctggccaacatgatgaaaccctatctctaccaaaaatagaaaaaaaaaaaaaaagtagctgggtttggtggcgggtgcctgtaattccagctactttggaggctgaggcaggagaatagcttgaacccgggaggtggaggtggcagtgagccgagatcacgccattgcactccagcctgggtgacaagagtgaaactctgtctcaaaaaaaaaaaaaggaaaagaaataaa

SEQ ID NO: 583815 - DNA, 621 bp, Homo sapiens
caggggggctgaggaaagagggcatcttttaaagacaaagaaaagaagttcatgtaagctattttgaaaccaaaggttacaaagaccgaaggtaataggggttacagaagttggtgttagctaatttctaggtgagtatccttgggcaagcaacttacctggaatgctacaatcttgaaaaagttcttgctataagttttgttcacagtttatgtggaggaatgtcttttgagaagtcctgttacaaacattcaagcatgggagcttctttctcatggcctctctcaactctattttgttagaatttgacacaagtggctccgttttacaacccaracgtattctttctttagtattctctaatttgactaatgggttcaccatcccttctaatcaagaaacccaaaagatttagtggactttttaccaccttcacaccttctcatttctaaagagtcaccactatcttttcattctattacaacatgacttgtaattcttcctgctcctttcctctactctactatagtatccccagtgactagtaatgtcggacatataccagattctcaataaatatttgttgaattaattaactcattaccaccttttgatgtttct

SEQ ID NO: 583816 - DNA, 621 bp, Homo sapiens
caggggggctgaggaaagagggcatcttttaaagacaaagaaaagaagttcatgtaagctattttgaaaccaaaggttacaaagaccgaaggtaataggggttacagaagttggtgttagctaatttctaggtgagtatccttgggcaagcaacttacctggaatgctacaatcttgaaaaagttcttgctataagttttgttcacagtttatgtggaggaatgtcttttgagaagtcctgttacaaacattcaagcatgggagcttctttctcatggcctctctcaactctattttgttagaatttgacacaagtggctccgttttacaacccagacgtattctttctttagtattctctaatttgactaatgggttcaccatcccttctaatcaagaaacccaaaagatttagtggactttttaccaccttcacaccttctcatttctaaagagtcaccactatcttttcattctattacaacatgacttgtaattcttcctgctcctttcctctactctactatagtatscccagtgactagtaatgtcggacatataccagattctcaataaatatttgttgaattaattaactcattaccaccttttgatgtttct

SEQ ID NO: 583817 - DNA, 504 bp, Homo sapiens
aactatctgatctttgacaaacctgagaaaaacaagcaatggggaaaggattccctatttaataaatggtgctgggaaaactggctagccatatgtagaaagctgaaactggatcccttccttacaccttatacaaaaatgtatatcatttttttgattttttkattttaattttttggggtacatagtaggtatatatatttatggggtacatatatatatttatggggtacatgttttgatacaggcatgcaatgtgtaatataatcacatcacttaaaatgggatatctatcccctcaagtatttatcctttgtgtatatctttattgaggagcatgaatgggaagagactgacatcagtgaagacaattggtttctacagcctatattttcagatgtatatttctcattaatacaattcagtcactgcaaaacacatgctaccatacttgaaccacaagtgtgatagaagcaggttggaaattagtggctttgatatatt

SEQ ID NO: 583818 - DNA, 504 bp, Homo sapiens
aactatctgatctttgacaaacctgagaaaaacaagcaatggggaaaggattccctatttaataaatggtgctgggaaaactggctagccatatgtagaaagctgaaactggatcccttccttacaccttatacaaaaatgtatatcatttttttgatttttttattttaattttttggggtacatagtaggtatatatatttatggggtacatatatatatttatggggtacatgttttgatacaggcatgcaatgtgtaatataatcacatcacttaaaatgggatatctatcccctcaagtatttatcctttgtgtatatctttattgaggagcatgaatgggaagagactgacatcagtgaasacaattggtttctacagcctatattttcagatgtatatttctcattaatacaattcagtcactgcaaaacacatgctaccatacttgaaccacaagtgtgatagaagcaggttggaaattagtggctttgatatatt

SEQ ID NO: 583819 - DNA, 504 bp, Homo sapiens
aactatctgatctttgacaaacctgagaaaaacaagcaatggggaaaggattccctatttaataaatggtgctgggaaaactggctagccatatgtagaaagctgaaactggatcccttccttacaccttatacaaaaatgtatatcatttttttgatttttttattttaattttttggggtacatagtaggtatatatatttatggggtacatatatatatttatggggtacatgttttgatacaggcatgcaatgtgtaatataatcacatcacttaaaatgggatatctatcccctcaagtatttatcctttgtgtatatctttattgaggagcatgaatgggaagagactgacatcagtgaagacaattrgtttctacagcctatattttcagatgtatatttctcattaatacaattcagtcactgcaaaacacatgctaccatacttgaaccacaagtgtgatagaagcaggttggaaattagtggctttgatatatt

SEQ ID NO: 583820 - DNA, 525 bp, Homo sapiens
tattcaataaagaaacatttgatagttagaccaaataaatatttagattatgacccatttgtaacagggtgatataaaataattaaaagaaccagagaagatgcaagtagaaagggcagcaagttacacattcaatgtattaaagcatttatttgtaagggggaaaaatagaaatggaggaccctgacacacccatttatgtctagaacccacagcagagagctattaacatggggtgacagtatagtaactatgtgtaaggtctctctgtaaatgttaggagaaaataattgaaagcaagttcaatgacaaaataaaatgtatgttaaagttaaatgattagcycacaggcagcataaaaactgagggagtgtaaatagtttagtttatgtagccagcagtaaaagagcaaaaatataaataaaaaaagaatgaccaaagcacatagatttaccagaattttttatgtatactttaaatgtcaaacagcctcaaaaagtaaaaacttaggcagatgcttcaatg

SEQ ID NO: 583821 - DNA, 525 bp, Homo sapiens
tattcaataaagaaacatttgatagttagaccaaataaatatttagattatgacccatttgtaacagggtgatataaaataattaaaagaaccagagaagatgcaagtagaaagggcagcaagttacacattcaatgtattaaagcatttatttgtaagggggaaaaatagaaatggaggaccctgacacacccatttatgtctagaacccacagcagagagctattaacatggggtgacagtatagtaactatgtgtaaggtctctctgtaaatgttaggagaaaataattgaaagcaagttcaatgacaaaataaaatgtatgttaaagttaaatgattagctcacaggcascataaaaactgagggagtgtaaatagtttagtttatgtagccagcagtaaaagagcaaaaatataaataaaaaaagaatgaccaaagcacatagatttaccagaattttttatgtatactttaaatgtcaaacagcctcaaaaagtaaaaacttaggcagatgcttcaatg

SEQ ID NO: 583822 - DNA, 609 bp, Homo sapiens
aaactattatcagtgggcaaaggatatgaacagacacttctcaaaagaagtcatacaagtggctaataaacatgtaataaaaggtaaacatcactaatcatcagagaaatgcaaattaaaaccacaataagataacacatcacaccagtcagagtggctattattaaaaagtcaaaaaaccacagatgttggtgtggatgtggagaaaagagaatgtttgtacactatgggagtgtaaattagtaaaacctctayggaaaacagtaggaagatgtgtcaaataactaaaaatagaactactatttgacccagcaatctcactactggctatctacccaaaggaaaagaagttattatatccaaaggacacccatactcacatgtttattgcagcactatccacaatagcaaagtcatgaaatcaacctaagtgcacatcaatggatgataggattaaacatatatacactatggaattctatgcaaccataaaaaagaatgaaattatgttttctgtagctacatgagtaaagttgggggccattattctaagtgaaataactcagaaacataaaaatcataaatcacttattctaacttttaaagggg

SEQ ID NO: 583823 - DNA, 575 bp, Homo sapiens
agaagcaactactacaccagatgcacagatatcaatgtgaggatacaggaagcatcaaaaagcaaggaaatatgacacctcccaaaaatataattttctaacaacatatcccaatcaaaataaatccatgaattcccagaaaagtaattcaaaatgctgagtttaaagaagctcagaaagataaataaaaatkattaaagcaatacagagaaatcagaaaaacaagtcaggatatgaatgagaaattttccgaatagttatttaaaaaaaatcagaaatactgaaaatgaaaaatttattaaatgaaataaaaatacatctgaaagcttcaataataaacaagattaagcagaagaaagaatctcaaaacttgaatatgggtgttttgaaattgaattatcaatgtccctgagggtgaagagaaaacaagagtttagttaagatcctatttaaaaaaacaataaatcaaaactttccaagtccagcaacagatttacacatccagatacagaaggcccagtgatccccaaacagctacaataccaaaaattatccacagcatattatagtccaac

SEQ ID NO: 583824 - DNA, 575 bp, Homo sapiens
agaagcaactactacaccagatgcacagatatcaatgtgaggatacaggaagcatcaaaaagcaaggaaatatgacacctcccaaaaatataattttctaacaacatatcccaatcaaaataaatccatgaattcccagaaaagtaattcaaaatgctgagtttaaagaagctcagaaagataaataaaaatgattaaagcaatacagagaaatcagaaaaacaagtcaggatatgaatgagaaattttccgaatagttatttaaaaaaaatcagaaatactgaaaatgaaaaatttattaaatgaaataaaaatacatctgaaagcttcaataataaacaagattaagcagaagaaagaatctcaaaacttgaatatgggtgttttgaaattgaattatcaatgtccctgagggtgaagagaaaacaagagtttagttaagatcctatttaaaaraacaataaatcaaaactttccaagtccagcaacagatttacacatccagatacagaaggcccagtgatccccaaacagctacaataccaaaaattatccacagcatattatagtccaac

SEQ ID NO: 583825 - DNA, 614 bp, Homo sapiens
gtgatgtgagaaggtgtcacagagcaagcaaaacttgcaggccagacagagacagaattattggagacctgtccaagtgtgcctgcgtagtctgtgacaaaggggcaaaggctaaatggaacagatgtatggtcatgtggagaccagagagcagakggacctgaccactatatccaaagcagccccacaatacacacccaacaagatatgcccttttagcctttcatcctgtttgtttcctttatatcatgtttcacaatccatactcatcttgtttttctattcctttaactgttagcaacctatctcccccactataatgtaagttctgttagggcagagtccttgtttgtcttctacagcactctgttcataaatacccagcactgtaccaggcataaaataatgttcaaaaaataaaagttgaattgataacaaagaatatgagctgaaaattaaatgattctttcaacaagcattactggataaactggggaattatattgtcaagtattaaaagaattccctgacaccttcaccctaccacattgtcttccaccacagaactgtgttgaataagctccccactgccacaggaggagtctcatagctca

SEQ ID NO: 583826 - DNA, 565 bp, Homo sapiens
ttctgtgtctggcttacttcactttgcataatgtcaagtgatgtacaaaagttaactcaatggaataagacctacacatatttccaaaaatcataaaactactagaagaaaacatagggaaaaagcttattaacattggtctagacgatgacattttggctatgacagtgaaagcataggcatcaaaagcaaaactaggaaagtgggattgcatcaaactaaaagcgtctgctttttagcagttttttcattattatttatttattattattattatttgagatggagtcttgcattatcgccagggctggagtrtagtggtgtgatcttggttcactgcaacctccgcctcccaggttcaagtgattctcctgcctcagcctcctgagtagctggaattacaggcacccaccaccacatctagctaattttttgtatttttagtagagatggggtttcatcatgttggccaggctggtctcgaactccttgtgatttgcccacctcggcctcccaatgtgctaggattacaggtgtgagccaccacgcccggctagcagtttta

SEQ ID NO: 583827 - DNA, 541 bp, Homo sapiens
agataatctttgtgttttttctcataacgcagtctctttcagaggatattcactgcagggtatttccttacaccccaaaagaggggtgctatataaggatatgacctagtcatgaaatctctacttaagaatgtacagtgcttatttctagatgttatctggaagtctaactgaaaagctctcaaatcaataggatacgttttgattattaattagcattttcatgacatcttaatgaatgcttccattgtgctttatttaataaattactgattttattgccccctttattcaytggtaatttaaagaagtttataatgtcaatttcttgtgttttttctaaagattaaattcaaagtgctattgtacaaataagcagagctagaactatcacagatgagaaaggaattggctgaatatctttatccttaatgccgcagtgttatatgtgtacttaaagcaatttgctcattaaacagaaaactattagagcagcaagcaaaaattctgccaatatcagcagaaagcattagtttggagt

SEQ ID NO: 583828 - DNA, 647 bp, Homo sapiens
acagtcttcttttctctggacaaagctctatgtacctgtgcattttgcatattttaaaataagggcttgaattgggagaatttttcaagactacagtgaaatgtgatcctaggagactatcaccaaagcagcaaatgctaaacatgatttttttttgtattgaatgcataaacacctttttttttgcatttttctccatgatattttgatagaactattgaaaatactctagggaagagaaaagtttttaagaggtgcttttaaaaaatcaacttaattatatagttaagtcctttatttgtaaattaatttatgtaattcaagtagatatatgtgcttctttaccaaaaactgagctcctatagattatattttgcatcatcaaaattatcaacaatcccctttaacaactagtaaatgccacctgaaattttccgaaattgggatcatacagttggaaaaaaattgaatgaataaaaattktaattgactgaaccagtctccagaatgaacatcctactctgaaattatcttccagtttcctgttttgcactatcaaactctgtcttatctctttcctttttctctttttaccttgatgcatgcatatagacatatgtagccacacacctgtcactctctacaca

SEQ ID NO: 583829 - DNA, 542 bp, Homo sapiens
gaagtgtacagccacattctgatgtacttaggaatgactctgtgacttactttgaccaaataagtgtggaagtgacatgttttatcagtttcctccttctccttataatgaaatgaacagtataccagaatagtagctacttcctcaacctgtatccagtgctgaagatgacatgaaccagaatctaagtccctgcaatgaacatttatgtgattgagaaataaaactttgctcctgtaggttactgaaatttggggattgtttgttaccacagtaaacaatcctgrctgataatccttctctccagaagagaagtagttatcagagatatcttcagttctaaagatgaaaggcctattgcctgataaacattcaccctagctgcagataagatatcaacaataaaacaatttaagaataacataacgcaattatctctttgtgaaatataatttgaggtgaatttttgaatgctgtgcaaaatgattggaaacaggtgaagtaaataattaaaaggcttcacagaagaaagggtctacttg

SEQ ID NO: 583830 - DNA, 542 bp, Homo sapiens
gaagtgtacagccacattctgatgtacttaggaatgactctgtgacttactttgaccaaataagtgtggaagtgacatgttttatcagtttcctccttctccttataatgaaatgaacagtataccagaatagtagctacttcctcaacctgtatccagtgctgaagatgacatgaaccagaatctaagtccctgcaatgaacatttatgtgattgagaaataaaactttgctcctgtaggttactgaaatttggggattgtttgttaccacagtaaacaatcctgactgataatycttctctccagaagagaagtagttatcagagatatcttcagttctaaagatgaaaggcctattgcctgataaacattcaccctagctgcagataagatatcaacaataaaacaatttaagaataacataacgcaattatctctttgtgaaatataatttgaggtgaatttttgaatgctgtgcaaaatgattggaaacaggtgaagtaaataattaaaaggcttcacagaagaaagggtctacttg

SEQ ID NO: 583831 - DNA, 542 bp, Homo sapiens
gaagtgtacagccacattctgatgtacttaggaatgactctgtgacttactttgaccaaataagtgtggaagtgacatgttttatcagtttcctccttctccttataatgaaatgaacagtataccagaatagtagctacttcctcaacctgtatccagtgctgaagatgacatgaaccagaatctaagtccctgcaatgaacatttatgtgattgagaaataaaactttgctcctgtaggttactgaaatttggggattgtttgttaccacagtaaacaatcctgactgataatccttctctccagaagagaagtagttatcagagatatcttcagttctaaagatgaaaggcctattgcctgataaacattcaccctagctgcagataagatatcaacaataaaacaatttaagaataacataacgcaattatctctttgtgaaatatamtttgaggtgaatttttgaatgctgtgcaaaatgattggaaacaggtgaagtaaataattaaaaggcttcacagaagaaagggtctacttg

SEQ ID NO: 583832 - DNA, 588 bp, Homo sapiens
tgataaacttttaggataaatggrtttgcatctatctcagaaaaaatgacaatcacaatcttgcttaacaatatggtaaactatagaattttgtttctgtgaaaattttagagctttcaaaatttatttcaaattatcttagaacttgtttataaaagtgaagttggtggaaagttaagcttttcaatttgttctctttggttaaaatgacatgtcaacacccagactgagtatagctatttaagagttaaagagacttgcttaaatatagaaaatatttgtttttcttgctcaaataatattccaatatatgttaaatctaggaaatatctaataatgttgatctttaaaattcataatccatcagttatttggctgggagagctattaaagggaaactcctgatgcttcaaaaattataattcatctcatattacaataattattcgttatatcctgtccagaatattacacaattgtggtgatttgtagctgactgaaggtggtagggaaaattgctgaccaagttctgttcaacaagtttagttgagaggataacttccaccttgttttagagtagagcatctg

SEQ ID NO: 583833 - DNA, 563 bp, Homo sapiens
ttcgtctgtgtctgcctcaatactggtaatctctcccctcctcctggcattactcttggagtgaaaggtagttgactaagattaaaagggaatatgagtgggacctttacaagcttcctctcctccctacttgccagattgtgttgtttgctttggaatttatataggagaaataatttgaaaatttttgagcagtgcacttcaattttcttcttcatrtatgcccccaaattttgaaaacgaatatataccctcatataaaattgatagctcaaattatttttataaatttaaatggctacaaagactattatatacccttgtatacaattgatagctcaaattatttttacaaatttaaatgactacaaaggctattatctccagcctgttgtatatgatatatcatcacagatcaaatctttatgtctgcctcaaattcatatgttgatgtcctacccccaaatgtgatggttttcagatgtgcggccttaggtttagatgccattatgagagtgggggccccatgatggcatcaatgtccttataagaagagaaagagc

SEQ ID NO: 583834 - DNA, 582 bp, Homo sapiens
  misc_feature 543, 544, 545, 546, 547, 548, 549, 550, 551, 552, 553, 554,555, 556, 557, 558, 559, 560, 561, 562, 563, 564, 565, 566,567, 568, 569, 570, 571, 572, 573, 574, 575, 576, 577, 578,579, 580, 581, 582: n = A,T,C or G
agacaataggcaaaatgagggtattagagacaaacactgagattacttgggatgaatggactgccagtaacattttccagaatacaaatgaccacaaaagaaaggtatgagatagaagaagaaaacttgagacaaccacatagtaatcatgtaggtaatacaaaatcattattaaaattttaacataatttttagtgttaaaaaataagatagaactaaaatatcaccttataaaagtttagccaagagagaaaactgtggcgtgagataaattgcttataggttcttgcatggttctgaagagttaacatggattatctttacggtaaatgtttatgttgaaatttctagagtaactgctagaagaagcaaaatagagtatataactatgaattaagagagaaatatggttggggtggggctttcagtacatccaaaataagaaaagaaaaacttaaaatgctttagaaaacattaattttttgcaagtrctgtgtacatagttgttttgttctttgacagacaccaaatgtccactacagnnnnnnnnnnnnnnnnnnnnnnnnnnnnnnnnnnnnnnnn

SEQ ID NO: 583835 - DNA, 605 bp, Homo sapiens
gtggggaaatggaatcaaaggtggcctgataggctggtaggttggagaatrtcttccgtgaggccagtctattctattcttgggaggagctgaatgctggctcacctggaggtgagccagaggtcagggatcttgaggaaggttggttaacagtcattttgttccagctgatcagttgggacaagcagttccattagtcatttctgaggcaaagaatgggaatttggagggtctgtgtctggccttgccttatgtgaacaagggggtcatctatgagtcttgtctaagtcatattgagaaaggtggtttctggcaatgtctttttctggaacaaaagagtgatggaatttcttaacctttaaataaaatttaatattgtcatcactaacatttatgaagtaccttctaccatataaccattgtactgggccttggagatgcagagatacgttttttaaaggcagatttgccataaatgtaatgaaccttaggctctggtgaccctcaactgcacaggttgctgtgagatactgacagctgcagagcattctagatggtagaaaaagccaggttcctattaggaaatatttctatgtaagcatttc

SEQ ID NO: 583836 - DNA, 605 bp, Homo sapiens
gtggggaaatggaatcaaaggtggcctgataggctggtaggttggagaatatcttccgtgaggycagtctattctattcttgggaggagctgaatgctggctcacctggaggtgagccagaggtcagggatcttgaggaaggttggttaacagtcattttgttccagctgatcagttgggacaagcagttccattagtcatttctgaggcaaagaatgggaatttggagggtctgtgtctggccttgccttatgtgaacaagggggtcatctatgagtcttgtctaagtcatattgagaaaggtggtttctggcaatgtctttttctggaacaaaagagtgatggaatttcttaacctttaaataaaatttaatattgtcatcactaacatttatgaagtaccttctaccatataaccattgtactgggccttggagatgcagagatacgttttttaaaggcagatttgccataaatgtaatgaaccttaggctctggtgaccctcaactgcacaggttgctgtgagatactgacagctgcagagcattctagatggtagaaaaagccaggttcctattaggaaatatttctatgtaagcatttc

SEQ ID NO: 583837 - DNA, 591 bp, Homo sapiens
gtaactatatctttacttcatctcatttcctctctaaaaagtcatctggatgtgaaagtatacacacaaggtaaaatatatagtatattatagtgtaaaagtatgatttttaaagaacttggaaaaagaaagaagtttaatgggacttatattgggttctatagatgcagattaaaactaatagttacagtagttttaattcctatgtttcatgtatagaaaccatgctatcattcttctaaatctgtaagctttttgctgtagatttaggatttagagcattatatctaattctaaaacaaacatttgaattatgaagaagttcttatgctgcagaaatttatttaaatttagactgtcattagcatcaagaatattttttattccattaacaacttttaattaatcatacaatttgcttttatttcagaaaataccacgtatctttatagactaggagctcagatatattatttccagctttcttgatgttacctcawattgaagttgccaatggtaggactgcacaatctgaatacatatgatgagatattttatgcctcgttttccatctgcttgagttagcaccct

SEQ ID NO: 583838 - DNA, 532 bp, Homo sapiens
cagtttttccttgtcaaaatcataaaaagactatggtaatcctacaaattctgattcacccgtgtcaaagaaaggaaggaagcttcagaaggttgttttcttttctccttcagagacttacaccaaattattttgaatttgcatttttttccagtctttaattcttgaccagtaagaagtctctcaactctagtcaytgaatctaccaaaatattttgtttcaaaaaataagaaaaaaatattgcatttttctacatttttgagtagaagaatctccctaatcattggttataaaaaatgaaaatataacactgaacaagttaatattacaaataacaaaataaatgcccactgtgtaaaaataatgcaaaattcatatttcaaagttaccataatttgaatacataggtctcttagagtcaaaaacctcataaaatgtgtgatgacatttttcaggacatatgtagcatcttctaatcagatgctaaatgtgatctattaactatcacttgggttgctgcagccctacatc

SEQ ID NO: 583839 - DNA, 576 bp, Homo sapiens
cttcttcaatgataagctgaagttccgaaaaaaaaaaaaaagacttaaaatgactatgcacatgatttttaaattactctccatgtttatggagtaattgagaaacaaactaagtttcatagtttctgaggccctgataggaagccaagtaaggatttaatatgataaaaaacaaacccacaaaaaatcatacattaaaatactagtaagataaataattgctgtaagtgagcttctatattattaaaactttttggaatgtaattaaaattaattttagagaatttttaaaaatagttatgtaagaatcaatttctattttgaaaagtgtattatgactactaatgctccattggtttaaataaataacactggaattctatattttatcataatcatctttgttactaatatagctgattattatactttcattaatgccctttattcaacgtatatttttattctttgtacactcaacaagactttgtttagaagwttctgtagtcttaacctgcctacctcttctgaaatgtctccttattctctttttatctctaagctttctattaaaaa

SEQ ID NO: 583840 - DNA, 607 bp, Homo sapiens
atgcaattgtcttccattaaactgccttctgcaccaccttttgtagggcctaagtcctgtatcttaatgrtacatttttataatttgaaaaattagatgtttaaaaaaggtattaaagaaaatataagtcattgagcatttttctctatacaatcaaaagaattaataatatattggctgaatgctttagagaaagacttggaaatagtctgaaacattttttctttaaagaaaactattttgtattttaaaagaacctatttttcacacataaaggggacagacttttgttttataaaatatactaaacatacattctagtgtgtacccaaggcagtgtctgaccatctgctggtaaaatttaagggcatttcaggtcaactcaagcaaataattttcagttcttcaaattaggtattcctgtcaatattgtattacatttgacatttgcactgttttattgggttagagccctaagcagaggaatttttttaaatttacctgatatgtgttcaaatattccctagtacacttcaaagggcctaaaacgtacgttttgaatgaataaataatcaaatgcataaatttgcactgtggaatttacatg

SEQ ID NO: 583841 - DNA, 633 bp, Homo sapiens
ttaaaaatgtattgacttgaataattttccagtgcagtctacttgtctacataaatattgttagcaaattagacatgaaatggtaacattattgaacattggctgcatcttaaccatcctgttaatttcatttgcatagtctttgttcaagtattttacagttcaagctttcttttggaccataatccaaacatatttaaaaagtaaaaatgaagtcctttgtgggtattttttactttcataggagaaggtgtaatttaaacctgttggttgataaaatacaaaaagtatcttgggatctaagtttttcttcgggataccaatttgagtggtctgtcactttctgcttacaacatactgtgcttatcaaactaaactccccaaaatggaactcacgagcctctatgatayggctcctgactacatgtccaactttaccttcagtcaacctatggcttctatattctcatgagtgaacgtattagctttctactcctagaatatctcaactttgccattttaggagttttcacttgctttcccatatgcctgaaatgcatatgcttgattagtcccgtggttgtctccatagcgccctacagttcttggatttaaatatcctagatatttaaa

SEQ ID NO: 583842 - DNA, 522 bp, Homo sapiens
gacaccttcaccctaccacattgtcttccaccacagaactgtgttgaataagctcccsactgccacaggaggagtctcatagctcacagtgaagctggagtataaagcataagattgtcacctctgaagttaaaatgcatggtccaggtatatgaaggaaagatttatgagaatctaattactctgagtttttccttcttctaagcaaataaagactccatgggcaggggcaggagagaggggaagatgaaagtcattggggcttgagaagaatgaggagtgaagatgatgaaattatttagtaaaatgtaggaaaaattgtacgtccagagaattagaagagttacagatgaatctgtagaatctggatgaataaccatggctgagaaccatacagcttccccctccttccactgaaataacatgacataagtgttctggagcatacatgtcactccaaagagaaggaatagatggaggtaatgaatactaacctgactaagtacactacaaattgtcaaa

SEQ ID NO: 583843 - DNA, 616 bp, Homo sapiens
tagcttgttattaccgaccttctgaagcctagttccgtcaactcgtcaaagttattctctgtccagctttgttctgttgctggtgaggagctgcgataatttggagaagaggtgctctcgtttttagaattttcatcttttctcctctggtttctccccatctttgtggttttatctacctttggtctttgatgttagtgacctaccaatggggttttggtgtggatgtcctttttcttgatgttgatgctgttcctttctgtttgttagttttccttctgacagtcaggtccctcagctgcaggtctgttggagtttgctggaggtccactccagaccctgtttgcctgggtatcaccagcggaggctgaagaatagcaaatattgcagaacagcaaatattgctgccttayccttcttctggaagcttcatcccagaggggaacccacatgtatgaggtgtcaatcagcccctactgggagatgtctcccagttaggctacacaggggtcagggacccacttgaggaagcagtctgtccgttctcagagctcaaacgctgtgctggaagaaccactgctctcttcagagctgtcagacagggacgtttaagtct

SEQ ID NO: 583844 - DNA, 571 bp, Homo sapiens
taacagtttcattccttcttttttcacattttatttgttctttttgtcaggaaatggtaagggaattcaaggattctggggacttggctatttggccttgaatgtacacatgcagggagtctgctccctgcaggtagstgccatgcaaaagcaaaggatcaataatagccatgataatattgaataataataaagtgggataccaagacattactgagttacaataattagtgttgaatttattcaggataagcaaatagatcaagtgaattgtaaatttaattgtaaaagtaaaaaaaaataaagatgaccgtatattcttatagccagaatgtataaagaacactaacaaaacaatttggaaaagacagctattctggttatgtatcactgtgtaacaaactgctccaaaacttagaggcttatacccactaccatattcttatagctcatgatattgttggtcagcaatttggacagggtgcggtgggggatttttctgccccacgtggcaccaacagagtcatctggtggtatatgctgggagatgagctggtgtggagggtctgag

SEQ ID NO: 583845 - DNA, 618 bp, Homo sapiens
caatttggacagggtgcggtgggggatttttctgccccacgtggcaccaacagagtcatctggtggtatatgctgggagatgagctgstgtggagggtctgagacagcttcatttacatttctgtcaccttgttggggatggctggaaggctaagcctagctgagatgggatacttgcacttgcttctccagagtggtgttctcacggtaactgggcttcttatgtggcagctcaggactccaaaagtgaacatttcagcaaataaaaaagcagcttcataactttggtaacctagacctggaaatcacatagaatttcttctaatcatactctattgaccaaagcagctgcaagccctcaaagatataaaggaagaaaacaatgatcttgctatttgattgaaggaatgtcaaagaatttatggccatgtcaaaaaattgtcagagcccaacctctggtcgcaaatcattttcatttcttccatgtgaaaaacaccctcatcccttttaaactcccttcccaaagtcttatcctgtgtggctcaaggttcacaatcttgtctcataatctgaattatgtccatgtgtgaaggagatgctttaggttcagtttctagg

SEQ ID NO: 583846 - DNA, 444 bp, Homo sapiens
gtagcttgtgttcacagctgaatggttttctgagcttactccctgtacataaaagttcagagttcaaatgcctcttttcattttgtactgtctatcccctctagtccaagctgatataattcctttaggttgcttatatatcaatttatgagctactccattagacaaaaagttcactcacaaacctttttgagagtaacctccccaactcataacaccactgtgataatatcgtcaggataatacctttagaagcactatggtctagcagagagttttaaataatrcccttaacattacttaagactcttgtttaactgaggtgatctatgaggcgccaccttaagtccttctaacatcttaataaagaaactttcagccctacctggattccccagggtaatattttactggtaatgcccaggatttgatctttgccttgca

SEQ ID NO: 583847 - DNA, 497 bp, Homo sapiens
tacctggattccccagggtaatattttactggtaatgcccaggatttgatctttgccttgcagctatattttattttatggatattttgtgggatataagactaccttgagcctttatgttttttccaaattctactaaaaaaaaaaccctaatattttgttctttagttcatctgtctcatctctcattttattataggcagctagaagaagccaggcagcatcttcaacactctgctcagatgtctccttagctagaccattaagtttattaggtacattgacaactttttatgttaccacaggcaacagtattgccaaactttccacagctacrtagccagggtctgctttcttccaccaccaataacagtgtactcattttcttttgagcctttaccaatagcatcttcaaggctgctggtcatctccaaaccgatgccacatacttttggttttattataacacttatcttactttcaggtaccaaattctg

SEQ ID NO: 583848 - DNA, 644 bp, Homo sapiens
ctattctcttattatgcattaatttttgtatagtatcaattgcttctctcctttatatacttatttgttcatttgtttattatcttatcccaccatcttataaaattaaaatctcaggaggactttttgttggctttttcattgcaaaatcaagkgcttagaatagtgcctagcacggcgggggaatagtggtgggctcacaccctgtaatcccagcacttttgggaggccaaggcaggtggatcatgaggtcacaagatcaagaccaacctggtcaacatggtgaaatcccgtctctactaaaaaatacaaaaattagctgggtgtggtgtcacacgcctgcagtcccagctactcaggaggctgaggcagaagaattgcctgaacctggggagtggaagttgcagtgagctgagattgtgccactgcactccagcctggcgacacagcaagactctgtctcaataataataataataataataataataataataataataataataatataagaatagtacccagcacatagcaggtattcagtaaatatttctggagtgaataaaatttcctctaacctcttagttccagcactcttgttagatgcatagtgtcaatatttttatgtttctttatgttgt

SEQ ID NO: 583849 - DNA, 534 bp, Homo sapiens
ttctggctaatgaagaagaacacacaatcatattcaatttaaaaaattttcaaaagaacctgtcaaaagttcatattacagtagtaaaaatgataatttctccaagcaattcatatttataaaagcaaggaatttgataccccaaataaaagtcttttgatttttgaagtttgaaaagcagagtcaagttgaagcttccgtagtaccaggaaagccagtttttatttcaaatacttcaaagccatgactttctgattttaaaaagttaaacaattgaaaggactttgactttattaagtgttatctcctctacacaagaaagtaaggttttgaatagtcattcaaatgcacaacatctacacatacctcctttttccaatacatactgatactctctcttgaatatagaacagcattttcaataaatggtacttgatgaatgtgctttcagtgaaagtatgagggttgagaaaaaagaaaagttatattgtagaaatggacacccatyattattaaggtaagagaacaaaaaac

SEQ ID NO: 583850 - DNA, 571 bp, Homo sapiens
atcattattaaggtaagagaacaaaaaacctatttgttcttcacaagtccattcgcatatggttgagtttgagacccagaactgcattctaaatatgtactctcaccttagtatcattgctgggttctttctattccattgttcattctactttattattccagactcagtaagccagatattcaattttattaattatgctcagtaaaattatttactgcattgggagtcatttagttatttcagttatggtttatttgaagtctgaaagttaattcagaagacattcttgggtagaaactagaytaactaaatggaaatagcttttaattaatttttaaatctatttccccattgtgtctaagtttgtcttagttggcttaatgtcagctccctaacctgctagggataatagtgtaattactgacatataacacctatgttaacattttgtcaaatataccttatttgtaaaaacatatataaacatttcaggatttgaagtgttttgccatgtattttatactttggctttcaattttaattttttttctatcagttcctatgacca

SEQ ID NO: 583851 - DNA, 571 bp, Homo sapiens
atcattattaaggtaagagaacaaaaaacctatttgttcttcacaagtccattcgcatatggttgagtttgagacccagaactgcattctaaatatgtactctcaccttagtatcattgctgggttctttctattccattgttcattctactttattattccagactcagtaagccagatattcaattttattaattatgctcagtaaaattatttactgcattgggagtcatttagttatttcagttatggtttatttgaagtctgaaagttaattcagaagacattcttgggtagaaactagactaactamatggaaatagcttttaattaatttttaaatctatttccccattgtgtctaagtttgtcttagttggcttaatgtcagctccctaacctgctagggataatagtgtaattactgacatataacacctatgttaacattttgtcaaatataccttatttgtaaaaacatatataaacatttcaggatttgaagtgttttgccatgtattttatactttggctttcaattttaattttttttctatcagttcctatgacca

SEQ ID NO: 583852 - DNA, 579 bp, Homo sapiens
atgcttatgactatgttatgaacgtataaatatgtttaataataggccaaatagattgcattcttttctaaggattttgtaacctctagaacagtggttcccaacctttttggtaccamgggccagtttcacagaagacaatttttccactgggggtggttttgggatgattcaagcacattacatttattatgcactctatttctgttactattacattgcaatatataatgaaataattatacaactgaccataatgtagactcagtgggagccctgagcgtgttttcctgcaactagatggttctatctggggatgatgggagacagtgacagatcatcaggcattggattctcctaaggagcacacaacctaggtccctcacacaggcagttcacaatagggttcccttcctgtgggaatctatgctgccactgatctgacaggaggcagaactcaggcactagtgcaagaatgtactgtaaatacaggagtagctgtaaatacagatgaagcttcacttgctcacccacctttcacctcctgttgtgtggtccagtttctaacaggccaaggac

SEQ ID NO: 583853 - DNA, 579 bp, Homo sapiens
atgcttatgactatgttatgaacgtataaatatgtttaataataggccaaatagattgcattcttttctaaggattttgtaacctctagaacagtggttcccaacctttttggtaccacgggccagtttcacagaagacartttttccactgggggtggttttgggatgattcaagcacattacatttattatgcactctatttctgttactattacattgcaatatataatgaaataattatacaactgaccataatgtagactcagtgggagccctgagcgtgttttcctgcaactagatggttctatctggggatgatgggagacagtgacagatcatcaggcattggattctcctaaggagcacacaacctaggtccctcacacaggcagttcacaatagggttcccttcctgtgggaatctatgctgccactgatctgacaggaggcagaactcaggcactagtgcaagaatgtactgtaaatacaggagtagctgtaaatacagatgaagcttcacttgctcacccacctttcacctcctgttgtgtggtccagtttctaacaggccaaggac

SEQ ID NO: 583854 - DNA, 579 bp, Homo sapiens
atgcttatgactatgttatgaacgtataaatatgtttaataataggccaaatagattgcattcttttctaaggattttgtaacctctagaacagtggttcccaacctttttggtaccacgggccagtttcacagaagacaatttttccactgggggtggttttgggatgattcaagcacattacatttattatgcactctatttctgttactattacattgcaatatataatgaaataattatacaactgaccataatgtagactcagtgggagccctgagcgtgttttcctgcaactagatggttctatctggggatgatgggagacagtgacagatcatcaggcattggattctcctaaggagcacacaacctaggtccctcacacaggcagttcacaatagggttcccttcctgtgggaatctatgctgccactgatctgacaggaggcagaactcagrcactagtgcaagaatgtactgtaaatacaggagtagctgtaaatacagatgaagcttcacttgctcacccacctttcacctcctgttgtgtggtccagtttctaacaggccaaggac

SEQ ID NO: 583855 - DNA, 633 bp, Homo sapiens
atcttgtagtcttctgttaacggtgctttttgccttggagacctccctgccagagcccttagaccttggaacttgttctctaggtctgcagaaagttaatctagaagatttcttcattgccatcctggaatgagtcagttgttttctagtttcctgtttaattaagaggaagttcttttgctggagtacatttctaaacatattgctaaggaaaaaagtgaattgaacatcaactttttgccatgtctgaaaatgtgcttatcctgatattgcttcagggttgataagttggctggctmcagaattctagattgaaagtattttctctcagaacttaaaaaacattgattcattttttttcatccagaatctgcagatgcttatgagaactcaagactctcatctgattcacattcctttgcaagtcatttttttgaaatctcagaagctttttagaatgttctcatttacaagtttccttctctgcagactccttgaaaatttgtagttcaagggtaattctatctgtgagtctcttattcattcaatatgctgagttttcagtgagctctttgaatctaaaggcttgggtatttcaattgtgaggaattttcttttatcatttatttgcta

SEQ ID NO: 583856 - DNA, 563 bp, Homo sapiens
cttcaaatttgtgtctgttttactagcataagacatatttgtgcacattattgcattagatctttataacacaatagaggtttgctagtcaaataaatattctcattttacatgtgaagaatgactcaggatgtttctgacactttcaaagtcacaacattaataaaatggcaaaaagggatgtcagatgcatatagtagatcacaaaatttgcatccttatcatattgttagattttaagaaaggaggatttttcctgataactcagaaagccctgtttctgaaaccatttggtaaagggaaaaattctgcacatttactactacgactggaatatgtaaccatatcttttagttaatacacatttattacacagcatccatatgtggtagccattgtrttaaactctggggatttggggatgaataagtaaaacatagcgtggccctcataaaacttatagtgtaatgcaataggcagataacagtagatacaaaaataattataatacattttgaattacatgaatgaaagaaaataaccagcagaagctacagggatgg

SEQ ID NO: 583857 - DNA, 563 bp, Homo sapiens
cttcaaatttgtgtctgttttactagcataagacatatttgtgcacattattgcattagatctttataacacaatagaggtttgctagtcaaataaatattctcattttacatgtgaagaatgactcaggatgtttctgacactttcaaagtcacaacattaataaaatggcaaaaagggatgtcagatgcatatagtagatcacaaaatttgcatccttatcatattgttagattttaagaaaggaggatttttcctgataactcagaaagccctgtttctgaaaccatttggtaaagggaaaaattctgcacatttactactacgactggaatatgtaaccatatcttttagttaatacacatttattacacagcatccatatgtggtagccattgtgttaaacyctggggatttggggatgaataagtaaaacatagcgtggccctcataaaacttatagtgtaatgcaataggcagataacagtagatacaaaaataattataatacattttgaattacatgaatgaaagaaaataaccagcagaagctacagggatgg

SEQ ID NO: 583858 - DNA, 453 bp, Homo sapiens
ggccatcgccaatcattctatacgacaaacatttcttctaacatccccacaatatcaccccttaccacaagacctcccttcagcttaatctctcccactctaggttcccacgcygcccctaatcccacttgaagcagccctgagaaacatcgcccactctctctccataccaccccccaaaaattttcgccgccccaacacttcaacactattttgttttatttttcttattaatataagaaggcaggaatgtcaggcctctgagccaagccaagccatcgcatcccctgtgacttgcacgtatacgcccagatggcctgaagtaactgaagaatcacaaaagaagtgaaaatgccctgccccaccttaactgatgatattccaccacaaaagaagtgtaaatggccggtccttgccttaagtgatgacgttaccttgtgaaagtccttttcc

SEQ ID NO: 583859 - DNA, 453 bp, Homo sapiens
ggccatcgccaatcattctatacgacaaacatttcttctaacatccccacaatatcaccccttaccacaagacctcccttcagcttaatctctcccactctaggttcccacgccgcccctaatcccacttgaagcagccctgagaaacatcgcccactctctctccataccaccccccaaaaattttcgccgccccaacacttcaacactattttgttttatttttcttattaatataagaaggcaggaatgtcaggcctctgagccaagccaagccatcgcatcccctgtgacttgcacgtataygcccagatggcctgaagtaactgaagaatcacaaaagaagtgaaaatgccctgccccaccttaactgatgatattccaccacaaaagaagtgtaaatggccggtccttgccttaagtgatgacgttaccttgtgaaagtccttttcc

SEQ ID NO: 583860 - DNA, 453 bp, Homo sapiens
ggccatcgccaatcattctatacgacaaacatttcttctaacatccccacaatatcaccccttaccacaagacctcccttcagcttaatctctcccactctaggttcccacgccgcccctaatcccacttgaagcagccctgagaaacatcgcccactctctctccataccaccccccaaaaattttcgccgccccaacacttcaacactattttgttttatttttcttattaatataagaaggcaggaatgtcaggcctctgagccaagccaagccatcgcatcccctgtgacttgcacgtatacgcccagatggcctgaagtaactgaagaatcacaaaagaagtgaaaatgccctgccccaccttaactgatgayattccaccacaaaagaagtgtaaatggccggtccttgccttaagtgatgacgttaccttgtgaaagtccttttcc

SEQ ID NO: 583861 - DNA, 620 bp, Homo sapiens
caactaacacataaggactcacataaacttaaggtaaatgggtggaaaaagatattctatgataacagataaactataaagcaacagcagttaaaaaagactgagagggacattatataatgataaatgtccttgtccaacaggaaaatatcacaatcctaactatatatgcacctaagtctggagctccaaaatttataaaacaattactactagacctaagaaatgagatgaacagcaacataataatagtgggggactccaatcctccactgatagcactagaccgatcatcaagacagaaagtcaacaaagaaacaatcgatttaaactatgccctgraacaaatggacttactagatatttacagagcattctacccaacaactgcagaatatacattctactcatcagtgcatggaattttctccaagacagcctatatgataggccacaaaacaagtctcaatacatttaagaaaactgaaattatatcaagtactctttcagaccacagtggaataaaactggaaatcaatgccaaaaggaaccttcaaaaccatgcaaatatatgtagattaaataacctgctcctgaatgatcattgggtcaacaatgaa

SEQ ID NO: 583862 - DNA, 479 bp, Homo sapiens
agattttggcatggatgtggtgaaaagagaagacttctacactgctggtgggaatgtaaactagtacaaccactatgggaaatagtgtgtagattccttaaagaactgaaagtagacctaccatttgatccagcaatccctctattgggtatgtacccagaggaaaagaagtcattatagaaaaaagatatttgcacacacatggttatagcagcaygattcgcgatagcaaaaacatggaaccaacccaaatgcccatcaatcaatgagtggataaagaagctgtgatatatgatcgaatactactcagccataaaaagaaattaattaatttgcagcacgctggatgggattggagactattaacctaagtgaagtaactcaggaatggaaaaccaaacatcgtatgttctcagtggtaagcaggagctaagctataaggatgcaaaggcataagaatgacacagtggactttgggg

SEQ ID NO: 583863 - DNA, 608 bp, Homo sapiens
ttcgcgatagcaaaaacatggaaccaacccaaatgcccatcaatcaatgagtggataaagaagctgtgatatatgatcgaatactactcagccataaaaagaaattaattaatttgcagcacgctggatgggattggagactattaacctaagtgaagtaactcaggaatggaaaaccaaacatcrtatgttctcagtggtaagcaggagctaagctataaggatgcaaaggcataagaatgacacagtggactttggggactcaggggaaagcatggggagcggctaagggataaaagactatgaaatgggttcaatgtatactattcaggtgatgagtgtaccacgatctcacaaatcaccactaaagaacttacgtaatgaaataccacctgttccccaaaaacctatggaaataaaattttttttttaaaaaaagagaaagatatccaatcactttgggaggccaaggcaggaggatcactggaggtcagtagttttagaccagtcttgccaacacggtgaaaccccatctctactaaaaacacacaaaaaaaaaaaaaaaagaggaagagagacagatctctctgccacatgagaacatgggg

SEQ ID NO: 583864 - DNA, 608 bp, Homo sapiens
ttcgcgatagcaaaaacatggaaccaacccaaatgcccatcaatcaatgagtggataaagaagctgtgatatatgatcgaatactactcagccataaaaagaaattaattaatttgcagcacgctggatgggattggagactattaacctaagtgaagtaactcaggaatggaaaaccaaacatcgtatgttctcagtggtaagcaggagctaagctataaggatgcaaaggcataagaatgacacagtggactttggggactcaggggaaagcatggggagcggctaagggataaaagactatgaaatgggttcaatgtatactattcaggtgatgagtgtaccacgatctcacaaatcaccactaaagaacttacgtaatgaaataccacctgttccccaaaaacctatggaaataaaatttttttttwaaaaaaagagaaagatatccaatcactttgggaggccaaggcaggaggatcactggaggtcagtagttttagaccagtcttgccaacacggtgaaaccccatctctactaaaaacacacaaaaaaaaaaaaaaaagaggaagagagacagatctctctgccacatgagaacatgggg

SEQ ID NO: 583865 - DNA, 539 bp, Homo sapiens
taaattctgtggtctaaaaatagaaacacaactcaaagagtgttcaaagtaaaatcaaggaaattaagctcaggatgcaacattttcaatcctgaagttaaatgtacgctgattagtcatacaattgtcatttttttaaataaaagttttggttgctggtggttttgccccctatataaagaagctattaatttggacatttttgccatagggaggctgttgtcttaggtcaggctttcctagaaagagactcagagaaggagactgtgtgctggaggtttattgtgaagtgctcttgggaatcacaactgtaatggagtgagagaaacaggactggatggaggaagaagctcacctgcaatgtaattctagccagggtcgcagcaattttagaaccgttctaatttgagccaagacattgtcttcatatgcccayatctgctaatcaatggattctgcatgccgctggatggagctataacctccagcagggcagctgccttttgacctgagaacattgcctggagagagactcaggc

SEQ ID NO: 583866 - DNA, 565 bp, Homo sapiens
aatgaccaactctcatttatatatgtagatgaatgagtctcaggtttaaaaatgaatgaatcttaccagatacaagctcaaactatgaagaagttaatatcatggaaattctgattaattagaaatgttctaaaatgtggctaattgccttttccrattaaggaacaatgtggaggtgagtgcttttataaaaatgtctttttaattaagacatagtcattcatttcaactgttttatattttattcagcataattctattaataggaccattatccagaggtaaaggtgtaaagctagaataacttgcatactgctcctcacatgctataacaatggagctccctcaggctaggggagtcttttaggctccagtgttcctaactctcaaaagactgtgggattcttaaaggggcagtaaaaagtctcttaagcatttttgcttgaagggaaagaatttgaaataaagggtatttacctttaccagcttgaatttttttcatgttctccaatctattacatttttcaataggaaaaattgggggaatgatatccattagttcaat

SEQ ID NO: 583867 - DNA, 456 bp, Homo sapiens
atcggtggcaactgtaacacagaatgttcatttgtctaacaggagagagcacatagaaggcacatgaagacaaagggcacagaaggcctcctgagaagcgtcaccacctgactatcccaactttcaactggaactgcacttccaaaacttccgcctctgaaagctcccgtttttccatctgcatcctccaaggcctcacctgaagaactgttataatgccttctaatcccgtcaccrcccctctacggtggaggacaaactttatgatggacctcctatgatccccacctcttgatgttaacagcttttttttttgaaacggagtctcgctctgtcacccagactggagtacagtggcacgatctcagctcactgcaagctccgcctccgggttcatgccattctcctgcctcagcctccggagtagctgggactgcaggtgtccgccaccacgcc

SEQ ID NO: 583868 - DNA, 531 bp, Homo sapiens
ggcacaaagatagacatatagatcaatggaatagaatcaagactctaaaaataaacccacagatttatagtcagttgattttcaacaagggtgccaagacacttcagtgaggaaagaatggtcttttcaacaaatgggctaggacaactgaatatccacatgcaaaaaaatgaagctggaagcctrcctcacactgtgtacaaaaattaactgaagatctatcagagaactaaatgtcagagctaaaactacagaactctaacaaaaaaacacaggtgtaaaccttcacgaccttggatatgacaatggtttcttattatgataccaaaagcataagtgaccaaaaaaaaaaacaaaaaaacagataaatgggacacaatcaaatttaaaacttctgttcttcaaaggacactatcaagaaagtaaaggccagcacagcagctcatacttgtaatcccagcattttgggaggccaaggcaggaggatcacttgagcccaggagttcaagaccagcctgggcataatataat

SEQ ID NO: 583869 - DNA, 521 bp, Homo sapiens
gccctatgatcaccctgtagtaaasaggtgaaactgaactctcatgagtgtatcttcaacccctcatacgtgattctggcctcaccttagaatcacatgaggctcttaattaaaacaacatggatgtgtccaacaataaaaagaacccgtggaaagggcacgagcaaagatatttctgtgaattggccatgtaatctgagtatccacatctaagtaatccacattaattacaatggcagaaactgtaataacttttgcaccaaactaatagaaccctgggtttataaccacttagctaagcattgtcactcaagctttaatgagtttataaaccactcggtaattttaatctctttctgtgtaatgtgattcttcaggttttcaaagagtacatgaatgtgtgttttaaataagtcccctgtcaatgcggatgatgctcccccaggctcattattagcattagttagagaaagcaggcacagcacagagtcccttatacttggcactgttgtcacaacaca

SEQ ID NO: 583870 - DNA, 596 bp, Homo sapiens
ggaacatcacataccggggcctttcgtggggcaggaggaggggggagggatagcattaggagatatacctaatgtaactgaccagttaatgtgcagcacaccagcacagcacatgtatacatatgtaacaaacctgtaagttgtgcacatgtaccctagaacttaaagtaaaataaaaaaaaaacttaaaaatgaaaaaaataataatctttaaaaaaaaagaaacaaaaaaaaagaaatggtgaaataaatcctgatacatcagtggcatggagtacaaggttttaattagaaaacatgatgtagtttccctcagaacatttactgtgggtagtaagataacttgtttaaaagaacagtcagtccacaaatttggagttcaataaaaattttatagtatccccaaattctcttaaaaatttcaaatttgcttttgaacacaggaaatgattactttaaaagcttagccttgtcactcagccatcaatactgcattgtatgaggtgagttgtggatataaaataagtataatatttgggtrtatgagtgtatactttctagacttttttgttaacttttttttttttttttttttg

SEQ ID NO: 583871 - DNA, 530 bp, Homo sapiens
ctcaaatatgttttagagtttttttttttttagaaactgaaaagtagtatgtaatatgtataataaagacttcgcaaaaagttacacttttcttaaactaaactttatacatacacatatgcatattgcactcattttatatttaaaattcttctcccaaatggaaatgctcatcttcactttggcacaaagatagcattaggactcaattttaagccactaaaattttgaatttacataaaagtaatacctacaagtattattactagatgtkccaataatgctaagtatgtttttacactatctattgaagatgtgggcaacttctgttctcaatattgatccttcagagtgtagtttatccattatatcactacaactacagcctcctatcaaacccgagcaaagtgttctcaggcagagtgggaccaggaagaaatctggtaacactaagagactaatattataataactgatcttccggagtgctatgagaactctccaaaacatcccttcacagagcacccaaa

SEQ ID NO: 583872 - DNA, 530 bp, Homo sapiens
ctcaaatatgttttagagtttttttttttttagaaactgaaaagtagtatgtaatatgtataataaagacttcgcaaaaagttacacttttcttaaactaaactttatacatacacatatgcatattgcactcattttatatttaaaattcttctcccaaatggaaatgctcatcttcactttggcacaaagatagcattaggactcaattttaagccactaaaattttgaatttacataaaagtaatacctacaagtattattactagatgttccaataatgctaagtatgtttttacactatctattgaagatgtgggcaacttctgttctcaatattgatccttcagagtgtagtttatccattatatcactacaactacagcctcctatcaaaccygagcaaagtgttctcaggcagagtgggaccaggaagaaatctggtaacactaagagactaatattataataactgatcttccggagtgctatgagaactctccaaaacatcccttcacagagcacccaaa

SEQ ID NO: 583873 - DNA, 626 bp, Homo sapiens
tattatttttattgcttacaaaatattatttgttgcctaaaacaaacacacttcacctgtaaagacaaacatagactgaaaataaagagatgaataaagatattccatgccaatggaaaccaaaaaagagcaggagtaggtatactgatatcagacaaaatagattttaagaaaaamactatgagaaaagacaaagaaggccatcatataatgataaagtggtcaattcagcaagaggatataacaactgtaaatatatatgcacccaacactggagcacccagacatataaagcaaaattattagagctagagaaataggccccaataaaataatagctggagacttcaatatcccattttcagcattggacagatctttcagacagaaaatgacaaagaaacattggacttaatctgcactgtagacaaaatggacctatgagatatttacaaaacatttcatccaacagctgcagaatacacattcttcttcttaggacatagatcattctcaaggatagaccatatgttaggtcacaaaacatgtcttgaaacattcaaaaacgttgaaataataccaagcattttctctgaccacaaggaaataaaactagaaatcaataa

SEQ ID NO: 583874 - DNA, 626 bp, Homo sapiens
tattatttttattgcttacaaaatattatttgttgcctaaaacaaacacacttcacctgtaaagacaaacatagactgaaaataaagagatgaataaagatattccatgccaatggaaaccaaaaaagagcaggagtaggtatactgatatcagacaaaatagattttaagaaaaaaactatgagaaragacaaagaaggccatcatataatgataaagtggtcaattcagcaagaggatataacaactgtaaatatatatgcacccaacactggagcacccagacatataaagcaaaattattagagctagagaaataggccccaataaaataatagctggagacttcaatatcccattttcagcattggacagatctttcagacagaaaatgacaaagaaacattggacttaatctgcactgtagacaaaatggacctatgagatatttacaaaacatttcatccaacagctgcagaatacacattcttcttcttaggacatagatcattctcaaggatagaccatatgttaggtcacaaaacatgtcttgaaacattcaaaaacgttgaaataataccaagcattttctctgaccacaaggaaataaaactagaaatcaataa

SEQ ID NO: 583875 - DNA, 626 bp, Homo sapiens
tattatttttattgcttacaaaatattatttgttgcctaaaacaaacacacttcacctgtaaagacaaacatagactgaaaataaagagatgaataaagatattccatgccaatggaaaccaaaaaagagcaggagtaggtatactgatatcagacaaaatagattttaagaaaaaaactatgagaaaagacaaagaaggccatcatataatgataaagtggtcaattcagcaagaggatataacaactgtaaatatatatgcacccaacactggagcacccagacatataaagcaaaattattagagctagagaaataggccccaataaaataatagctggagacttcaatatcccattttcagcattggacagatctttcagacagaaaatgacaaagaaacattggacttaatctgcactgtagacmaaatggacctatgagatatttacaaaacatttcatccaacagctgcagaatacacattcttcttcttaggacatagatcattctcaaggatagaccatatgttaggtcacaaaacatgtcttgaaacattcaaaaacgttgaaataataccaagcattttctctgaccacaaggaaataaaactagaaatcaataa

SEQ ID NO: 583876 - DNA, 626 bp, Homo sapiens
tattatttttattgcttacaaaatattatttgttgcctaaaacaaacacacttcacctgtaaagacaaacatagactgaaaataaagagatgaataaagatattccatgccaatggaaaccaaaaaagagcaggagtaggtatactgatatcagacaaaatagattttaagaaaaaaactatgagaaaagacaaagaaggccatcatataatgataaagtggtcaattcagcaagaggatataacaactgtaaatatatatgcacccaacactggagcacccagacatataaagcaaaattattagagctagagaaataggccccaataaaataatagctggagacttcaatatcccattttcagcattggacagatctttcagacagaaaatgacaaagaaacattggacttaatctgcactgtagacaaaatggacctatgagatatttacaaaacatttcatccaacagctgcagaatacacattcttcttcttaggacatagatcattctcaaggatagaccatatrttaggtcacaaaacatgtcttgaaacattcaaaaacgttgaaataataccaagcattttctctgaccacaaggaaataaaactagaaatcaataa

SEQ ID NO: 583877 - DNA, 592 bp, Homo sapiens
tgatacttagaaagacaacctatgttatctttctttaaaaggtgctgagatagataatttttgtctggctcttcttgatcttctctaaggcttggttttcagttttcttacagtagggccattcaataaacctttcttaaaatgataaacgtgttctctgtctctgctttgtaatatggttaccatcagtcacatttagatactaaacatttgaaacatggctaatgagactgaggaaatgaattttaaatttaagttaaatttgaattgaaaataccrtatatgtttactgctactttattggccagtattgtctggattaacctttactgtaaggcatggtatttactcctatacttttctggagtcatagtgaatgtctggggtgttgacaagtctctcggttctgattgggccagaactccagtatcccccagaattatatcacctctagtacctttgctccatgtttaagtctgtaaccaccaccctgctaggctttgtggaacttcgccctgcatgtttgcagcacagcccttggctaaggatctgtggatgatctccatgcaaaattattcttccgatttatttt

SEQ ID NO: 583878 - DNA, 357 bp, Homo sapiens
acagatgtggaatactgtccctttccatctctttctatcgctcttgctctctctctctccctctaccccaattccactctttctcccccacctcccatcccccccgccacacacacacaaacacagcctttgcgtgtatggcaaagttaaytaaaggtttgtgggagggatataaagagagtttctttcaccacaacacaaacacctaacactgaaattagacatctttgttctgaaccatcctagggcactctcacattgcacctcctttttggcctccccgttccaacaatgttctcttcacagctaatgaaaagcttttcatgtcttttgttgttttaccccccactaaaccat

SEQ ID NO: 583879 - DNA, 357 bp, Homo sapiens
acagatgtggaatactgtccctttccatctctttctatcgctcttgctctctctctctccctctaccccaattccactctttctcccccacctcccatcccccccgccacacacacacaaacacagcctttgcgtgtatggcaaagttaactaaaggtttgtgkgagggatataaagagagtttctttcaccacaacacaaacacctaacactgaaattagacatctttgttctgaaccatcctagggcactctcacattgcacctcctttttggcctccccgttccaacaatgttctcttcacagctaatgaaaagcttttcatgtcttttgttgttttaccccccactaaaccat

SEQ ID NO: 583880 - DNA, 448 bp, Homo sapiens
cagtcattgtctttggtagaataaagttctctcagagtgttgtattgaaccaagcagtgtgaatggacaaatgaatttcccaagggctccagctaccagaaatcatctagtaatataagggaagtccccaaagttttttaagtgaaaaaataagcatgaagattgaaagaataagacaaaggaaagtataagtataaatggatttataacatggactgcatcaagggatttggtatttttctttstaattcatatacattaaagtagattaacatgcacagcttctaaggaaggcacacacacacacacacacacacaaataatgagctcaaaatagaaagtgttaagcaaatgaaggaataatacaccatgagcaagagtccgaggaggaaaaaacaaacaaaattgttttagcaccactttcccaaggactttagattttgccatt

SEQ ID NO: 583881 - DNA, 506 bp, Homo sapiens
acctctatcatggttaacaaaatttcaagatgtcaaacaatttgaggagaattcaaagcaaaaaacaaaacaaaaaactttaagattggggtgggggtagacactagagaatgaataaatgaatgcattatccccaggtgctaagatcacagaaatgtcttagaaataacagatgacaacacatgaacataaccagtatatccaacagttttggctaattggaatgcaaatgcaaaaatgttgtgtttccaatcattatagctgaattctattgaacttagtttttattcattcattctatatttagtgagaactcwctgtgatttaggtgctgggtatacagcgataaataaaatccttgttctcatggagcttgcactgttgtagataagagttttccttacagtctgattctatacttttccagatacttttattttgaagcaatatgatctaaggatctctttgttttgggttattctgtatgctgtacttaatgctaggta

SEQ ID NO: 583882 - DNA, 625 bp, Homo sapiens
cagtgtggtgattcctcaaagaacttaaaatgaaattatcatttgacccagcattctcattactgggtatatactcaaaggactacatattgttttatcataaaggaacatacatctgtatgttcattgcagcactattcacaatagcaaagacatgagctcaacctagattcccatcaacagtagactagataaagaaaatgtggtacacatacatatactatgtagctataaaaaaaaaaaaaaaacaatgaaatcatgtcctttgcagtgacatgggtgaaactggaggtcattatcccaggcaaacaaacaaaggaacaaaaaaccaaatactgcatgttctcacttatgggaactaataaatgagaacacatggacacaaagaggggaacaaaagagtctggggcctacttgcgggtgaaggctaggaggagggagaggaagagaaaaaataccttattgggtactatgctyattacatggatgatgaaataatatatacacgaaacccccatgacatgcagtttacctatagaacaaatttgcagatgcacccctaaatctaaaataaaagtccaaaaacgaccaaaaaaaaacaaacagaaaagaagtaaattttgtg

SEQ ID NO: 583883 - DNA, 595 bp, Homo sapiens
gtaaatgacgagttgatgggtgcagcaaaccaacatggcacatgtatacttatgtaacaaacctgcacgttgcgcacatgtaccctagaacttaaagtataataataaaaaaacaataaaacattgatgtaagaaattaaagaggacacaagaaataaaataattccatattcatatattcaaaaaatcaatttttttatttcaatagttttggggatataggtggattttggttacatggatgagttcttggtggtgaattctggaatttgtaatgcacccatcatctaagcagtgtacagcatacctaatatgttgtcttttatccctcatcctcctcccaacctcycccaccccaagtcctcaaagttcattatatcactctgtatgtttttgcatcctcatagcttagctcccacttacaagtgaaaacatatggtatttggttttccattcctgagttacatcacttaaaataacgacctctagctctatccacgttgttgcaagacattattttgttccttttaatggctgagtagtatttcctgatgtatatataccacactttctttatccaaccattggtcaatag

SEQ ID NO: 583884 - DNA, 478 bp, Homo sapiens
attttagaataaggatttttaaatcattaaaattcttcagaagcttccactgcagagctagtrataataacagatcattgaagcaacagccatccctcccaaggcaacactccagccataatcaattcacttaatgcccacgggagtcaggtctttgtctcccttactgcctcaccgtttatttcaatagagaactgaacccaaaaggaatgaaatttatagtgcactttttgccactgataaactatagaattaaatagaacatataatttctaaaatgagctatgctggtgaatttatgtgaacagttacttatgagatgacttgtgggaaatcaaggtaagttcacaattactgaacacgaagcaccaactggaatttcaaacgggtagaagagacgataagatacaactatgcatatctaatagacataggattctacattaatttatatagctctccagagccacataattca

SEQ ID NO: 583885 - DNA, 588 bp, Homo sapiens
gttggtcagtctggtcttgaactcctgaccccaggctatccacccaccttggcctcctaaagtgctggtattataggtgtwagccactgtgccatgcctttagtaggtttttaaatgttaaattctctacatattatgtgctcctcattgcttcatctcagaagagctctcctgtttttccctcaagccctttgtccaaatgaaaccatttgtctgcttttctatcattcttcttctcattctttacccactgactcctactcatcctctaggtctggacttaaatctcacttctttgaagaatatctctctcattgtttaaacttggttaaatcaaaactaggttaaattattgcatattcctttgactctgtatgctaccttggaaatatttaagtctcttgaaattgctttttaaatataatccttgtgagggcagggaccatttgtgtatttttagtatctagcacaattactcacacaatgtgggcactgaagaataatgtattgattgatacttgactgaaaggtgtgacccaataattctacatctggctgagttttcttaaaagtgtaatggtaacagag

SEQ ID NO: 583886 - DNA, 643 bp, Homo sapiens
gggcaggtaaattaaagtgattataaaatctgggtttatggttacataataatcattgtttaagtaaattgatgttataagattgycaagtgcttaaaataatttatcaagcaaagtagacatggggccttgaaagaagaatgctgaagccaaataagaaaaagatacataaatattacaaccttttcaatttcaagcctctacttgacaataatacaagacacatcattaatctaacaatcctctaatgcccagccttgcactcacactccatacttattccaaattttacacttttattgaagaaacataatagtgcaatagaaaatttaaattttacactttaaacaataaaaagaaaatgatgctattgaagaaactaacagtgttgtatgggaaaaacttagaaattcttctagaatccaaaaacaatgataaatggtataaaatatgccaatgatgaataaaataatgtttttgatgaaataagaataaatagaagtatattctaagatataatagaagaaaacacatttaaggtgaaaatctgagacaaaaagtctcagaagcgaatttttgcctccagatagtaaatggatgatattgtttggctctgtgtctccatcaaaatcaccccttaaat

SEQ ID NO: 583887 - DNA, 643 bp, Homo sapiens
gggcaggtaaattaaagtgattataaaatctgggtttatggttacataataatcattgtttaagtaaattgatgttataagattgccaagtgcttaaaataatttatcaagcaaagtagacatggggccttgaaagaagaatgctgaagccaaataagaaaaasatacataaatattacaaccttttcaatttcaagcctctacttgacaataatacaagacacatcattaatctaacaatcctctaatgcccagccttgcactcacactccatacttattccaaattttacacttttattgaagaaacataatagtgcaatagaaaatttaaattttacactttaaacaataaaaagaaaatgatgctattgaagaaactaacagtgttgtatgggaaaaacttagaaattcttctagaatccaaaaacaatgataaatggtataaaatatgccaatgatgaataaaataatgtttttgatgaaataagaataaatagaagtatattctaagatataatagaagaaaacacatttaaggtgaaaatctgagacaaaaagtctcagaagcgaatttttgcctccagatagtaaatggatgatattgtttggctctgtgtctccatcaaaatcaccccttaaat

SEQ ID NO: 583888 - DNA, 643 bp, Homo sapiens
gggcaggtaaattaaagtgattataaaatctgggtttatggttacataataatcattgtttaagtaaattgatgttataagattgccaagtgcttaaaataatttatcaagcaaagtagacatggggccttgaaagaagaatgctgaagccaaataagaaaaagatacataaatattacaaccttttcaatttcaagcctctacttgacaataatacaagacacrtcattaatctaacaatcctctaatgcccagccttgcactcacactccatacttattccaaattttacacttttattgaagaaacataatagtgcaatagaaaatttaaattttacactttaaacaataaaaagaaaatgatgctattgaagaaactaacagtgttgtatgggaaaaacttagaaattcttctagaatccaaaaacaatgataaatggtataaaatatgccaatgatgaataaaataatgtttttgatgaaataagaataaatagaagtatattctaagatataatagaagaaaacacatttaaggtgaaaatctgagacaaaaagtctcagaagcgaatttttgcctccagatagtaaatggatgatattgtttggctctgtgtctccatcaaaatcaccccttaaat

SEQ ID NO: 583889 - DNA, 636 bp, Homo sapiens
cacacacacttgttgcaatggctactgtattagtccattctcacactgctatgaagaaatagccaaagctgggtaatttatgaagaaaagaggtttagttgactcacagttatgcatggctggggaggcctaaggaaacttacaattatggcagtaggtaaagaggaagaaaggcactttcttcacagggtggcaagaaggagaagtgttgagcaaaggtgtaaagagccacttataaaaccatcagatcaactgggtgcagtggctcatgtttttaatcygagcattttgggaggccaagatgggtggatcacctgaggtcaggagttcaagaccagcctggccaacatggtaaaccccatctctactgaaaatacaaaaattatccaggcgtggtggcaggtgcctgtaatcccagctgcatgggaggctgaagcatgagaattgcatgaacctgggagacagaggttgcagtgagcctagattgcactactgcactccaacctggtgacagagcaagactctgtcttaacaaaccaaccaacagacaaaaaaccatcagatctcatgagaactcattcaccgtcacaagaacagcatggaggtaactgcccccgtgattcaattaactcccat

SEQ ID NO: 583890 - DNA, 636 bp, Homo sapiens
cacacacacttgttgcaatggctactgtattagtccattctcacactgctatgaagaaatagccaaagctgggtaatttatgaagaaaagaggtttagttgactcacagttatgcatggctggggaggcctaaggaaacttacaattatggcagtaggtaaagaggaagaaaggcactttcttcacagggtggcaagaaggagaagtgttgagcaaaggtgtaaagagccacttataaaaccatcagatcaactgggtgcagtggctcatgtttttaatctgagcattttgggaggccaagatgggtggatcacctgaggtcaggagttcaagaccagcctggccaacatggtaaaccccatctctactgaaaatacaaaaattatccaggcgtggtggcaggtgcctgtaatcccagctgcatgggaggctgaagcatgagaattgcatgaacctgggagacagaggttgcagtgagcctagattgcactactgcactccaacctggtgacagagcaagactctgtcttaacaaaccaaccaacagacaaaaaaccrtcagatctcatgagaactcattcaccgtcacaagaacagcatggaggtaactgcccccgtgattcaattaactcccat

SEQ ID NO: 583891 - DNA, 383 bp, Homo sapiens
aacaaaaatagcatgggagagaccggcccctatgattcagttacctccccctgggtcccttccacaaaatgtgggaattctacgagatacaattcaagttgagatttgggtggggacacagccaaaccatgccattccacccctggcccctccaactctcatgtcctcacatttcaaattcaatcatgtcttcccaaaagtcccccaaagtccacagtccaaagtctcatctgagacaaggcaattcccttctgcctatgagcctgcaacatcaaaaacaagctagttacttcttagatacaatgggggtacaggttttgagtaaatacagccattccaaatgsgagaaattggccaaaacaaagaggttacagggcccacgc

SEQ ID NO: 583892 - DNA, 585 bp, Homo sapiens
tcaatctaaatgttttgacaagacttcattagaagacatagtgaaagagtccattgtttgcacctacatatagaatcaccttgagtgaagcacataggttcacacaggttttgttttgattgttttgtactaacaaatctaataccccaagcagtgttactgtttgtattacaattttctgaaataattaacwattttgttgatttccaactaagtgcaatcactccttactttttttttttggggtaactgcatcttttacttgatgaaaccagcaaaattatcaaacctctgattagttgtcactttctcccttgaaatcattaacattgagtcacaattattcctttcttgtattcccttatatgtgagtctgtccatttttatacatggatacatattgtaaaggtacagcctgatgctgaaaatgctctggtaaaaaggtatccagggcattttgttcagtaatagtgagatcccacttttgcaaatatggcagacccctgttaggtatgtgagatgtgtaggaagcaggcctctgccctggggagctttaaattgataatattgacaagggggtattct

SEQ ID NO: 583893 - DNA, 585 bp, Homo sapiens
tcaatctaaatgttttgacaagacttcattagaagacatagtgaaagagtccattgtttgcacctacatatagaatcaccttgagtgaagcacataggttcacacaggttttgttttgattgttttgtactaacaaatctaataccccaagcagtgttactgtttgtattacaattttctgaaataattaacaattttgttgatttccaactaagtgcaatcactccttactttttttttttkgggtaactgcatcttttacttgatgaaaccagcaaaattatcaaacctctgattagttgtcactttctcccttgaaatcattaacattgagtcacaattattcctttcttgtattcccttatatgtgagtctgtccatttttatacatggatacatattgtaaaggtacagcctgatgctgaaaatgctctggtaaaaaggtatccagggcattttgttcagtaatagtgagatcccacttttgcaaatatggcagacccctgttaggtatgtgagatgtgtaggaagcaggcctctgccctggggagctttaaattgataatattgacaagggggtattct

SEQ ID NO: 583894 - DNA, 499 bp, Homo sapiens
atcaaaatatacagcccagatgtagctaataacagtattccctatatttcctctcccctttttttttttttttttgagatggggtctcactctgttacccagactgcagtgcagtagtatgatcttagctctcagcttactgcagccttgacctccctgggctcaagtgatccttctacctcagcctctcaagtagctgggactacaggcatgtgacaccatgcccagctaatttttgtattttttgtagagacagggttttgtcatgtttcccaggctggtcttgaactcccagactcaagtgatccatccaccttggtctcccaaagtgctgggattacaggcatgagccacyacaccaggccttccctatatatttttaaacaatatacatctgagcattctgaagagagttctttccacctgttatgggctgagttgtgtctcgcacctgcaaataacatgagacccacaacagctctagttcataaaaatttct

SEQ ID NO: 583895 - DNA, 561 bp, Homo sapiens
tttattgaccttttataattttgagttttytagcaaaaagtgttgattttagatttagtttccccctttcccggaatagtgtattttaaaacagcattaaatttggggttttttttttttttttttttttttgctttcacaggctttcaagctttcattttaaaaatacaaagtgcatcaccccagtcctgacgtgagagagcaaaactaacattgttgctaaaaatcaatgctaaacctgccaagtataatttttttggtgttttagtattgaggcattttttcttacatgtctcatgagtatatctttgtttcaacctaaatgccataaaatatttttcttgttaaaaatattgtaaagagatttctgtgactgtaaatagcaccatggtttttttgacctctaaataaaaatgttaagaaatgtaactatttatttgaaatggcaaatttatttttttctcataatatagaaagtcaaatttaacctgtcttatttttaacgcaattgctcgttgttcttaatgcaccttgataactcttggtttaggaaataggcaa

SEQ ID NO: 583896 - DNA, 561 bp, Homo sapiens
tttattgaccttttataattttgagttttttagcaaaaagtgttgattttagatttagtttccccctttcccggaatagtgtattttaaaacagcattaawtttggggttttttttttttttttttttttttgctttcacaggctttcaagctttcattttaaaaatacaaagtgcatcaccccagtcctgacgtgagagagcaaaactaacattgttgctaaaaatcaatgctaaacctgccaagtataatttttttggtgttttagtattgaggcattttttcttacatgtctcatgagtatatctttgtttcaacctaaatgccataaaatatttttcttgttaaaaatattgtaaagagatttctgtgactgtaaatagcaccatggtttttttgacctctaaataaaaatgttaagaaatgtaactatttatttgaaatggcaaatttatttttttctcataatatagaaagtcaaatttaacctgtcttatttttaacgcaattgctcgttgttcttaatgcaccttgataactcttggtttaggaaataggcaa

SEQ ID NO: 583897 - DNA, 561 bp, Homo sapiens
tttattgaccttttataattttgagttttttagcaaaaagtgttgattttagatttagtttccccctttcccggaatagtgtattttaaaacagcattaaatttggggttttttttttttttttttttttttgctttcacaggctttcaagctttcattttaaaaatacaaagtgcatcaccccagtcctgacgtgagagagcaaaactaacattgttgctaaaaatcaatgctaaacctgccaagtataatttttttggtgttttagtattgaggcattttttcttacatgtctcatgagtatatctttgtttcaacctaaatgccataaaatatttttcttgttaaaaatattgtaaagagatttctgtgactgtaaatagcaccatggtttttttgacctctaaataaaaatgttaagaaatgtaactatttatttgaaatggcaaatttatttttttctcataatatagaaagtcaaatttaacctgtcttatttttaacgcaattgctcgttgttcttaatgcaccttgmtaactcttggtttaggaaataggcaa

SEQ ID NO: 583898 - DNA, 533 bp, Homo sapiens
accatggctcaagttcagctctgcaacctgtgtgaacttgagttaattctatatagcatgataaatattttagaaaaaattactgtggcagtcggagttctgtaagtaggaaaggggaggcgggaagaataacacagacttggggtacgaagaggatcctgtagggaattaggcagtgctggtcattgaaatgcaaattattacatatataaaaatagtcataaattgatcacactcttgaaaatagtttacagagctgtcacactctayaaggttaagtcataaaatatctaacttccatatatatatatatatatataaaacttccatacatatataagttccatatatatataacttccatgtatattatatatatataacttccatatatataatttatatatatatatatatataaaacttccatatatataatatatatatatatattaggcagtgtcttgctctgtcacccaggctggagtgcagtggcatgatctaggctcactgcaacctccacctcctgggtt

SEQ ID NO: 583899 - DNA, 637 bp, Homo sapiens
gtaattcaagaaacaacaacaaataataatagagcaattgaaccttatcttactctatatacataaattaactcaaaatggattaaagacttaaatgtaagacctgaaatgataaactactagattaaaaacatgggggaaacacttactgactttggtggaggcaatgatttattgaatatgccatcaaaaatacacaacagaagcaaaaaatggcaaatgggattgcatgaaactaaaatgcttctgtatagccaaggaaacaatcaacagagtgaagagacacctgtagaatggaagaaaatawttgcatatcatacatctgacaaaatattaatatttaaaatgtacacaaaactcaaacaacttaacaaataatcctatttttaaaaatgggcaaaaaaatttcaatagatgtttctcaaagaagacacacaaatgaacaatagatatatgaaaaaatgcttaacatggctaattatcagggaaatgcaaatcaaaaccacaatgagatcttatcttgcttgttaaagagctattactaaaaagacaaaagataacaagtattggtgaggatgtgaagacaaggaaacactttcagacttttcttgggaatgtaaattagtactctcattat

SEQ ID NO: 583900 - DNA, 637 bp, Homo sapiens
gtaattcaagaaacaacaacaaataataatagagcaattgaaccttatcttactctatatacataaattaactcaaaatggattaaagacttaaatgtaagacctgaaatgataaactactagattaaaaacatgggggaaacacttactgactttggtggaggcaatgatttattgaatatgccatcaaaaatacacaacagaagcaaaaaatggcaaatgggattgcatgaaactaaaatgcttctgtatagccaaggaaacaatcaacagagtgaagagacacctgtagaatggaagaaaataattgcatatcatacatctgacaaaatattaatatttaaaatgtacacaaaactcaaacaacttaacaaataatcctatttttaaaaatgggcaaaaaaatttcaatagatgtttctcaaagaagacacacaaatgaacaatagatatatgaaaaaatgcttaacatggctaattatcagggaaatgcaaatcaaaaccacaatgagatcttatcttgyttgttaaagagctattactaaaaagacaaaagataacaagtattggtgaggatgtgaagacaaggaaacactttcagacttttcttgggaatgtaaattagtactctcattat

SEQ ID NO: 583901 - DNA, 415 bp, Homo sapiens
aatcaacagagtgaagagacacctgtagaatggaagaaaataattgcatatcatacatctgacaaaatattaatatttaaaatgtacacaaaactcaaacaacttaacaaataatcctatttttaaaaatgggcaaaaaaatttcaatagatgtttctcaaagaagacacacaaatgaacaatagatatatgaaaaaatgcttaacatggctaattatcagggaaatgcaaatcaaaaccacaatgagatcttatcttgcttgttaaagagctattactaaaaagacaaaagataacaagtattggtgaggatgtgaagacaaggaaacactttcaracttttcttgggaatgtaaattagtactctcattatgaaaaacaatataggagttcttcaaaaaattaaaaatagaac

SEQ ID NO: 583902 - DNA, 560 bp, Homo sapiens
gtgttcttacctaaggtaaaaaagtgtcgaggacagtgtggccttaaggtggtggctgaagtcaaatctagaaagtccagtagtccagctaggacaccatcaatcaggacacccacagaaccaagctggaggagatgggggtggcactgaggaatcaggaaagccaagtgccaggtgaggcaggagcagatgaacctgaggttgtctggatctactcccyaagaccgaccaggcagagggacggaagagacattaagtgtttgaaccaggtggttctcaaaacttttcagtctgagtccctgttgcttagcaaaagaacaaattacctgcctcaactcctcctgactgctatggctaggaagaaaccccaaaaatacataaataaatgagaaatctggttttttaaaaatatttttaacatattattaattataccagaactaaaattgtggacacaagcatttttagggtacaacccatgaagcataaagagacaccatgaatgttcatggcaatgaatatttattgaaaacccagattgaccagaaactgccaggtat

SEQ ID NO: 583903 - DNA, 560 bp, Homo sapiens
gccaggcaaatcccttgaacccgggaggcagaggttgcagtgagccaggatcgtgccgttacactccagcctgggtgacaagaatgaaactcagcytcgaaaaaaaaaaaaaatagagaattaaaggcccccacctaataggattttttgtaatgattaagcaagctaacatctgtaaagttctaacacagtaagtgatcaataggtactcattattattattatccccatcatcatcatcattaattcctgctaccaaattataagatccctaaagaccagaatgtatcccactcacattttaattcccctacagtgtctatagctcagtaaccttttgcttaggtgtgtatgtcctggcaaacctttaacaaccagctctctggggatggagaaaaccctgatttatagtaattgccagtttctatggtgtaaatactcccatcatggccaatgtcaagcacacgagatgatattactgaaagtggcattaggaagagatgcatataatcagttcttgggagttgtaaaaaccacttcagcccacactggatgcactt

SEQ ID NO: 583904 - DNA, 563 bp, Homo sapiens
gttcaatcaatgtctgctgttgttattgtcatcactacagtgtcatcagcatttttgttatgctcagcctatagctaagtgcctttgtgacaggtatcaatatccaggacatcagctgtggccagggctacaaggtcacaccacatagaaagggcaatttatattaagggaacagccttcagccacttttttttttttttttttagagcggagcagtgtaaccatcagacaccaggaggcttcctggccttctcagtacatcacgcaatggcagctttttgaagatcagtaacatgaagtctgtcctaaagaacattgaaggtatccctcctggaaaacaaygctattttcttatggtccacaaggaaaagaaagaaggaatgtaagtattccagttacaactcactaggatccatccatgtgtaaatacatcccacaaggtggattaaaagtatataaatttgtgttaaaaagaaggtaaaatggttattatataagatgctgatattaggggaaaattagtgaaggatacgtaggaactctctgtactctctctgcaactt

SEQ ID NO: 583905 - DNA, 563 bp, Homo sapiens
gttcaatcaatgtctgctgttgttattgtcatcactacagtgtcatcagcatttttgttatgctcagcctatagctaagtgcctttgtgacaggtatcaatatccaggacatcagctgtggccagggctacaaggtcacaccacatagaaagggcaatttatattaagggaacagccttcagccacttttttttttttttttttagagcggagcagtgtaaccatcagacaccaggaggcttcctggccttctcagtacatcacgcaatggcagctttttgaagatcagtaacatgaagtctgtcctaaagaacattgaaggtatccctcctggaaaacaatgctattttcttatggtccacaaggaaaagaaagaaggaatgtaagtattccagttacaactcactaggatccatccatgtgtaaatacatyccacaaggtggattaaaagtatataaatttgtgttaaaaagaaggtaaaatggttattatataagatgctgatattaggggaaaattagtgaaggatacgtaggaactctctgtactctctctgcaactt

SEQ ID NO: 583906 - DNA, 563 bp, Homo sapiens
gttcaatcaatgtctgctgttgttattgtcatcactacagtgtcatcagcatttttgttatgctcagcctatagctaagtgcctttgtgacaggtatcaatatccaggacatcagctgtggccagggctacaaggtcacaccacatagaaagggcaatttatattaagggaacagccttcagccacttttttttttttttttttagagcggagcagtgtaaccatcagacaccaggaggcttcctggccttctcagtacatcacgcaatggcagctttttgaagatcagtaacatgaagtctgtcctaaagaacattgaaggtatccctcctggaaaacaatgctattttcttatggtccacaaggaaaagaaagaaggaatgtaagtattccagttacaactcactaggatccatccatgtgtaaatacatcccacaaggtggattaaaagtatataaatttgtgttaaaaagaaggtaaaatggttattatataagatgctgatattaggggaaaattagtgaaggatacrtaggaactctctgtactctctctgcaactt

SEQ ID NO: 583907 - DNA, 525 bp, Homo sapiens
tctgcccgcatggctgcccagtcccctcagcagatgctgggcacttcctcctttttctccttcctccttctctctcctttttcctctgtttcttcatccttctcccctttccctataatcagtaataattcctcatttacaaagccctttcacatatgttacatcatttcatcttcctgacaagcccatgaggtgtgttactactgtatcccagttttagagatgagtacattgaggtccagagaagttaggttatttaattcaaagtcatgtagttggtagtttatggaattgagatttcaatgaagggtcttcacctctaaatctcagggttttttgttttttgtttttttttttaaagttttgtgacattgaaactgaatttggaacaatgtttacatttgtagtatcttctttgttactaaaagattgtgttttataaacyctcttagagcatctgctgctctagagcaggggtccccaacccccaggctacagaccagtactagtccatggcctgttagg

SEQ ID NO: 583908 - DNA, 609 bp, Homo sapiens
cctcctgtgcctggctcggcaggtcccaygcccacggagccttactcactgctagcccagcagtgtgagattgacctgtgatgctgcagctggatgggggatggagcatccaccattgctgaggcatgagcagctcacagtataaacaaagaggcctggaagcatgaaatgggcggagcccaccacagctcagcaaggcctacggcctctatagattatacctcttggggcagggcatagtagaacaaaaggcagcagacagcttctgcagacttttaaacgtccctgtctgacagctctaaagaaagcagtggttctctcagcacagcattcaagctccaagaacagactgcctcctcaagtgggtccctgaccctcgtgtagtgggactgggaaacacctcccagtaggggccagcagacatgtcaaacgggtagatgcctctctgggaggaagcttccagaggaaggatcaggcagcaatatttgctgttctgcagcctctgctggtgatacccaggcaaacagggtctggactggacctctagcaaactccaacagaccagcagctgaggggtctgactgttagaaggaaaactaaccaacagaa

SEQ ID NO: 583909 - DNA, 548 bp, Homo sapiens
gtcttttacctcctgccatgattctgaggcctccccagccatatgaaactgtaagtccaattaagtccaattaaacctctttttcttcccagtctcaggcatgtcttcatcagcagtgtgaaaacggaccaatacactgtctaaattcaaactgagagactgaattctaaaatcagcaagagaaaggtatcaagttacctataaaggaaayccctttaaataaacaagagtattcccagcaaagccttatgggccagaagagaatggaatgacatattcaaagtgctgaaagaaaacaactggaagcccataattctatatctagcaagattaatgttcataaatgaaggagaaataaagtctttcccagacaaggaaatgatgacagaattcatcaccactatacaaaccctaaaagaaatgttcaatgaagtcccaaacttggaagtgatggaacaacattcaccatcaagaaaacacaaagtataaaactcattggtaaattaaacacaccaaagaggaagaaaaaagaatcagatgataccact

SEQ ID NO: 583910 - DNA, 603 bp, Homo sapiens
aaaaacaaacccaaatattctgatattcatacaggtgagtgagtaaaaaacattgtagtacattcataccatggaatactcagcaatgaaaagaaatgaaccattgattgccaaacacaacaatatggaggaacctcaaaataataatgtttggtgaaagaagctagacaaaaaataatccatactgtatgattccatttgtataaaattttagaattcaaactaatgtatagtgacagaaatagatcaagagtcaactagagacagacagagtaggcaaaaaggagagataatgaaaaggcattaagaaatattgagtgtgcatgttctcacttataaatgggagttgaacaatgagaacacatggacacagggaggggaacatcacacactggggcccatcgtgaggtggaggrcaaggggagggagagcactaggaccaatactaatgcatgtggggcttaaaacctagatggcgggttgataggtgcagcaaaccaccatggcacatatatacctatgtaacaaacctgcatgttctgcacatgtatctcagaacttaaagtaaaataaaataaagaaacattgggtgtgatggctaga

SEQ ID NO: 583911 - DNA, 280 bp, Homo sapiens
agtactttgggaggccaaggcaggtggatcaactgaggtcaggagtttgagaccagcctagctaatgtagtgaaatcctgtctctactaaaaatacaaaaattagctgggtgtggtggtgcatgcctgtaatcccagctactcaggaggctgaggcaggagaatyactggaactcaagaggcagagactgcagtgagccaagatcgtgccatggcactcctgcctggacaacagagcaagactccatcctaaaaaacaaaacaaaacaaaaccctataag

SEQ ID NO: 583912 - DNA, 280 bp, Homo sapiens
agtactttgggaggccaaggcaggtggatcaactgaggtcaggagtttgagaccagcctagctaatgtagtgaaatcctgtctctactaaaaatacaaaaattagctgggtgtggtggtgcatgcctgtaatcccagctactcaggaggctgaggcaggagaattactggaactcaagaggcagagactgcagtgagccaagatcgtgccatggcactcytgcctggacaacagagcaagactccatcctaaaaaacaaaacaaaacaaaaccctataag

SEQ ID NO: 583913 - DNA, 482 bp, Homo sapiens
aggcaggagaatcgcttgaacccgggaagtggaggttgcagtgagccgagatggcaccattgcactccagcctgggcgacagagcgagacttcgtctcaaatagaaataaataaatactaattttttwaaaaaggcacttgtctgtgcctttgttttgttttgtttttttagtgaagtcccattcctaacaatggggaaaaaaatctctaagggaaggagggaagaggaaggaaggaaaggagggaggaagggcagtaaaactgagaaagttccaacacacactgccaaaaccactggcaaatttctcaaaagcatccattcaccaataaggctatcagtaagctaattctagaaagaagaattgttctaaagctcggcatggcaaatatttcagagaaaaactgctcgactgtttgaaggtacagatgtctgacctacctggccattccaactcctacaggtgcgactgtgacagacagct

SEQ ID NO: 583914 - DNA, 482 bp, Homo sapiens
aggcaggagaatcgcttgaacccgggaagtggaggttgcagtgagccgagatggcaccattgcactccagcctgggcgacagagcgagacttcgtctcaaatagaaataaataaatactaatttttttaaaaaggcacttgtctgtgcctttgttttgttytgtttttttagtgaagtcccattcctaacaatggggaaaaaaatctctaagggaaggagggaagaggaaggaaggaaaggagggaggaagggcagtaaaactgagaaagttccaacacacactgccaaaaccactggcaaatttctcaaaagcatccattcaccaataaggctatcagtaagctaattctagaaagaagaattgttctaaagctcggcatggcaaatatttcagagaaaaactgctcgactgtttgaaggtacagatgtctgacctacctggccattccaactcctacaggtgcgactgtgacagacagct

SEQ ID NO: 583915 - DNA, 607 bp, Homo sapiens
agccagctctttgtggcaggagaaaaagatttgatttgtagtgtttgccaatttccctgttgtaaatgctcccatcatggctgctttcaaactatcaatgtgacrtcactgagtgcagagttagaaagggatattcacatcaactcccatgagcctttataatctgactccatgcatcaatatccctcacaaaaatagacataaaatgcctaccaaaatactataaataactttatgccaataaattcaacaagttaggtgaaatacacaaactttttgaaagacatgttagctcaggctcctatatccaaataccatagacagggtggcttaaacaacagacattatttctcacagctctggaagatgggaattccaagatcaagatgccagtagatgcaattcctggtaagagatctcttccttgcttgcagacagctaacttctccatgtgtcctgatatgttggagagagagagagagagcatgcacactctggtctctcttcctcttcatatcaggacactaatcccatcctgaggaccccaccttcataccttatttaaacctaattgcctcccaaagctccactggggttaaggcttcaa

SEQ ID NO: 583916 - DNA, 607 bp, Homo sapiens
agccagctctttgtggcaggagaaaaagatttgatttgtagtgtttgccaatttccctgttgtaaatgctcccatcatggctgctttcaaactatcaatgtgacgtcactgagtgcagagttagaaagggatattcacatcarctcccatgagcctttataatctgactccatgcatcaatatccctcacaaaaatagacataaaatgcctaccaaaatactataaataactttatgccaataaattcaacaagttaggtgaaatacacaaactttttgaaagacatgttagctcaggctcctatatccaaataccatagacagggtggcttaaacaacagacattatttctcacagctctggaagatgggaattccaagatcaagatgccagtagatgcaattcctggtaagagatctcttccttgcttgcagacagctaacttctccatgtgtcctgatatgttggagagagagagagagagcatgcacactctggtctctcttcctcttcatatcaggacactaatcccatcctgaggaccccaccttcataccttatttaaacctaattgcctcccaaagctccactggggttaaggcttcaa

SEQ ID NO: 583917 - DNA, 614 bp, Homo sapiens
aaaaaaaaaaaaaaaaaaaagaatgaattctctcagtttttgtttttgttctttttactttttaagagacagggtctcactgtgttgcccaggctgcagtgtagtggctcaattatagctcactacagccttgaactcttgtcctcaagccatcctcctgcctcagcctctcagagttctgagattacagatgtaagccaccgctcctggcttgtctttattcttgcaactatttttcactattgtagaattctaggtttttatattggcattttmttttcttttcaagatgatgatatctcttcattgttttctggtttcaaatctaacaatacatttaataaatgtttaatgagcactactgtgtgccaggcagtattccaaacaatggacctataacactgaataaaacaaaataccgaccacaacaaaaaccagcatcaacaaccaaaaaccaagacaaacccaagaatatgtgcaaaatagaacttttcctttaggccacattcagtgatccttatcattcttcctgactgctgaactttgttattctttgtgtgcttgtcatatcctacatgctcctacctgatcttagatacgcagattactctgca

SEQ ID NO: 583918 - DNA, 614 bp, Homo sapiens
aaaaaaaaaaaaaaaaaaaagaatgaattctctcagtttttgtttttgttctttttactttttaagagacagggtctcactgtgttgcccaggctgcagtgtagtggctcaattatagctcactacagccttgaactcttgtcctcaagccatcctcctgcctcagcctctcagagttctgagattacagatgtaagccaccgctcctggcttgtctttattcttgcaactatttttcactattgtagaattctaggtttttatattggcattttattttcttttcaagatgatgatatctcttcattgttttctggtttcaaatctaacaatacatttaataaatgtttaatgagcactactgtgtgccaggcagtattccaaacaatggacctataacactgaataaaacaaaataccgaccacaacaaaaaccagcatcaacaaccaaaaaccaagacaaacccaagaatatgtgcaaaatagaacttttcctttaggccacattcagtgatccttatcattcttccygactgctgaactttgttattctttgtgtgcttgtcatatcctacatgctcctacctgatcttagatacgcagattactctgca

SEQ ID NO: 583919 - DNA, 550 bp, Homo sapiens
acaaatgcattaataatgtaatagtaaatggtaactctcttagtccacttgggctgctataacaaaatacctaaactagataatttttaaaaaacagaaatgaacctgaaatcataaaatttctagaagataacattggaaaaactcctttagaaattgattgaggcaaagagttcatgaccaaggacacaaaagcaaatgcaacaaaaacaaagataaatagatgggacttaattaaaataaaaagcttttgcatagcaaaagaaataaccagcagaataaaccaacaatccacagagtggcagaaagtatttgcaaactatgcatccaacaaaggactaatatccagaatctacaatgarctcaaaaaaatcagcaagaaaaataataataataatgccatcaaaaagtgggctaaggacacgaatagacaattctcaagatatacaaatggacaacaaatatatgaaaaaatgctcaacatcactaattgtcagggaaatgcaaatcaaaaccacaatgcaataccaccttactcctgcaagaatgg

SEQ ID NO: 583920 - DNA, 568 bp, Homo sapiens
ttaataatgtaatagtaaatggtaactctcttagtccacttgggctgctataacaaaatacctaaactagataatttttaaaaaacagaaatgaacctgaaatcataaaatttctagaagataacattggaaaaactcctttagaaattgattgaggcaaagagttcatgaccaaggacacaaaagcaaatgcaacaaaaacaaagataaatagatgggacttaattaaaataaaaagcttttgcatagcaaaagaaataaccagcagaataaaccaacaatccacagagtggcagaaagtatttgcaaactatgcatccaacaaaggactaatatccagaatctacaatgaactcaaaaaaatcagcaagaaaaataataataataatgccatcaaaaagtgggctaaggacaygaatagacaattctcaagatatacaaatggacaacaaatatatgaaaaaatgctcaacatcactaattgtcagggaaatgcaaatcaaaaccacaatgcaataccaccttactcctgcaagaatggccataatttaaaaatgaaaaaatgata

SEQ ID NO: 583921 - DNA, 559 bp, Homo sapiens
gggctttttgttcttatgttctttttytcttttgagggtttgactgtggtatgtgttgtgtatagtcaattggcttcatttctgggtgttttcagggggcccaggctctgtatggattccttagttgtggctagttttctgcattgtttcacagatgatacatggtgaaggaatttgtttttgtttggtggcgtaatttaagctgagatccagtagatggcacttgacaataaaagccagcagataggcttttactcagccataggcctcctttgtatttcagtgtgtacacagcagtactctggggagagggagatggtagtggtggtggcaggggaagatgagtccctcacaaaatccattcctaggccttagggatcctctccagtcattggtgctgtgtccatgtttccttagccctaaggaggtcccagttgggctgcactttcccccctcttaggggcagcagaagccaaaggttaggtcaccgggggacccacaactccctgggggcctgctggttccctgagcttggcagagtcagagcaggttgtagggt

SEQ ID NO: 583922 - DNA, 587 bp, Homo sapiens
aagaggaaccgaatgtacagcctccagctggcaaagccagataacttcttagttgtaacttttgtgtatgtccctggccacagcagccaggggtatgctgaaagccatcagtgccatcattgctgcaagctcagactctcttttctctccctccttggattctaaccccttttgaggtgttccaaataaggccatgtgacctagtgggaaaatcccaacgtattaagccagaaggacatgtattcaaatcccagctcttccacttactagygtgtgatttggagcaagttagttaagttctctgagcctcagtttcttcaactgtaatatgattctaattcttaccctcctaggacccagatgttaatcagtcaaggaggtggaggaaaagaattccagacagacaggcccaaatggccaaaggcataaaaatgagatactataggatatttgctgagaaggactggggggactacaagcacccaaatattttaagggaaagaacaggccagagcaaaggtatcataagtacaaagagacaagtcttgaagagcattgaagtagcttggatctgattcaatgtgtaa

SEQ ID NO: 583923 - DNA, 587 bp, Homo sapiens
aagaggaaccgaatgtacagcctccagctggcaaagccagataacttcttagttgtaacttttgtgtatgtccctggccacagcagccaggggtatgctgaaagccatcagtgccatcattgctgcaagctcagactctcttttctctccctccttggattctaaccccttttgaggtgttccaaataaggccatgtgacctagtgggaaaatcccaacgtattaagccagaaggacatgtattcaaatcccagctcttccacttactagtgtgtgatttggagcaagttagttaagttctctgagcctcagtttcttcaactgtaatatgattctaattcttaccctcctaggacccagatgttaatcagtcaaggaggtggaggaaaagaattccagacagacaggcccaaatggccaaaggcataaaaatgagatactataggatatttgctgagaaggactggggggrctacaagcacccaaatattttaagggaaagaacaggccagagcaaaggtatcataagtacaaagagacaagtcttgaagagcattgaagtagcttggatctgattcaatgtgtaa

SEQ ID NO: 583924 - DNA, 661 bp, Homo sapiens
aggttacacaaaatctcctactctccatcatctgatctcacagttttattgtgaggattaaatgatggaacacgtgcaaagagtttgacatgatgcctgttactgagtcagccctcagcatacaagcctaatacagggtttgaaatctggccctagtgttctgccattcacctcctctgggtggtaatatgctggctaatgttttataatcagctctctgagtaaaacaaggctctgatttatagtgcttgctgatttccatggtgtaaatattcccatcatggccaatttcatggtgctaatgtgatgttactgaacacagagttgagaaaagatacacacaagaggttttcatgagytggtaagagcaggacgcagcacaccagtgacattggagctacactggcccagtgcttatgctctgacctggatcttttatgaggaactcatttctggctcatgctcaagaagctgtctctccgtgatgtattaaagagcggtctccttcacattcttgggagtgatgctggataaagcatgtagtcatttcatctcttcaaataagatattacagatgattctgatctgctgagatgcagcagcctcttcaattgcagccaagggtcagctcatgatattgatggtaaggactgcccttctg

SEQ ID NO: 583925 - DNA, 555 bp, Homo sapiens
agacactaaaatgatgagtagagtttttggccatttcactatgctggggagaaaaaatatggagatgagaataagtcataaaaaggggtgttggtaaacataacaggtgttcaggtgtgatccctgaagggctacagtttactagtggggataaaacagaagtgaaacaggaaattttcctggaccccttcatgggtgggaactagaatgtgggtgctggagctagccagtggcttcagaggcttcactcactgggatccactgcattccaccccttgtgagaggagcagtgcagctgagcttgtgcaggaaggagccagggcaagtgcttctgggcactgtcaggagcaaaatgctgtgcggggcccatggcagcgtctatgggagagtacccacwatccccaaagccccagaaggagtgttacaggcagtgctctttcagctttatcatccacagatggcttaaatgattaacagcttagtggacgctctgcctttttgcaagggtagagggtcagcgtgacagccttctgtatcttgagctcttgttcagca

SEQ ID NO: 583926 - DNA, 560 bp, Homo sapiens
taaacgtaaggtcacaggataaacctcctccccaaaaataagagagacacacgagcgtatacagagaatcacaacttgccagaacagagacccacaagcagaaacctctgtgggaacaaatactggggcaggaaaacccaaactgtaactggtgaattgctgaaagctcagtgtggatgaatctgagagttagaaactccagtgggggcaggcatacagaggcccctcacttkttatgagttttacttccaggagctctctcaggttctcaaagtgagtatcagagaaaactttcctcatgtatttgaaaatagaagggagaagtaaccattatgaaatatgccaaagcattctgttcttaaaaaggcctgtggtcaataaaaaatatcttaccaaagcctactcttttgtggttttaacagagcctaaccaacctggagaaagagaaagacccaactctagcccactctagtcaacctgtcctacctggagcaggggtcagggagactgagaagcccttgtgaagttcatattcaaggggcataggatcacaaaaggac

SEQ ID NO: 583927 - DNA, 595 bp, Homo sapiens
ccctgtttgcaggctgactactggacaaaggccactgaactacccatgccccacttccacccttcctggctaaggccacatcccttccctgccccagcagacagcatctccttggaccaggaaagttctgccctacaatcagaggccccatmcagccacgtgcaaataaatatggagacattctgcttctctgactctacttttttaaagtctccacattgactactgccacattacaggtacatttctctttaaaagtgattagtaggcccttatcagatcctgctaattattcatttttctggctaactcctcctcattcttccagcttcaggggtgtcccctcctctgggaagttctcccagatatcctgggtctggtgagatgccgttttctccctgcctctaccctagcatcctgaagacgtccttgccatgtgctaatatgccctaggctggcattacctgctcctatcagagatcccacagagactctgagccttcctggcagggaccatatacttccacagggtctgagggtaggggaggaggaagcagtgggacatagtatgtgcttgggaaaatatgacgaacaa

SEQ ID NO: 583928 - DNA, 553 bp, Homo sapiens
gtgacctcctgcagtgggaagagcctgttcccagacattcagacaattttgcccaacgaccttgtaagaaatgacacacacctgtgccactcattgactttcacctcgaggagcaatccaaatattacaccaaggcttcagtcctcagccaatccaatttcagaagtcctaaaggactttgacccaggttgcaaaattacacacatctctctccttccttgtaggaagataacaatcctataaatttttcctgctggcaaacaagttttctcacaaaaagatagacattttcaacctcttagtaaccaagtttctcagcaaaatgttgacttatgacctaatatttggctttagtcagactttggagcatttcacatccatgcttgcaattcaacatgacaatcagacattgttatttstatgatttcaaaagggtatgtcacgttgagggaaaaattaagataaaggtttgtttctacatttcaagtgatgctccaagaatgaaaacaaaatatgctggcttagagagaatggaaagggactccaaggaaag

SEQ ID NO: 583929 - DNA, 578 bp, Homo sapiens
ggcttgcaaaaacacagatggctcaacttctccctcagaactttggatccagtaggttagactagggtccaagaatttgcatttctaccaagttctccagcgattctgaaccccacttagagaacagtckttgattttctccagtgctcagaaaggtaagagatagaaggagtttctgccatattagagggtcaaattctccgaggggaccagcaatttggatatgcattttcctgagttctatggtgggggctagttgtctgacctcacaactagaagtgatactggtgtttgcattggtctctttcaagtgactcaattaaatagcagaaagtgatagaggaaaccaaggaaggggactggagctggattcctttaaatggactttttcatgaaaatatctgttattctctgagaagcggttgctgcaggctgattgtgggagtgaccctttgcagcaaaggaaaggaggcagttccaggcaccctgtgggaccttcccagctctaatttctcattataatgaagactgatgggtaatgggatcagctttttgcccaagggcctgcatggttctgt

SEQ ID NO: 583930 - DNA, 637 bp, Homo sapiens
gctaatacccttctaaacccttatgagatcccctgtctatcttctcaattaatgtgcccctcttctatttttcgatattgaatatgaaagtcaagttcctcccataataagagttgagtcattttgtgccttatgagctttcaagtttgtagccagawcttctttagtttgaaagcatattagggatattcagttcgtagccatttttagggttttctgaatttttttgtgttagccacccctccccaccttcccatccggggttaaatgcctgcccacagggccccctttctctcaaatgcagtttcactctttggaaaatgcgctgggcatcttccatttgcctctctcaccctatttccaacccttcttcaccctgctctgtgaggctaggggctcaactatatggattgtattgatgggttcctttgctgcctggcttcggtttgagtttgtccaatacgaagccccattaggagactggagggtatcctaatgcagggtctggcacgtagaacccagcaaactcttttgatggtaagggtgggtgggctatgtgcaagcaatttctgatgctgctgagccctgcagtaatggtactgggagctgtcagtattgtccttcttatgaacttctt

SEQ ID NO: 583931 - DNA, 637 bp, Homo sapiens
gctaatacccttctaaacccttatgagatcccctgtctatcttctcaattaatgtgcccctcttctatttttcgatattgaatatgaaagtcaagttcctcccataataagagttgagtcattttgtgccttatgagctttcaagtttgtagccagaacttctttagtttgaaagcatattagggatattcagttcgtagccatttttagggttttctgaatttttttgtgttagccacccctccccaccttcccatccggggttaaatgcctgcccacagggccccctttctctcaaatgcagtttcactctttggaaaatgcgctgggcatcttccatttgcctctctcaccctatttccaacccttcttcaccctgctctgtgaggctaggggctcaactatatggattgtattgatgggttcctttgctgcctggcttcggtttgagtttgtccaatacgaagccccattaggagactggagggtatcctaatgcagggtctggcacgtagaacccagcaaactcttttgatggtaagggtgkgtgggctatgtgcaagcaatttctgatgctgctgagccctgcagtaatggtactgggagctgtcagtattgtccttcttatgaacttctt

SEQ ID NO: 583932 - DNA, 637 bp, Homo sapiens
gctaatacccttctaaacccttatgagatcccctgtctatcttctcaattaatgtgcccctcttctatttttcgatattgaatatgaaagtcaagttcctcccataataagagttgagtcattttgtgccttatgagctttcaagtttgtagccagaacttctttagtttgaaagcatattagggatattcagttcgtagccatttttagggttttctgaatttttttgtgttagccacccctccccaccttcccatccggggttaaatgcctgcccacagggccccctttctctcaaatgcagtttcactctttggaaaatgcgctgggcatcttccatttgcctctctcaccctatttccaacccttcttcaccctgctctgtgaggctaggggctcaactatatggattgtattgatgggttcctttgctgcctggcttcggtttgagtttgtccaatacgaagccccattaggagactggagggtatcctaatgcagggtctggcacgtagaacccagcaaactcttttgatggtaagggtgggtgggctatgtgcaagcaatttctgatgctgctgagccctgcastaatggtactgggagctgtcagtattgtccttcttatgaacttctt

SEQ ID NO: 583933 - DNA, 425 bp, Homo sapiens
atctcttttttgcccaaacttcactgttttcctatatggatgaaattccccaaaggctattttgattctttctgggattgagagaacatggcaatatttgattggcagtccagaaaagggagcttctctgggaaataagactagacaaggcaagaggctgctgagtgaatgaarcaactagatctctggggaagtggaatcccagctcttggctgagacagactgtggttaagcaactccccagaaagagcactccctcagcctggcacataaagctgcccattccactttggctctgcagaccatgctggtgttatttatagggaagagaaaagtagttgagagaggtcctaagtcatggcactggggcaagtaagtagcatttctgaggagttgttacagtgaaaggccaaagtctctggaaa

SEQ ID NO: 583934 - DNA, 562 bp, Homo sapiens
taacaaatttttaaatcaattttgaattctatttaaagtataaatttttgttgtcaatcctcttgatcatattttgttttttatttaattaatttgatctcatattgattttcttcatatacttcctttgtgcttcctttttcgatttaattttcagtttgttatgtcttctgactctcatggtagattattatcttattttatgtaagcacatcttcagcagaggctatttttgtctatagaaatattatatattctaatttktataattgttaatatgaatagctttgatttatttttattagatagcctacgagtttcaacagtttggagctagatttaacctttttttatttgtgaattattttttattcataggattagacaaacttttgatttcatttgcatacatgaagcagtttatgagtttaattccacaggagatatagaagacatttttacccacccaaagccctaggcagaagcatgtttacttttcatttctcattgtcctggggagagagtgtaagtattctcttcttcctatcacttaggtacaatc

SEQ ID NO: 583935 - DNA, 541 bp, Homo sapiens
attattgcccttagctgtatgagagatacccctaccttgcttctttaaaacaataatttyaacttttattttatattcagggagtacatgtgcagatttgttacaggggtatattgtgtgatgctgaggtttgtggtaccaatgatcctgtcaccagttagtgagcaaagtacacaacaattggttttttgccccttgcccccacttctacctccctcctctagtagtccccagtgtctattgttcccaagtctatgtccatgagtacccaatatttagctcatacttataagtgagaacatgctgtattttggttttctgtcactgtgttaataatttgcttaggataatgacctccagctacatccatgttgctgcaaaggacatgatttcattcttttttacagctggatagtattccatctaccttgcttcttgcttctctcattcttcttttcttaagagaagcacttcaacaagaattcttctcaggctctgcttttggggaaagcaacctaagacacaggtttgttatagaaat

SEQ ID NO: 583936 - DNA, 570 bp, Homo sapiens
ttgcttctttaaaacaataatttcaacttttattttatattcagggagtacatgtgcagatttgttacaggggtatattgtgtgatgctgaggtttgtggtaccaatgatcctgtcaccagttagtgagcaaagtacacaacaattggttttttgccccttgcccccacttctacctccctcctctagtagtccccagtgtctattgttcccaagtctatgtccatgagtacccaatatttagctcatacttataagwgagaacatgctgtattttggttttctgtcactgtgttaataatttgcttaggataatgacctccagctacatccatgttgctgcaaaggacatgatttcattcttttttacagctggatagtattccatctaccttgcttcttgcttctctcattcttcttttcttaagagaagcacttcaacaagaattcttctcaggctctgcttttggggaaagcaacctaagacacaggtttgttatagaaattatatttgtactcatatatattaatattttaggtatatgtgtattttgataagagcagcaagaat

SEQ ID NO: 583937 - DNA, 608 bp, Homo sapiens
tagagtgtgcacatatgtaacttccatgcacactcccagatatttctaaatcagatagccccaaatggcatctcattttgcacttctaccagaaatgaataagggattatatctttccacaatcayctcccagtctgtcattggttaataaaatcgacagcattctttactaaacagaaattttaaaatacaatataacaaaattaattaattcatttttacctcatactattttattttattttttcatatctggttaagcaagtttgctcttagtccaaggtcacaagaaccctcttggctgaggactaagtgttctaaatgttctagcagggaatttcagctccttgaatgctcttcgtcaaagaactattctcctctctctgagaaggtgatcctcctcaaccacagaggcagtttcaggaagagtgcccatggaggcttgaaaaggagtgtcacgtctaggcagccagagcacacatgttgctatctggacaatcaatgaactgtgagttgtcccagacaaggcatcctgacatgtggttgggaaagttgaaagcagagcgtgacttagcaacacatgactcagctttccctttctgcacctc

SEQ ID NO: 583938 - DNA, 616 bp, Homo sapiens
catacttgtagaacaaaaatmagtaacattttaattattgaaacaatgtaacaactttaaacacagtttcataactaggagtgaatcacccataatctcatacccggaacaaaatatctgttagtatgatgcacctttacatagctgtaatcttaaagggcatgtacttccttctttgctttcctttttttttttcttcatcctttccctctctccctctctccctctctccctttctcccttccttctttcttttcttcctttctttctgattttctaacttccttctttaaacattccttgatcgtctgtgggtctggacagcaacatggagatcaattaggcgcagcattttaaatttgccctcaagaagttccactagtgtaagagtaggcaagtaaccaattattacaatagtgggacaagcgctgtgatagaaataaatacagagtactgtggcagtccttacccagaaaaagatatctagggtagatggtatctgaactgagaattaaagaataaatagaagatagcatggcaaaaaaagttcaagagtgttccattctttgagaatagggcattgagatagaacctgtagacatgagatagaactgtg

SEQ ID NO: 583939 - DNA, 569 bp, Homo sapiens
ggtacacttgttatcgttaatgaaccaatattgrtatattattattaattaaattccatattttacattagggtttacactttgtgttacacagtactatgggtgttgacaaatataaatgttatgtatctaccattacgatatcatacagaatagtttcactgccttaaaagtcccccgggctccacctactcatgcctaccttcttctcatccacccttttcctagcaacccttcatctctttattgcctctatagttttttctaatttgaagtcatatagttaaaattgtacagaatatggcctttgcagactgacttcattaacttagtactatgcatttaagattattctatgtcttttttgtggcttgatggctcatataaaaaaatctgaataatattccattgtatggatgtatcatagtgtatccattcacttattgaagaatgccttggctgcttctaagatttgacagttctaaatacagctgctataaatgtctgtatgcaggtttttgtgggacatcagttttcaaataatttgggtaaatttacttggtgattgc

SEQ ID NO: 583940 - DNA, 569 bp, Homo sapiens
ggtacacttgttatcgttaatgaaccaatattggtatattattattaattaaattccatattttacattagggtttacactttgtgttacacagtactatgggtgttgacaaatataaatgttatgtatctaccattacgatatcatacagaatagtttcactgccttaaaagtcccccgggctccacctactcatgcctaccttcttctcatccacccttttcctagcaacccttcatctctttattgcctctatagttttttctaatttgaagtcatatagttaaaattgtacagaatatggcctttgcagactgacttcattaacttagtactatgcatttaagattattctatgtcttttttgtggcttgatggctcatataaaaaaatctgaataatattccattgtatggatgtatcatagtgtatccattcacttattgaagaatgccttggctgcttctaagatttgacagttctaaatacagctgctataaaygtctgtatgcaggtttttgtgggacatcagttttcaaataatttgggtaaatttacttggtgattgc

SEQ ID NO: 583941 - DNA, 560 bp, Homo sapiens
gctttcttatttttgaagtttaagagttctttgcatattttgtatactagccattggatagctgataggcaattgctttttttctcagtcattctcctaacagtgtctttgacagagcagaagttcttaattttaatgaagttcagcttatccagtttctcttcatggattgtgcttttgtgttatatctaaaaactcaccaaacccaaggtcacctagattttttcatatgttattctctagaagttttatagttttgcatttaggtyttcgattcattttgagttaatgtttgtgcaaggtataaggcctgtgtctagattcattttttttggtatgtggctgtccagttgtttcaccaccatttgttgaaaagactgtcctttctccattgaattgtctttgctcttttgtcaaagatcagtaggctatgtttatgtgaattatttctgggttctctattctgctccattgatcggtctttttttttttttttttttttttttttttttgtccgtaccacactgtctttactactgtcatttctatgaatttgaata

SEQ ID NO: 583942 - DNA, 560 bp, Homo sapiens
gctttcttatttttgaagtttaagagttctttgcatattttgtatactagccattggatagctgataggcaattgctttttttctcagtcattctcctaacagtgtctttgacagagcagaagttcttaattttaatgaagttcagcttatccagtttctcttcatggattgtgcttttgtgttatatctaaaaactcaccaaacccaaggtcacctagattttttcatatgttattctctagaagttttatagttttgcatttaggtcttcgattcattttgagttaatgtttgtgcaaggtataaggcctgtgtctagattcattttttttggtatgtggctgtccagttgtttcmccaccatttgttgaaaagactgtcctttctccattgaattgtctttgctcttttgtcaaagatcagtaggctatgtttatgtgaattatttctgggttctctattctgctccattgatcggtctttttttttttttttttttttttttttttttgtccgtaccacactgtctttactactgtcatttctatgaatttgaata

SEQ ID NO: 583943 - DNA, 560 bp, Homo sapiens
gctttcttatttttgaagtttaagagttctttgcatattttgtatactagccattggatagctgataggcaattgctttttttctcagtcattctcctaacagtgtctttgacagagcagaagttcttaattttaatgaagttcagcttatccagtttctcttcatggattgtgcttttgtgttatatctaaaaactcaccaaacccaaggtcacctagattttttcatatgttattctctagaagttttatagttttgcatttaggtcttcgattcattttgagttaatgtttgtgcaaggtataaggcctgtgtctagattcattttttttggtatgtggctgtccagttgtttcaccaccmtttgttgaaaagactgtcctttctccattgaattgtctttgctcttttgtcaaagatcagtaggctatgtttatgtgaattatttctgggttctctattctgctccattgatcggtctttttttttttttttttttttttttttttttgtccgtaccacactgtctttactactgtcatttctatgaatttgaata

SEQ ID NO: 583944 - DNA, 637 bp, Homo sapiens
cattatgatgatttttatgtagcttcattaaatttaataatattttgttgacaattcttgcatcttttaatgcaagatattggtctgtagttttcatttttttctactgtcctgctttagttttggtacagagtgatgcaggcttcatgaaaaattatgtagacaaaatttttattctattatttgaaagacattttygacacctgatgttattttttaaaatatttgatataacctacactgggaaatcatcagagattggaatttctttttcaggagactcttgagctacaaattcgaattatttaatatatgtaagaagatttgtctatttcatcttgtctgaatttgtagtttacagtttttgaggaattgtatcatttcagataaattattgaagagagtgcatagagttgagctggctattcactctctattcttcttacatgtatgtcatttttagtgagagcacctctttcatttttactgttggtaatttatatattttctctttttttaacaatcttgatatttatccatttcatttattatttcaaagaaccagcttttactttcattgatacttaatatttgttgtctgaattaaacaaaaaattttttactcttatcttttatc

SEQ ID NO: 583945 - DNA, 477 bp, Homo sapiens
gttgtctgaattaaacaaaaaattttttactcttatcttttatctttactcttatctttactcttttcttctttaaacttgctttgaatttattttgctctgtttcttattttttaagttagaagcatagaatattgatttaagaactttcttctttcctaattaataaatgcatttattgctgtgaatttcagtctaatcacttccttaactgtacacaacatctttgatctatttgtgcttttattttctttaagttctattttttttctaatttatcttggaactttctctttgactcacagattattttaaagtggggtakgtaatatgcagatgtttgctgatttttcagtcatctttctattattgatgtctagtttaattccatgaaagtctgagaacattgtagagtttaattattttaaacttcataaagttttttaaatgattcaggttatggagtatcctggtaaa

SEQ ID NO: 583946 - DNA, 508 bp, Homo sapiens
actggaatatatccattagggtttttttttttttttttttttgcatttttttcaaatttttattttgaactaatttaagactcacagaagttgcaaaaataatactggargttcctgtgtgtactttccctagctttccccaatgacaacatcttatatacaagagtaacattttcaaaaccagaaaatcggtagtgttacaacactattaattaaaccataggaattatttgacttttatcagcttttgttggtggtggtgatgttgatgatgatatgcagtactgtggaatttcacatgtataaatttctgttgacaccaccacaatcaagatatagaactcttccagcactacaaaaaaactccctcatgctgctatatctgtataatcacactcttcctctgattctaacccctgggtaaccattgatctgttctccattattgtaactttttcatttcaaggttgctctataaatggaattatacagtatagccattagtttt

SEQ ID NO: 583947 - DNA, 578 bp, Homo sapiens
atgctctttttgactatgccttatcagcctattgatgcccctctggaggttcagtcatgcctctttatttycccctggatggaaataaggtataatttagaaatccctcagtttatttttttcacttttgatagaaacacaggcctgatgaaaatttcccctgtttttattacctatcaatctttccaatggaattaatagagagaaaggcagttaaaccctgtgctcaaattgcactatcttacccaaagtcctatgaaagaaaaattttgttacatattttaaatgatatggagtgcctatatcccctagataaaccttggagtctctaggttaagtcttcctgtttgaacgtatccactttcccagaacaggctcgggtggactctggaatttgcaggaggccaataaatcacttcttacgtataccagggatagtagctcgtttttaatcttcactctgaccaagctctggccctgacacatgatctcaggcatgagatgggtgtctgccttgggctctgctcttgcagagtcactattctgcaggaagcagctttgcttctcatgcccaggag

SEQ ID NO: 583948 - DNA, 607 bp, Homo sapiens
ttaacatcttgttttaattaagaactttcttgcctatcagtcttctcaataactgtgtactcttgtccttgtgaaactgaaggctgacctgattaagctagccaaaattaacctgccttgcttgcttttaactgcttacttctagttgatcttaaacccttatagctaaaagtcatgtagccaaacaataygtaactcaactctcactagcttccttacagataatatatctgatgtgtatgtcactatggtaacggttgctttaacttgttttttgggagctgggggacagctcttgtctggtttcaactgattgagaccaccgacccttcaactgggcctgcagaaatgcctaaaaggttatcttttggcattagagggacaaaactccttcctcagatcatgctaatgaacatgcgtcctatgaagagtcatgacccccagctacacttgcaaagaccatcgattacatcatctttccccactgccaatcacttttccccatgcctggaccaccttaatcctctatcccataaatatcgctaaaaccccatcttcagggagatgtactggagacatgttctcccatttcctcacttggctgcct

SEQ ID NO: 583949 - DNA, 607 bp, Homo sapiens
ttaacatcttgttttaattaagaactttcttgcctatcagtcttctcaataactgtgtactcttgtccttgtgaaactgaaggctgacctgattaagctagccaaaattaacctgccttgcttgcttttaactgcttacttctagttgatcttaaacccttatagctaaaagtcatgtagccaaacaatacgtaactcaactctcactagcttccttacagataatatatctgatgtgtatgtcactatggtaacggttgctttaacttgttttttgggagctgggggacagctcttgtctggtttcaactgattgagaccaccgacccttcaactgggcctgcagaaatgcctaaaaggttatcttttggcattagagggacaaaactccttcctcagatcatgctaatgaacatgcgtcctatgaagagtcatgacccccagctacacttgcaaagaccatcgattacatcatctttccccactgccaatcacttttccccatgcctggaccaccttaatcctctatcccatraatatcgctaaaaccccatcttcagggagatgtactggagacatgttctcccatttcctcacttggctgcct

SEQ ID NO: 583950 - DNA, 646 bp, Homo sapiens
cccttacccctgatgtttcctgttcataatttttcatccactgttcccaccctgctctctggctataaattcccgcttgcccatgttgtattcaaagatgagtccaatctctcttcrttagaaaactcattgctgcagtccccatatctgttgcgatggccccgaataaagtctgcattaatgtgctttaataagtggcattgaataattttttctttaacaggagtagaaagcagaaggcaacgttagatgtaaaaagaaagacctcaaagcactgttgctggtatgaagatggaggtgagcatatgagaaggaatgtgggcagtgtctaggggcacagagtggccccagctgccagccaacagggaaaggaggacctcagtcccatcaccacaggagctaaattataccaacaccctgaataagactaaaaactatttatctcccagagcctccacaaaagggcccagcttgctcacatcttggtttctgtcctgtgagactctgagtatagaacctagtagagccctcctgaactggacttctgactcataaaagtgtgagataaggaaaataagttgtgtcctgctaaacctctagcaatttattttttatttttaattaattactttatttatttatttag

SEQ ID NO: 583951 - DNA, 646 bp, Homo sapiens
cccttacccctgatgtttcctgttcataatttttcatccactgttcccaccctgctctctggctataaattcccgcttgcccatgttgtattcaaagatgagtccaatctctcttcgttagaaaactcattgctgcagtccccatatctgttgcgatggcccckaataaagtctgcattaatgtgctttaataagtggcattgaataattttttctttaacaggagtagaaagcagaaggcaacgttagatgtaaaaagaaagacctcaaagcactgttgctggtatgaagatggaggtgagcatatgagaaggaatgtgggcagtgtctaggggcacagagtggccccagctgccagccaacagggaaaggaggacctcagtcccatcaccacaggagctaaattataccaacaccctgaataagactaaaaactatttatctcccagagcctccacaaaagggcccagcttgctcacatcttggtttctgtcctgtgagactctgagtatagaacctagtagagccctcctgaactggacttctgactcataaaagtgtgagataaggaaaataagttgtgtcctgctaaacctctagcaatttattttttatttttaattaattactttatttatttatttag

SEQ ID NO: 583952 - DNA, 590 bp, Homo sapiens
tttactaattttgatactggtcttatgcaaaaggttatatttggtgccagtaggatactgagcatactgtaaaccacacattcatgtgttcacttattcatccaacaaatatttactcagttccagttgtttgtcacacactrtgaatgcaaacacagagatgattgacaagtcttccatcctttacagagccttcaatacatgtgtgagagaaagaggaattataagcaaaatatgcctctctaacatgctggggattttaattaaagttaaaagtttaaaacacagaggtagactctgcccctcctctctgcttttcccacctaaggacaagctcctttacaacacactttcttttttaaaaaaaatacatatattttttaaatttaaactagacttttacttctttattgcttttttattttgggttatccttgcacaagggccatactaaccttctctgtattgttccaattttagtacttgtgctgccgaagagaacacaacaacacactcagagacagagcccatagacaatggcaccagaggatctaggagcagatttcactctccccatcaatttaccttcc

SEQ ID NO: 583953 - DNA, 470 bp, Homo sapiens
aggacctaacagagatagaagtgggtaggggaatgatgaaaggctcttcaaaggagtcaaagcatgagtggaggtgtgaaaaatacacaggaatcatccaggtggatagggaagaagtgaaggacagagcatatgcgtttgagtgtgatattctaagggayagattgggaagctcagatgtggctgactgatgtgtgagaacaaagcataagatagagacagaaaggtccatctaattcctaggtgcttcaggctgtgctcacacaagggctgggcagataaccatggtgcccaacaaggtgctggcagagaagcaaagctgacagatgccggctcctgcttgaagttaggcattgtccctgtagggtaaggataagcttgcatgaagctaaccactgtggttggcccaaaatgagagacaggccacaggatgtgatgggaaacactgcagacatctgccacacgtggtt

SEQ ID NO: 583954 - DNA, 661 bp, Homo sapiens
tatttttttattccaaaggatgcaattttttttctcagcttatcaaagcattacataccctttggaaatcatttgcaagatacatgaaataacaaaaacactgtttaactcattccagagctcaatgtctagcaataaccactatttatcactgttatgtatttacagtgagtttttaagctagatgaagacacaaactggtagataaaacaatggagattacactgcacttttagatttatgtgctgtgattggtttaacaattctgtcagaagcatcaccctgggttattaaggattctctgtatgcataatttttgatggtgatataattttccattgtttgtctcyatcataatttccgtaactattcccatattgctgttccttcaagtttttttctaagttttcactgttatgattaatgttgaaataaatctcagtttacattttttgttattgccttacaataaatcgctaggagtgaacttagtggaacaatggtcttagacatttttaggatgtttgttccatactgtcaagtttatttccagaaatactgttttctagaaaggattttttttttttctctccaagaagtgtccctggatccagagactgagcccattctgagagccttcctcctcagggaagctagcact

SEQ ID NO: 583955 - DNA, 563 bp, Homo sapiens
tttaattgtgggtgcttccatatcccaaggttctctcttgttgttgttcaaagtcgcacatctttacatgtgaataccatggcctatccaagatgtggtggcctgtatcacctggcagcctcccgtatcatcctggtgttgccattctggtgcagagtcttgtctgtattgagcatgagtcagggcatatcactgaggaccccagggagcccagggtctgcaatgaaggagaaagcatgtaggagacttgggtacagtgatacagatgccaactctgaggtgagcaaggaggaggcatggggaagatgaaccgcaaatcccgaggacagactccaagtggtgggaggaagatcctgaagcacaaatctgataatccctcagtttgatctcagcctggcttcagacacagccaagatcctagactaagcctggatcttggtcacaacctggactcacctccaggctcattragccctgacacaagcccatgccaacttagattctggccattggagtaaaacactacctggcaaccatttgagcctgaaccccaactgagaata

SEQ ID NO: 583956 - DNA, 501 bp, Homo sapiens
tcacccccactagctttggtttctggcccatccccctctttctttgcttttatctcagaggaagcactccggacttctggagaaaacctttccttcttcagcttccctccactcacaaarctacttcctctaaactcagatgttctaagtgtagaaaggatggcccctctggggttaggaagaggatatttgcttgcctcttccataggcaattatattttcctttgacactggacagagctctgtatccctgacctgtggcagaatgtggttggaggttgtcacctattagtgactctaagtgactattcctgattcactcggccagtggtgttaggctcctagtggcacaggagggcatgatgtcatgggcctggcttcctcttcaagaggaaatatgtgggcattctgaacatttctgttctgtatgtctgccaatctggcaccctcctaccagacaccaaccttcagagtgcatgagcattgcctgtaattcaaaag

SEQ ID NO: 583957 - DNA, 584 bp, Homo sapiens
tctggaatttccttatatgattaacaaaacttctttccaaaagtaatgcaattgtcttaagacttcctccctaagaatctcatcaaataaccagggaagatcaaccacctgagaagagaagagactgtaagtcgtcaccacacccagacatcatctgcttttctgagagcagctccaagtgataacctggaggactttatctgcaaaataaaacaacctttgtccctgtacagtgccacctctcccattctagtagtgtctgactccctctgcctgggtccattcattctttctaatgattgactgctcctcaaaagaattgtctacattttccatctgttccctcttgtgtgaagaaggatgcrtaagctcttatactacactggcttttttgggtgattaccctgtgattcccccctgtacatgttaataaatttatatgccttttctcttattaatatgccttttgtcagtttatttttcagcgtactttcagaggacgaaggcaaactgttccctttgcccttgcattaacaacagactgacacagattcatggagatcagccaataggagggaaagatt

SEQ ID NO: 583958 - DNA, 455 bp, Homo sapiens
atttatctaaacaattcaggctaacgttgtcattgtctggctactcaaagactcctgctaattacttagcmcattctgtctgatagaaaagtctttcttcagctgcatgggatacatgtggtgaggaagagggggacaaagcaacacagaggtgtggctgtcctgatgttggagctggagagaagatctgagactaaatacttcccagaaactttgacgacacttgctttaaacacaggcctgtcacaaagcacacatgttgtgtctgacagaacacacttcatttcctctacatggaacagtctctcagttgttcccaattgcctcagagacaatagaaaagggagtctggggaaaatcagattacctctgatctcatttctttctcagtttcatggatcataggtttaggttattttaagaattgccactgaggaagaaaaggcaaagaattc

SEQ ID NO: 583959 - DNA, 455 bp, Homo sapiens
atttatctaaacaattcaggctaacgttgtcattgtctggctactcaaagactcctgctaattacttagcccattctgtctgatagaaaagtctttcttcagctgcatgrgatacatgtggtgaggaagagggggacaaagcaacacagaggtgtggctgtcctgatgttggagctggagagaagatctgagactaaatacttcccagaaactttgacgacacttgctttaaacacaggcctgtcacaaagcacacatgttgtgtctgacagaacacacttcatttcctctacatggaacagtctctcagttgttcccaattgcctcagagacaatagaaaagggagtctggggaaaatcagattacctctgatctcatttctttctcagtttcatggatcataggtttaggttattttaagaattgccactgaggaagaaaaggcaaagaattc

SEQ ID NO: 583960 - DNA, 614 bp, Homo sapiens
aaaagggagtctggggaaaatcagattacctctgatctcatttctttctcagtttcatggatcataggtttaggttattttaagaattgccactgaggaagaaaaggcaaagaattcaatataatcacactagtaacatgactgaataggtttgtgaaaacttcttccttttgtcctttctccctcctttcttcctgtgcatgcatccctcctttcttttaggtcactatctgggtactgaggacaagacactaggaaggtagcagctgtcattcaaaagaccaccaggatggatagtagaaattattggcagtagcagtttgcaaactgggaagacactttctatggctggtactaaagctactttctctttgaagagtggaaggacaggttgggttttatggctcagagggccagtatcatacatattcagcagatttgggagaaagctatacatatttatgagagaagccaagtgcatgcwtaacgggtaaaccagtacgtatcatacattccatgttcactttagggcagggttttagcattgaaatggggtggaatttggctcttcacatcaaaggtgaattataagacacaaagacaatttgtgcgca

SEQ ID NO: 583961 - DNA, 614 bp, Homo sapiens
aaaagggagtctggggaaaatcagattacctctgatctcatttctttctcagtttcatggatcataggtttaggttattttaagaattgccactgaggaagaaaaggcaaagaattcaatataatcacactagtaacatgactgaataggtttgtgaaaacttcttccttttgtcctttctccctcctttcttcctgtgcatgcatccctcctttcttttaggtcactatctgggtactgaggacaagacactaggaaggtagcagctgtcattcaaaagaccaccaggatggatagtagaaattattggcagtagcagtttgcaaactgggaagacactttctatggctggtactaaagctactttctctttgaagagtggaaggacaggttgggttttatggctcagagggccagtatcatacatattcagcagatttgggagaaagctatacatatttatgagagaagccaagtgcatgcataacgggtaaaccagtacgtawcatacattccatgttcactttagggcagggttttagcattgaaatggggtggaatttggctcttcacatcaaaggtgaattataagacacaaagacaatttgtgcgca

SEQ ID NO: 583962 - DNA, 427 bp, Homo sapiens
atttttcatataaatagaaaaacaatcctaaaattcacctggaaccactaaagatcccaaatagctaaagcaatcttgagcaagaagaatggagcaggaggcattacatgtcctgatttcaaaatatgatacatagctatagtaatcaaaacactatggttctggcacaaaaacagacacatagagcaatggaatagaatcctcttgayatacatagtcaattaatttttaacaaaggtgccaagcatacacaatggagaaaggataatcttcaatcaataatattggaaaaactggatatccacatacaaaagaataaaattagaccctactttacaatatacataaaaaattactcaaaattgattaaagacttaaatgaaagacttgaaactgtaaaactcttaggagaaaactcctttacgtt

SEQ ID NO: 583963 - DNA, 427 bp, Homo sapiens
atttttcatataaatagaaaaacaatcctaaaattcacctggaaccactaaagatcccaaatagctaaagcaatcttgagcaagaagaatggagcaggaggcattacatgtcctgatttcaaaatatgatacatagctatagtaatcaaaacactatggttctggcacaaaaacagacacatagagcaatggaatagaatcctcttgacatacatagtcaattaatttttaacaaaggtgccaagcatacacaatggagaaaggataatcttcaatcaataatattggaaaaactggatatccacatacaaaagaataaaattagaccctactttacaatatacataaaaaattactyaaaattgattaaagacttaaatgaaagacttgaaactgtaaaactcttaggagaaaactcctttacgtt

SEQ ID NO: 583964 - DNA, 580 bp, Homo sapiens
tttttcctaatcccaagctagttagatgtttctcctttgtacttctatagcatagtagcttatcattctcaaacctcacattaaactgggtggtagtttattctttaattatctctatctaccactagactatgaatttcttaagaaaagtgtaccgggttgaatggtgtgacacatgtccacccagaayctctgaatgtgatcttattttgaaaaggatttttgcagatataattagctagcaactctcaggagctacatgagagacatgaaagaggtgctctctcagggctttcagaaagaactaacctgctgacaccttgattttgaatttctggcctccagaactgtgagtcacaaatttctgttgctttaagccatctggtttgtggtacttttttttttttaatagtagcctagaaaacaaatacaaacaaggtcagaaacttttatatctgcattcagcttgtaactcagggcagggcacaaggtaagttctcaggaaattattgtggaatgcatggtcaaagcaagatggagatattgcatgtaagcttggtactaggacaatggttgatta

SEQ ID NO: 583965 - DNA, 597 bp, Homo sapiens
  misc_feature 1, 2, 3, 4, 5, 6, 7: n = A,T,C or G
nnnnnnnacgcgatccttcagcccgggtgaagactccaaattctgtgattttcaccaccagatagcacaacccgctattttctattcactgtattttattttgaacctttctctccttgattggagatgtttcttcagcatgactgactaccacccaatcgcaccattcamtctcttctctcagctgtgaatagactgcaattcccccggatcttttcctctgactccactcccctatatccatttgaatgttttaagaggatctctttgaaataagaattgtgccagagtaagcattatgtgccttctctttcaaaggaaaaaagtatacaatgcattgagctttctactatatgctaagcacgtccacaaatactatctaatttattctttaccacaactcactggagtatgtttaataaccccattttagagataaagaagttgagtctcagataaataacttacctgcgatgacatatccaatttgtaataaaaccataatttacagacatgtctgtcttactcagtacattgcagtccgtaacgcaaattaaatccatgggaccacacagctccctgtggctattgttattt

SEQ ID NO: 583966 - DNA, 617 bp, Homo sapiens
ataaatatctttggtaaaggtaactacaaagctaacgttaaagtcaataattttacatttttggtttgcaactccacattttatattctacatgatgtaaaagtagatgtataaaataattagaaattgatatattaaacacataatgtataaagacataatatgttacaacaacacagaaggggacagtgctagatggaagcagatattttgcatgttattcaagctctcttggtataaaccagattgttataaatttgagatgtttgatgtaatctgctactgttaatcaaaattgtaagccayggtaaccactaaaaaatatttaaaatatatatacaacagaagtgagaagagtatctaaatggtacattgccaaaaatggaacaaacacaaaagaagttgaaaattgagcaaatgaggaaaaatagagctataagatatacagaaaggaaatagaaaaatagcagaagtcttttcttaattattttgtgtacaaatggattaaattctgcaatcaaattgtaaagcttggtagaatgaattttttaaaatcttactattattcaaagtgatctacagattcaatatgatccctatcaaaatttcaacagcca

SEQ ID NO: 583967 - DNA, 619 bp, Homo sapiens
atgtaatctgctactgttaatcaaaattgtaagccacggtaaccactaaaaaatatttaaaatatatatacaacagaagtgagaagagtatctaaatggtacattgccaaaaatggaacaaacacaaaagaagttgaaaattgagcaaatgaggaaaaatagagctataagatatacagaaaggaaatagaaaaatagcagaagtcttttcttaattattttgtgtacaaatggattaaattctgcaatcaaattgtaaagcttggtagaatgaattttttaaaatcttwctattattcaaagtgatctacagattcaatatgatccctatcaaaatttcaacagccatttgtacagaaatgaaaaatctaaccctcaaatttatacgaaatttcaaagggccacaagtagccaaaacagtcttgaaaaatgctccacattattatccattagggaactgcaagctaaaactataaagaagtactacttcatagtcattagctataatttaaaacaaagaaaatagcataaagaaaatgtggcacacatacaccatggaatactatgcagccataaaaaatgacgagttcatgtcctttctagggacatgaatgaagct

SEQ ID NO: 583968 - DNA, 536 bp, Homo sapiens
cacacttcgaaaaaggaaatattattgctccaagatcctgcccacaagacccacactggcatgtcagtgagactgtgatcatcattgtgggcaccatcatagttgcataacaacaattggccattggattgcacaatatggcacagagagccacctctagggagtctgaaaccccatgtccatgattgaaggtgattttgagatrtgggaagagcaagcaggtatcaatgatgaaatctaggtgctcagaaacagggcaggcaaaacaattgcatgaacccacaaacctccacagtgtctgtaatgtgtagtccacttttgtggcactacattttatctcagagatacaactaatctcagtctctttatctgccaagtttcctgaatccttctttccaggatgaataaatttcctggcaaaacaagacccaggggaaagttttgaatccatataataatatatcactgcatttgtcacgaactcttgattcaacagaactgattttgtgcgcttagtccttgccctggggatagaa

SEQ ID NO: 583969 - DNA, 580 bp, Homo sapiens
gcatctaatgcagttgccccatctaatgctcaagctgtaacgctaccttagtttctccaattaacagatgagagggccaaagctccaagtagttgggcaggttgcccaggatggatgcatacgtagaagatagaacaacccagagtggtgtgattccaaaccatgctttctccattgcatcacagtgatctttaagatcaccagcagagtggactgggacttcagggtaagatcacatcaagatatcaagtccagasaggccaaccccacaccgttcacatgatctctgaaacaattttcaagaacagcactgtgaattcaactcgacactcttccatcaagcaaggacggaaaactccaaatgactgcaagacaagagctcccaggaaacacagaattccagagcagattcttcttttgaagtttctgtgaataaaatctcataatcaggtggggctttgagctgccctctccttaaaggtaacttccagccctgtggttctagattgggttccgactcagtgtggggatttttttttttttttttttttttttttttgagatggaatctcaccctgtc

SEQ ID NO: 583970 - DNA, 580 bp, Homo sapiens
gcatctaatgcagttgccccatctaatgctcaagctgtaacgctaccttagtttctccaattaacagatgagagggccaaagctccaagtagttgggcaggttgcccaggatggatgcatacgtagaagatagaacaacccagagtggtgtgattccaaaccatgctttctccattgcatcacagtgatctttaagatcaccagcagagtggactgggacttcagggtaagatcacatcaagatatcaagtccagagaggccaaccccacaccgttcacatgatctctgaaacaattttcaagarcagcactgtgaattcaactcgacactcttccatcaagcaaggacggaaaactccaaatgactgcaagacaagagctcccaggaaacacagaattccagagcagattcttcttttgaagtttctgtgaataaaatctcataatcaggtggggctttgagctgccctctccttaaaggtaacttccagccctgtggttctagattgggttccgactcagtgtggggatttttttttttttttttttttttttttttgagatggaatctcaccctgtc

SEQ ID NO: 583971 - DNA, 580 bp, Homo sapiens
gcatctaatgcagttgccccatctaatgctcaagctgtaacgctaccttagtttctccaattaacagatgagagggccaaagctccaagtagttgggcaggttgcccaggatggatgcatacgtagaagatagaacaacccagagtggtgtgattccaaaccatgctttctccattgcatcacagtgatctttaagatcaccagcagagtggactgggacttcagggtaagatcacatcaagatatcaagtccagagaggccaaccccacaccgttcacatgatctctgaaacaattttcaagaacagcactgtgaattcaactcgacactcttccatcaagcaaggacggaaaactccaaatgactgcaagacaagagctcccaggaaacacagaattccagagcagattcttcttttgaagtttctgtgaatraaatctcataatcaggtggggctttgagctgccctctccttaaaggtaacttccagccctgtggttctagattgggttccgactcagtgtggggatttttttttttttttttttttttttttttgagatggaatctcaccctgtc

SEQ ID NO: 583972 - DNA, 634 bp, Homo sapiens
aagcacacactgtcctggtatgcacacaacatataaccatgatccaacaaatcccactagtcacgttttcccaaaacttcataagacacagccagtgttcactgggttgtggctctgctctctaggaagaaaacattttccagtgcccttgcagttaggtggggttcaatgactagctctagccaatgaagaagagtgagaataaagtgtgtcacttctgggctgagttattaacagctgtttctctttgtccagactcttcctggcctgtgaccttggaggtcatccactcagcctaggtcccttaatcgtggtgtggagcagcatccaggctgccaaccccatcccagactctccttgaagatgtggatctacaactgatgaaaatctttgttgtgataagccactgacattttagacatgttgttactaatgcataagctattcattttcatgatctttcctttgcctggaatgtmtctccctttttcttttctaagcacggcaaactggctacatttttgaaaatacccagctgtcatattaacatcttgtaggggatttttaccactctttagcacaattactttctctctttaccccctgcagcatcttgcagacaccttcttacttt

SEQ ID NO: 583973 - DNA, 534 bp, Homo sapiens
aggacatatctaacaccgaaggaaaaaaaaaaaagttgaaaatgaacttacatttaaattaacaacttctgttcatcaaaagataccacaaagaaagtgaaaaggtaaaccatgctatggaagaaaagagacagctcacaaaagcaatatacaaatcggcatatgtaaaatgygcaatctcattaatcatcagtaaatgcaaattaaaatcacaattaagtgtaccacattcccactagaatggctgaaaattaaaatatatgatagcacaggtgttaatgaggatgtgggacaactgcagctctcaaacactgcaggtcaactgcataaatcagtacaactatttctgaaaactgtttagcagtatctacataaaattgaacacatgcatacttgtgacccagcaaaccaacagaaaagcatacataaattcacccaacatgtccaaaaaatgtttattgggatactgcttgttataacccaaaacgaacacaaatcaaaagtctattgacagtagaatgcataaattgtggc

SEQ ID NO: 583974 - DNA, 527 bp, Homo sapiens
ttcttttcttaaacagatgtctcctgagcccttcttttgtgaaacactgagtagagggcattgaggatgatacagatgtgtaaacattcctaatgcctccctgctatcaagaaaatcttaaccttttagcgtgcttatatctaaagccaatggaggaaaaaaaaacttcccaacaaatgaaaayctaaatgaaaatttaggagaataattgtacaatttttggatgagggcatactttagagaagaaaacttataataaaaatactatgtatggcaaaatatatgatgtattaatcaagtctcttgcaagtgaaagaacaaaagtgaaattaagtgaaaagaaaatttcgaggcattcataggtagctgaaaatccaaattgcatgtagcacgaaaggtcactttcctgaatatgtcaaggactcccactcttgatatgttgtttagatagataatagctaagtgaaataagatatgaagaacacattgctgattaactgtaaattgctgtaacttttaaggaaaat

SEQ ID NO: 583975 - DNA, 527 bp, Homo sapiens
tgagcccttcttttgtgaaacactgagtagagggcattgaggatgatacagatgtgtaaacattcctaatgcctccctgctatcaagaaaatcttaaccttttagcgtgcttatatctaaagccaatggaggaaaaaaaaacttcccaacaaatgaaaatctaaatgaaaatttaggagaataattgtasaatttttggatgagggcatactttagagaagaaaacttataataaaaatactatgtatggcaaaatatatgatgtattaatcaagtctcttgcaagtgaaagaacaaaagtgaaattaagtgaaaagaaaatttcgaggcattcataggtagctgaaaatccaaattgcatgtagcacgaaaggtcactttcctgaatatgtcaaggactcccactcttgatatgttgtttagatagataatagctaagtgaaataagatatgaagaacacattgctgattaactgtaaattgctgtaacttttaaggaaaataatatcagtgtacagagtgcagct

SEQ ID NO: 583976 - DNA, 530 bp, Homo sapiens
tggcttttggcttggctgttgtcgatgtataaaaatgctagtaatttttgtgcattgaatttgtatcctgcaactttgctgaaattgtttatcagctgaaggagctttgacataaaattatgtcatctgcaaatggggatagtttgacttcctctcttcctatttagatggtctttatttctttttcttgcctgatttattttgccgggacttctaatactatgctgaataagagtggtgagagagggcatcattatcttgggccagttttcaaggggaataagtccagcttttccgcattcagtatgatattgsctgtgagtttgttgtaggaggctcttactaatttaagatatgttccttcaatatctagcttcttgatagtttttaacctgaggagatattgaactttatcaaaagccttttctgtttctattgagataatcatgtggtttttgtctctagttctgtttatgtgacgaatcacatttactgatttgtgtatgttgaggcaaacttgcatcctgggg

SEQ ID NO: 583977 - DNA, 573 bp, Homo sapiens
tatgtatagtttccaaaattccctttgttactgatttctagttttattccactgtgatcaaagaagatgcttgatattatttcaattttttgaatatttaaagacttattttgtgatgtaacatatggtctatccttaagaatgatccatatactgaggaaaaaactgtgtattctgtagttgttcgatgaaatgttctgtaaatatctattagatccatttggtctgtagtcaaatgaagtttgatgtttctstgttgattttatctctagaagattctgtacaatgctgaaagtggggtgtcaaagtatccagcttttattttattgaggtctatgtatctcttttgctgtagtaatatttgctttatgtatctgggtactccagtgttggatgcatatacatttaaaattgttgtatcccgttgctgaatttacccttttactgttataaagtgacagtctcttcttataggttttgccttgaaattaattttgtctgatttaagtgtagctattcctgctctttcttggtttccattggtatggaacatctttttttcatctttttatt

SEQ ID NO: 583978 - DNA, 581 bp, Homo sapiens
gctgagtatggagtgacacaagcgcccctgtggtcactgccactgtgactgtgctgggtcagacccaaagccggcacagcactgggtcttgtccaatgcctgctataaccactctctggctactgccaattttctctcaaggccctggggctctataatcagcaggttgcaaagccagccaggccagtgtatttcccttgagggtgatgggttcccccaggtcatgggtgtgtccagaggtgcaattcaggagtcagcaactagagtcaaaaacattacaagtctacctggtgttctatggtactgcagctgagctggttcacagaccacaagatgcagtccttcccactcttccttctcctttccaaatgcagaggaggctcaccccatggccaccaccaccacaggcccacaaggagaacttccagacagactaccactgatgtccccttaaggcccaaggtctcttaagycagtttgtaggcctggtctgggattcatcctttatggcagtgggcccccctctagcccagggcaggtccagaaatgctgtcctaatcccccccatctcccaaaaaact

SEQ ID NO: 583979 - DNA, 539 bp, Homo sapiens
aatcctcccacttcagcctcccaaagggctggaattacaggtgtcagccattgcacttgggctaaaacctttttttagtttttagttttagattttttgtagcaatagggttgtactatgttgcccatgctggtctcraactcctgggctcaagtgattctcccacctcagtctcccaagtagttgggaccacaggtgcactatgttgcccaggctggtcttgaactcctaggcttaagtgatccttctactttggccttcccaagtgcttgtattataggcatgagccatcacacctggtcaaaaaccttaatcagattatgcttttctttttttatttcatttttcattttttatagagacagggtcttactgtgttgcccaggctggcctcaaactcatgggctcaagtgattcttctgcttcagcctcccaaagtgttgggattacaggcgtgagccactgcacttggccgctatgatgttctgaagtacttgattagcacctggaaatagtttatgtgaaatcaggctgaagca

SEQ ID NO: 583980 - DNA, 591 bp, Homo sapiens
tgctcttattctctggggtgaagaaatactgtctgcttgtttctgggcatgctgagatcatgaagtaaattctgtgctatcagcagggacagtcatgaggaaaactcctctcctcaagggggtctcagatatgcctggaggtgggggcaggccctcctcacccagtgcatatccagagttccctgaaaccaaccaggggacagtgtgagggacaggctgaggagcaagtctaatttttggttaacctaacagtgttctttaaaatattacgttcttggaagtgtcttaggagagaactgggtcatcatcatgcgtrgagaagtgctcccatggcctggaggaatgaacacccctttaattgtcagctgactgtgctgccactctcatctctgcactcaccctgacctcagataagttgcttccctgtgcttaggtctcagagctaagggactgtcattcctggtggagcacagcttggctggacccccagcttggcttctcaaaatttggcccttacaggatctgtggagacctttctccaatgaacatcttatgccctcagtcatcctacaggcctcaagccatcaacct

SEQ ID NO: 583981 - DNA, 469 bp, Homo sapiens
attataaatagatttatagataggaaaactgaaactcaaaaagacatggttccaaagctggtgagagayagtgctgggattcactttcttgtctatctgagtccttagtgagtactcctgccagtacagctggctctccctcccagagagcatacccactgtgcctcagctgctgcacctgtgctgaccttccctgtcaccagcctatcaggtacctcagcctccacatctgctgccttctctccagtggcttcagggcagtcggtgagtatctgcttgtgcacccctgcagtggctgtaggtaggctgggctaacagggtcatttgtaaccacagagttgggctggatatctgctcccctgaagttgcctaagccaggcagggcatcagtctgtcaggcttactcagaagctgggctgttcctttatggatatctccttcctcccctagactccccaagaggcatatc

SEQ ID NO: 583982 - DNA, 630 bp, Homo sapiens
tatacatttgaatgctatatattttatatggttttatttctacaacaaacatctgttcagttcagcatttgtcctaaacgaaaatatctggtttggacaatatatatcgtcacactactatcatcccatataagtcaatatcctggctgccaatgctgcttctaaaccaagaatgcagctgtgctgtggcttcaactctgctcactgatttatcattctgttgyattgagatgtttgtattttgagccagggtatttatttttaaattctgtctattatgctgtgtgtttggaacaagaggggatgaaaggaaagagtgagaagtattatgccatcttgaccacaagtgtcccttcattgctctttaaaaacaaaaaagaaattgtctctgctagacttgcttgttccctctttttttcttttttcttctttctttttttttttttgagacagaggctcactctgtcacccaggctggagtgcagtggcgtgatcttggcttactgcaacctccgcctcctgggttcaagcgattctcccacttcagcctcccaagtagctgggattacaggtgtgtgccaccaagtccggctaatttttgtgtttttagtagagacagggtttcagcat

SEQ ID NO: 583983 - DNA, 581 bp, Homo sapiens
  misc_feature 45: n = A,T,C or G
aaacatttaaggtaaaaataataccaattctacacaaactctttncagaaaacttgaagatattagggaaagctttccaactctatgaggcctgcattacgctgatactaaaatcagacagagacttcagaagaaaactgcagcccagtctctctcatgaacatagacacaaaaatccttaacaaaataattgtaaatcaaatgcaacaatataaaaaatagtacagtatgwcaaaactgggtttatcttcaaaaatgcaaggttaacattcataaatccattaatataaatcatattaacaacctataaaagaaaaacaacatggctatctcaataaacaccaaaaaaatcggaaaaaatatcctacatccctttctgttaataactcttcagcaatcagtgaagagaactccttcaacttgatgaacatctgtggaaaacatagagctaatatcctaattaatggtgatatactgagtgctttctctttcagatcaggaacaacatggagttcaccttccccactttggtcatacattgtagtaagggttctcaccatcacagtacatcaaagtaagaa

SEQ ID NO: 583984 - DNA, 593 bp, Homo sapiens
tagctgggactacagatgcatgccaccacacctgggtaatttttgtatgtttttgtagagtcagggtttcgccatgttgcccaggctggtcttgaactcctgggctcaagcaatctgagtattcatactttataatacttacaattagaaggaattttttatactattccttcagtgtacctaatattatataattaaaagagtaagaaattctaaagagaaagtgtgtgttattccaaagatggataaagtgagtgctgayaagatgggggatttataccaatattttttgatagcatcagttttaaactcatcattgaagagccatattttattcacttcacatattagtactttttccatttataaacatgtagttttattattctaagcctatctgatattcaggcagtgtgcacatttcataggaggaaacacaaagccaattttgctccaagataatgtccttgagaaaatggtcactgaggaagttgttgaaaggcagtgtgttacactgtgtcaaaactgggctgctttcaaatacattttagaaatcccagctttaaagtaggaaatgtaataaggatttcatt

SEQ ID NO: 583985 - DNA, 565 bp, Homo sapiens
ggataaagtgagtgctgataagatgggggatttataccaatattttttgatagcatcagttttaaactcatcattgaagagccatattttattcacttcacatattagtactttttccatttataaacatgtagttttattattctaagcctatctgatattcaggcagtgtgcacatttcataggaggaaacacaaagccaattttgctccaagataatgtccttgagaaaatggtcactgaggaagttgttgaaaggcagtgtgttacactgtgtcaaaactgggctgctttcaaatacattttagaaatcccagctttaaagtaggaaatgtaataaggayttcatttgccaggtgtgatcataaaacaataaaagtagttttctaatgttgctcataaactgggactgaaaatcatttcaaatccaggagacagtccaaaaatggttattgagcaatggccacatattggaataaaaatttttattttcagtctgtgttttgggaaaacagcatttcattgcataggtggataagttctagaatattggctaaacatataa

SEQ ID NO: 583986 - DNA, 450 bp, Homo sapiens
ttttaaaaacctgacccaactatatgctgcctacaagaaactcacttcagacacccttatcttttttcttaacttgaaacaaaaaggataaggatggaaaaagatatatcatgcaaacattaatttaaaaaagcaagccaagtatggtggcacatgcctgtagtcccagttactagggagactgaggcaagaggattgcttgagccaggggttcaaggctgtagtgagccatgatcgtaccactgcactccagcctgggtgacagagagagacactgtttcaaaatatagaataaaataaaataaaataaaataaataaaaawttaaagccagagtagctatattaatatcaaaaaaatgtagacttcagggcaaataaaattactagggataaagtgggacattacatgatgataaaaggataaatgagaagacataatgatcctaaat

SEQ ID NO: 583987 - DNA, 630 bp, Homo sapiens
cctgtagtcccagttactagggagactgaggcaagaggattgcttgagccaggggttcaaggctgtagtgagccatgatcgtaccactgcactccagcctgggtgacagagagagacactgtttcaaaatatagaataaaataaaataaaataaaataaataaaaatttaaagccagagtagctatattaatatcaaaaaaatgtagacttcagggcaaataaaattactagggataaagtgggacattacatgatgataaaaggataaatgagaagacataatgatcctaaatatgtatgcaccaaatgacagagcttcaaaatrcatgaagcaaaacaaggttgaaagaataaatagacaaatccacaattatactgagaatttcatcaccccactctcaacaatttatagtacaagaaaaattcatcaaaaatataaaagaaagcaatattgaccaatgagatctattgaattttacagaagactccatccaatgacagcagaatacagattctttgtatgcactcatcaaacttgtaacaaaatagaacatatcctgggccataaaagcaaaacttgggaaatgttaaataattgaaatcatgcagtatgttctctgaccacagtg

SEQ ID NO: 583988 - DNA, 620 bp, Homo sapiens
  misc_feature 1, 2, 3, 4, 5, 6, 7, 8, 9, 10, 11, 12, 13, 14, 15, 16, 17,18, 19, 20, 21, 22, 23, 24, 25, 26, 27, 28, 29, 30, 31,32, 33, 34, 35, 36, 37, 38, 39, 40: n = A,T,C or G
nnnnnnnnnnnnnnnnnnnnnnnnnnnnnnnnnnnnnnnnttcaagcgtttctcatgcctcagcctcctgagtagctgggattacaggtgtgcaccaccacrcccagctgatttctgtatttttagtagagacagggtttcgctaccttggccaggctgatttcaaactcctgacctcaagtgattcgcctgcctcagcctcccaaagtactgggattacaggtgagccaccgtgcccagcctcaataaacatttttggagcacctactctgtgctacatcctgtgcttttgagggatttatttccaggtttctaaaatttacattggtgactccttcctgtgatatcagttgttttcaaactttgtgtctgtaaaccacaataaaaaatatatttcatatcatgactggaacatatgtgacttgacaaaaaactgaaaacaaaggttttacaaaacaatatccaaagtatgtgctgtatgccttaatattttccgttctattctactccattaaaaaaaacttctggtcatatccactgtccaccaaactcgcttttattatctatgagtcaagacccaccgtttaaaagtcaatctctgttattcttttggcaatctt

SEQ ID NO: 583989 - DNA, 573 bp, Homo sapiens
gtaagacttcaaactataagaatcctagaagaaaacctaagaaacaccattctggacacaaagatgaatgactagtagcctcccgaggactccaagggctctactagctaggagacagaatgataaccaacaattagagcagcatgtgacaggtgctaagagaaagtctttgcattggcctttggaaagaatttatgactragttctcaaaagcaattgcaacaaaaccaaatattgacaagtggaacctaaagagcttaaagattttaagagcttctgctcagccaaagaaagtaactatcaacagagtagacagacaacctgcagaatgagagaaaatatttgcaaacaatgcaaccaacaaaggtctaatacccagaatctataaggaacttaaacaattcagcaagcaaaaaacaggaaaccccattaaaaaatgggcaaaggacacgaacagacacttctcaaaagaagacatacaagtggctaacaaacatgaaaagatgcctcacatcacaaatcatcagagaaatgaaaatcagaaccacaatgagataccatcttataccagtc

SEQ ID NO: 583990 - DNA, 546 bp, Homo sapiens
gtgacactgcaaacatttgggggcagagggctggaactcaaccatatgtgggtgtaagtgttgatgaaatcacatctttggccctctcagtcctactcactcgtgaaccctagacttgcataagcagccacctattaaatctctacctggatgccctggaagtacctacactccaacaggttcaagagagagctccttttcctgctgcatgagtgccagacctcatcatccctctaatgcctcgagctagcaacttggagccactgtggacattccccttctcagctcatatatccatccttattctcagcaccctggctggggtcctcatcgtctctcctgggctcttacaataacctcccaacgtcccttccagcttgtattaaactgtagcctccttgccaagcaagaacaaacagagataaagatgtcaatcaagaaagtaagtcaacagagagggggataactycagcgaaggactgaaaacaaagattttccctcagactaccaataaaatggctatttgaaaactgaccagtgtatgag

SEQ ID NO: 583991 - DNA, 474 bp, Homo sapiens
ctccctgaaatgaccagtgcctccctgaggacaggcacatcaggtctcagccaaccttcccttccaaacataactcagcyagacccctctggtctctaaatagtatctcttctctttgtctttttctgtttcaggcctccagttaccaactcctgtctggtttcatgtccttttctatctggcagtgggaataatgtttttagtgaacactgttctctgggtgacaatacgtaaagaactgaaaagaaagaaaaagtgggatttagaaatctctttggattctggtcatgagaagaaggtaatttccagccttcaagaagacagacatttagaagaagagctgaaatgtcaggaacaaaaagaagaacagctgcaggaaggggtgcaccggaaggagccccagggggccacgtagcagcggctcagtgggtggccatcgatctggaccgtcccctgcccacttgctccccgtga

SEQ ID NO: 583992 - DNA, 568 bp, Homo sapiens
tttaccttcctgattttctggttactaattagcttcaggatacgctgctctcatacttgggctgtagtttggagacaaaatattttcctgccactgtgtaacatagctgaggtaaaaactgaactatgtaaatgactctactaaaagtttagggaaaaaaaacaggaggagtatgacacacacagcaacttgattctagattatttggtttgatccgtaaatgatgggatggggcgtcgcgctccgagcgtgtcccgcggcgggcccctggcgccacactgtggccgcatgtgcatattgcagcctccgccygtatctgggggccgcagccgccagcgcccggggacccagctgcggcgaaagctgttgggcgcgcgcttctccgcagctccgcgcccccgccaaaacccagtgagaaattatttgcattcctggaggctgcaggagcgagaaatgagctgtaggagtcggtgggcagcaacggcggcaggcggatggaagagagcaaggggtcgccgttcgtgtcccattcgcccgagtcaaggggcggccccccaaaatcccaacg

SEQ ID NO: 583993 - DNA, 568 bp, Homo sapiens
tttaccttcctgattttctggttactaattagcttcaggatacgctgctctcatacttgggctgtagtttggagacaaaatattttcctgccactgtgtaacatagctgaggtaaaaactgaactatgtaaatgactctactaaaagtttagggaaaaaaaacaggaggagtatgacacacacagcaacttgattctagattatttggtttgatccgtaaatgatgggatggggcgtcgcgctccgagcgtgtcccgcggcgggcccctggcgccacactgtggccgcatgtgcatattgcagcctccgcctgtatctgggggccgcagccgccagcgcccggggacccagctgcggcgaaagctgtygggcgcgcgcttctccgcagctccgcgcccccgccaaaacccagtgagaaattatttgcattcctggaggctgcaggagcgagaaatgagctgtaggagtcggtgggcagcaacggcggcaggcggatggaagagagcaaggggtcgccgttcgtgtcccattcgcccgagtcaaggggcggccccccaaaatcccaacg

SEQ ID NO: 583994 - DNA, 568 bp, Homo sapiens
tttaccttcctgattttctggttactaattagcttcaggatacgctgctctcatacttgggctgtagtttggagacaaaatattttcctgccactgtgtaacatagctgaggtaaaaactgaactatgtaaatgactctactaaaagtttagggaaaaaaaacaggaggagtatgacacacacagcaacttgattctagattatttggtttgatccgtaaatgatgggatggggcgtcgcgctccgagcgtgtcccgcggcgggcccctggcgccacactgtggccgcatgtgcatattgcagcctccgcctgtatctgggggccgcagccgccagcgcccggggacccagctgcggcgaaagctgttgggcgcgcgcttctccgcagctccgcgcccccgccaaaacccagtgagaaattatttgcattcctggagsctgcaggagcgagaaatgagctgtaggagtcggtgggcagcaacggcggcaggcggatggaagagagcaaggggtcgccgttcgtgtcccattcgcccgagtcaaggggcggccccccaaaatcccaacg

SEQ ID NO: 583995 - DNA, 627 bp, Homo sapiens
gactttaaaaaaaaaaaaaaaagaggaacttgctctgtcaccaggccagagtgcaaaggtgcaatcatagctcactgcagcctygacctcctaggctcaagcaatcctcctgcttcagcctcctaagtagctgggactacaggtgcatgtaaccatgcctggctaatatttttactttttgtagagacaggggtcttgctttgttgcccaggctgatcttgaactcttggcttcaagtgatcctcctgcctcagcttcccaaagtgccaggattacatgtgtgacccaccatgtaagcccacatttttctaacttctacagtaataatatctatatcctatttatttataacataaatcttacttagcttgttttacttctcttcactcttgctttccctaccacccttctacatcacctggaatttgaattccaggttttctttttaattttctagaatctaaattcactttgtttagcaatatcttttaccaaatacatgaccacctttgcttccattatctcacatcttcccttatgatctttttaaaattattgctggaatagaattctgaaaagtcacccacacttaaatgatagtttaattgaattcaaaattattttccc

SEQ ID NO: 583996 - DNA, 364 bp, Homo sapiens
aatttaaatttgatttaaattttcataatttaattttcattttgatggccactttattttgacaaagacactagtggaggaaagtctctttatyggatcatcaatttccctataaatctttgtctcagaaaaatttaataataatttcataataaattataataaataatgtttcacatcttacattattcacttttgatttagttggcttgtgctgtcaatatgttgcccactgtataacactacctgatgaattacattcaactatgtagtaatacatattactacatatacacacacacgtatacatgtgtatatacatgtatacgtgtgtgtgtatatatatatataaccatatgtaatt

SEQ ID NO: 583997 - DNA, 364 bp, Homo sapiens
aatttaaatttgatttaaattttcataatttaattttcattttgatggccactttattttgacaaagacactagtggaggaaagtctctttattggatcatcaatttccctataaatctttgtctcagaaaaatttaataataatttcataataaattataataaataatgtttcacatcttacattattcacttttgatttagttggcttgtgctgtcaatatgttgcccactgtataacactacctgatgaattacattcaactatgtagtaatacatattactacatatacacacacacgtatacatgtgtatayacatgtatacgtgtgtgtgtatatatatatataaccatatgtaatt

SEQ ID NO: 583998 - DNA, 637 bp, Homo sapiens
ttgtctcctggttccaaaacatgtggatcattttttggtccactcctgtcttctgcagaagtcctccttggcactcttcactgttaccccatctgccatctttgtcaattttttatcatttctaggaatttggggtggaatatgagaagaaagcaacatatcttcaggacacaatcttgaatcagtagctatttttcacctgtgcattagagatgggaaacttgcagagcacttaacaggacttccctacgatcaccaactagtatttattgaattgtttattagtaggaaacattaagcaattatccttcataaaaacattatgaagtaagtaagcattactatagtcccagttttaagatgagaaaacacagattaaaaacatcctaaagagcagagccaagttacactccaggtggtccgtctcagaagcctgaactctttactaatacactatacgatggcatatccgggtgattttgggaacacattatacttctaccctgccaggagggccaaatgtatttactttgtcatctctgtgctgtaaggggccacatttctacccatcaactcaatctacattactcaagcatgcttgtaattcatakgttatttcctcatgccaggaagaaca

SEQ ID NO: 583999 - DNA, 518 bp, Homo sapiens
tgtggcctaaggcccaaaagccccaggcaagccactggtgttaagtccaagagtccaaaggccaaagaacctggagtctgatgtccaaaggcaggaggaatggatggaggcatccagcacaggagagggatgaaagccagaactctgcaagccagcttagcccaccttctctctcctgytttgttgtagctaccctggcagccgactggatggtgccaacccacattgagggtgagtcttcctctcctagtccactgactcaaatgttaatctcctctggtaacaccctcacagacacacccagaaacaatacttagctatctaggcatcctttaatcctatcaagttgacacctaatattaaccatcacaccctaggatttagaattttcttaagaacactgaatgacccttgcccaggatcgtatctgtgctgtgtctgaagtcttagactccctcctggcctaaagaattttccttcaatgcaatgaaaaatgataatcccacaaactagaaacc

SEQ ID NO: 584000 - DNA, 518 bp, Homo sapiens
tgtggcctaaggcccaaaagccccaggcaagccactggtgttaagtccaagagtccaaaggccaaagaacctggagtctgatgtccaaaggcaggaggaatggatggaggcatccagcacaggagagggatgaaagccagaactctgcaagccagcttagcccaccttctctctcctgctttgttgtagctaccctggcagccgactggatggtgycaacccacattgagggtgagtcttcctctcctagtccactgactcaaatgttaatctcctctggtaacaccctcacagacacacccagaaacaatacttagctatctaggcatcctttaatcctatcaagttgacacctaatattaaccatcacaccctaggatttagaattttcttaagaacactgaatgacccttgcccaggatcgtatctgtgctgtgtctgaagtcttagactccctcctggcctaaagaattttccttcaatgcaatgaaaaatgataatcccacaaactagaaacc

SEQ ID NO: 584001 - DNA, 518 bp, Homo sapiens
tgtggcctaaggcccaaaagccccaggcaagccactggtgttaagtccaagagtccaaaggccaaagaacctggagtctgatgtccaaaggcaggaggaatggatggaggcatccagcacaggagagggatgaaagccagaactctgcaagccagcttagcccaccttctctctcctgctttgttgtagctaccctggcagccgactggatggtgccaacccmcattgagggtgagtcttcctctcctagtccactgactcaaatgttaatctcctctggtaacaccctcacagacacacccagaaacaatacttagctatctaggcatcctttaatcctatcaagttgacacctaatattaaccatcacaccctaggatttagaattttcttaagaacactgaatgacccttgcccaggatcgtatctgtgctgtgtctgaagtcttagactccctcctggcctaaagaattttccttcaatgcaatgaaaaatgataatcccacaaactagaaacc

SEQ ID NO: 584002 - DNA, 518 bp, Homo sapiens
tgtggcctaaggcccaaaagccccaggcaagccactggtgttaagtccaagagtccaaaggccaaagaacctggagtctgatgtccaaaggcaggaggaatggatggaggcatccagcacaggagagggatgaaagccagaactctgcaagccagcttagcccaccttctctctcctgctttgttgtagctaccctggcagccgactggatggtgccaacccacattgagggtgagtcttcctctcctagtccactgactcaaatgttaatctcctctggtaacaccctcacagacacacccagaaacaatacttagctatctaggcatcctttaatcctatcaagttgacacctaatattaaccatcacaccytaggatttagaattttcttaagaacactgaatgacccttgcccaggatcgtatctgtgctgtgtctgaagtcttagactccctcctggcctaaagaattttccttcaatgcaatgaaaaatgataatcccacaaactagaaacc

SEQ ID NO: 584003 - DNA, 592 bp, Homo sapiens
ttttttgctccaagtgttccttcttctgagtgcctagtgctgctccagtacctagatatctctctctccccctctctttctgtctcaatatccaatcaatcccaagctgtattagctctttaccaactttgggaaagtggaccagtatccaggcttggataarccaaggaaaaatactaaggaactgcttaaagctctagtggttcttctactttgctgtttctggctttggccatctaaagcaaagttccttggattggttgacagtgagatagtctctagattcttgtgtctctttttagtaggaccacctaagatgtatcatccattgtataatgagttcttgaccaaagaaaagaaatcttaaggtcttcggactctgtcatctttcttgtttgccactctttggactgtaatttgaagagaaaaaaccttgttttcttgtgaaaattttggatgctgagtagttgacaacaacagtaacttcagctagaaaatgctggaaacaatttaataagcagaaatgattaaatccaaaatcatcaacatgactccaccaaccccatttttaaatttctatttaaacatttcc

SEQ ID NO: 584004 - DNA, 592 bp, Homo sapiens
ttttttgctccaagtgttccttcttctgagtgcctagtgctgctccagtacctagatatctctctctccccctctctttctgtctcaatatccaatcaatcccaagctgtattagctctttaccaactttgggaaagtggaccagtatccaggcttggataaaccaaggaaaaatactaaggaactgcttaaagctctagtggttcttctactttgctgtttctggctttggccatctaaagcaaagttccttggattggttgacagtgagatagtctctagattcttgtgtctctttttagtaggaccacctaagatgtatcatccattgtrtaatgagttcttgaccaaagaaaagaaatcttaaggtcttcggactctgtcatctttcttgtttgccactctttggactgtaatttgaagagaaaaaaccttgttttcttgtgaaaattttggatgctgagtagttgacaacaacagtaacttcagctagaaaatgctggaaacaatttaataagcagaaatgattaaatccaaaatcatcaacatgactccaccaaccccatttttaaatttctatttaaacatttcc

SEQ ID NO: 584005 - DNA, 592 bp, Homo sapiens
ttttttgctccaagtgttccttcttctgagtgcctagtgctgctccagtacctagatatctctctctccccctctctttctgtctcaatatccaatcaatcccaagctgtattagctctttaccaactttgggaaagtggaccagtatccaggcttggataaaccaaggaaaaatactaaggaactgcttaaagctctagtggttcttctactttgctgtttctggctttggccatctaaagcaaagttccttggattggttgacagtgagatagtctctagattcttgtgtctctttttagtaggaccacctaagatgtatcatccattgtataatgagttcttgaccaaagaaaagaaatcttaaggtcttcggactctgtcatctttcttgtttgccactctttggactgtaatttgaagagaaaaaaccttgttttcttgtgaaaattttggatgctgagtagttgacaacaacagtaacttcagctagaaaatgctggaaacaatttaataagcagaaatgattaamtccaaaatcatcaacatgactccaccaaccccatttttaaatttctatttaaacatttcc

SEQ ID NO: 584006 - DNA, 675 bp, Homo sapiens
gaatgtgctctggaagtacaatggtgctcttgctagcgccttcctaaccataacaataataagaacaacactgatcaaatatttaccatgttccagccactgtactaagtgctttgggtacattacctcatttaatcttcatatcaagcctagaaggtagtttccattatkttttccactttacaggggaataacttgaggatcaatttgctgtaaggaagtttatttatcacaacaagtaaagaaagttttccaaggtcatacagtccttacgtggggaagctatactcaaagctgatgttcatcgccactacaggctagtgccttctcagcaagaactactcttacagtgctaagaggagaaatgggcaaggtggtaagagccagaatatctgttgttgatattacagatacagctctgaacttaagaccctaaaaatgatctccaacctcagttgcctctgagagccttcagcatgatatgtgatcatgtgagagccacgttatgtgtattctttttaccacctcttctgtatccatctggagatagttctcttttctgttttttctagaggaaaaaaacaacgacaaaaaaacagggagatcttagcagaaccaaagcagattagatattagccttgaaaatggtgacagcaatcagtgatattgaacctg

SEQ ID NO: 584007 - DNA, 532 bp, Homo sapiens
gttatgtgtattctttttaccacctcttctgtatccatctggagatagttctcttttctgttttttctagaggaaaaaaacaacgacaaaaaaacagggagatcttagcagaaccaaagcagattagatattagccttgaaaatggtgacagcaatcagtgatattgaacctgaaataatttaaataattatcggggacttaccagagctaagttcgtggaccactgggatttctcttatttgggtctyatagtgttccataaagtgatgggactataattgtccatcttcaagtatccttctatgactcatgtataatcccttgacttttaggagattcctggcagttaatgtcaatactgcccttcataatgcttctgagttagcttaggtaaggtccttaaatacccaatgacttatactctgaggcttctaaactggtatgtggacctcggtggttgcaacttcacccaaatcctcattctgtgttgtgctgtccctaatttagagggcaaaagatttcaaactcaat

SEQ ID NO: 584008 - DNA, 532 bp, Homo sapiens
gttatgtgtattctttttaccacctcttctgtatccatctggagatagttctcttttctgttttttctagaggaaaaaaacaacgacaaaaaaacagggagatcttagcagaaccaaagcagattagatattagccttgaaaatggtgacagcaatcagtgatattgaacctgaaataatttaaataattatcggggacttaccagagctaagttcgtggaccactgggatttctcttatttgggtcttatagtsttccataaagtgatgggactataattgtccatcttcaagtatccttctatgactcatgtataatcccttgacttttaggagattcctggcagttaatgtcaatactgcccttcataatgcttctgagttagcttaggtaaggtccttaaatacccaatgacttatactctgaggcttctaaactggtatgtggacctcggtggttgcaacttcacccaaatcctcattctgtgttgtgctgtccctaatttagagggcaaaagatttcaaactcaat

SEQ ID NO: 584009 - DNA, 532 bp, Homo sapiens
gttatgtgtattctttttaccacctcttctgtatccatctggagatagttctcttttctgttttttctagaggaaaaaaacaacgacaaaaaaacagggagatcttagcagaaccaaagcagattagatattagccttgaaaatggtgacagcaatcagtgatattgaacctgaaataatttaaataattatcggggacttaccagagctaagttcgtggaccactgggatttctcttatttgggtcttatagtgttccataaagtgatgggactataattgtccatcttcaagtatccttctatgactcatgtataatcccttgacttttaggagattcctggcagttaatgtcaatactgcccttcataatgcttctgagttagcttaggtaaggtccttaaatacccaatgacttatactctgaggcttctaaactggtatgtggamctcggtggttgcaacttcacccaaatcctcattctgtgttgtgctgtccctaatttagagggcaaaagatttcaaactcaat

SEQ ID NO: 584010 - DNA, 470 bp, Homo sapiens
gctgtaaattgtgattatctataccttgtcagttttatctatgtatatatcttttacagtaatccccacatccaccagagaacctaggttattggcagaatgaggtttgggaattytggtcctctggccagacactatcagttagtactctgattccaccatttttgaaattatatacaacaaattttaagtattgtttattttggagagttcaggttaaaggaaatgaagactattattcagtattatttctgtaattttgtaattttaaccataacataggtttcttatcaaaacgtatggaagccagaaagcagtgaagcaacaatattttctccaaaacgaacaggccaaactttggcaggagtgacaaatctggcatgcaatggtggcttctatatcagaaatcaagtcttttactttgtgagagcacgagtttttagttttttgtcttccttttggctgccaga

SEQ ID NO: 584011 - DNA, 431 bp, Homo sapiens
acgagtcaaacctttcgaatctcgtagcacagataacaagcaactcagtaagactrgacggggatgactgagggccaactcattacaggactacaggaaactccttagtcctaaacccgaatgcatccgtgaccatggtaacactccctacctgaccaaaagctatcaaacgctctgacaagtgtttacagctgctttctcgattactgaagtggctctgaaaagagcctttggggttaggtggttgatctattgcgtcccttgcacactcttacttcgagctggtgtacttggtgaccgccttggtgccctcggacacggcgtgcttggccagctcgccgggcagcagcaggcgcacggccgtctggatctcgcgggatgtgatggtggagcgcttgttgtagtgcgccaggcgggacgcctctcccgcg

SEQ ID NO: 584012 - DNA, 431 bp, Homo sapiens
acgagtcaaacctttcgaatctcgtagcacagataacaagcaactcagtaagactggacggggatgactgagggccaactcattacaggactacaggaaactccttagtcctaaacccgaatgcatccgtgaccatggtaacactccctacctgaccaaaagctatcaaacgctctgacaagtgtttacagctgctttctcgattactgaagtggctctgaaaagagcctttggggttaggtggttgatctattgcgtcccttgcacactcttacttcgagctggtgtacttggtgaccgccttggtgccctcggacacggcgtgcttggccagctcgccgggcagcagcaggcgcacggccgtctggatctcrcgggatgtgatggtggagcgcttgttgtagtgcgccaggcgggacgcctctcccgcg

SEQ ID NO: 584013 - DNA, 470 bp, Homo sapiens
gctgtaaattgtgattatctataccttgtcagttttatctatgtatatatcttttacagtaatccccacatccaccagagaacctaggttattggcagaatgaggtttgggaattctggtcctctggccagacactatcagttagtactctgattccaccatttttgaaattatatacaacaaattttaagtattgtttattttggagagttcaggttaaaggaaatgaagactattattcagtattatttctgtaattttgtaattttaaccataacataggtttcttatcaaaacgtatggaagccagaaagcagtgaagcaacaatattttctccaaaacraacaggccaaactttggcaggagtgacaaatctggcatgcaatggtggcttctatatcagaaatcaagtcttttactttgtgagagcacgagtttttagttttttgtcttccttttggctgccaga

SEQ ID NO: 584014 - DNA, 613 bp, Homo sapiens
cctatgtaaagtttaagcaaagccattcccttgtaccttgtaccttgaagagagtttcattggatataatatccttaatttgcactttcttctttttaatgagtaaattgcattttattttattttattttattttattttattttattttattttattttttgagatggagtctcactctgtcgcccaggctggagtgcartggcactatctcggctcactgcaagctccacctcccaggttcacgccattctcctgcctcagcctctggagtagctgggactacaggcacccgccaccatgcctggctaattttttgtatttttaatagagacggggtttcaccatgttagccaggatggtctcgatctcctgacctcatgatccacccaaggagtctctctccctccttgtgttctggtctgtgaatggctcacacttgaacttagtgtaggctcctagtgggaggagcaggggtggcgaaaatcctcatcatatggataaacataacccaaacctctagaggtttcataattttcctcttgcttctaaaaacatagtcatgtcttatggggtgttatgtactttatatcttaacattttccacttgctg

SEQ ID NO: 584015 - DNA, 613 bp, Homo sapiens
cctatgtaaagtttaagcaaagccattcccttgtaccttgtaccttgaagagagtttcattggatataatatccttaatttgcactttcttctttttaatgagtaaattgcattttattttattttattttattttattttattttattttattttattttttgagatggagtctcactctgtcgcccaggctggagtgcagtggcactatctcggctcactgcaagctccacctcccaggttcacgccattctcctgcctcagcctcyggagtagctgggactacaggcacccgccaccatgcctggctaattttttgtatttttaatagagacggggtttcaccatgttagccaggatggtctcgatctcctgacctcatgatccacccaaggagtctctctccctccttgtgttctggtctgtgaatggctcacacttgaacttagtgtaggctcctagtgggaggagcaggggtggcgaaaatcctcatcatatggataaacataacccaaacctctagaggtttcataattttcctcttgcttctaaaaacatagtcatgtcttatggggtgttatgtactttatatcttaacattttccacttgctg

SEQ ID NO: 584016 - DNA, 613 bp, Homo sapiens
cctatgtaaagtttaagcaaagccattcccttgtaccttgtaccttgaagagagtttcattggatataatatccttaatttgcactttcttctttttaatgagtaaattgcattttattttattttattttattttattttattttattttattttattttttgagatggagtctcactctgtcgcccaggctggagtgcagtggcactatctcggctcactgcaagctccacctcccaggttcacgccattctcctgcctcagcctctggagtagctgggactacaggcacccgccaccatgcctggctaattttttgtatttttartagagacggggtttcaccatgttagccaggatggtctcgatctcctgacctcatgatccacccaaggagtctctctccctccttgtgttctggtctgtgaatggctcacacttgaacttagtgtaggctcctagtgggaggagcaggggtggcgaaaatcctcatcatatggataaacataacccaaacctctagaggtttcataattttcctcttgcttctaaaaacatagtcatgtcttatggggtgttatgtactttatatcttaacattttccacttgctg

SEQ ID NO: 584017 - DNA, 509 bp, Homo sapiens
agagtggaacttctggttttgtggtgaagtgcacagggttttataggctggcttgaggaggcagtgtctgattcacatagggcccaaagattggttggaccaggtgtgacatttacatagcgctggaagaagctggccacccaaccctaatcttcttcttatgcaaatgggttttctactttactcgcrccatgttgtctgctccttactgtacacgtggttagaaaggaaaagggaagatggagccaccatgttgaacatgcctaccccccaggtagccttgtcctattggcacagccgccagcagtcacctgtgcaagcttccagcttgcttatctatgtctgcagctccattttacaggctgctttttgttagaaaagaaattatttggtggctgcttttcattaaaagggaaccttaccaaggacttccttaccctaatgcctaaataatttctttttaactcctatatcaatttgtttgaagaacagatgacactttgaatggc

SEQ ID NO: 584018 - DNA, 509 bp, Homo sapiens
agagtggaacttctggttttgtggtgaagtgcacagggttttataggctggcttgaggaggcagtgtctgattcacatagggcccaaagattggttggaccaggtgtgacatttacatagcgctggaagaagctggccacccaaccctaatcttcttcttatgcaaatgggttttctactttactcgcaccatgttgtctgctccttactgtacacgtggttagaaaggaaaagggaagatggagccaccatgttgaacatgcctaccccccaggtagccttgtcctattggcacagccgccagcagtcacctgtgcaagcttccagcttgcttatctatgtctgcagctccattttacaggctgctttttgttagaaaagaaattatttggkggctgcttttcattaaaagggaaccttaccaaggacttccttaccctaatgcctaaataatttctttttaactcctatatcaatttgtttgaagaacagatgacactttgaatggc

SEQ ID NO: 584019 - DNA, 628 bp, Homo sapiens
atactagttctggccaacaaaccttcacatattgtctgtgtcaaccagagctacatttattccsaaatctctttctaaaatacaaacctgtactttctactctcaaccccaaaatttacaagaggcctcatatgcatctcagagtcacagatgctaaaactcaacacaccagtgagttccctgtcagcatcatatactaccctctacctcaatgatcagccccaagccagcatctcccaaagagtagtgtgttgctgtgggtgtttcaacagatcactaaaacctgcttctacccctgcctagacacttatcctcactgctatgcatcctgctcctcaaatcagatcttgatatcttctttaaacactcccaatctcccaacacgacaattcatttccaaagaattatagtatttaaatttattggactctatacagactcattcccactttgttactacgctggtccatccatcacctccattaacataagtagatcaaaaactggcctctctacagccagtcttgtctattccaacccatttgccacactgtatcctgagtgacctttccacagtgtaaatctggacatacctgtagccttaaatcatatctaccaacatagtagc

SEQ ID NO: 584020 - DNA, 628 bp, Homo sapiens
atactagttctggccaacaaaccttcacatattgtctgtgtcaaccagagctacatttattccgaaatctctttctaaaatacaaacctgtactttctactctcaaccccaaaatttacaagaggcctcatatgcatctcagagtcacagatgctaaaactcaacacaccagtgagttccctgtcagcatcatatactaccctctacctcaatgatcagccccaagccagcatctcccaaagagtagtgtgttgytgtgggtgtttcaacagatcactaaaacctgcttctacccctgcctagacacttatcctcactgctatgcatcctgctcctcaaatcagatcttgatatcttctttaaacactcccaatctcccaacacgacaattcatttccaaagaattatagtatttaaatttattggactctatacagactcattcccactttgttactacgctggtccatccatcacctccattaacataagtagatcaaaaactggcctctctacagccagtcttgtctattccaacccatttgccacactgtatcctgagtgacctttccacagtgtaaatctggacatacctgtagccttaaatcatatctaccaacatagtagc

SEQ ID NO: 584021 - DNA, 628 bp, Homo sapiens
atactagttctggccaacaaaccttcacatattgtctgtgtcaaccagagctacatttattccgaaatctctttctaaaatacaaacctgtactttctactctcaaccccaaaatttacaagaggcctcatatgcatctcagagtcacagatgctaaaactcaacacaccagtgagttccctgtcagcatcatatactaccctctacctcaatgatcagccccaagccagcatctcccaaagagtagtgtgttgcygtgggtgtttcaacagatcactaaaacctgcttctacccctgcctagacacttatcctcactgctatgcatcctgctcctcaaatcagatcttgatatcttctttaaacactcccaatctcccaacacgacaattcatttccaaagaattatagtatttaaatttattggactctatacagactcattcccactttgttactacgctggtccatccatcacctccattaacataagtagatcaaaaactggcctctctacagccagtcttgtctattccaacccatttgccacactgtatcctgagtgacctttccacagtgtaaatctggacatacctgtagccttaaatcatatctaccaacatagtagc

SEQ ID NO: 584022 - DNA, 666 bp, Homo sapiens
catcattgttttgcagtctttctaatatatctaatatttgggggcttgatttcaactgcctgacatgtctgctggttttcacacctggtttagtttctttgggttcattattatttttgagtatgtgccatatcttgtatctggaaaaatatttttggaataatctgagatctacaatgaaagctttcttgcccagcacctgggggtacttccagcccagaaccacctttaatcaagtaaaaggtgtgaaagatgctctgaacttaaactgtgtaacataagggatgtttcttttatagttcatttttatcccaagattatagaaatgtaaggtcctaccttattgtaggattattctcctgataaactccccaacttgggcagactctggtcttctatttctgtcccattagtcacagaaggctgtcaaaccctaatatgcasgtcaggaaatgtccttagccaaaaaatggcttctctgcttgcttacggctctgggttccagtttttcctttacttcaggcctcgtaattcttcagtgttaatcatcatcttgatgcttttaaaaatatttgtttcctatatattacctaaatagcttagtcagtgttaccagaaatgtatcatcaacttttaaaatatactaaatgcttaaaaaaataaagt

SEQ ID NO: 584023 - DNA, 666 bp, Homo sapiens
catcattgttttgcagtctttctaatatatctaatatttgggggcttgatttcaactgcctgacatgtctgctggttttcacacctggtttagtttctttgggttcattattatttttgagtatgtgccatatcttgtatctggaaaaatatttttggaataatctgagatctacaatgaaagctttcttgcccagcacctgggggtacttccagcccagaaccacctttaatcaagtaaaaggtgtgaaagatgctctgaacttaaactgtgtaacataagggatgtttcttttatagttcatttttatcccaagattatagaaatgtaaggtcctaccttattgtaggattattctcctgataaactccccaacttgggcagactctggtcttctatttctgtcccattagtcacagaaggctgtcaaaccctaatatgcaggtcaggaaatgtccttagccaaaaaatggyttctctgcttgcttacggctctgggttccagtttttcctttacttcaggcctcgtaattcttcagtgttaatcatcatcttgatgcttttaaaaatatttgtttcctatatattacctaaatagcttagtcagtgttaccagaaatgtatcatcaacttttaaaatatactaaatgcttaaaaaaataaagt

SEQ ID NO: 584024 - DNA, 666 bp, Homo sapiens
catcattgttttgcagtctttctaatatatctaatatttgggggcttgatttcaactgcctgacatgtctgctggttttcacacctggtttagtttctttgggttcattattatttttgagtatgtgccatatcttgtatctggaaaaatatttttggaataatctgagatctacaatgaaagctttcttgcccagcacctgggggtacttccagcccagaaccacctttaatcaagtaaaaggtgtgaaagatgctctgaacttaaactgtgtaacataagggatgtttcttttatagttcatttttatcccaagattatagaaatgtaaggtcctaccttattgtaggattattctcctgataaactccccaacttgggcagactctggtcttctatttctgtcccattagtcacagaaggctgtcaaaccctaatatgcaggtcaggaaatgtccttagccaaaaaatggcttctctgcttgcttacggctctgggttccagtttttcctttacttcaggcctcgtaattcttcagtgttaatcatcatcttgatgcttttaaaaatatttgtttyctatatattacctaaatagcttagtcagtgttaccagaaatgtatcatcaacttttaaaatatactaaatgcttaaaaaaataaagt

SEQ ID NO: 584025 - DNA, 666 bp, Homo sapiens
catcattgttttgcagtctttctaatatatctaatatttgggggcttgatttcaactgcctgacatgtctgctggttttcacacctggtttagtttctttgggttcattattatttttgagtatgtgccatatcttgtatctggaaaaatatttttggaataatctgagatctacaatgaaagctttcttgcccagcacctgggggtacttccagcccagaaccacctttaatcaagtaaaaggtgtgaaagatgctctgaacttaaactgtgtaacataagggatgtttcttttatagttcatttttatcccaagattatagaaatgtaaggtcctaccttattgtaggattattctcctgataaactccccaacttgggcagactctggtcttctatttctgtcccattagtcacagaaggctgtcaaaccctaatatgcaggtcaggaaatgtccttagccaaaaaatggcttctctgcttgcttacggctctgggttccagtttttcctttacttcaggcctcgtaattcttcagtgttaatcatcatcttgatgcttttaaaaatatttgtttcctatataktacctaaatagcttagtcagtgttaccagaaatgtatcatcaacttttaaaatatactaaatgcttaaaaaaataaagt

SEQ ID NO: 584026 - DNA, 517 bp, Homo sapiens
gagacatcacacataataaaatacttggactttgaaaggaaagagtcaagtctatgacttacaagcttataaagatccctcagatgagttatgtacatggattgagaatcagaaaaggaaggatgctctctcaggagatagaaaaaccagataaaaggarcaactgaaattatctgacccatcccctcatcgcctgtgtagaagggaaatgcttactttatctaaccagtggataacagacagcctctttcattttggagctaccaaaaagaaaaataaattgtggtttggttcagttcccttttgaccagtatgttcttgaaatttcgaaaacattttactctttttccttttagtgtttcagtgtggataatttcatttgatctattttcaagttcattttttaggccaaaatttgtcaaatattggcaatttcatatgattcaacttaatatattaacctaatgtgccaaattcaaatttgtttctatactactaaataatatcccccgaaacg

SEQ ID NO: 584027 - DNA, 517 bp, Homo sapiens
gagacatcacacataataaaatacttggactttgaaaggaaagagtcaagtctatgacttacaagcttataaagatccctcagatgagttatgtacatggattgagaatcagaaaaggaaggatgctctctcaggagatagaaaaaccagataaaaggaacaactgaaattatctgacccatcccctcatcgcctrtgtagaagggaaatgcttactttatctaaccagtggataacagacagcctctttcattttggagctaccaaaaagaaaaataaattgtggtttggttcagttcccttttgaccagtatgttcttgaaatttcgaaaacattttactctttttccttttagtgtttcagtgtggataatttcatttgatctattttcaagttcattttttaggccaaaatttgtcaaatattggcaatttcatatgattcaacttaatatattaacctaatgtgccaaattcaaatttgtttctatactactaaataatatcccccgaaacg

SEQ ID NO: 584028 - DNA, 569 bp, Homo sapiens
atcagaaaaggaaggatgctctctcaggagatagaaaaaccagataaaaggaacaactgaaattatctgacccatcccctcatcgcctgtgtagaagggaaatgcttactttatctaaccagtggataacagacagcctctttcattttggagctaccaaaaagaaaaataaattgtggtttggttcagttcccttttgaccagtatgttcttgaaatttygaaaacattttactctttttccttttagtgtttcagtgtggataatttcatttgatctattttcaagttcattttttaggccaaaatttgtcaaatattggcaatttcatatgattcaacttaatatattaacctaatgtgccaaattcaaatttgtttctatactactaaataatatcccccgaaacgctttgccaatttactcctactgacagtgtatgaaaatatccattttatttcatcctttacaaggtgctattatcaataatttatacttttaccaatctgggaagtgaaaaagacatttaattgtcttgacttgcatctcccttattactggttagttta

SEQ ID NO: 584029 - DNA, 569 bp, Homo sapiens
atcagaaaaggaaggatgctctctcaggagatagaaaaaccagataaaaggaacaactgaaattatctgacccatcccctcatcgcctgtgtagaagggaaatgcttactttatctaaccagtggataacagacagcctctttcattttggagctaccaaaaagaaaaataaattgtggtttggttcagttcccttttgaccagtatgttcttgaaatttcgaaaacattttactctttttccttttagtgtttcagtgtggataatttcatttgatctattttcaagttcattttttaggccaaaatttgtcaaatattggcaatttcatatgattcaacttaatatattaacctaatgtgcmaaattcaaatttgtttctatactactaaataatatcccccgaaacgctttgccaatttactcctactgacagtgtatgaaaatatccattttatttcatcctttacaaggtgctattatcaataatttatacttttaccaatctgggaagtgaaaaagacatttaattgtcttgacttgcatctcccttattactggttagttta

SEQ ID NO: 584030 - DNA, 616 bp, Homo sapiens
ttttattcttagttattcttactactcaatcttttattttaaaaaattatcatctatgattttataggaatgtttacagttaatttctggagatattataatttatcttttataagttatttcaatttgggatgaccttgtccatttcctcttcccgacttcaccttcttgtgttgtcatgaatatrtctatcaagccctttgcttattttcctatgtgcccttgagattctttcctaagcttttaagggatcaactcgttataaatctcagtctgtttgcttttgcatatgcagttttcatctttccccagatagcaaggtcactccattttgattttcttcctgtatcacagcagcaagaggaaaaggatgggaaaagggttaaaacatttatgtagcttgtgttcctaaaaatagctatcatctgaaatggaaaaactcttcacatgagctcattccccagcttttaactgcctaatagtgtgagtcaggtgcagacactgaagcgctattctgaaagaccctcacttagtgtataaatgtgagaggctacagtggcttgtcagatcataaagtatgaaagctcatgatcttccctgtcacctaacccagcac

SEQ ID NO: 584031 - DNA, 616 bp, Homo sapiens
ttttattcttagttattcttactactcaatcttttattttaaaaaattatcatctatgattttataggaatgtttacagttaatttctggagatattataatttatcttttataagttatttcaatttgggatgaccttgtccatttcctcttcccgacttcaccttcttgtgttgtcatgaatatgtctatcaagccctttgcttattttcctatgtgcccttgagattctttcctaagcttttaagggatcaactcgttataaatctcagtctgtttgcttttgcayatgcagttttcatctttccccagatagcaaggtcactccattttgattttcttcctgtatcacagcagcaagaggaaaaggatgggaaaagggttaaaacatttatgtagcttgtgttcctaaaaatagctatcatctgaaatggaaaaactcttcacatgagctcattccccagcttttaactgcctaatagtgtgagtcaggtgcagacactgaagcgctattctgaaagaccctcacttagtgtataaatgtgagaggctacagtggcttgtcagatcataaagtatgaaagctcatgatcttccctgtcacctaacccagcac

SEQ ID NO: 584032 - DNA, 547 bp, Homo sapiens
atgtagcttgtgttcctaaaaatagctatcatctgaaatggaaaaactcttcacatgagctcattccccagcttttaactgcctaatagtgtgagtcaggtgcagacactgaagcgctattctgaaagaccctcacttagtrtataaatgtgagaggctacagtggcttgtcagatcataaagtatgaaagctcatgatcttccctgtcacctaacccagcaccatttttccttgaccatcttggtgtgtcagaaaggcaccttcagagtcatggtgacaaggacagggggagctggctgagatggagggctctaggtagaagaggtagaggggtcagaaaggtacgtgagttaagaggttggccacagactcttcctacttctttgcccttgttccgccccagggctcttcactttcttttagaacttaaaaaagttgactaatattttacgcaaatgaaaaaatgtgtaatatatatgtgtatatggttaatgatgcaaaataagaaaatgaacatttataaacccacaacccaaattaacaaca

SEQ ID NO: 584033 - DNA, 595 bp, Homo sapiens
agtgacctttgatcgtcctcactgctcattatatgctaattataaccattagcatgttaaaagacactcccaccagcaccatgacagtttacaagtgctatggcaacatcaggaaattacactatatggtctaaaaagaggaggaactgtcagttcctggaattgcmccccccctttcctggaaaggaataataatccaacccttgtttagcatataatcaagaaataaccacaaaaatagccaaccagtaacccttggggctggtctgcctatggagtagtcattctttatttctttactttcttaaataaacttgctttcactttactctatggactcactccaacttcttccttgcatgagatccaagaaccctctcggagtctggattgggaccccttcctggtaacagatagaaaaaatatttgaacaaagaatgaccaaaaagttttcaaacttgatgaaaacttgtaggagacaggcatgtgccaccctaaaatatgactttttggcataaggattattttgagaaacagtagacacaggagaattctaaaaacacagtagaagttacccttctgtaagggaaattta

SEQ ID NO: 584034 - DNA, 595 bp, Homo sapiens
agtgacctttgatcgtcctcactgctcattatatgctaattataaccattagcatgttaaaagacactcccaccagcaccatgacagtttacaagtgctatggcaacatcaggaaattacactatatggtctaaaaagaggaggaactgtcagttcctggaattgcaccccccctttcctggaaaggaataataatccamcccttgtttagcatataatcaagaaataaccacaaaaatagccaaccagtaacccttggggctggtctgcctatggagtagtcattctttatttctttactttcttaaataaacttgctttcactttactctatggactcactccaacttcttccttgcatgagatccaagaaccctctcggagtctggattgggaccccttcctggtaacagatagaaaaaatatttgaacaaagaatgaccaaaaagttttcaaacttgatgaaaacttgtaggagacaggcatgtgccaccctaaaatatgactttttggcataaggattattttgagaaacagtagacacaggagaattctaaaaacacagtagaagttacccttctgtaagggaaattta

SEQ ID NO: 584035 - DNA, 595 bp, Homo sapiens
agtgacctttgatcgtcctcactgctcattatatgctaattataaccattagcatgttaaaagacactcccaccagcaccatgacagtttacaagtgctatggcaacatcaggaaattacactatatggtctaaaaagaggaggaactgtcagttcctggaattgcaccccccctttcctggaaaggaataataatccaacccttgtttagcatataatcaagaaataaccacaaaaatagccaaccagtaacccttggggctggtctgcctatggagtagtcattctttatttctttactttcttaaataaacttgctttcactttactctatggactcactccaacttcttccttgcatgagatccaagaaccctctcgsagtctggattgggaccccttcctggtaacagatagaaaaaatatttgaacaaagaatgaccaaaaagttttcaaacttgatgaaaacttgtaggagacaggcatgtgccaccctaaaatatgactttttggcataaggattattttgagaaacagtagacacaggagaattctaaaaacacagtagaagttacccttctgtaagggaaattta

SEQ ID NO: 584036 - DNA, 564 bp, Homo sapiens
aaaattagtaaatggtacagtgagacataaactagctccatgtctagttctgtgcagtagtgatataagaattataaggtttaacagaaacagaattgttgctaattgtccctgagtatgcttccctctacactgtaactcagcagtcttctctcaggcaattagcagctttatcacgtggaagaggaagaggctaaaattcagtcaaaatcaggtcctctttggggaaaattagtcttttgcagtaggggtgtagaaagagagtcaagaaataaagcattgttggctgggcacggtggcttacgcctgtaatcccagcactttgggaggccaaggcaggtggatcacgaggtcagaagttcaagaccagccaatatggtgaaatccygtctctactaaaaaaatacaaaaattagctgggcgtggtgttttgtgcctgtagtcccagctacttgggaggctgaggcaggagaattgcttgaacccgggaggcagaggttgcagtgagctgagattgtgccactacacttcagcctgggtgactctgtctcacacacgcacaaa

SEQ ID NO: 584037 - DNA, 421 bp, Homo sapiens
tctgcaacattcagcaatgaatttagattatctttgaaaaaaagttcattttcaagktgttttttttgtttcgtttttttttttttttttttgccaaaaaatttctttttttttctgttacttagtagcatgaagtacaatgtttggtttgcaatttctgttctttgtaggaagaaaaactttagtggaaacaaccagtacttaaagaccattttatgaggctgtcatttacgtattatctcttttgctgtttttgttaaaatgatataaggtgggctttatatgctttctgtatatcctttggaatgtgtatttaaattaaaaacttaaaattaaaatattcatcctagactcaggttaagttccaccaacagtacacttaaaataggatgagcccaacctaagcgtacaacctacctgc

SEQ ID NO: 584038 - DNA, 421 bp, Homo sapiens
tctgcaacattcagcaatgaatttagattatctttgaaaaaaagttcattttcaagttgttttttttgtttcgtttttttttttttttttttgccaaaaaatttctttttttttctgttacttagtagcatgaagtacaatgtttggtttgcaatttctgttctttgtaggaagaaaaactttagtggaaacaaccagtacttaaagaccattttatgaggctgtcatttacgtattatctcttttgctgtttttgttaaaatgatataaggkgggctttatatgctttctgtatatcctttggaatgtgtatttaaattaaaaacttaaaattaaaatattcatcctagactcaggttaagttccaccaacagtacacttaaaataggatgagcccaacctaagcgtacaacctacctgc

SEQ ID NO: 584039 - DNA, 540 bp, Homo sapiens
ccaggctatagatcttacattcctcttacacaacaatcctaattccctcatgttatcctgatcaatgaaatgatttcacttatttttcaaagaagtagctattttactacaaagcaggaatcgcaaggcatggggtgggcactgttctactccatcagtgagtacgtaaaggaaataaaactgtctgattttgaatcctgcttctatttttyacaaccttggacaaattactgatttcctctttcactaagtttatcatttgtaaaatggagatactagtgtctactcatggattattgtgaggcttaaataagaaaacatgtatcaagcatatttgtctggcatgtaataagcactctaaaatttatgcagtgatgaggataatgatcatagacaatctgatagcatcttatccaaaggaaaaaatgcgcatttcctttgagtaagcactactgattctaggaatgtgtcctaaggaaaaaataagtcaaatgtttaaaggtagtcacaagactattttggtagtaagcagtctttttt

SEQ ID NO: 584040 - DNA, 540 bp, Homo sapiens
ccaggctatagatcttacattcctcttacacaacaatcctaattccctcatgttatcctgatcaatgaaatgatttcacttatttttcaaagaagtagctattttactacaaagcaggaatcgcaaggcatggggtgggcactgttctactccatcagtgagtacgtaaaggaaataaaactgtctgattttgaatcctgcttctattttttacaaccttggacaaattactgatttcctctttcactaagtttatcatttgtaaaatggagatactagtgtctactcatggattattgtgaggcttaaataagaaaacatgtatcaagcatatttgtctggcwtgtaataagcactctaaaatttatgcagtgatgaggataatgatcatagacaatctgatagcatcttatccaaaggaaaaaatgcgcatttcctttgagtaagcactactgattctaggaatgtgtcctaaggaaaaaataagtcaaatgtttaaaggtagtcacaagactattttggtagtaagcagtctttttt

SEQ ID NO: 584041 - DNA, 606 bp, Homo sapiens
acttttatcacttaaaataccttaaagttctgtttatattaatagaaatccactttaaaatgtctgctgcacagctgtaccagaattaatttaaccattctgcctattagcaaatttataagatgtttccactcttttgattttacaagcattgctgcaataattatctttatacatacattccgggggcacatttcatagggtatctgtaagataatattctggacatggaattattgtcatattttaataaatggaagcagaaaagcccaccacccacttaaacctgtaaggagtttctattcatcaagagatggagactgcaatattcttcagggaaaaatgcttcattcaatatgcaagacaaaataaccaaatgtattatttagttattcagaagtgatgagtttaaacttckttaaaaatgataatgcaaaagtcaatccacactggaggcaaaattgcctttatgcagacatggttgctgttagaggaaatgtgttttagccaaggaaatgttgagaatgtctgagggaaggcttgatgttcctcatgtgtcccttaggtctctgtaaataagttcttaggatggagaggttagggaag

SEQ ID NO: 584042 - DNA, 606 bp, Homo sapiens
acttttatcacttaaaataccttaaagttctgtttatattaatagaaatccactttaaaatgtctgctgcacagctgtaccagaattaatttaaccattctgcctattagcaaatttataagatgtttccactcttttgattttacaagcattgctgcaataattatctttatacatacattccgggggcacatttcatagggtatctgtaagataatattctggacatggaattattgtcatattttaataaatggaagcagaaaagcccaccacccacttaaacctgtaaggagtttctattcatcaagagatggagactgcaatattcttcagggaaaaatgcttcattcaatatgcaagacaaaataaccaaatgtattatttagttattcagaagtgatgagtttaaacttcgttaaaaatgataatgcaaaagtyaatccacactggaggcaaaattgcctttatgcagacatggttgctgttagaggaaatgtgttttagccaaggaaatgttgagaatgtctgagggaaggcttgatgttcctcatgtgtcccttaggtctctgtaaataagttcttaggatggagaggttagggaag

SEQ ID NO: 584043 - DNA, 556 bp, Homo sapiens
ccagatctattttagacatttccagcacctcagaaactccttcttgcccatttctagtccacccctgacactgacttccagcaccataggttttttgcctrtttttgaacttcatataaagggctacggtatgggacaggatgtactcttttgtgtctggtttatttttctcaacattatgattgtgaactgtatacatgttgtaaattgaagttcatttgttcttattactgtatatttcatattttcccattctgctgaggggctcgggttgcttctggttttgaccacttacaaatagtaatgctgtggatatttttgtttacatgtttcaaatattttctaccattactaatgtttgacagtatctgatggaggtatgttacaatttcccactcttttggatatacaaatgcaaattaagcatttccctaatgactatgatattgaccatttttcacgtttattacctatttgggtatccttttttgtaaggtctttttgataatttttctattgtctgtctttttcttactgacttacaggagttatttat

SEQ ID NO: 584044 - DNA, 556 bp, Homo sapiens
ccagatctattttagacatttccagcacctcagaaactccttcttgcccatttctagtccacccctgacactgacttccagcaccataggttttttgcctatttttgaacttcatataaagggctacggtatgggacaggatgtactcttttgtgtctggtttatttttctcaacattatgattgtgaactgtatacatgttgtaaattgaagttcatttgttcttattactgtatatttcatattttcccattctgctgaggggctcgggttgcttctggttttgaccacttacaaatagtaatgctgtggatatttttgtttacatgtttcaaatattttctaccattactaatgttygacagtatctgatggaggtatgttacaatttcccactcttttggatatacaaatgcaaattaagcatttccctaatgactatgatattgaccatttttcacgtttattacctatttgggtatccttttttgtaaggtctttttgataatttttctattgtctgtctttttcttactgacttacaggagttatttat

SEQ ID NO: 584045 - DNA, 397 bp, Homo sapiens
tttgtttcaaccaacttctgagatctggaaagggaagataagaaagggctgtgtacgcagttgccagtaaagattgcttttctttccaccaaagctaaagatatttgaggaactggatataggcctgagatttrgcagagctctgaggctggatgttgcaaggagaaaaaataggaagcccacagggccaagcttgggcctccttgtacctcctccactgtatacatacattttgggttcatatttttcaggctggctactactgcaggtctccagcagagtcttcacggaaggagaacctctggccttgaggtgtcatgcgtggaaggataagctggtgtacaatgtgctttactatcgaaatggcaaagcctttaagtttttccactggaattct

SEQ ID NO: 584046 - DNA, 567 bp, Homo sapiens
gctggtgtacaatgtgctttactatcgaaatggcaaagcctttaagtttttccactggaattctaacctcaccattctgaaaaccaacataagtcacaatggcacctaccattgctcaggcatgggaaagcatcgctacacatcagcaggaatatctgtcactgtgaaaggtattgtattggaatagtcatagaactgatagtccctccccctgagggaccatcataaatattctaaactcctcactttaatttacaagtgaagaaaccgggctccagagaggtaaactgcattactaaaggccacaccatgaccagtagctggaaccagaactgaggtctctgggtcctagtccaatactctttccagtgtaccgcaacccccatcaayaatcacaggagctaatgtcaatgtcagggcataatggtgatccatttcatccatcattattttagttgtaaagaatacagactcactctaggtagataggagagttagaaaataataccatggaatctcatggaagccccatagaaagagaaacctggaaaatatgaagaacgggct

SEQ ID NO: 584047 - DNA, 564 bp, Homo sapiens
acagggtcatgccaccatgttcagctaagttttgtatttttagtagagacggggtttcaccatgatggccagactgctcttaaactcctgaagtctggtgattcgcccacctctrcctcccatagttctgggattacaggtgtgagccagcatgcctggccggacactgcttttttaatcactcatgcacggagctattttaaagaaaagttatataaccttttgagcataattagaagtgggtcttctttgtgcttctatttatcagtttatgcataatgctattaaacactgctatttctatttgaatatgagtaactatacagcaaattattacttttatcttctttttcaaaagaaatgttgctaaaggaagtattaaggttttttttaattttaggaattgcataaaatggacagggtacattaggtgaatattctatgtgtgtttctaatgttttgatcttggaaacttaagtggacacatctaaaaatgatgatagtatcaattcctcataccaatttggtaaaaaacaaaacatatgctgtctgtgcacatcagaa

SEQ ID NO: 584048 - DNA, 591 bp, Homo sapiens
ctagactgggtcctacaagaaatgctcaaaggaattctaaacatggaaaacaaaaggaccatactcaccatcatgaaaggacacttaagtacaaagctcactgattgaaactccaaagaaactagctaacagcactaagacaggaacaaaacctcacatactaaaattaactttgaatgtaaatgacataaatgatccacttaaaatatacaaattggaaaattcgattaaaaaaacccgctcaaccaggagagacaaacctgcagatcaaagacagctatagattcaaagtaagagggtagaaaaagctttatcacacaaatggaaaacaaaagagaggaggagcagccattctcatataagataaaacagacttccaaccaacaacagtaaaarggacaaggaagggcattataatattaaggatacaataaaacaagaagatttaactgtccgaaatatatatgcacccaacacctgagcacccacattcataaaacaaaaaacactaggcctaagaaatcaggttaatagcaatacaataatcatggggttttcaatactccaatgacatcactagagagatcatca

SEQ ID NO: 584049 - DNA, 512 bp, Homo sapiens
ccactggttctatcatagtccaggtcactcaattagactgtttgaaagatggcctcaatttttacatcttattctctcctgtgttaattttttaaaacrtgactgaaataatttaattcccaaacatgaataacttccattccacttattgccaaaagaataaacaccagattctttgacatgttctctgtggttgttcaaattgtcttttgatcttaatctctcaatatccccctattaacttacatttcctaaagtgcccaaattacttcctggcttttaatgtacttaagtattattatgctcttcttgtcattatttatcatctttctatttccaactcaaatatcagcacacctttgaagttgtcattgatctcagagtcaacatttatttatcctttttctatatttgcacaggaaattatttgaattaagaagttactttattttgccttaaattataccagagtctgagtaaatttttaatttttaaaattaaaatcctacatc

SEQ ID NO: 584050 - DNA, 512 bp, Homo sapiens
ccactggttctatcatagtccaggtcactcaattagactgtttgaaagatggcctcaatttttacatcttattctctcctgtgttaattttttaaaacatgactgaaataatttaattcccaaacatgaataacttccattccacttattgccaaaagaataaacaccagattctttgacatgttctctgtggttgttcaaattgtcttttgatcttwatctctcaatatccccctattaacttacatttcctaaagtgcccaaattacttcctggcttttaatgtacttaagtattattatgctcttcttgtcattatttatcatctttctatttccaactcaaatatcagcacacctttgaagttgtcattgatctcagagtcaacatttatttatcctttttctatatttgcacaggaaattatttgaattaagaagttactttattttgccttaaattataccagagtctgagtaaatttttaatttttaaaattaaaatcctacatc

SEQ ID NO: 584051 - DNA, 330 bp, Homo sapiens
cctgctttttattctgtcccacaaaaggcaagtaaacagaacaatgaagtttctagtcttgctgaaacacgacttaggtgaataatagcttgcctgaattagtgttttcagcaaatgaaacaaagaactcccarcaaagaacatccgtatccctactatcacatattgtccttgaggaataataaataatatgtgcatttcaaagactgaatgctccaaaatacctcacttggtctaatatgttatttaatgtgcatttgcagtttgtagctctagattcctctgactgctacagttggtgccatgcttctgtctcatctttttagctgg

SEQ ID NO: 584052 - DNA, 330 bp, Homo sapiens
cctgctttttattctgtcccacaaaaggcaagtaaacagaacaatgaagtttctagtcttgctgaaacacgacttaggtgaataatagcttgcctgaattagtgttttcagcaaatgaaacaaagaactcccagcaaagaacatccgtatccctactatcacatattgtccttgaggaataataaataatatgtgcrtttcaaagactgaatgctccaaaatacctcacttggtctaatatgttatttaatgtgcatttgcagtttgtagctctagattcctctgactgctacagttggtgccatgcttctgtctcatctttttagctgg

SEQ ID NO: 584053 - DNA, 217 bp, Homo sapiens
caagaacagcatgggaatgaccygcccccatgattcaattacctcccaccagtttcctcccatgacatgtgggaatggtgggagttacaattcaagatgaaatttgggtgggacacagctaaaccatatcagctatcatttcaagtttttggccttcttttgtttctatggagaagtcatttgtcataattttgcttcttttcagatagatcttttt

SEQ ID NO: 584054 - DNA, 515 bp, Homo sapiens
gctcattgggatctccggatggctatgtaagggtgggatgttcccagctcgcaaggagaatctcatttatgtaagaatagccttccatttaaagcattcaaaactcattactgttgcagacttttcattccagtgcctggctttgtagaagaagccagggacctaaagttttaagctttcttaaaattgtactcattaaacagcatgttaatcatggatcagggaatgcacattatacartccattaagcttgtgtatgttcctggaagactgtagattgtataaaaatacaaatgatccagcagttaaaataattggctataatgaacagcaaaattaattatgaatgaccacattgcttacccagttgacctaagtcattagcagatgtaatgggtcaggtaaaaataagatgtattttggcttctacaaattgctccacaagcatccgcgatagtccagggatctcatggccagaacagaggctagacatgagacaatgtatgagagtgagg

SEQ ID NO: 584055 - DNA, 559 bp, Homo sapiens
ttggtgttgttttcaatgactcgccccaaatattttgtaattgttgkgaagacattttcatcatggctgatggcttttggcacagtggatcactcctggacatgcttttactcttggcctcctgcatggtgtcctactctggctcttcttctaccccacctccctggcttcttcatgttgggatgccctaaggctcttctcttggccccttatgttctctctctctttttttttttttttgaggcggagtcttgctttgtcacccaggcttgggtgcaacagcacgacctcggctcaccgaaacctccacttcccaaattcaagtgattctcatgcctcagcctcccgagcagccggggttacaggcacccatcaccatgcctggctaatttttgtatttttagtagagacagagtttcaccatgttggccaggctggtctcgaactcctgacctcaagtgatctgcccacctcagtctcccaaagtgctgggattacaagtgtgagtcactgtgcctggccccttatgttctccatccatacttgtgccttagtgatt

SEQ ID NO: 584056 - DNA, 564 bp, Homo sapiens
cacccatcaccatgcctggctaatttttgtatttttagtagagacagagtttcaccatgttggccaggctggtctcgaactcctgacctcaagtgatctgcccacctcagtctcccaaagtgctgggattacaagtgtgagtcactgtgcctggccccttatkttctccatccatacttgtgccttagtgattcatcttgcctcatgcacttaagcatcatctagaaactggtgactccaaaatttacaactccagactggacctctcttttgaactctaaactcatattttgacctgcttcctcaagattcccacttgggttttcaaatttaacctgtctaaaactgacatccaaatgatcacctctccaaacctactcccaccacaaccttcctcatctcagctcatggaaatgctactattttcatttcttaggccaaaattcatttatacccctagcacagatctgtctcatgaactccagactcatattttcagttgccaactcgacctctctacctgactgtctcacgatcatcacaaacttctatccaaggctaact

SEQ ID NO: 584057 - DNA, 564 bp, Homo sapiens
cacccatcaccatgcctggctaatttttgtatttttagtagagacagagtttcaccatgttggccaggctggtctcgaactcctgacctcaagtgatctgcccacctcagtctcccaaagtgctgggattacaagtgtgagtcactgtgcctggccccttatgttctccatccatacttgtgccttagtgattcatcttgcctcatgcacttaagcatcatctagaaactggtgactccaaaatttacaactccagactggacctctcttttgaactctaaactcatattttgacctgcttcctcaagattcccacttgggttttcaaatttaacctgtctaaaactgacatccaaatgatcacctctccaaacctactcccacyacaaccttcctcatctcagctcatggaaatgctactattttcatttcttaggccaaaattcatttatacccctagcacagatctgtctcatgaactccagactcatattttcagttgccaactcgacctctctacctgactgtctcacgatcatcacaaacttctatccaaggctaact

SEQ ID NO: 584058 - DNA, 564 bp, Homo sapiens
cacccatcaccatgcctggctaatttttgtatttttagtagagacagagtttcaccatgttggccaggctggtctcgaactcctgacctcaagtgatctgcccacctcagtctcccaaagtgctgggattacaagtgtgagtcactgtgcctggccccttatgttctccatccatacttgtgccttagtgattcatcttgcctcatgcacttaagcatcatctagaaactggtgactccaaaatttacaactccagactggacctctcttttgaactctaaactcatattttgacctgcttcctcaagattcccacttgggttttcaaatttaacctgtctaaaactgacatccaaatgatcacctctccaaacctactcccaccacaaccttcctcatctcagctcatggaaatgctactattttcatttcttaggccaaaattcatttatacccctagcacagatctgtctcatgaactccagactcatattttcagttgccaactcgacytctctacctgactgtctcacgatcatcacaaacttctatccaaggctaact

SEQ ID NO: 584059 - DNA, 450 bp, Homo sapiens
taggtaagacttgtttattatgttgttcaaaactttcttattctttcttatttttatgtgctagatatatcagttattgaatgagttgtgtgaaaaatctttcactgattctagattgttttttcttacaattttgtcagtttctgcattatgtattttaagactgtgctatgagatacaaacagatatgcaattattatatcttctttgtgactttattttctcatatttatgaagagatctttcaaaaattaaatagctgagattaatatatcttataccatatacttttcttttggccaatacttaaatgcatattcttttccatccctttatttttcacstctctttatcttgttttagatgtgcagtttgcaaaaagcttatggtcaaatttcatttcattttatctgcttgaattagtctgttcttatgctgctaataaagaca

SEQ ID NO: 584060 - DNA, 588 bp, Homo sapiens
aagcttgtaatcccagcactttgggaggctggggtgggtggatcacctgaagtcaggagttcgagaccagcctggccaacatggcaaaaccctgtctctactaaaaatacaaaaattagccaggcatggtggcgcacccctttaatcccagctactgaagaggctgaggcaggagaattgcttgaacctgggagggaggcggaggttgtagtgagctgagatagtaccattgcattccaacctgggtgacagagggaaactctgtctcaaaaaataaataaaataaaataaagrtaaataagccctgaaacatctgcttgttttaatctctgctccatgtgttcacattcatctggtgtgcaataaatttatgttttggaaagctctttgcttgtgattgacaacctggtgattgctctctggccctgaaattttccttcccctcatcctaaagatactctttggccctttagggggttggagccctgtttcctggtcgctgtgtcttcatgtcttccccctcctttcctcacttcacttgctggagaatctcctctggctttctgttttctcccttcagtattttag

SEQ ID NO: 584061 - DNA, 583 bp, Homo sapiens
atctcatacaagtgtcccaaagttgtgcttttggagaaattcaccttggatagagacatggtcaagtgaccatgtctctttacctttaccttttttaaaaaacaatacatagctgtatccttggaagagaggcaaggagtgctgtagrgtgactatctttgatttctgttgtggttcagaggaagtgtaactttcttaaaagataccttgacttttgtcacatttagctattcgttcctttttatttaggaaaaaaaggctgagcctgctgtggcttgggctcttattatcttttcttgggcttcttggatctcataaatgataactctacttttattgttgccttctccaaaggaacctgaataccagcatcaccttcatttaccctaaagcatgattctctgcctaagaaaacccctatggttgacatttacatttactttatacctctcttaatcttttgaggaatgcctctctacctattctgcatggtaaagttctaattaattacaactatgaaacagatatttccttcttttcttatgtttcagatattgaattactttattattgccaagcacaa

SEQ ID NO: 584062 - DNA, 573 bp, Homo sapiens
taataacaacctaaaaatgctcaacatcaataatcaaggaaatacaaatgaaaaccacagttagatatcaaataactcctacaaaaatggccattttttgtaggccaaaaaaagtcaagaaaacaacagatgttggcattggatgtggtgaaatgggaacacttaacaaaataatgtcatttgcagcaacttggatggagccgaaggtcattattctaagtgaaataactcagaaatggaaaactagatatcgtatgttcttacatataagtgggagctaatctatgaggatgcaaagrcataagaataatgtaaaagactttggggactcgagggggaaggctgggaggcgggtgagggataaaaaactacatattaagtacagtgtgcactgctcaggtgacaagtgcactgaaatctcagaaaacacactaaagaacttatccatgtcatgaaaaaccacctgtatttccaaaacaattgacacttaaaaaaaaaaaaacctaatgacgtatcttagagagctagaaaaacaagagcaaaccaaaccaaaattagaagaaaagaagtaat

SEQ ID NO: 584063 - DNA, 542 bp, Homo sapiens
  misc_feature 1, 2, 3, 4, 5, 6, 7, 8, 9, 10, 11, 12, 13, 14, 15: n = A,T,C or G
nnnnnnnnnnnnnnngttattttgaatattttcaagtaatttgtatatctcaattttttagggttcatatctggaaatttattgtgtttttttggccatgttactctggtactctgttgtcatctttcattgtgatttgagcattaacagaaagctgtcacagtctttataaagtggtttggagtctgacaccaattgaccaggctagagattctggaggtttctaaagcctgttctcaggctgtgtctactctgggattgtgtgtttattttctttcttcagaaagaagtcagaagtttacttctataagcatcatgctgcattggagaggaagaagggctgtggtgggtaaatgcaasaaattttccttcctctactatttggcttttggcattctgcttgcctggggtgctgcaaactcttgatttttaaacttatcacaatggaattttgttcaggatatttttgttaagtgtatatgtatatgaagaaattagggcctatgatttttattgtgtcattttgctaatgtgcttgacat

SEQ ID NO: 584064 - DNA, 509 bp, Homo sapiens
agactagaacagcgtgggtgagttgtgaggggcaggaagcatgtcttaatggacttaaccaattttcgtcaactattcacagtaaaatctttcaatgtacaaaatttaataatctgataaacaataaacaaaatatttgaataggcatttttcataagacgtacaaagggcagacaggcatacgaaaaggtgctcaacatttttgatcatcagacaaatgcaaatcaaaactacaatgagatattaygtgactcagttaaatggcttatatccaaaaggtaggcagtaacaaatgctggagagaagtggagaaagggagcccttgtatgctgttgacaggaatgtaacattttgaaaattcttcaaaacaactaaaaataaagctaccatataattcaggaatgccactcctgaggattcacttactagaaaggaaatccatacattgaagagatatctaccctcccatgtttgttacagcagtgtgctccagccaatatttggaagta

SEQ ID NO: 584065 - DNA, 454 bp, Homo sapiens
ctaaaaccaagaaagataaaakgattggtccaaatctcctaaagtggcattacctagcattttatggcaccattcaggattgttccataataatgaaagaatctctctagggtttgtatctcttgaaaactcaatgtacagaattctttctgagttaaatattaaatttttcactggtgatttatgctacttacatgataggatcatgtatgcgtacacttactacactttgttaaacagcataacataaaaatctaattccacagaaacatttgaacataaaggtatacctctctatcacagtccttatttatttctggttcttgagacattttctgcagatgcaaaaatagaaggttaatttgcttgttgtatttccgtgtatgtctcctcttttggaatgcatgttaaaataattttattcttaagtaatcaagtatggacatgaaaaatt

SEQ ID NO: 584066 - DNA, 603 bp, Homo sapiens
ctaatttgtgtgtttgtgtctagtttttaacaaaagaaaaattaaagcaaaaataaatattttttaaaataaaaaactttagaataaagatgtaaagaaagacaatatttttctaatgctgtacaatatgtgttctaagtgttactacaaagaatcaaaaagtttaaaaatatttaaaagtttataaagttaaaaaagtacagtaaactaaggttaattaaacattgaagaaataaaaatgtttgtataaattgggygtagcctaattgtctagtatttataaagtatacattagtgtacagtgatgtcataggctttcactttcactcatcactctcactgactcacccagagcaacttccagtctcgcaagctccattcatgccaagtgtgctacagtagttttactatgctttttctatgtttagatacacaaacatttatcattaagttacaattgtctacggtgtttaatgcagtaacctgccgtacaggttttagcatagaagcaatgggctataccatacagcctaagtgtgtagtaggttgcaccatctaggtttgtgtaattatactgtatgatgtttgcacaataattaaacc

SEQ ID NO: 584067 - DNA, 603 bp, Homo sapiens
ctaatttgtgtgtttgtgtctagtttttaacaaaagaaaaattaaagcaaaaataaatattttttaaaataaaaaactttagaataaagatgtaaagaaagacaatatttttctaatgctgtacaatatgtrttctaagtgttactacaaagaatcaaaaagtttaaaaatatttaaaagtttataaagttaaaaaagtacagtaaactaaggttaattaaacattgaagaaataaaaatgtttgtataaattgggcgtagcctaattgtctagtatttataaagtatacattagtgtacagtgatgtcataggctttcactttcactcatcactctcactgactcacccagagcaacttccagtctcgcaagctccattcatgccaagtgtgctacagtagttttactatgctttttctatgtttagatacacaaacatttatcattaagttacaattgtctacggtgtttaatgcagtaacctgccgtacaggttttagcatagaagcaatgggctataccatacagcctaagtgtgtagtaggttgcaccatctaggtttgtgtaattatactgtatgatgtttgcacaataattaaacc

SEQ ID NO: 584068 - DNA, 495 bp, Homo sapiens
aagaaggaaatgatttaaaaataatgataataactgttatatattgggaatctattctttgcaaaatgcccccctgggaattttctttgttaaataattctttgaagtaygtattacagttcatattccagacaagaaaatatatctagaccagcattaacttgcccaaagtaaattcagaagtaagtgaaattaggatttgaacccaaggcaatctcattatagaattcatggtttttcccctacaccaatggcgctttagagaagcataatctttgattatcaatttacttattactacatgcctttacaaatggattttacttatcctgagtgtccagagaggtatattttgcaagaaacatatgcattctcagttctcgactcattacttaattttgaagtgacaagaaaattatcatattagctaatgtgacaactttggttaatgtggcaattttaaccaaggtgtcacactggctaaaacaacttgtc

SEQ ID NO: 584069 - DNA, 588 bp, Homo sapiens
aagcaaaaaaacaaacaacaacaacaacaacaacaaacccacacattttaagggaagaaagagagctgaagacaatgattcaggacctgccaattatatgcagcaagatacagcaaaagttaaacttctgagacataaatctgaaatgtttccagaaaaaatttacctccaaaaataaaagtacaattctggatgaaaaagacagcatttcaaaactaaaactagagaaattaaatagatctcaggaagaaatatggcagaaatagaaattgtctgtagtttagaatatcaccattaagaaaaacatgtttcagaattwaaaatcaaaaatttttgcagtcttactaagagcaaatcaatatattaagaaaatctttttctaatataggggaccaaattttttagtttaatgttagtatattttcaatgttaagtctcattttatagacagtcataattttttttaaattatagccaacttgatcacatacaaaatttcttttataaattccccctttcacaaacaccatacctactcagaccatttacagcatgcttaaactttctgttatgtcttatacttaatct

SEQ ID NO: 584070 - DNA, 572 bp, Homo sapiens
taagtagagtgggttaaagggctctgggaaaagcctcttgcatttatgttgtgcattcattccagcacacatcattcattcatccaacaagcatttatttgattcttaggatgttctaacccaattttagggattatgcagggatataaaaggaataatattgcttgatctgcaagtctagttggacaagagcacaaacagtcataacacaagggagaacatgttaagtgtcctaagagcagcatgcactgcagcgtggagagtgttccaagaagggacaaattgcttcagcaagaggaaatcatagaggacttttcagaggattctaaggaaaagatgtttgccttaaagagcaactgaaagtgctctacaaatagcgggtattatattttatcttccctgcccacaaaaatggtsataacaccatccccggttggagttgattctaccctttttaccagaagcactgacctcggtaactttggcaaatatcctagacacacatacacatacacagacacacacacacacacagagagagagagagagagagagaggtaagaaaacaccct

SEQ ID NO: 584071 - DNA, 586 bp, Homo sapiens
aacagcctgaatagcaaaagttttaagcttcttcaatccaagtcttccagttgacatcacttaatctaaataatctacatcactacttcatacattgaaatgacttgtcaatgttgaaaatttctgtgctgagctcatacaagtgttacattgacaataacctgtgcaagtgaacattcagtgtcaacatatattgagtaccagccatgagcttgttcctaaggatacaaggagttctcaagacctagtttctgtcttaaaataatttttaatacagtagaagaaacagataagcattcaaccatattacatttttaaaatttaaggttaatatgatgagattcagagaagcaagactcaggaatatttgcacattggacagtaggactttgaggtagtttctgttaccacttgtaaaggggggaagtaaagaagagaacatcataacattgaaaacaggtcttgaagacagaagataccagtttttaaaaaatactgctttgtcacatatgtttattgyggcactgttcacaatagcaaagacatggaaccaacccaaaagcccatcaatgatagactggattaa

SEQ ID NO: 584072 - DNA, 626 bp, Homo sapiens
atttttgccaatgttctaaatttcagagagcaactgaaatacagcatttaaaaaatatcaaattcctcaatttcaaaatattatatgccaaaaatgtcaccaatttttagcatactgtggataatcattattaaaacccaaaggacatctgtaggccaagtctttcagaaaattagtatatacagtcaataacctttgttggaagattccatattgcaaattcatctacttgctaaaattttgaaacctcagagtcaatactgtgacactttcactgttatttgtggatatgcacagagtagcaaaaaattttagttgcctgaggcatgtcttcccagatgaggctgaacaaatcaacactctacttccttgtttcaattcttgtgctgtaaagtgcaagaagactgcaawgtgccttatggagaaaacaccagtgctagagaaactttatttgggcacaccatgagatatagtgcctttgtgtgttcagtgttgataaatcaacaatatatattgatatggtttggctgtgtccccacccaaaatctcatcttgaattgtaatccccataatccctatgtgtcaagggagagaacaggtggaggtaattgaatcatgggggcagt

SEQ ID NO: 584073 - DNA, 628 bp, Homo sapiens
atgaacttggcttactgcaacctctgcctcctggggtcaagcaatcctcccacctcaacttcccgagtagctgggattacaggcatatgccaccatgccttgttaatttttatttttagtaaagatggggtttcaccatgttggccaggctggtctggaacttctgatctcaagttgtccacccgcctcagcctcccagattgctgagattacagttgtgagccaccacacccagctgatgctctcatatatatcttactatgagtttaaaagaggcaatacccatgaaaggaggaactctccaagaagcagagtctgattgggtcttgaaacgtgaacagaattcagaaaggtagtgttaatgtaaaaaacaaattatgtaaaacaatttgaagmggtttattctgagccaagacgagtgactgtggcccagagaaaaacacaaacccaagaagcttggagtaagtggtcctgaagcagtcagttttcagtttagttgtaaacattttaggaagacaggagttacaggcaaatatataaatcaatacatagcaggtatacattggttcagcctgaaaaagtgggaaatctcaaagcagtgccttgcaaatcataggtggattttagg

SEQ ID NO: 584074 - DNA, 621 bp, Homo sapiens
aattgcttgaactcgggaggcagaagtttcagtgagccaagatggtgctaccacactccagctggggggcagagcgagactcttgtctccaaaaaacaaacaaacaaacaaacaaacaggccaaaactattgtctgattctctaaatatgtggttttctagtggtctaacttgattccagagttctaaaatttagaaaaataagaatagattgtcacatgcacttcaagtaatcttgaagagatgttctaacctgatatctaagctaagatatcctacagctaagagttaaagctctttggaaagcatttgcagataatctacagcactaattaaagacagattgatttattttgtgcacaaacaaaaagactaggattttaatcccttaataaaagttttggatttatgctttmatagaaagctctgaaacttgtccatcaggtaggtaaaggaaaggttggcagaaaaggtcaagtatctcaacagcaatatcagatccactgaaaccaaaggtctcaaagttttgcattatagagcttataaataagtattttatactagagaatttttaaagcaggtgttataaaatgcccatttaaaccatttaaaacttctttcc

SEQ ID NO: 584075 - DNA, 593 bp, Homo sapiens
ttctttctacacatttcttcacctatcttaacatcacgtcagggtcctctcagtccccttttctctgttatgccttctggacctctgtggctagaaataaaccctctttcctgagttactttgattctgactgtccaatcattggtgaccacattctgggcaacttctgcaactaggtaccgttttttgtgtgtttagaaagttctcagcttttaggagtgacttatgtacattctttaatgtgaatggcacctatttcaaaccttttgtggratgtgttgattatatacagaaaattaaattctggtatagctaatacatacctgcacacgcatgcataaataggagcaataaaccagaggaacaaaaacacttccatgcaaatggcaggtggtgactcctccccttctgtcactgaagccacttggaagatttctgtgctctctctcctccctcttcctcctcttatttgcaggtctccattttgatgagtttttctgatctgacaaagtaaaatggggactgtgaactgagttgcattaatatagttctaattgaaagtagtccaagtttgctatttaatttattgtgta

SEQ ID NO: 584076 - DNA, 621 bp, Homo sapiens
atcttattccttccctttacattgctataattttattagaagaaaaaaatcacatgtatctagagagaaaagcaaactttattaaatatttatttaaaataccctagattttgaatacatgatttatatgaacattgatgtcaatatatttgagaaaattatgacatagttttaatttagaaaagtattcagaaatacatttgcctacttttgaagatttttgcaacttcaagatcaaagaaggaaaaatagaccatctcaattttttcctgatttttaaaaattattttaagtcttttcccaaaaccatatacatttaaaacaaatacattttaattctaaggaaacatttcaggaaaaatcagaaaaacattttcagaaccagaggaaaaaattgtgtgttgtatcaccacagtggccaaaatattgcaatactgtcaaactttcacatgagaatacttcattttcacttaattcttattttaatttgatatttcagaattatttttgtatgttttaccytgactctgaagttagcatttatttttaaggtataaaatttaatggtcaggtaaattaggcaacgaagacatcaatgtgtaataataatataataagata

SEQ ID NO: 584077 - DNA, 578 bp, Homo sapiens
ttatttctgtataaatataactatactaatcataaaaggttagtgttgttatctggagtgagactgttcaggtattaatttattctcatgtaaaattaactaaaaatcgccattgattaaaaaaagaaaatgcaaatgccaatgattcatagtatttaggacatgtctagacatttttagacagtgccatttgcttaaagacttcaggcacaaactgcaggcacagggacagattgcataagatgwcacgtgcttgctgcaactgtatgcatgttattgaattttttagagcaacccataccgtgaataatttaatagttaataaaatattcaatctgactgatccattggtttaattttaaaataaagacgactaataaaaggagttacatatccttatcaaatcccaggcattaatgcaagtaaattgcaacccatacgtagggaaaacaccaatttctaagagacatgagattaatgattgggggcgggaaggagtgcaaggaaaattctgtgttagcactggcttcaataagtttgccggaagtttaattgtttggagctgtcacggaagctgt

SEQ ID NO: 584078 - DNA, 554 bp, Homo sapiens
tcaggaactaccacagaagaggtaggcatgtgagattgtaagggctgattttgagagacaaaataagttcagtttctctgcaagttaataattgatgtcaaaggcacactgatgcaataccagcatacgggcccctgcrtcagattaaaaaggttttcttgaagtgttaaccgaccccttaataaaggttataaaggttaaaaaaggcttatggaagctgtatcttatggtcaagattaaaattttaaagattgataataaaatttcaaaaaacaaatttaattggctttatgctgttttatttgggcttaatgtttgaaaaattgacttattttatgatgacctatcaagtattttaaacttttgatatttggcaaagtttccagaatcaaattacaagttgtgtatttttctgacctaattaatcctctaagatattagtttccctaaagtccaaaaatgaaataaatgacttatttggtataaaaattatacaggaagcattgtcaaatataaaatggtgtttggttttctttgggctgtatttgtataaa

SEQ ID NO: 584079 - DNA, 428 bp, Homo sapiens
ttatggctgacctaaaactttttgtcacccatggacaattgttttgttttagtcctttttagaagatggttttataatcagctataaaactctaacacgtgttcttgaaggcaagtttctaataactttggagactgtgacatcagaatggaggaaaagctttcagaactcatggagacctgaaatgttcatgaatagcaagcagaacaggaattaactgcatgaactgaactaatagaagagcaacgtaatctttttgactttttgcttaaaaygttgctgctccttgttttcctttttttagtcaaggaaacttttatttgagctgttgtcagcttttaacaagttagtatactcctgtgaaaaatatttggagcatatttgtttctctctacctgattttccccagaattggaaactatctgtga

SEQ ID NO: 584080 - DNA, 428 bp, Homo sapiens
ttatggctgacctaaaactttttgtcacccatggacaattgttttgttttagtcctttttagaagatggttttataatcagctataaaactctaacacgtgttcttgaaggcaagtttctaataactttggagactgtgacatcagaatggaggaaaagctttcagaactcatggagacctgaaatgttcatgaatagcaagcagaacaggaattaactgcatgaactgaactaatagaagagcaacgtaatctttttgactttttgcttaaaatrttgctgctccttgttttcctttttttagtcaaggaaacttttatttgagctgttgtcagcttttaacaagttagtatactcctgtgaaaaatatttggagcatatttgtttctctctacctgattttccccagaattggaaactatctgtga

SEQ ID NO: 584081 - DNA, 428 bp, Homo sapiens
ttatggctgacctaaaactttttgtcacccatggacaattgttttgttttagtcctttttagaagatggttttataatcagctataaaactctaacacgtgttcttgaaggcaagtttctaataactttggagactgtgacatcagaatggaggaaaagctttcagaactcatggagacctgaaatgttcatgaatagcaagcagaacaggaattaactgcatgaactgaactaatagaagagcaacgtaatctttttgactttttgcttaaaatgttgctgmtccttgttttcctttttttagtcaaggaaacttttatttgagctgttgtcagcttttaacaagttagtatactcctgtgaaaaatatttggagcatatttgtttctctctacctgattttccccagaattggaaactatctgtga

SEQ ID NO: 584082 - DNA, 578 bp, Homo sapiens
tataggtcttcaattaaaatatttaatccattttgatttgatttttgtatayggtgaaagataagggtcttttcattcttctgtatatgttatttttctgtttccccacaccctttaatgaggaggctgtcctttttccattaaatattcttggcacctgtgtcaaaaacaagttggctgtaatgcataggtttatatctgagctctctattctattccattggtctatatgtcggttttcatgccactaacatgctgattttgttactatagctttgtatatattttgaagttagtgtaatgccttcagttttgttgtatttgctcagaattgctttggctattcagggtacttttatgattccacataaattttagaatttttttctatttttatgaagaatgttattggcattttttggagattgcattgaatacgtaatttgctttaggtggtatggtcgttttaacaatattggttcttccaatccatgagcatggaatatctttccttttgttgtgtcgtcttccatttctatcatcagtgttatatagtttttctagtatggatctttcac

SEQ ID NO: 584083 - DNA, 448 bp, Homo sapiens
ctgcagtcccggctacttgggaggctgaggcaggaggatcccttgagcctgggaggttgaggctgcattgggccattatagcgccactgtactcagacggagtgagatcctgtctcaaaaaagtaaaataaaataaataataaaagagtgattttctgcagtagatgctcattatcaccatcattattatatgcattctcaccattctaccaaarctatattatcaataacacttaggtaactcataatttttagaatcagtggaaatttgttaacttttattttcttaaattcgcatttttaaaacgtggtcctggtgaccaccgtgtcagtaaaagtccagtgcataaacagaaatcacctacataattcaagaagaatgggattgaatactgggaattagtttcttacaaaagtatctgaggggttagaggagtgcaagtcagga

SEQ ID NO: 584084 - DNA, 612 bp, Homo sapiens
aaatgtggctcacatttctggattcatgaaggctggctctactgtcgccatttacgcatttctatggaggtgggaagtgaggagagagaaaatttacagtgagcaaccaagtagttgtgtgacattaagctacatgtacytttctaagactcagttcctactttaggatgatgaaaagtatacatactacatcattagatctttgtgaggattaactaagttaattcatgcatatattttattaacacagagtacttagctaaatagtgggaaccacatgagttattattaaccttactttattgttttgaaatggggctaataattatagttatctcacaggttcaaatcagagaatgggcatgtattactgagttataaagtaataatgaggtttggactttttattgttattttatatttagaaaagctattttaatatcttcagggtttcatcagatatggtatttgttttctctttttttgaatttcttctttgcaacaaattaattattgcttcttaacactttgcttctctctctgtctctctatgtctctttctctgtgtgtgtgtctctctctctctcacacacacacacacacagacacagt

SEQ ID NO: 584085 - DNA, 572 bp, Homo sapiens
ggtggtacatgcctgtaatcacagctactcaggaggctgtggcaagagaatcacttgaactcaggaggcggaggttgcagtgagccgagattgttccactgcactccaacctgggcaaccgagtgagactgtctcaacaacaacaacaacaacgaaaagaaaaaaaaaaaatacatatcctaagaaggcacaaccacatttgaaattaaacacttaaaataaaactaaaataatttatttcataacattaaaatcttaaggcattaaatcacagagtagatacagctggggaaggtattagtaaatggaaagatggatctgaagacatcatgttgaacatagcccagagaaataaagcaagcataagagacatgtagattaaaatggtaatgttgaaaaaaaaactaattaggctgggcatggtggctcacgcctgtaatcccagcacgttgggaggccraggcaggtggatcacctgaggttaggagttcgagaccagcctgaccaacatggagaaaccccatatctactaaaaatacaaaattagctgggtatggtggcacatgcctgta

SEQ ID NO: 584086 - DNA, 617 bp, Homo sapiens
aataaaacattatgatgtgctacatccagtgataaagaaagaacaaagtcctctaggaacacttcttcctgcctatagaggtcaaggagttctcaacatagaagacatctcatttgtgtttttatcaatgagtagcattggccagatgaagaagcagaaaagaaagttcaataaagggaacagcacatgcaaaaccagggcattacacaacatcatgaaatgtttgaataatggcaaaaaaaaaaamaaaaaaaaaaaccccaccttggtatcaaaaacaaaataagtatgttttgtgagcatgtcaggatagggggcagttccagataaatgagtcaaggaaaaaaattataagcaaaatttgaaaggataaaaggatcttcatgttttaccaaagcaccctggatgaaggctttttagggcactggatgccaaaaagcaaagtgtaaacatgggggaagattgtgcccgaatcaaaagtatggtcccattgcctaaaaaatgggacctgaggtagctatgaaacacactctagtccttctgccattaaacttgtaggaggcaaaaaaagtggggaagggagggagggaaaagggggaggaggaaaaaaaagaagc

SEQ ID NO: 584087 - DNA, 617 bp, Homo sapiens
aataaaacattatgatgtgctacatccagtgataaagaaagaacaaagtcctctaggaacacttcttcctgcctatagaggtcaaggagttctcaacatagaagacatctcatttgtgtttttatcaatgagtagcattggccagatgaagaagcagaaaagaaagttcaataaagggaacagcacatgcaaaaccagggcattacacaacatcatgaaatgtttgaataatggcaaaaaaaaaaaaaaaaaaaaaaaccccaccttggtatcaaaaacaaaataagtatgttttgtgagcatgtcaggatagggggcagttccagataaatgagtcaaggaaaaaaattataagcaaaatttgaaaggataaaaggatcttcatgttttaccaaagcaccctggatgaaggctttttagggcactggatgccaaaaagcaaagtgtaaacatgggggaagattgtgcccgaatcaaaagtatggtcccattgcctaaraaatgggacctgaggtagctatgaaacacactctagtccttctgccattaaacttgtaggaggcaaaaaaagtggggaagggagggagggaaaagggggaggaggaaaaaaaagaagc

SEQ ID NO: 584088 - DNA, 617 bp, Homo sapiens
aataaaacattatgatgtgctacatccagtgataaagaaagaacaaagtcctctaggaacacttcttcctgcctatagaggtcaaggagttctcaacatagaagacatctcatttgtgtttttatcaatgagtagcattggccagatgaagaagcagaaaagaaagttcaataaagggaacagcacatgcaaaaccagggcattacacaacatcatgaaatgtttgaataatggcaaaaaaaaaaaaaaaaaaaaaaaccccaccttggtatcaaaaacaaaataagtatgttttgtgagcatgtcaggatagggggcagttccagataaatgagtcaaggaaaaaaattataagcaaaatttgaaaggataaaaggatcttcatgttttaccaaagcaccctggatgaaggctttttagggcactggatgccaaaaagcaaagtgtaaacatgggggaagattgtgcccgaatcaaaagtatggtcccattgcctaaaaaatgggacctgaggtagctatgaaacacactctagtccttctgccattaracttgtaggaggcaaaaaaagtggggaagggagggagggaaaagggggaggaggaaaaaaaagaagc

SEQ ID NO: 584089 - DNA, 572 bp, Homo sapiens
caagtccagccacgaggatatatcacaagtacttgtctccagcgctggtttcttagcaaaaaaagaacytgttaaatgtcagggctttgtgtttttgcctttgggcttttgccatgcctggttattgggcaccttctggtaataaacagttagttgaaaggagctgttcccatgtcttatttaattctctcattaagcctgtgggccagaggttcttattgttcatacccctggataaacacactgagtcccagggaggtaaagtgccttggccgagtgccacccaggagctggtggtgcctcagctgaacccaagtccacggaccgtggagttcgcgccctctcactgtggcacacgggcctgagcctcaggaacactgcaaagtaggttggcttcccccttacggagcccctacccgggacagcctcaatccctcagggcccctctgtgcccaggtgcctgcttggctgactgggcagcctggagagaacagtgacccagaaatgcaagaggagagtttccaggaggacagaacactggtgctatcaggtgccaggagcagcgtgtgcca

SEQ ID NO: 584090 - DNA, 572 bp, Homo sapiens
caagtccagccacgaggatatatcacaagtacttgtctccagcgctggtttcttagcaaaaaaagaacctgttaaatgtcagggctttgtgtttttgcctttgggcttttgccatgcctggttattgggcaccttctggtaataaacagttagttgaaaggagctgttcccatgtcttatttaattctctcattaagcctgtgggccagaggttcttattgttcatacccctggataaacacactgagtcccagggaggtaaagtgccttggcygagtgccacccaggagctggtggtgcctcagctgaacccaagtccacggaccgtggagttcgcgccctctcactgtggcacacgggcctgagcctcaggaacactgcaaagtaggttggcttcccccttacggagcccctacccgggacagcctcaatccctcagggcccctctgtgcccaggtgcctgcttggctgactgggcagcctggagagaacagtgacccagaaatgcaagaggagagtttccaggaggacagaacactggtgctatcaggtgccaggagcagcgtgtgcca

SEQ ID NO: 584091 - DNA, 572 bp, Homo sapiens
caagtccagccacgaggatatatcacaagtacttgtctccagcgctggtttcttagcaaaaaaagaacctgttaaatgtcagggctttgtgtttttgcctttgggcttttgccatgcctggttattgggcaccttctggtaataaacagttagttgaaaggagctgttcccatgtcttatttaattctctcattaagcctgtgggccagaggttcttattgttcatacccctggataaacacactgagtcccagggaggtaaagtgccttggccgagkgccacccaggagctggtggtgcctcagctgaacccaagtccacggaccgtggagttcgcgccctctcactgtggcacacgggcctgagcctcaggaacactgcaaagtaggttggcttcccccttacggagcccctacccgggacagcctcaatccctcagggcccctctgtgcccaggtgcctgcttggctgactgggcagcctggagagaacagtgacccagaaatgcaagaggagagtttccaggaggacagaacactggtgctatcaggtgccaggagcagcgtgtgcca

SEQ ID NO: 584092 - DNA, 572 bp, Homo sapiens
caagtccagccacgaggatatatcacaagtacttgtctccagcgctggtttcttagcaaaaaaagaacctgttaaatgtcagggctttgtgtttttgcctttgggcttttgccatgcctggttattgggcaccttctggtaataaacagttagttgaaaggagctgttcccatgtcttatttaattctctcattaagcctgtgggccagaggttcttattgttcatacccctggataaacacactgagtcccagggaggtaaagtgccttggccgagtgccacccaggagctggtggtgcctcagctgaacccaagtccacggaccgtggagttcgcgccctctcactgtggcacacgggcctgagcctcaggaacactgcaaagtaggttggcttcccccttacggagcccctayccgggacagcctcaatccctcagggcccctctgtgcccaggtgcctgcttggctgactgggcagcctggagagaacagtgacccagaaatgcaagaggagagtttccaggaggacagaacactggtgctatcaggtgccaggagcagcgtgtgcca

SEQ ID NO: 584093 - DNA, 565 bp, Homo sapiens
tctgcctgcctcagtctatgaaaatgctgggattacaggcgtgagccaccatgcccggctggctcgaggctttcgagaaagacattcctgagttgtagaaaatgtacaaaagggtagaatttacagtygtaaattttctcaggtaaatgttctaagaaaatggagatcaggtatttaaagtgaggaagaaccctgtctagagtttagtcaagctgagaggccgtaagactgcctttgtcacctctgccttccttatggcctgtgccctttgcctccctactctgacaagaaaccaactctgcctacatgactgtggtgcttaggttcctctccatttctaaaaatttaatttttaaaatttattgatgcacaataattgtacatatttatgggatgcaatctaatgtttcaagacatgtatatatatattataatgtcagatggtagaacgtgagagtagaataatgattaccagaggataaagagggcaacaggaaagggggtactgggagaggttagtcaatgggtacaaagttaccacgagaaaggaagaataagttttggt

SEQ ID NO: 584094 - DNA, 571 bp, Homo sapiens
cggcctcccaaagtgctaagattacaggcatgagccaccacacccagccaatagttttaaatgaaagtactcaaaaagtgctgatggtatcaaatatgttccctcaggaaagaaatcttatatttatttccttagataactcagggaagatattcagggctgtccttggtttaaaagaaaaaagagcacacagtgtaaaggaagagcaatatgaaaatatgacactgtatcaacatgtgtttctgaagaaggtccttayagccattcaaagatatattgtaaataaaaataaatgtatttataattttcttaaatatttttgaatttcatattttttgtgctctaatcattcttaccaacaatatttgattcaagcgatgaaacagatacttctgctccaactaaaccaaaaagaggtggttgaaaaatatcccatacatttgtaataatctttcggactttcatctatagaaaagagaaatacatttatacttattttggcacataaatatatttcagaaagttaaagtctcctcacctttttctttcactttttaagtattttagagat

SEQ ID NO: 584095 - DNA, 368 bp, Homo sapiens
atttagtagaaaatatatctaaaaatatacttatgtactatattgaatccactacccagagcttaactgaactatttttgtgactcattctgtttttttattttttgctttttacttattacaatgaactacaagtatggatatattaatattaattaatataaaatatactggaatctttttatttttttttccttttttcttcaccaaaagcagaaacttaaatatactgaaatcttaaatgacccttgaatgtttctaggactgaccctggaacaaawttttttatgttgttattacattgttcttttcatgttaaaatcatttgtttctttttcatatagtacatcaaagaagaattgttaata

SEQ ID NO: 584096 - DNA, 360 bp, Homo sapiens
gaacttaaagtataataaaaaaatatgtattttaactttgcacttgggtatgtgtatatatatgtatatgggaagaaattgtgcctactacacaattgcacacataatttgagttctgtgatttcagtataaattacaggggtatgacagtgtaagaatatttatggttaacagcttttgttgatatttttttctgccagaagaagttttcttgttcaaattcatttcttgtgaagaatagggttataaatgtaaaggcygtggcagggaaattgagttaatgatgaaataaggttagagagaaataaggcttagagaaaaattggcagtaggtctttttgaaaaacagggttgtacgtt

SEQ ID NO: 584097 - DNA, 576 bp, Homo sapiens
acagaagtaaacagaggaaaaacaatttatacctaaacatattatattcaaactgaagaaaattagaggcaaagggaaattctttaaagaagccagaataaaaacaccttatctatagaggaataagaataagtattacattaggcttcttttcagaaatcattcaagcaggaagagagtggaataaaatattgaatgtattcaaagaaaaacaaacatagwattccatatctagtgaaattatcattcgaaaaagagaaacaagaaacaactggacaagaaactttctccaaaaaacaaataaacgtttacaaatataaagcgtatgtcaaatatatggcataattctgaattattgttccataaatggtagctgtttcaataaccaatgagaaaaagtaattatgctccgagtattcatgggcaaataatgcactgtgcatactttcataatttttacttaaaccttattaaacttcacggttaagtaaactgaaatttaaaaattttaattaatctcaagtgaaaatgaacatttcaataaaaaacaaaaaaactcaaaggaaataccaattt

SEQ ID NO: 584098 - DNA, 598 bp, Homo sapiens
aatatttatccaataagtaaaataaaagcttattttctctttggttttattatatcaatgaaatataagtaatcatggactcagtgaagtaaaagataaaacataagatgaaaattgatctggcataagaaagtraaaatacagagaaatcccaaagaagcacaaaaaaaatagaataattaaaatatgcattggaacatgtaaaggacagaactaagactgcaaataatgtaatcagtaacaacctagagaagttctctaagaaaatcataaatacagtgaaagagaaaattcaacatgtgaataatcaccactgagaaagaaataagaatagagaagcaatcatcaaagagatattagaaaggaaaaatataatgtcctaagtgaaaaaaatcaaagcacagacattgatatatcaaaaagggttaccaaattctagacaaaattaatataaagtaggctaaattaaatataaactgtataaattttttagtctgacataagattttgtaaaaattcaggaagacaacaaaaatagttttggagaattgaaaaaagtcaggcctgccttattcaacccagaataccagaactgtat

SEQ ID NO: 584099 - DNA, 626 bp, Homo sapiens
ttaggttgaagggcttctacatttagctrttctctgaggaattaaggtagtatttatttaattttcaagtatttggcattctcattcattttagaaatttgtgatgttacttcttatttctagaaaggtttatagtctcaaaaattcgattctaaccttttttcttattagacttcttcctttttagtagttcaaatgttctttctattctttcaaagacagcgttttctttcctgagaccttttagacctttttatctttattggctgataaagcttgacaaaatatatcatcatctcccgcaaattggcttattcttcaaaagtcattaccaagagccatgtttgacccctccctctcaatggtcaccctaattagttaacaaattagttaacaaaacattctgtccaaacaatgccccataaggctaatctgtataaaaccacctattcctaataatcttaaaatgacataattggattaactcctaaacccatttgtaatctttccctatgataactctgcctacacgtagcagtcatatttaggctggagataaaattaacaattaaaatgactactagtcaaatggtaatataaacctatgcttctcttagtgtttactg

SEQ ID NO: 584100 - DNA, 519 bp, Homo sapiens
cctactctaatctttatcattttctttcttttattaactttgggcttamtttgtactgttttatccagttccctgaggtgtaacattagattgtttatttgggatctttcttatgttctatgtaggcatttattgctataaacttccttcttagaactgctttttgctgcatcctataattttggtatattatgttttcatttttttatctcacgatatttttaaatttgcctcttaatttcttcattgactcatcagttgtggaagagcatgttaattaattttcatgtatttgtaaaattgtcaatattcttcctattgatttctagtttcataacattgtgataaaaatatatttaatatgatttcaattttcttaaatttgttccaagacttgttttgtggcctaacataagatctatcatagaaaatgatgggccaggcgcggtggcttatgcctgtaatccccgcactttgggtggcctaggcgggtggatcacttgaggtcaggagttcaag

SEQ ID NO: 584101 - DNA, 519 bp, Homo sapiens
cctactctaatctttatcattttctttcttttattaactttgggcttaatttgtactgttttatccagttccctgaggtgtaacattagattgtttatttgggatctttcttatgttctatgtaggcatttattgctataaacttccttcttagaactgctttttgctgcatcctataattttggtatattatgttttcatttttttatctcaygatatttttaaatttgcctcttaatttcttcattgactcatcagttgtggaagagcatgttaattaattttcatgtatttgtaaaattgtcaatattcttcctattgatttctagtttcataacattgtgataaaaatatatttaatatgatttcaattttcttaaatttgttccaagacttgttttgtggcctaacataagatctatcatagaaaatgatgggccaggcgcggtggcttatgcctgtaatccccgcactttgggtggcctaggcgggtggatcacttgaggtcaggagttcaag

SEQ ID NO: 584102 - DNA, 508 bp, Homo sapiens
ctcaggtgacttcaaggctcttctcctsttcctcttccccgggataatcttggatcctggtacttccatatctttttgacattggatggagtgggaagggtctgaggctcctatctgtggcgttcactgcaggtgcaacgtgccatctgtcctctgtgtcagcaaagtgcagtgattgctctgggaagctcgttctgctctgtaggtccctcactgctcatcctcttacccttcagggatgccatatctttatttttgcctaacctctgtgcctcattgggtaggagaatctttttggattttctccatatctctaggattccaggaaggatggtggaatgagcattaatctcaaggcacttctctgcctagatctgctctgctgtgattcataccccagagcagtggctctatattggcaagtatcatgctgctaggctgcctctttccagaaatccagaaaagaagtgaagcttttcttccttcatattctcaacatatttcgcta

SEQ ID NO: 584103 - DNA, 537 bp, Homo sapiens
gcccaggctggtctcaaactcctgggctcaagcaatcctcctgccttggtctcccaaagtgctgggattaccagcgtgagccactgtgcccaacctttcttctttttttttttaaatttttacctcttttataagaattgttctctctattttttctttttattgcccaaatttcattctcttctttccttatatcctcttactttgtctgcccatccatgttgatcttccttctttctttcttttcctttctcttaaattatgataatacaggatctagcatacctaaaatttagtcttgcatatattgaatcagactgtatgtttctggtttcaatcccaaaacacgttaagtttttataytttactcttttgagaaaatataaacttaacattttttggttgaatataaccattgattacttttcctttaagattaatacaatttattaataaaatagttctcactactgctgtaaaggattataaaaatagtgctagaaaaatggtagcaaaagaatatttcttttaaagctt

SEQ ID NO: 584104 - DNA, 537 bp, Homo sapiens
gcccaggctggtctcaaactcctgggctcaagcaatcctcctgccttggtctcccaaagtgctgggattaccagcgtgagccactgtgcccaacctttcttctttttttttttaaatttttacctcttttataagaattgttctctctattttttctttttattgcccaaatttcattctcttctttccttatatcctcttactttgtctgcccatccatgttgatcttccttctttctttcttttcctttctcttaaattatgataatacaggatctagcatacctaaaatttagtcttgcatatattgaatcagactgtatgtttctggtttcaatcccaaaacacgttaagtttttatattttactcttttgagaaaatataaayttaacattttttggttgaatataaccattgattacttttcctttaagattaatacaatttattaataaaatagttctcactactgctgtaaaggattataaaaatagtgctagaaaaatggtagcaaaagaatatttcttttaaagctt

SEQ ID NO: 584105 - DNA, 521 bp, Homo sapiens
tacaaaataacatatataaatctcaaagaaaagtggtttttttgtttgtttgttttgtttttttgagacggagtttcgctcttgtcgcccaggckggggtgcaatggcgcgatctcgactcactgcaacctccgcctccctcgttcaagcgattcttctgcctcagcctcgcaagtagctgagattacaggcatgtgccaccacaaccagctaatttttttgtgttattagtaaagacaggttttaccatgttggccaggctagtctcaaactactgaccccaggtgatccacctgacttggactcccaaagtgctgggattataggcatgagccacagtgcctggccagaaaagtttaattataaaaagaagatacaaaagagtacatgctgtccgatttaatttacatgaacagtaaaagaaagaaaaaagggagactggaagagtagatgacagcagagagataagtgagagaatgagtgaaagtcctaataccaaacaataaggacctctccaactc

SEQ ID NO: 584106 - DNA, 585 bp, Homo sapiens
attactcagcgatgaaatgaaatgaacggatatacaaaataacatatataaatctcaaagaaaagtggtttttttgtttgtttgttttgtttttttgagacggagtttcgctcttgtcgcccaggctggggtgcaatggcgcgatctcgactcactgcaacctccgcctccctcgttcaagcgattcttctgcctcagcctcgcaagtagctgagattacaggcatgtgccaccacaaccagctaatttttttgtgttattagtaaagacaggttttaccatgttggccagkctagtctcaaactactgaccccaggtgatccacctgacttggactcccaaagtgctgggattataggcatgagccacagtgcctggccagaaaagtttaattataaaaagaagatacaaaagagtacatgctgtccgatttaatttacatgaacagtaaaagaaagaaaaaagggagactggaagagtagatgacagcagagagataagtgagagaatgagtgaaagtcctaataccaaacaataaggacctctccaactcctttgtttcacttggcttctagaatactggca

SEQ ID NO: 584107 - DNA, 434 bp, Homo sapiens
aaacttaacattttttggttgaatataaccattgattacttttcctttaagattaatacaatttattaataaaatagttctcactactgctgtaaaggattataaaaatagtgctagaaaaatggtagcaaaagaatatttcttttaaagcttcttagagatttctctcttaaatgtctgcttaatgtatttatattatctgagtaaattcaggaagagaaagaacaaaaattaatttaattaagggcttaaaaaagacctgtctcaaatttgtggaagtagagttgtacaatcaaacacggcttagaaagactggatacaatgcctctatacagtcaattttttggatagaaggccttcctattaaatatgtatcagctgctattctttataaaataacttkctaagtatcaatgaaccttatttaatttcta

SEQ ID NO: 584108 - DNA, 631 bp, Homo sapiens
cttctttttttttttttttgagacagagtctcaccctgttgcccaggctggagtacagtggcatgatcttggctcactgcaatctctacctcccaggttcaagcaattctcctgcctcagcctcccaagtagctgggattacaggcacctgccaccatgtctggctratgtttgtatttttagcagagattgggtttcaccatgttggccaggctggtcttgaactcctgacctcaagtgatccacccaccttggcctcccaaagtgctgggattacaggcatgagccaccatgcctggtcccaaggtggtacttctgtaagttcaagagccacagcattactgggcttggaatgtcccctaacacacatatggctgcagcaaccaaaactcagatcacaacaaccaggtccctttgaatacctggaaagcctccccaagaaggatgggtaaaaataagcatagactgtgaagactataataaatacctaacttttcaatgtccagacattggcaaacatccacaagcatctagaccatccaggaaaatatgacctcacagaatgtgctaaataaagcaccagggacctatcccagaaacagagatatatgtgacctttcagacagagaat

SEQ ID NO: 584109 - DNA, 515 bp, Homo sapiens
aggcatttcatttactgcaaatgaattaaattatcatcagcatgttaagaattctgtaagtaaatatcacttttaagacatattttacctggaattcactcagttgcagaacttatataaaggaatcaccttcactcctgatttgtcactaaccatggctgtaaaacataactggcaatcattagaagtttcttctctggagaaacaaattgacctcagagagaagacactaacaattggggggtttcccaacagtgaaacccaccagttgaaaagcccaacataattacagaacctccaggcaacttcatagcgacttactctcaaatatcaacaacagatatctggagggaaatgtccagtattaaagagaaataacaataacaacagcaaagggaccaaagggaaccagagacaacataggacytgaaacaaaacttaagaaagaaaatagaccaaacccgaagtaaaatattctcagagaaataagagattgtattcataaaaacaagtag

SEQ ID NO: 584110 - DNA, 580 bp, Homo sapiens
taacttcaaaatactaaattgtgttcttactttaatggagaatatacagttttagaaaactttgaaaaactagatttatattctattctctactccttaacctttaagaaggccatcaataatggccattccttctacrgaaatatccttagagggaaaactattaatgcttgggtgaaataaacatccaagtaaataatcttcattgcacatgttaacttcattcaatagttattgttcttcagagtacagtaaaataagaaattaaaatttttttagtttaaccaaatatttataaaatctcacctctaattcctcagcctgttctgcattatcatcttctgagccactggttttaggtaaataagtcatttttagtctcagataacctttaactcttgatttgtgactgtagaaaagaaaataaatattcataaaactttaacaccgggagaaaagtattcaattaataagagtttaatgaacacccactaggtaccagggggtctacaaagggaggttcaaagacaagttccagggcagaagatatctagggaaaggaatagaaggtagagaaaag

SEQ ID NO: 584111 - DNA, 580 bp, Homo sapiens
taacttcaaaatactaaattgtgttcttactttaatggagaatatacagttttagaaaactttgaaaaactagatttatattctattctctactccttaacctttaagaaggccatcaataatggccattccttctacggaaatatccttagagggaaaactattaatgcttgggtgaaataaacatccaagtaaataatcttcattgcacatgttaacttcattcaatagttattgttcttcagagtacagtaaaataagaaattaaaatttttttagtttaaccaaatatttataaaatctcacctctaattcctcagcctgttctgcattatcatcttctgagccactggttttaggtaaataagtcatttttagtctcagataacctttaactcttgatttgtgactgtagaaaagaaaataaatattcataaaactttaacacygggagaaaagtattcaattaataagagtttaatgaacacccactaggtaccagggggtctacaaagggaggttcaaagacaagttccagggcagaagatatctagggaaaggaatagaaggtagagaaaag

SEQ ID NO: 584112 - DNA, 591 bp, Homo sapiens
ttactaaggctaccactacaaatggctggactgcttacaaggtgaccatcattcacagcattcaattcattatcgaccacagcactactgtaaataccatccttcaagatacaagtaaacgaagcatcatcactatcagctaagacattgctagactgaagatatccactgtaccttgttggctgtagtgaaatctgtagacagctgctctttttattaacattttcagatgagggaacagatgatctttcttgagactgaacgttttcctttattaacggagctagtgcagtctgtctgggagtcagcttcatttgaacaacgttagacgttgaaatccgtgttggtcttttgaagcacaygtgaacatggctatccaagtcatctccggaggtttctgacaaagggtaagtattgcttcttctggctgcaaagtgcaatcgtaagctttgtgccatttgttctcatttccaaacatgttaagggctgaaagtcataacaaagatctctgtccgtagacaggctagaagcagctgcactgcatcaaaagaaaaaatcatttgtggtgcctaaaagagctattaagtagta

SEQ ID NO: 584113 - DNA, 591 bp, Homo sapiens
gccaaagtcagctgcggtggttaattgtatgtatcaacttcgataggttatggtacccacttgtttggtcaaacatcagtatagacattgctatgaagacatttagacatgattagcatttaaatcagtagactctgagtagagcacattaccctccacaatgtgtgtgggtctcatccaatcagctgagggctttgaaagcaaacacaggttgtgtaagaagcagcaattctgcctcaagactacaatgtagaatccctgcctaagttctcagcttcctggcctgccctgcagatttcagattgaagtcttcactatatatatattgtgtggaaatatatatattcatatattatacataatttcatatataaaatatatgaaaaataaataatacataaaatatatacacaatctattgtttctgtttctctggagaaccttcactaatacaactgctaaacgtgagaagcacagggtctccacccagaatataggtggctcctaaaaccggtggctgaatgtgtacaggtgtatrtcttagactggtgacacagtgctaacttttgcattggtgggtagagttttttt

SEQ ID NO: 584114 - DNA, 577 bp, Homo sapiens
cccggttaatttttgtatttttttgtagagacagggttttgccatgttgcccaggctggtctggaattcctgggctcaagcaatccacccacctaagcctcccaaagtgctacaattacaatgctttcataaggttctaatttaaggcttaattctattgtcctcatcaattctagtatcctatgatttacttaagaaatccttacttgtctcagctctctatatagattttttggggatgattttttacagatatcagatatgtagcaattaccctttgtctttctagacaagagtcctaatccttttattctgtcttcaagagattacctacccccactcccaagcctcccctaatctttttagctcttctctgtatggttctcatggatttggcaaattkagtgtatcctttcatgagtagtcagtgaaatcctgatgcttattcccaaggccgctaatgtggcttgtgtctccatactgaaggagatgtgaacattctgacttgtggctataaaagatggatacagaaaatgtgctcagacaatgttttgttgaaaagtttctctacaattgt

SEQ ID NO: 584115 - DNA, 577 bp, Homo sapiens
cccggttaatttttgtatttttttgtagagacagggttttgccatgttgcccaggctggtctggaattcctgggctcaagcaatccacccacctaagcctcccaaagtgctacaattacaatgctttcataaggttctaatttaaggcttaattctattgtcctcatcaattctagtatcctatgatttacttaagaaatccttacttgtctcagctctctatatagattttttggggatgattttttacagatatcagatatgtagcaattaccctttgtctttctagacaagagtcctaatccttttattctgtcttcaagagattacctacccccactcccaagcctcccctaatctttttagctcttctctgtatggttctcatggatttggcaaatttagtgtatcctttcatgagtagtcagtgaaatcctgatgcttattyccaaggccgctaatgtggcttgtgtctccatactgaaggagatgtgaacattctgacttgtggctataaaagatggatacagaaaatgtgctcagacaatgttttgttgaaaagtttctctacaattgt

SEQ ID NO: 584116 - DNA, 525 bp, Homo sapiens
ttagtttatcaaatgctaacttgacagtgctttcactttcctgcccaagaggaattgcagccgacatcacaactcaaaygaaaactagctgagcaggtgggttgtggagccaaagggagggcagaagagaataagcagaaaaacagtatagagtggttagtatgttaacatcccaaaagaacacggactatgcacatgtctgcaggctggcttggttagagcatagagataattctaggagatcaaaaaagtcaacagcctggaaagtaagactggattaaatatattactgaaagcttatggtcctgcaccctgtttaaaaaaaaaaaaaaaagattatgctctggaaagactgtggagagccaattaatataactcacaagactgaaaaagaagtattttttctctttctttaaaattcagcagttgttagtttttattatccttctctgatgttctgcattgttaactacccagtctgccttgaaactcctttcttaaattctcatgacattattttacttg

SEQ ID NO: 584117 - DNA, 531 bp, Homo sapiens
aagactgtggagagccaattaatataactcacaagactgaaaaagaagtattttttctctttctttaaaattcagcagttgttagtttttattatccttctctgatgttctgcattgttaactacccagtctgccttgaaactcctttcttaaattctcatgacattattttacttggctcttttcctgtttccccttgtctgtcttctctttcttttctgatccactcacgttgactgagggtcaatggctggccctccgttcttatctctttcatcaggagagcccattattctcagagattctgctgttatctggacagtgataacactcaatccttccagtcccttttccctacctagctgatttttatctctctgtcagcagtctactttaaactttcattttctttgtttcctatcaaaactctgtttgtccaaaaataaattttttgcttttcaaaacaaaatggcttttcttcctcacttttctacragagacgccactcttatcttccaagttcaacttgta

SEQ ID NO: 584118 - DNA, 537 bp, Homo sapiens
gcccaggctggtctcaaactcctgggctcaagcaatcctcctgccttggtctcccaaagtgctgggattaccagcgtgagccactgtgcccaacctttcttctttttttttttaaatttttacctcttttataagaattgttctctctattttttctttttattgcccaaatttcattytcttctttccttatatcctcttactttgtctgcccatccatgttgatcttccttctttctttcttttcctttctcttaaattatgataatacaggatctagcatacctaaaatttagtcttgcatatattgaatcagactgtatgtttctggtttcaatcccaaaacacgttaagtttttatattttactcttttgagaaaatataaacttaacattttttggttgaatataaccattgattacttttcctttaagattaatacaatttattaataaaatagttctcactactgctgtaaaggattataaaaatagtgctagaaaaatggtagcaaaagaatatttcttttaaagctt

SEQ ID NO: 584119 - DNA, 394 bp, Homo sapiens
  misc_feature 351: n = A,T,C or G
gaattcaatgcttgggtcacctccagattcattttcacagtctttcatgttttggtcatattacattgtattttgctgcccatatgactgatctttttttgttaaatgtgagatacttgttaaaaaatatttagcaatgaattgaggcctagtagcatgttatcttgctgcagaagagatgggagtctacttctggcggatggtcaggggtcctccatacaggctgcaattgaggtcgtcrgtgcaggctcagtccctacaaaggccaaggtatttcctgtccacctctattctgatgcatgactcttctgggtctcaaccagagccagtggacttcagtatgggtcgctntcattggcagaccctcaatccacttgttttccatctaacccca

SEQ ID NO: 584120 - DNA, 417 bp, Homo sapiens
  misc_feature 315, 388: n = A,T,C or G
acagtctttcatgttttggtcatattacattgtattttgctgcccatatgactgatctttttttgttaaatgtgagatacttgttaaaaaatatttagcaatgaattgaggcctagtagcatgttatcttgctgcagaagagatgggagtctacttctggcggatggtcaggggtcctccatacaggctgcaattgaggtcgtcggtgcaggctcagtccctacaaaggccarggtatttcctgtccacctctattctgatgcatgactcttctgggtctcaaccagagccagtggacttcagtatgggtcgctntcattggcagaccctcaatccacttgttttccatctaaccccacgcatgtgtgcaaaagctgctgtgcttctntgcatctcagtagttcctttctggaattc

SEQ ID NO: 584121 - DNA, 618 bp, Homo sapiens
tgacacaaatactgttgtatgaaccatgtgccaatcaaagtagacaactgtaaagtccttgagaatattttctacaatatttgtggcaaattcagtgggttcaaaattgagyttgtcctttctgcttcattagtttaagctgtataattcctttcccttcctacattcttgtttgtcattttttcaggggaagaggagttgctagtactggcattggttttcctttgtctctctctctctttttttttttttcctgagatggggctttgctcgtgttgcccaggctgtagtgcaatggcacaatctcagctcactgtcttttgggttcaagcaattctcctgcctcagcctcccaagtagctgggattacaggtgcccaccaccacgcccagctaatttttgtatttttactagagatggggtttcaccatgttgtccaggctggtctcgaacttctgacctcaggtaatccacccgcctcagcctcccaaagtgctgggattagaggcgtgagccaccacacccagccttttttttttttttttaaattttgagatagagtctcgctctgtcgcccaggctggagtgctgtggtgcaatcttggctcactgcaacct

SEQ ID NO: 584122 - DNA, 618 bp, Homo sapiens
tgacacaaatactgttgtatgaaccatgtgccaatcaaagtagacaactgtaaagtccttgagaatattttctacaatatttgtggcaaattcagtgggttcaaaattgagtttgtcctttctgcttcattagtttaagctgtataattcctttcccttcctacattcttgtttgtcattttttcaggggaagaggagttgctagtactggcattggttttcctttgtctctctctctctttttttttttttcctgagatggggctttgctcktgttgcccaggctgtagtgcaatggcacaatctcagctcactgtcttttgggttcaagcaattctcctgcctcagcctcccaagtagctgggattacaggtgcccaccaccacgcccagctaatttttgtatttttactagagatggggtttcaccatgttgtccaggctggtctcgaacttctgacctcaggtaatccacccgcctcagcctcccaaagtgctgggattagaggcgtgagccaccacacccagccttttttttttttttttaaattttgagatagagtctcgctctgtcgcccaggctggagtgctgtggtgcaatcttggctcactgcaacct

SEQ ID NO: 584123 - DNA, 618 bp, Homo sapiens
tgacacaaatactgttgtatgaaccatgtgccaatcaaagtagacaactgtaaagtccttgagaatattttctacaatatttgtggcaaattcagtgggttcaaaattgagtttgtcctttctgcttcattagtttaagctgtataattcctttcccttcctacattcttgtttgtcattttttcaggggaagaggagttgctagtactggcattggttttcctttgtctctctctctctttttttttttttcctgagatggggctttgctcgtgttgcccaggctgtagtgcaatggcacaatctcagctcactgycttttgggttcaagcaattctcctgcctcagcctcccaagtagctgggattacaggtgcccaccaccacgcccagctaatttttgtatttttactagagatggggtttcaccatgttgtccaggctggtctcgaacttctgacctcaggtaatccacccgcctcagcctcccaaagtgctgggattagaggcgtgagccaccacacccagccttttttttttttttttaaattttgagatagagtctcgctctgtcgcccaggctggagtgctgtggtgcaatcttggctcactgcaacct

SEQ ID NO: 584124 - DNA, 522 bp, Homo sapiens
aacagaggggaaatgagagggtcctgcaggcagagctggaatcaacttccactctgcctcttgcaagctgtgtgaccctgggcacaatttctccttcctctggaaacctctgttttcttagatttggagcagggtggtcacactgaccttgcagagttctgagaatcagagacagaacataaarggcctggaaaacattctccaaaaagaagctgcaacatgtgtggacaatgggcttttcatgcctctcttactgtctcttactgtctgttgacctggtgcaagaaacatgctctggtgatggctgtgagggaggaatgaggatagacatagacactcctgtgtctcaaacatgcttctttattactctgttatgactctgtcttccctggggcaggaccccagcctgcctacatttgcagacagacacagtggcatgtggagacaacagtgtgtcccagtgacttttctttaccccccagctgtcggcagtactcagtggaagggtgatatgacactgat

SEQ ID NO: 584125 - DNA, 522 bp, Homo sapiens
aacagaggggaaatgagagggtcctgcaggcagagctggaatcaacttccactctgcctcttgcaagctgtgtgaccctgggcacaatttctccttcctctggaaacctctgttttcttagatttggagcagggtggtcacactgaccttgcagagttctgagaatcagagacagaacataaagggcctggaaaacattctccaaaaagaagctgcaacatgtgtggacaatgggcttttcatgcctctcttactgtctcttactgtctgttgacctggtgcaagaaacatgctctggtgatggctgtgagggaggaatgaggatagacatagacactcctgtgtctcaaacatgcttctttattactctgttatgactctgtcttccctggggcaggaccccagcctgcctacatttgcagacagacacagtggcatgtggagacaacagtgtgtcccartgacttttctttaccccccagctgtcggcagtactcagtggaagggtgatatgacactgat

SEQ ID NO: 584126 - DNA, 512 bp, Homo sapiens
acctcccaagtgtgtctgctcactccccttccaccctcagtggatgataatctsaagaaactaacgaagaataaataaataatataaaaataaaatgaatactgcagtccttatgttattgctttgtttcaatatctggtatgattgcctgagggacctgaggtttttaatcgtaggggtttttttaatctttagaagtggttggttatgtaaaatattattatttgtttttttttttgagactggagtttgctctgtcacccaggctggagtgcagtggctcgatcacagctcactgcagcctcaacctcctgggcttcaagcaatcctcctgccccagcctcccaagtagctgggatcacagatgtgtgccaccacgcctggccaatgttaaaaaatcctttaacttttttgtagagatgcactcctggactcaagcaatcctcctacttgtcccgaccaccagcctctttctgataaacatttacactgtttattatctgatgccattt

SEQ ID NO: 584127 - DNA, 512 bp, Homo sapiens
acctcccaagtgtgtctgctcactccccttccaccctcagtggatgataatctgaagaaactaasgaagaataaataaataatataaaaataaaatgaatactgcagtccttatgttattgctttgtttcaatatctggtatgattgcctgagggacctgaggtttttaatcgtaggggtttttttaatctttagaagtggttggttatgtaaaatattattatttgtttttttttttgagactggagtttgctctgtcacccaggctggagtgcagtggctcgatcacagctcactgcagcctcaacctcctgggcttcaagcaatcctcctgccccagcctcccaagtagctgggatcacagatgtgtgccaccacgcctggccaatgttaaaaaatcctttaacttttttgtagagatgcactcctggactcaagcaatcctcctacttgtcccgaccaccagcctctttctgataaacatttacactgtttattatctgatgccattt

SEQ ID NO: 584128 - DNA, 192 bp, Homo sapiens
ctgcttgctacttcgcttgcccccagctcccaccctcagccctgtgactggaatgtgtgccccaccgtcattgtcctgagttgaatgtccctttgtgggggaggtggggggggcagtgtccatccacgaaggggcagaaggagggagccacgkgccccgccccacccgctcgggtgaagcccagtgggattt

SEQ ID NO: 584129 - DNA, 192 bp, Homo sapiens
ctgcttgctacttcgcttgcccccagctcccaccctcagccctgtgactggaatgtgtgccccaccgtcattgtcctgagttgaatgtccctttgtgggggaggtggggggggcagtgtccatccacgaaggggcagaaggagggagccacgtgcccygccccacccgctcgggtgaagcccagtgggattt

SEQ ID NO: 584130 - DNA, 531 bp, Homo sapiens
tgttttaaaagaaaatatatgtctatgtgttgacataagcaacaataaaaatattttttcaacaaacaaaacatttatatttttaagtgagtttatttctctttaaggtatatgcttaaatagattgtacatatttttctaagtgtaatttgttcatattatttttgaaactctaatttgggaattatttttaaagacagttttaaaaaagtgaatgtgttcattgtggtggctcaagcctataattccagcactttggaggctgaagtggatgaatcctttgagtccaggagttcaagattaacttgggcaacatggtgaaaccatgtctcaaaaaaaaaaaaaaaaattagccagacttggtgctgckcacctatagtcccagctactgaggaggctgaggcaggaggatcacttaagcctgtgaggtggaggttgcagtgagctgagattgcaccactgcactccagcctggggatggagaccccgtctcataataataacaacaataataatagtaatgaatgtaaa

SEQ ID NO: 584131 - DNA, 456 bp, Homo sapiens
ctcctgacctcaggcaatctgcctgccttggtctcccaaagtgctcggattacaggcatgtgccacagcgcctggctgagacagtggatcataatggctgagctcttatcaggtacccacccattggccaggagacagaggctcaaacaatagagaatctcattggctgagcttgactcactgccccacccactggccaggagagagaggytcaaagaataggagaatctcattggctaagcttgactcactgccccacccattggccaagagagaaaggttcaaacaatagaagaatctcactggctaagattaactcacggtcccacccactggccaaaagagacagcattcaaacaataggagaatcccattggctaagcttaactccctgccccgcccattggcagagcacttgattgacagccctaccaacaggaggactgtggaaaggcc

SEQ ID NO: 584132 - DNA, 456 bp, Homo sapiens
ctcctgacctcaggcaatctgcctgccttggtctcccaaagtgctcggattacaggcatgtgccacagcgcctggctgagacagtggatcataatggctgagctcttatcaggtacccacccattggccaggagacagaggctcaaacaatagagaatctcattggctgagcttgactcactgccccacccactggccaggagagagaggttcaaagaataggagaatctcattggctaagcttgactcactgccccacccattggccargagagaaaggttcaaacaatagaagaatctcactggctaagattaactcacggtcccacccactggccaaaagagacagcattcaaacaataggagaatcccattggctaagcttaactccctgccccgcccattggcagagcacttgattgacagccctaccaacaggaggactgtggaaaggcc

SEQ ID NO: 584133 - DNA, 512 bp, Homo sapiens
caaactatatcaggtatcttattcaaaaatcccttttgtacaaaaattacataaatatttatgcattatttcaaataatgttagctttcattttagtcttaaaatatttacctcatattgatactcttatgtatattatgtgaaataataatctaccattatacttctttcaaatagttggccaatttcacagaacagtttattgaattggtccctctttaatggtttaaagtcgtaaaatacctttgtttgtgttgcatactttatttaatctgccatgagtctgtttctctctccctctgccaatgctacactactttacatataatagccatattttaagtttcaaattctggatggcaaactcctactgaattgtatatttcattgattatacttgtagattgattttagaatatttcaaaattgcttttattataatattttaatgtcagagattgtattagttcattttcacactrctgataaagacatacctgagactgggcaat

SEQ ID NO: 584134 - DNA, 329 bp, Homo sapiens
tggccagccgtggtggctcacacgtgtaatcccagcacttcgggaggctgaggcgggtgtatcacctgaggtcaggagttcaagaccagcctgccaaacatggtgaaactccatgcccaaagtcagataactggtaaagtttggaaataaagtattctatgaacatccttgttatgaaccacatgtttatgtcaccgcaaaattcatayattgaaaacttaattctaatgtgatgatattgggagatggggcctatattaggcagtttttgaattgctatcaagaaatacctaagactgggtaatttagaaagaaaagaggtttacttg

SEQ ID NO: 584135 - DNA, 329 bp, Homo sapiens
tggccagccgtggtggctcacacgtgtaatcccagcacttcgggaggctgaggcgggtgtatcacctgaggtcaggagttcaagaccagcctgccaaacatggtgaaactccatgcccaaagtcagataactggtaaagtttggaaataaagtattctatgaacatccttgttatgaaccacatgtttatgtcaccgcaaaattcatacattgaaaacttaattctaatgtgatgatattkggagatggggcctatattaggcagtttttgaattgctatcaagaaatacctaagactgggtaatttagaaagaaaagaggtttacttg

SEQ ID NO: 584136 - DNA, 597 bp, Homo sapiens
tgctctgtttatggacgcatttgataagtcatagattttgttcttgaacctgttttccaattctctttttcttaatataatactcactgtatgaccttgggtaatgcatcattgttataattgaaaaatgatgatattttctccctaataagttcatgtatgtaagattcactggccgtgagttaacactcagtacgtagtagctttttaaaaaaattccttctattgtcttctgaattctagcataacatgcctcaataatatgcatcactagtagaaagatatagttgttttgctatagttatagtcaagataattatagtccagatatagttgttttgttaatatatgtcatttccacatatacaaggaaaagcacacactaaccaagccactgcaaactatatgtgagtggtgctcatgagtagccattcattttttagaatactgtttatatggcatgcttagtagtgataactctagcccacccacacaacctgcttggctgctgcatgtctgggacaaactaaatccttactgtckctcattatcatgagtattgcaaaaattcttccatgttttatatttttgtttttc

SEQ ID NO: 584137 - DNA, 500 bp, Homo sapiens
tatcattaatgcaaatcaaaaccacagtgagataccacctcatgccagtcagaatggcaattattaaaagatcaagaggccaggcacagtggctcacgcctgtaatctcaaaactttgggaggctgaggkgggcagatcacctgaggtcaggagttcaagaccagcctgactaacatggcgaaacctcatctctactaaaaattcaaaattaaccaggtgtggtggtgtatgcctgtaatcccagctacttggaatgctgagacaagagaatcgcctgaacccgggaggtggaagttgcaatgagctgagatcgcaccattgcactccagcttgggcaacaagagttaaactttgtctcaaaactaaagtcaagaaacaacaagtgttggcaaggttgctgagaaaaaggaatacttttacattgttggtggaaatgtaaattatttcaaccattgaagaagactgtgtggtgattcctcaaagatctagaagcaggaac

SEQ ID NO: 584138 - DNA, 500 bp, Homo sapiens
tatcattaatgcaaatcaaaaccacagtgagataccacctcatgccagtcagaatggcaattattaaaagatcaagaggccaggcacagtggctcacgcctgtaatctcaaaactttgggaggctgaggggggcagatcacctgaggtcaggagttcaagaccagcctgactaacatggcgaaacctcatctctactaaaaattcaaaattaaccaggtgtggtggtgtatgcctgtaatcccagctacttggaatgctgagacaagagaatcgcctgaacccgggaggtggaagttgcaatgagctgagatcgcaccattgcactccagcttgggcaacaagagttaaactttgtctcaaaactaaagtcaagaaacaacaartgttggcaaggttgctgagaaaaaggaatacttttacattgttggtggaaatgtaaattatttcaaccattgaagaagactgtgtggtgattcctcaaagatctagaagcaggaac

SEQ ID NO: 584139 - DNA, 547 bp, Homo sapiens
  misc_feature 297: n = A,T,C or G
aataaaaattgtacatgttaaggtatacaacctgatgttttgatatacatatactttgtcaaatgatcaccacttatccaactaattaacatacccatcacctcacagttaacattttctttctttgtgtatgtgtgtgtgtgtgagataagaacacttaaaatctactcttttagaaaatttgaagtatatgatacaatattgttcactatagtcaccatgctgtgtacattagatcttcataactaaaactttaccgacayctcccaatctcccccttcccacaacacctggcanacacttagatgtagaatctaaaatagactcaaagagcagagggtcataccctagtctaagcactaactgacactcataagttttcaggtcccttttgccgctcctaaagttacaacatgagagatgtcatgttctaacaaatatctttaatcttaagaataaaataatatttttaaatagaaaattgttttcatcagctcaggaaggatccaaatttgagtctctcaaagacaagtggtagtaagaattc

SEQ ID NO: 584140 - DNA, 520 bp, Homo sapiens
  misc_feature 337: n = A,T,C or G
aaattcttttgcttttcagctttattgagtacagttgacaaataaaaattgtacatgttaaggtatacaacctgatgttttgatatacatatactttgtcaaatgatcaccacttatccaactaattaacatacccatcacctcacagttaacattttctttctttgtgtatgtgtgtgtgtgtgagataagaacacttaaaatctactcttttagaaaatttgaagtatatgatacaatattgttcactatagtcaccatgctgtgtacattagatcttcataactaaaactttaccgacatctcccaatctcccccttcccacaacacctggcanacacttagatgtagaatctaaaatasactcaaagagcagagggtcataccctagtctaagcactaactgacactcataagttttcaggtcccttttgccgctcctaaagttacaacatgagagatgtcatgttctaacaaatatctttaatcttaagaataaaataatatttttaaatagaaa

SEQ ID NO: 584141 - DNA, 520 bp, Homo sapiens
  misc_feature 337: n = A,T,C or G
aaattcttttgcttttcagctttattgagtacagttgacaaataaaaattgtacatgttaaggtatacaacctgatgttttgatatacatatactttgtcaaatgatcaccacttatccaactaattaacatacccatcacctcacagttaacattttctttctttgtgtatgtgtgtgtgtgtgagataagaacacttaaaatctactcttttagaaaatttgaagtatatgatacaatattgttcactatagtcaccatgctgtgtacattagatcttcataactaaaactttaccgacatctcccaatctcccccttcccacaacacctggcanacacttagatgtagaatctaaaatagactcaaagagcagagggtcataccctagtctaarcactaactgacactcataagttttcaggtcccttttgccgctcctaaagttacaacatgagagatgtcatgttctaacaaatatctttaatcttaagaataaaataatatttttaaatagaaa

SEQ ID NO: 584142 - DNA, 583 bp, Homo sapiens
tcaaatcagacatcagaaaagacamcagtaccaaacgaagatatctttgctgtatttgcagttttctctcttattaacatgaaaacaccttacatagatggaaacatctaaaggctattttttattttattttccattacttcactctaatgctttcacccgtacctgtggaaattagactgtcacctgcttttagcatcctgttttctttcgtgtttgtaatgaagccctccgggaatatgcgattacaaaaatgagttacaaatcctcattcggtatacgaaagatatagctgctttccttctctgtttaaatagtctacaaaacaagaaataattagtcaagcactatcggtaattaagcacataagatgaacattaaacaaactgcaatcttgcatcattttgaaggtagataggcaggtttttgcatttggaatccagccaaaatgcccatcttcattccctttgctccttatttattattggtgagggaattcacttgccgaacttgctgatgtactcttgctggcggtccatctgagagttcacataagtgtgagtgactattttttgacaacact

SEQ ID NO: 584143 - DNA, 566 bp, Homo sapiens
tttagattaaatctctggaatctcgctttccattggaatatataatcaaatattaataatacatgcaataggttaaaattagaatagggcttttgaacagttattttttttttctttttatatttgggttaaacattcatctactatttattagaatttgttactactgctaaatcattattctttgagatcaattttcttttactctttttttggttgttattgttgctgcattgtattagtctctgcttaaaactagaatttttggctgggcgcagtggctcacgcctgtaatcccagcactttgggaggccaaggcaggcggatcatgaggtcaagagatccagaccatcctggccaacatggtgaaacrtagtctccactaaaaatataaaaattatctgggcatagtggtgcttgcctgtaattccagctactcaggaggctgaagcaggagaatcgcttgaaccagggagtcagaagttgcagtgagctgagatcgtgccactgcactccagcctggtgacagagcgagattccatcttaaaaaaaaaaaaaaatagaat

SEQ ID NO: 584144 - DNA, 607 bp, Homo sapiens
caaaagtctacattccaaaatcttatctgagacaaggtaagtctcttccacctatgagcctgtaaaattaaaactatttacttacttccaagatacaatggggttacaggcattgagtaaatgctcccattctaaatgggagaaattggccaaaacaaaggggctatagracccatgaaagtctgaaatccagcaaggaaattcttaaatcttatatccagggcatgctgatgcaagaggtgggctcccaaggttttgggcagctctgcttctgtggctctgcaggataccacccataccacagctttcgcagcctggtgcaaactgactgtggcttttctaggcacacagtgcaagctgttggtggatctaccattctggggtctggaggacagtggccctcttctcatagctccactaggcaattccccaatggggactctgtgcaggggctccaaccccacatttccccttcacactgccctaataggggttctccatgagtgctctatccctgcagaagacttctgcctggacatccagccatcctctgaaatctaagcagaggttcccaaacctaaattcttgccttctggatacccgcagg

SEQ ID NO: 584145 - DNA, 607 bp, Homo sapiens
caaaagtctacattccaaaatcttatctgagacaaggtaagtctcttccacctatgagcctgtaaaattaaaactatttacttacttccaagatacaatggggttacaggcattgagtaaatgctcccattctaaatgggagaaattggccaaaacaaaggggctatagaacccatgaaagtctgaaatccagcarggaaattcttaaatcttatatccagggcatgctgatgcaagaggtgggctcccaaggttttgggcagctctgcttctgtggctctgcaggataccacccataccacagctttcgcagcctggtgcaaactgactgtggcttttctaggcacacagtgcaagctgttggtggatctaccattctggggtctggaggacagtggccctcttctcatagctccactaggcaattccccaatggggactctgtgcaggggctccaaccccacatttccccttcacactgccctaataggggttctccatgagtgctctatccctgcagaagacttctgcctggacatccagccatcctctgaaatctaagcagaggttcccaaacctaaattcttgccttctggatacccgcagg

SEQ ID NO: 584146 - DNA, 560 bp, Homo sapiens
tttacttaatatggtagatttgttcatgataaaaastcaattttatttacattaacactcactctcaaactcaattcaaagtgtagttcaatttgtttatatttcagtgggcttcaggtggtctatgcttcatgacccatgagctcccatcctggtgctggggcagggaagagtcagagctccataagtggccgcctgtggccagttttcttctttgactaaggctgaccgatgaggtctccgctggctttcatgatggcatacttcaggaggttcttctgaagtctgtgggggggcctcccctactaatgtttcttgatacagaaaatggaactctattttggcttcttgcagctattctttttcctctccagctctcatcaaatgaggtacatctgacatacaatacaatacatgcatacatacctacattcatatatgaatgcatacatggatagatttttttaaactacttaacaaaaatcagatgatcaatggaagtgaagaatatggctatatagtctttcaaggaagacacatattcactaacttggtgaatg

SEQ ID NO: 584147 - DNA, 607 bp, Homo sapiens
agcagcttaatttttcagtattttctttaaagataacactgtaacgttagtacaaataggcagataaatgaatgttcactgcagtattattcacaacagtgaaaatttgggtacaacttttaaatgttcagtagtatagtagaaaagtagactatctcaagtatggtatatccataagttggagactataggacagtgtagaagaatgtgctgatccacatgagctaacataaaatgatctgagatacattgttgcgtgacaaatgtaacttatagaaaaacaggtacaatatgatacaagttcgagcctattgttcaaggtgcccttccttagacacctaactacctccctgctcaccagtaatgtttgcagggcccaaagcaagagtgaaarttgaggtccacataccatatgctttggatcatggattgtgttatgccagcaatgagtgctgcatcctgagtaacagaagcacctatgtgtattcagtatgtttcctgtatgtgtttgtaatattcaggcccagtaagcaagcagtccagggcaaagttacttcctgtccaagtctaaaagcctttctgtcctccctaccataaaaatgaaatc

SEQ ID NO: 584148 - DNA, 539 bp, Homo sapiens
ttactaatatatttttaattgttttgtagagatgaggtctccctatgttgcccaggttggtctcaaactcctgggctaatgagatcctcccatctcagcttcccaaagtgctaggattataggcacgtgccaacccaytggcttcaaaatgctcttatactcactcatcatcagttaataaaattctccattcaaacctttcctcaactaatagtaatgctccggtaatcagaatttttcaatcatagtatcaaaagaaagcaattactttaagcaacctaggacaaacagttaaactgtctatcaacctagtgatgataaaggcatttaccagagctactaagctcaagaaaaataaatcagagggcaaaatagacgaaagaaaaaagtagtcaatacaatgctatacatgtacataaaagaggtgaaaaactctgcaacagctgaaaatttcagcacaaattatttctatcacatttctgtgggaaaaaatggcctgcttttgtaaataaagctctactggaacctagccacaccca

SEQ ID NO: 584149 - DNA, 554 bp, Homo sapiens
aaatcagtatatcaaagagatatctgcactcccatgtttgttgcagcactattcataatagccaagatttggaaacaacctaagtgtccatcaacagatgaatggataaagaaaatgtggtacatatacataatggagtactattcagctgtaaaaagaatgagatgttgtcatttgcaacaacatggatggaactggaggtcattatgttaagtgaaaaaagtcaggcacagaaagacaarcttcacaggttctcacttatttgtgggatctaaaaaaataaaaacaattgaactcatggagatagagagtagatggatggctactagaggctgggaagggtagtaggagggggaatagggttggttaattgatacaaaaaatagttacaaagaataaataagacctactatttgatagcatgacaggtgtctatagtgaacaataatttaattttacatttaaaaataactaaaatagtgtaattggattgtttgtaacacaaacaatgaatgcttgagagcatgaataccccattttccatgatgtgatta

SEQ ID NO: 584150 - DNA, 397 bp, Homo sapiens
aattcatgagctcaagcaatcctcctaccttggcctcccaaaatgctgggatttcaggcatgagccaccatgcctggcctgatattttgttaaagcactgtaaattataatttggtctgttaaaaggatctgctaataatttgtaaataatcagaaaactttggaaatatcgattacttttacgataagaaacctaactaaytatgctatctttcaaactaaaaaatcaaaaggttagaagggagaggtaccttctccgtgtttgtcagtgtactggaatgcttgaaccaaacgtagtgtctcatccactgatctacccacaggaagatcattcagagtaatttgtcttaggattcctttgtcatcaataatgaagagacctctgtaaaacagaaga

SEQ ID NO: 584151 - DNA, 638 bp, Homo sapiens
aaaacaattatatacatgctgttttaatcaatgaattagttaagaaatgtggctccatgggtctgcctataccagaacaagtgcctactaagaaggaataataaaaacaagtcatttgaaagagggcaaaagctttgtatataaagattcatagctcctgaaacataattagcttgtctttcagctgtttcccttgtatcaaaattcagcccttattattttcaataatatataaattaagatgctatgagattacataaggtaatatattagaattaattcatatgaagttcccagtttctcttaaaaccattgtcattgggtttccaaatatgaaaatgatgtgctcagttgccttttaggataagccctgatatttgctatttttacaggaaagtagyggaaatatttatgtcagcattttagttgccaactctcacagaaaaatagcttctatttctgtgttattaaccatattacattggaatgtttaaaaactcctaacttctaactaagaatttgtgaataatagtagaaactgacttttaggtgaaacaattttggagttatttactagtttgatcacagaataaatatgctgttacaagatatgtcagcgggaggtgaattggcaatgg

SEQ ID NO: 584152 - DNA, 521 bp, Homo sapiens
tgaaacatctcacaaagggaatgaattggtcagtgacatactagtacatgtttaagcaccatggtgtgtgaggagggctctaatttatagatttgctgatttctgcgatatcaatactcccatcatggccaatttcagctactaagtatctaagaaccagcttgcaaaattcctgatgatttaataatcatctcttagcagccaacacaaacaagctccagaaccccacaaagtgttctctgtgtaagtttaatataacaggaaaaaataawataatctgaagtttagtgatcctccaaattaatggaaaaccacttgaaaataagaactaaattttatacccagaaaacttgattaccacaaagggataaagatagaaaaatcccaaaattattatatgaatcttctttgattcaaagtggcttatgtggtgtgtcttactgctattactgggacttacagagatagcatgagtgtttgttgtatattagaatttttaaaaatctaaagaaaaacatttt

SEQ ID NO: 584153 - DNA, 521 bp, Homo sapiens
tgaaacatctcacaaagggaatgaattggtcagtgacatactagtacatgtttaagcaccatggtgtgtgaggagggctctaatttatagatttgctgatttctgcgatatcaatactcccatcatggccaatttcagctactaagtatctaagaaccagcttgcaaaattcctgatgatttaataatcatctcttagcagccaacacaaacaagctccagaaccccacaaagtgttctctgtgtaagtttaatataacaggaaaaaataaaataatctgaagtttagtgatcctccaaattaatggaaaaccacttgaaaataagaactaaattttatacccagaaaacttgattaccacaaagggataaagatagaaaaatcccaaaattattatatgaatcttctttgattcaaagtggcttatgtrgtgtgtcttactgctattactgggacttacagagatagcatgagtgtttgttgtatattagaatttttaaaaatctaaagaaaaacatttt

SEQ ID NO: 584154 - DNA, 596 bp, Homo sapiens
cgttaggagagcatggagtgccctaactactgttcttcctaaccccctggctctcagaactacccaatccttgcagcctcaaagtttgccttttcatttcaagcgtaaggccataaatgcctgcagcaatggtgggagaaagtagttgctgatcaaaaagaaaaggcagtttcaaagccaattcatttgaagaaagtacaattcccaccttacactttgaacattcacggtctcagtatctgcctctgggcataagctgatccccagctagtcaggaaaataacctcactgggtttgtagagacacagtgtatatgcctgtttgaagccttttcctcttgggtccaatggagttacttggttgaggtagcaaawcattccctcttctgggtttgttcgtttgtttgttttttcactgagagttcttccctgactttggacttgggaatgattcttatgcatacttgaagctgtctccttgcacctcacctcaaagcaactctcatgtcattggaaaagagattttcaaaccacagatcaaaaattacttcttaaggtggtggtaatgggtgccaggatgaaaaggtacctgctgtg

SEQ ID NO: 584155 - DNA, 596 bp, Homo sapiens
cgttaggagagcatggagtgccctaactactgttcttcctaaccccctggctctcagaactacccaatccttgcagcctcaaagtttgccttttcatttcaagcgtaaggccataaatgcctgcagcaatggtgggagaaagtagttgctgatcaaaaagaaaaggcagtttcaaagccaattcatttgaagaaagtacaattcccaccttacactttgaacattcacggtctcagtatctgcctctgggcataagctgatccccagctagtcaggaaaataacctcactgggtttgtagagacacagtgtatatgcctgtttgaagccttttcctcttgggtccaatggagttacttggttgaggtagcaaaamattccctcttctgggtttgttcgtttgtttgttttttcactgagagttcttccctgactttggacttgggaatgattcttatgcatacttgaagctgtctccttgcacctcacctcaaagcaactctcatgtcattggaaaagagattttcaaaccacagatcaaaaattacttcttaaggtggtggtaatgggtgccaggatgaaaaggtacctgctgtg

SEQ ID NO: 584156 - DNA, 276 bp, Homo sapiens
ttaaaactttaccaatcttttaattaatataaaaatattttattttttacttgtattttcgataattgtaatggatttgaattatttcaagacctatatgtagctttaaaaaaaggaatatagaycatatatactatgtaaatatcaataatttctttacataggtatttgatttaaaaatgtgttttttgttcttatgaaataacattttattaatttttttctctttagtcagggtctcactctgtcacctaggctggagtgcagtggcatgat

SEQ ID NO: 584157 - DNA, 521 bp, Homo sapiens
ggctatatgatatagcctattacacacccaaggtatgtggtatagcctattgctcctaggctacaaacctgtacaacatgttattgtayggaatactataggcaattgtaacacaattggaagtatttgtgtatctaaacagaaaacatatagtaaaaatacagtattataatcttatggaaccaccttcatgtatgaagtttgtcattgactgacatgtcattatgtgacacacgactgtggtgaaaggaaaatatcttgggctcctgaaatcatgaagctaaagggaaaaatcaagctgtgaactgcctagagcaaacctgcctctcattctattcaaaattacccctctgttcattgagagaaatgcatatctgattgcttcctttggagaggctcatcagaaactcaaaagaatgcaaccatgccaggtgaggtggctcatgcctgtaatcccagcactttgggaggcaaagctgggcggatcacctgaggtcaggagtttgagcctgaccaacatg

SEQ ID NO: 584158 - DNA, 477 bp, Homo sapiens
gattcagagagactccaggggtgcctcatggtcagaacaaatttataggcaaaaaaagtaaagtgacatacagaaattggaagtgaggtacagaaacagctggattggttagagctcagcatttgccttatttgaacagtttgaacactcagcagtatgtgagtggttgaagtatggctgctgggattggccaagactcagcaattgttacaggcacatactcttacgtcaggttttcaatcttgtctacctattaagttaggttgcagttcatccacaaaaacactgcgaatattgattttgaggttacaaataaattttagcaagttggcaaatttcaaataaggaacctgtgaatagtgaggatctccagtagcagtgttcttataaagaagtcatcactgaacacaccatcatattaaggataaatctaggcattatcttcctctcaaaayagggtcactctgagaagtcctg

SEQ ID NO: 584159 - DNA, 566 bp, Homo sapiens
gatacatattattttattttattttaagttctgggatacatatgcaggatgtgcagggttgttacataggtaaacgtgtggcatggtgatttgatgcacatgtcaacccatcatcacctaggtattatgtccagcatgcattagctatttttcctaatcagcagagatatttgatgtttatttagtttgtgtcaccagcatatatagagtatataggtcaagtgaggagaaattaagtgctctgttgctatttgaaagcaacctattaacaaaataatcaaacccaagaagttctatactgatttgtctcagatagtcaccgtatttgcatgcctaactttttcacaaaaacttacacccaaagaaagaactacaaaattgtattgatgattattcattcatccataaatttcaatggtttcctggtgctgacagatagagaaatasgtactttaggtggcctctctgaagtttggcagtagatgtgtatgatctcatgcaagaaagacagaacattccccagtccccttggcagaagatgatgatgagtgtaaaaggagattaaa

SEQ ID NO: 584160 - DNA, 455 bp, Homo sapiens
ctccattctgtgacctcatactcaagccctgaccacctggtcatatgccaaagccaatgatccatgcctttgatcctagggcagctaagttatagctaagtcataaaacttaagaatacaatactgaaaaaaaaaaatcttacataggtcagcagcaccatctttacytaaaacagctataaaaaatgttgttaccataaaggtcttaattgtaataagaatatttatatttgctctaattaatgtatatttctagcttttaaaaaggaataactttttaaaatgttttgttaactcaccttgtcacagatccatttcttaggattttcacttcggaattgttctttgtaagaaataggaccatacttgcttgataaatgcattgatgggatgtacttttcatttttatggtatgaagaaaatggcaaaaacctgaaagaaatatttaagagcta

SEQ ID NO: 584161 - DNA, 455 bp, Homo sapiens
ctccattctgtgacctcatactcaagccctgaccacctggtcatatgccaaagccaatgatccatgcctttgatcctagggcagctaagttatagctaagtcataaaacttaagaatacaatactgaaaaaaaaaaatcttacataggtcagcagcaccatctttacctaaaacagctataaaaaatgttgttaccataaaggtcttaattgtaataagaatatttatatttgctctaattaatgtatatttctagcttttaaaaaggaataactttttaaaatgttttgttaactcaccttgtcacagatccatttcttaggattttcacttcggaattgttctttgtaagaaataggaccatacttgcttgataaatgcattgatgggatgtacttttcatttttatggtatgaagaaaatggcaaaaacytgaaagaaatatttaagagcta

SEQ ID NO: 584162 - DNA, 485 bp, Homo sapiens
ataatctttatggggacatctatctgcctcatgacatgcttattatagatttctgtgaatatcttttttttttttttttagtatttattgatcattcttgggtgtttctcggagaggggsatatggtagggtcataggataatagtggagagaaggtcagcagataaacacatgaacaaaggtctctggctttcataggcagaggtccctgcggccttctgcagtctttgtgtccctgggtacctgagattagggagtggtgatgactcttaaagagcatgccgccttcaagcatctgtttaacaaagcacatcttgcaccccccttaatccatttaaccctgagttgacaaagcacatctttcagagagcacagggttgggggtaaggttatagattaacagcatcccaaggcagaagaatatttcttagtacagaacaaaatggagtatcctatgtctacttctttctacacagacacagtaa

SEQ ID NO: 584163 - DNA, 485 bp, Homo sapiens
ataatctttatggggacatctatctgcctcatgacatgcttattatagatttctgtgaatatcttttttttttttttttagtatttattgatcattcttgggtgtttctcggagagggggatatggyagggtcataggataatagtggagagaaggtcagcagataaacacatgaacaaaggtctctggctttcataggcagaggtccctgcggccttctgcagtctttgtgtccctgggtacctgagattagggagtggtgatgactcttaaagagcatgccgccttcaagcatctgtttaacaaagcacatcttgcaccccccttaatccatttaaccctgagttgacaaagcacatctttcagagagcacagggttgggggtaaggttatagattaacagcatcccaaggcagaagaatatttcttagtacagaacaaaatggagtatcctatgtctacttctttctacacagacacagtaa

SEQ ID NO: 584164 - DNA, 549 bp, Homo sapiens
gatgctcctccagcatacaccagtcaaactagtgcccctaatatttgtggtgtgttcattttctctcttttttctggctctgggagggaagttgtgtctctgagcacaaccctcaggaagtccgagggtcctgaaaagtgtgggatggatggtttaagccccccaaatgtgaacaagctacatgtatraactcagataacacagacacacagaagaaataaattggcagcctgtgtaaatagatttggtttttgacagccaatagcaggtgatggttattttggagaaattatgagtgttggagagaaattaaagtcttgaaatatatgaaaggatttttgtgtagtggttttgtgagggacactagccttttttttttttttttttttttttttttgcctccctgtcaagtcctgaacaaaaaaaaattaatttatcccagtacttggcatttaaaaagtgctgtgtgggggtttggggttgattcaaataaagcaggggaggttttagtgggacataaaaaaaaacttaacagctgggaaattaaaa

SEQ ID NO: 584165 - DNA, 549 bp, Homo sapiens
gatgctcctccagcatacaccagtcaaactagtgcccctaatatttgtggtgtgttcattttctctcttttttctggctctgggagggaagttgtgtctctgagcacaaccctcaggaagtccgagggtcctgaaaagtgtgggatggatggtttaagccccccaaatgtgaacaagctacatgtatgaactcagataacacagacacacagaagaaataaattggcagcctgtgtaaatagatttggtttttgacagccaatagcaggtgatggttattttggagaaattatgagtgttggagagarattaaagtcttgaaatatatgaaaggatttttgtgtagtggttttgtgagggacactagccttttttttttttttttttttttttttttgcctccctgtcaagtcctgaacaaaaaaaaattaatttatcccagtacttggcatttaaaaagtgctgtgtgggggtttggggttgattcaaataaagcaggggaggttttagtgggacataaaaaaaaacttaacagctgggaaattaaaa

SEQ ID NO: 584166 - DNA, 514 bp, Homo sapiens
ttatataaaataacagcttggtgttaataagagcatacttacgacatgcaggtaaacttctgagctgtttaagaggtgaatacagatacaatagcaayagtatatccatttaacagcttgaactattgaatatactagaaaaaggtttttatatgcatcattttattttaaaaataaaatactcagaagtaagcaaaatgataataaaaaaaatccctgaagagtgcaaaataaaaatctcaaaacgagctgagatactctaatcaaatataaaaggtcaacttggtgagtactgtgtgaattttagaagatgtgattaggaagtttgttcattaggaatatatacattttgcacctttcttccccatgcaatttggtttaggtaaactgtggaaagagagtttctggggtgccagttgagttggtctcccctgtgtgagacacccatggggagccatgggcggcctctgaggagaaaagtctccttattgccttcatgcctttatgccccgag

SEQ ID NO: 584167 - DNA, 574 bp, Homo sapiens
gaagctggccaataccatggaagtgctatttccctagcttgatcatttgttcgaataacattattgacatgtttaatattattagtccaagaagattccaggaatactcttgcaatacactcaccaatatttaataggtactgcctgagtaaaacttgtaaaatgaaatgtgtttgcttaggcccttggtccaattctcaatgctgtcctgatgtctgctgttatagccttaggcatatatcctaccatttccaaccacttatttcacctactctgtcctattttacactgtcaggctttctctatcagtgtgccagtgcaatgacacagcagaaactcattacttgatctcccacctttgttctcttggtaacttactaaagaggtaatgtaaaatgaaagaaaaacaagcctttgcatcagaagacctgggactgaaacttatctccccacctacacctaatttgattttatccaaattccaatgactctcactatgacttttctttgaagtactgttgtgaagatgacatagataatacatmtaaaatgctttaccagatagaaatattca

SEQ ID NO: 584168 - DNA, 542 bp, Homo sapiens
attgaagagttatgtatgtgtgtgttaaataaacaatctagaaataaaatctgataagatgtcaacatgggagttagctgggggagaaggaaggacagtataaaaggaaatgaatacatgctaaatttattgtgttattgaggaggctaggacataatccagactttttctcaaagaatgtgtaagtttctgtgtgtgagttaaaaatatacacaggctaaaactaaaagaatagatgaataagtaactatcaaaacagaagaaggaaaatgttgcaaagcacaatctaatcaacagaaggaaagaaagcttttttaaaatcttcgttaaaaaactaactaggccagkcgtggtggctcacacctgtaatcccagcactttgggaggccgaggtgggcggatcacctgagaggtcaggagttcgagaccagcctggccaacatggtgaaaccccgtctctactaaaaatacaaaattagccgggtgtggtggtggatgcctgtaattccagctacttgggaggctaaggcaggagaattgct

SEQ ID NO: 584169 - DNA, 542 bp, Homo sapiens
attgaagagttatgtatgtgtgtgttaaataaacaatctagaaataaaatctgataagatgtcaacatgggagttagctgggggagaaggaaggacagtataaaaggaaatgaatacatgctaaatttattgtgttattgaggaggctaggacataatccagactttttctcaaagaatgtgtaagtttctgtgtgtgagttaaaaatatacacaggctaaaactaaaagaatagatgaataagtaactatcaaaacagaagaaggaaaatgttgcaaagcacaatctaatcaacagaaggaaagaaagcttttttaaaatcttcgttaaaaaactaactaggccaggcgtggtggctcacacctgtaatcccagcactttgggaggccgaggtgggcrgatcacctgagaggtcaggagttcgagaccagcctggccaacatggtgaaaccccgtctctactaaaaatacaaaattagccgggtgtggtggtggatgcctgtaattccagctacttgggaggctaaggcaggagaattgct

SEQ ID NO: 584170 - DNA, 604 bp, Homo sapiens
ggctcacacctgtaaaccctgcactttgggaagccagggaaaaagggctgcctgagtccaggagtttgagactagcccgggaaacatagcaaggtctcaactttaccaaaaagatttttaaaaattgtgtgtatatatatatatgtatatatacatatatatatatatttttttactgggaattgtgaagaatgctgcaatgaacataggaatgcaggtatcttttcaatgtactgatttcattttttaaaatatatatatacccagaartgggattgctggatcatatagtagttctgtttttacatttttgaggaatctccatactgttttccataagttgtactaatctacattctcaccaatagtgtataaagtttcccttttctccacatccttgcaacacttgtattttgtcttttagataatagccattctattataagaagggtgtatatatatgccaatcaaaatattttaaagtattaaaaatgtgtaaataatagctatgaaaaagtcacactttttcagtcaaaaagtaagcaagtgcaagaggaattaaatagacatatagagaattaagacaaatagacatatgcaatca

SEQ ID NO: 584171 - DNA, 451 bp, Homo sapiens
ttgtcttttagataatagccattctattataagaagggtgtatatatatgccaatcaaaatattttaaagtattaaaaatgtgtaaataatagctatgaaaaagtcacactttttcagtcaaaaagtaagcaagtgcaagaggaattaaatagacatatagagaattaagacaaatagacatatgcaatcaagaatcttcatccctaatgaaccccaaaaatcctcaaaaaatactagcaagccaaatttcacagcacattaaagaaatcatataccatrattaagtggcatttatctctgggttgcaaagatggctaaacatatgcaaatcagttgatgtgatttaatagaatgaaggataaaaatcatatgattatttcagtagatgcagaaaaagcatttgagaaattcaacatccttttatgattaaaactttcaacaactacataa

SEQ ID NO: 584172 - DNA, 607 bp, Homo sapiens
attttttttcatttttagggagatttattcaacaattaatataacaagaccttcccctagaaagcttcttagggatacacagcacttttcagacccataaaatagttgtgtaaaagtgatcaaatttcacattgtgaaacgagacacaatgcagctttttaaaatgctgacgaggcatgagcaacctggtggctttcttttgctttttgactacmgtatgatctgagcatgttttgaagtggaggagaaaagtgaacagaaatcagtgaactccatcagagaaccatggtaggtttattcatgagctgctatgagccaccacgtcctaggtttctttgttttgcagcaacagtagctggaacacaaacattgagctcatgatccaccgacatttcctcattggcttctgccatttagcattgcaggcccagcccagtttgatatttttattcctttacaattaaaatgttttggtttttgatgttgttgttgttgtttctgcttgaatacttctggaattttgtctctatccctgcaatttaaatattccctggaatatggctaaatatagatctgatgttattaatcttgcctaaagtgaagtgag

SEQ ID NO: 584173 - DNA, 607 bp, Homo sapiens
attttttttcatttttagggagatttattcaacaattaatataacaagaccttcccctagaaagcttcttagggatacacagcacttttcagacccataaaatagttgtgtaaaagtgatcaaatttcacattgtgaaacgagacacaatgcagctttttaaaatgctgacgaggcatgagcaacctggtggctttcttttgctttttgactacagtatgatctgagcatgttttgaagtggaggagaaaagtgaacagaaatcagtgaactccatcagagaaccatggtaggtttattcatgagctgctawgagccaccacgtcctaggtttctttgttttgcagcaacagtagctggaacacaaacattgagctcatgatccaccgacatttcctcattggcttctgccatttagcattgcaggcccagcccagtttgatatttttattcctttacaattaaaatgttttggtttttgatgttgttgttgttgtttctgcttgaatacttctggaattttgtctctatccctgcaatttaaatattccctggaatatggctaaatatagatctgatgttattaatcttgcctaaagtgaagtgag

SEQ ID NO: 584174 - DNA, 607 bp, Homo sapiens
attttttttcatttttagggagatttattcaacaattaatataacaagaccttcccctagaaagcttcttagggatacacagcacttttcagacccataaaatagttgtgtaaaagtgatcaaatttcacattgtgaaacgagacacaatgcagctttttaaaatgctgacgaggcatgagcaacctggtggctttcttttgctttttgactacagtatgatctgagcatgttttgaagtggaggagaaaagtgaacagaaatcagtgaactccatcagagaaccatggtaggtttattcatgagctgctatgagccaccacgtcctrggtttctttgttttgcagcaacagtagctggaacacaaacattgagctcatgatccaccgacatttcctcattggcttctgccatttagcattgcaggcccagcccagtttgatatttttattcctttacaattaaaatgttttggtttttgatgttgttgttgttgtttctgcttgaatacttctggaattttgtctctatccctgcaatttaaatattccctggaatatggctaaatatagatctgatgttattaatcttgcctaaagtgaagtgag

SEQ ID NO: 584175 - DNA, 500 bp, Homo sapiens
cagatgttgtgatgagctcagaccgcaccattgcactccagcctgcaagagcaaaacttcatctcaaaaaaaaaaaaaaaaaaaatgaaagaacagaagtgctactgaatactgccaaatgagccaattaaattggcagaagctagaaagactgataatactaactgctgccaaagatgcagagctgtggcaactctcattcagtgctggtgagcatgcatattggtacaactactctttttttatgtatttttattatagtttaagttctagggtgcatgtacacaacgtgcaggtttgttacatatgtatacatgtgccatgttggtgtgctgcatccattaacttgtcatttacattaggtatatctcctaatgctatccctccccactcacccygcctcacaacaggccccggtgtgtgatgttccccttcctgtgtccatgtgttctcattgttcaattcccacctgtgagtgagaacatgcggtgtttggtttt

SEQ ID NO: 584176 - DNA, 500 bp, Homo sapiens
cagatgttgtgatgagctcagaccgcaccattgcactccagcctgcaagagcaaaacttcatctcaaaaaaaaaaaaaaaaaaaatgaaagaacagaagtgctactgaatactgccaaatgagccaattaaattggcagaagctagaaagactgataatactaactgctgccaaagatgcagagctgtggcaactctcattcagtgctggtgagcatgcatattggtacaactactctttttttatgtatttttattatagtttaagttctagggtgcatgtacacaacgtgcaggtttgttacatatgtatacatgtgccatgttggtgtgctgcatccattaacttgtcatttacattaggtatatctcctaatgctatccctccccactcaccccgcctcacracaggccccggtgtgtgatgttccccttcctgtgtccatgtgttctcattgttcaattcccacctgtgagtgagaacatgcggtgtttggtttt

SEQ ID NO: 584177 - DNA, 590 bp, Homo sapiens
ctttttttttgagacagggtcttgctatgttgcccaggctggcctcgaactcctaggcccaaacatcctcctgccttagcctccccagtagctgatgtaacccagagtccctggtttttcaggtaccgctgtgaaaaactacttccttgtaactgttgcacckggagttcttgttgttttaaatagctccaagaagaagttcaggctctgttaaaaacaaacaaacaaacaaacaaaaaaaactccagctgtatccagagtggcccgagtctaagatgaacttttgcaaatgctcctcatcactgtactaaaaaccccgcccaggaaggagctcatttgctacgttctattcatgagactgtgccagtgctacatacaatgactcagctaaccagcctattaaaaatcctgttttcacctctgttcagggaggaattgctttggggaattatccctggtgtccttcttacttgttgcaaatggtaaaatctccttgttaattaaatcttccttggttgtggtcatctgactgtcacccgctgaaccctccccttgtctgggtaactctgggactactggcacacaccacg

SEQ ID NO: 584178 - DNA, 560 bp, Homo sapiens
gtcctgctaattttttttgtattttggtagaaacgggtttcaccatgttgcccaggctggtctcggactcctgagctcaggcaatctgcccacctcggcctcccaaagtgctaggattacaggtgtgagccactgtgcccagccaaatttatttaatgttttatgtgacatgagaatcttcataagaaatgaagacccaaagaaatggttaagccagtatatttttatgttaggtttgatgaacagtggacygttgagaaatgtgataagacaaagaggacatgatctgatggcaacaaacagggaaacttaaaagactgtttgctcagattcctttgtgatccttcatctttagagataaggacactccttttctctgggtgtagaggacacctcttccataagggtcttatgtcttactttagggaaaggtgaaaaaagaaattcttcctaggttttatgatctactccagggaagaaggggggcagaggaaactcagagacttccctgtttctgccagttttcagggtgccaaagtgttatattttggaatagcatg

SEQ ID NO: 584179 - DNA, 560 bp, Homo sapiens
gtcctgctaattttttttgtattttggtagaaacgggtttcaccatgttgcccaggctggtctcggactcctgagctcaggcaatctgcccacctcggcctcccaaagtgctaggattacaggtgtgagccactgtgcccagccaaatttatttaatgttttatgtgacatgagaatcttcataagaaatgaagacccaaagaaatggttaagccagtatatttttatgttaggtttgatgaacagtggactgttgagaaatgtgataagacaaagaggrcatgatctgatggcaacaaacagggaaacttaaaagactgtttgctcagattcctttgtgatccttcatctttagagataaggacactccttttctctgggtgtagaggacacctcttccataagggtcttatgtcttactttagggaaaggtgaaaaaagaaattcttcctaggttttatgatctactccagggaagaaggggggcagaggaaactcagagacttccctgtttctgccagttttcagggtgccaaagtgttatattttggaatagcatg

SEQ ID NO: 584180 - DNA, 646 bp, Homo sapiens
tttcctcccccatgaggaagaaggggcttttgacttgttgccttaactcattcaatgggaaaagattccatttttcacctacaggcagaggcagctggaaactcccagaagtagaggctcagtctctctggaggctactgaagagcaccctgaagggtgtcacaatcctcagtgttgggggaaagttgggtaagtttttaccaygaacactggagggaccagctcctctcagggtgaaatgagccttgaaggaaggacagagggaatcacgcttgggcaagtgttttgccctcacaccaagagtaccagggaagcagagggtaccagtccaaacagatgtcagcagctctatctcaccaatgacagccagaaaagcaagcaaccactgcaaaaaaaaaaaaaaaaaaaaaaaaatggagaggaaccagaggtgtgtggaccattgcgtgaaccaactcattccctcacctccaaccacacctactgggtcagacattcaggcactgaagacagaataagggagagcgggcagccaggtcctccttttctgcctgaggccactgcagtagaacagaagttccacgggtggagaagaaagactttaaactggatgagaaccataaacaataataacctaaatgcagtt

SEQ ID NO: 584181 - DNA, 552 bp, Homo sapiens
tgaactgtgagacaacttcaagcggctaaaatacatgtaattggagttgctgaaaaggaaaggggaaggaacgtcgttgaaaaaataatggccaattttttttaatttatggaaattccacagacccaacaatctcattgatccccaagaacaagaaacataaataaaactacattaagggacataataataaaattgcttaaaatcactgaaaatagaatttcttaaaagcagccagagaaggccaggagcagtggctcacgcctgtaatcctagcactttgggaggccaaggtrggcagatcacgaggtcaggagttcaaggcctgcctgaccaacatggtgaaaccccatcattaccaaaaatacaaaaattagccgggcatagtggtgcgcacctgtaatcccagctcctcagaaggctaaggcaggagaatcgcttgaacccaggaggcagaggttgcagtgagccgagatcgcaccactgcactccagcctgggtgacagagtgagattcagtctcaaaaaaaaaaaaaacaaaaaagtagccagg

SEQ ID NO: 584182 - DNA, 613 bp, Homo sapiens
ctatttttttttttaataactcactccaatgaacctattgtccccggggtatttccaattcctcaatagttcagcttgccacctttaccttcattttagtcttcttagaatttcacttgattaaataattgacartatttatcagacaatgggatgatcattcttgtcataaatgtatcatcttcattttccaattagagctatgattgtgatttccaggcagaaacataaattatgaatgtaatgttgaagtaaataaacataaaataatttatttgacacatttttataataattatatggcatgtttctttttagctgtgtcctcatgacttcccgaaggctccacctccaaataccatcacattattgggggacacaaatattcagtccatagcaatattagttaaaatgccttactggaattcgacttgacttctctggctcctcctgaggagaaaagacaggtctaagtgtagatgaaacaccatccaagaaaatgtgctttgcttcttctccctttataagggcctcatattaagagattgtgtgctaagttagattaaccacgtgtgaagccaaattggaataggctgctttgaaatcactgaag

SEQ ID NO: 584183 - DNA, 620 bp, Homo sapiens
tacattctgcacatgtatcccagaacttaaagtaaaataaaaactaaaccaaacaaaaaagaacatgtgaaaatatatatgtacaaagttgttcattagagtattctaaaaattagccaaaaatgaaaaaggaaactaaatatccactaatgggcactccttaaataaagtttcatgttgtcatgtaatgaaatatccaactgattatctgacacttgaatgttcatttcctgttataacatgatataataataataataatagtgttaaatgaaaattctaaaatgttaaacatattaaacaacaaatcccacatttataaaatcatttacagtacaattttattcttaaatatattggcagaaaaaatcctaaaatatctgaatgtatgaacaatggagcaattggaaattttgttttgcttatttgcattttttttctgaaaaaaatcaatattctctgtttctgtgaagaaatagaaaaaaaaaaaccttaaaatttacatggaatcacaaaagacccagactagccaaagctatcctaagcraaaagaacaaaactgaaggaatcacattactcaacttcaaattataccacagccctatagtaaccataacagc

SEQ ID NO: 584184 - DNA, 498 bp, Homo sapiens
ttccactttactggggggcaagtacctcccaccccatttctactttcctggggggcaagcacctcccaccccatttccactttactggggggcaagcacctcccacgccttttccactttcctggggggaaaacacctcccaccccttttccactctcctggggggaaagcacctgccacctcttttccactctcctggggggcaagcacctcccaccccttttctgctcttctggggggcaagcatctcccaccccatttccactttctgggggggcargcacctcccccccatttccactttcctggagggcaagcacctcccacctcttctccactttcctgaggggcaagcctcccccaccccttctctccatgtctctacccttctctttaaacttgcctcttacactacaggcaaatttccaccctccattcctccttcttctgccttagcctgtgttctcaagaacttaaaacctcttcaactcacacctg

SEQ ID NO: 584185 - DNA, 742 bp, Homo sapiens
aggaggatttccggtataactaattcccttccctccaccccgaagctcaccttgaatgcaccggtgctcattgattcatgcaaacttgtctctgttattgctgacatgcctggagagggtctgttaagggaagctcatttcaagcacagatggtcccaggtagcttagcctctgcctggtggccagactaagttaattcggacggccttagacttctgatcacatccgtgcagccagagaggaaaagaaaaacttatttatcatcttgataaacagtctctttcaatgtctgtggatgctgtatgtaactcggtagagtcaaatactattaaattgtcatcactgtcaaaagggggagtaataaatttttctacctgagtcatagttaatgacatctacaatgtgcaacacaaatcagaattactgtttgccttcttttctcctaaatgtgtgttttctgatctctctggctgtagatgtgaggcacagccctcaaaatataaataaatatatacttttgttattacctctcagctaaaccaataaaatatccagctgacaagggccagactcttggcttggatgaggtatgcatgcacaggcaaaagctaagcagaagtacctcgttctagttctgcacggaagacatggatttgaaagastgtatttcactgagtgaaggccttggaaatggctccacccaatagttatttgtaaacatatttgcagaagctgcttaaat

SEQ ID NO: 584186 - DNA, 570 bp, Homo sapiens
gctcaacatcctagaagctacttgcaattccctgccacaagacccctcccacaggcagtttgcaacatggtggtttgcttcttcaaggccagcaagaaaatctctttagtctaccaagaaggagtcttatacaataaaacaatcatgggagtggcattcccatcactagtgccatattctatttctttttttttttattattattatactttaagttctgggatacttgtacaggacatgcaggtttgttacatagatatacatgtgccatgatggtttgctgcacccatcaacccgtcatctacatgaggttatttctcctaatgctatccctcccctacctccccacctcctgataggccccagtgcatgatgttcccccctctgtgtccatgtrttctcatttttcaactcccatttatgagtgagaacatctggtgttgggttttctgttcttgtgttagtttgctgagaatgatagtttccagcttcatccatgtacctgcaaaggacatgaactcatcctttttatagctgcatagtattccatggtgtatatatgccacattt

SEQ ID NO: 584187 - DNA, 558 bp, Homo sapiens
taaattaaccagtctcaggtagttctgtatagcaagtgaaaatggactaatacaacttgtatgcaaatatatagcattcatcataactaagaagtgaaaacatttcaaatgtttatctactrgtgaaagaaaaaacaaaatgtgatatatcagtgcaatggaatactacttagcaataaacagaaacaactactgatatgtgctgcaacgtgaatgaatctcaaagacatcaagctaagtgaaagaagccagatgaaaaactccatatgctttattattctatttatcctaaatgcccagaaaaagcgaagcaaaccttatagagacagaatgcaaattactggttgccttggtctgggatgggaagtggacatgcggtatcttttgggggtgataaaatgctctaaaattgggttaaaatgatagttgcacaattctataaacttactaaaattattccattcttaaaatgtgtacataatgatacatcaataagggttttaggaaaaaaatagtagatatgaacatgctttgataactgaaaagtgtgtgaagtga

SEQ ID NO: 584188 - DNA, 558 bp, Homo sapiens
taaattaaccagtctcaggtagttctgtatagcaagtgaaaatggactaatacaacttgtatgcaaatatatagcattcatcataactaagaagtgaaaacatttcaaatgtttatctactggtgaaagaaaaaacaaaatgtgatatatcagtgcaatggaatactacttagcaataaacagaaacaactactgatatgtgctgcaacgtgaatgaatctcaaagacatcaagctaagtgaaagaagccagatgaaaaactccatatgctttattattctatttatcctaaatgcccagaaaaagcraagcaaaccttatagagacagaatgcaaattactggttgccttggtctgggatgggaagtggacatgcggtatcttttgggggtgataaaatgctctaaaattgggttaaaatgatagttgcacaattctataaacttactaaaattattccattcttaaaatgtgtacataatgatacatcaataagggttttaggaaaaaaatagtagatatgaacatgctttgataactgaaaagtgtgtgaagtga

SEQ ID NO: 584189 - DNA, 558 bp, Homo sapiens
taaattaaccagtctcaggtagttctgtatagcaagtgaaaatggactaatacaacttgtatgcaaatatatagcattcatcataactaagaagtgaaaacatttcaaatgtttatctactggtgaaagaaaaaacaaaatgtgatatatcagtgcaatggaatactacttagcaataaacagaaacaactactgatatgtgctgcaacgtgaatgaatctcaaagacatcaagctaagtgaaagaagccagatgaaaaactccatatgctttattattctatttatcctaaatgcccagaaaaagcgaagcaaaccttatagagacagaatgcaaattactggttgccttggtctgggatgggaagtggacrtgcggtatcttttgggggtgataaaatgctctaaaattgggttaaaatgatagttgcacaattctataaacttactaaaattattccattcttaaaatgtgtacataatgatacatcaataagggttttaggaaaaaaatagtagatatgaacatgctttgataactgaaaagtgtgtgaagtga

SEQ ID NO: 584190 - DNA, 602 bp, Homo sapiens
aaatgcctatggaaagggatcaatgtgtttataatttgtttttggctgttattttatttacaattttaataagtttgatagagtttttggaagaaaaataaaaagctaaatatgtacattttaaatttcctaccaatacctttttattttaactctatagatgaatgaagaagtcgaaaaattatttcctttttttaggaaaataraacagttgtttccaagcttttagtgtcttaaccagaatgatatcaagaatttgtattaaaagtctttcagctcaactttaagtaggaaatgcacatgtgaattaaaaaaaaacttaggcaccagcatttctctccatgagcaaacaggtataaatttctatcagatttttcagacattgaatatgcctaattttaaactatgaaatgagacttattttctaataataccaactgtatttttaaaaaaatttttggcaatcacaaagtgggtctgcaatgaaattcacttagcttttggggtactgtttccactgatttcagagttctgggaaactcagtcaatttttatttatcttatgattgctaagcattgtttaagactgcacccattcccta

SEQ ID NO: 584191 - DNA, 484 bp, Homo sapiens
aagtatagaaaaatataatgcgtctgaggagttttaagatttttttctgtgctgtatataatgacctccatttcttctaacttttacaggtgattatcctcctctatgtagaagggaagccctataatatcctaaatactaccaataacagytctaatctatgtcgattaatacaataattttaggactctccactgaagacttaaaagctaataacttgaaaatttctaggctgagttgttgactgcaggggataaaatagcaaatgctataatttatctggtttaatgcaggttttgttgccacttttccataaatgggacaggcagatatcccatattagatatctgttttataaagaaagctattgtataactttttgccgtacactgaagacctagactttttttaagttcttttttgttgttgtttgtttttatttttttattttttttaattttattattattatactttaagtttt

SEQ ID NO: 584192 - DNA, 484 bp, Homo sapiens
aagtatagaaaaatataatgcgtctgaggagttttaagatttttttctgtgctgtatataatgacctccatttcttctaacttttacaggtgattatcctcctctatgtagaagggaagccctataatatcctaaatactaccaataacagttctaatctatgtcgattaatacaataattttaggactctccactgaagacttaaaagctaataacttgaaaattwctaggctgagttgttgactgcaggggataaaatagcaaatgctataatttatctggtttaatgcaggttttgttgccacttttccataaatgggacaggcagatatcccatattagatatctgttttataaagaaagctattgtataactttttgccgtacactgaagacctagactttttttaagttcttttttgttgttgtttgtttttatttttttattttttttaattttattattattatactttaagtttt

SEQ ID NO: 584193 - DNA, 484 bp, Homo sapiens
aagtatagaaaaatataatgcgtctgaggagttttaagatttttttctgtgctgtatataatgacctccatttcttctaacttttacaggtgattatcctcctctatgtagaagggaagccctataatatcctaaatactaccaataacagttctaatctatgtcgattaatacaataattttaggactctccactgaagacttaaaagctaataacttgaaaatttctaggctgagttgttgactgcaggggataaaatagcaaatgctataatttatctggtttaatgcaggttttgttgccacttttccataaatgggacaggcagatatcccatattagatatctgttttataaagaaagctattgtataactttttgccgtacactgaagacctagactttttttaagttcttttttgttgttgtttgtttttatttttttatttttttwaattttattattattatactttaagtttt

SEQ ID NO: 584194 - DNA, 569 bp, Homo sapiens
catctattgagattatcatttggtttttgttttaattctttttaggtggtgaatcacctgtattgatttgtgtatgtagaaccaaccctgaatcccaggaataaaatctacttgattgtgttggattaactttttgatgtgcagctggatttggttggctagtattttgctaaggatttttgcatgtatgttcatcagtgatataccaccagctagattaacaaataaaaagagagagaagattcaaataagcacaatcagaaatgatgaacatgacattacaactgataccatagaaatagaaatgatcctcagtgactattatgaacatttctatggacacaaactagaaattctagaggaaacggacaaagtcctgaacatatacagccttacaaaattggactagaataaattgaagctctgaacagaccaataatgagttccaaaattgaatcagtaataaaaaaayctcctaacctaaaaaagccctcaatcagaaagattcatggccgaattctaccaaatgtccacagagctgatgctaagcctacagaaactattacaaa

SEQ ID NO: 584195 - DNA, 629 bp, Homo sapiens
aaacattaaaattgataccatagaaacacaaaagatcatcagtgactactaygaaaaactgtccttacaaactagaaaatctagaggaaatgggtaagttcagtaaacatacaacctttcaatattaaaccaggaagaaataaatatcctaaagagactaataacaaatatgagattgaatcagtaataaaacctttttcagcaacaacgacaacaaataaaaaacaagatcaggtaaattcacaaccaaattctacaaaatgtacaaagaactgacaccaatcctatggaaattgttccagaaaatcaaacagaagagaattctttccatctcatactttgaagccagaatcacccggatacaaagccaagcaaggacacacaatgagaaagacaactacagatcaacctccctgatgaacacagatttaaaaaccctcaaaaaaaaaaaaaaaaaaaaaaaaccctagcaaaccaaatccaatagcacatcaaaaaagtaatatgtcatgatcaagggggttttattccacataaacaagtatgattcactctatgccaaatgtgattcaccacataaacagatttaaaaacaaaaccattctgattatctaaagggatgcaaaaac

SEQ ID NO: 584196 - DNA, 629 bp, Homo sapiens
aaacattaaaattgataccatagaaacacaaaagatcatcagtgactactatgaaaaactgtccttacaaactagaaaatctagaggaaatgggtaagttcagtaaacatacaacctttcaatattaaaccaggaagaaataaatatcctaaagagactaataacaaatatgagattgaatcagtaataaaacctttttcagcaacaacgacaacaaataaaaaacaagatcaggtaaattcacaaccaaattctacaaaatgtacaaagaactgacaccaatcctatggaaattgttccagaaaatcaaacagwagagaattctttccatctcatactttgaagccagaatcacccggatacaaagccaagcaaggacacacaatgagaaagacaactacagatcaacctccctgatgaacacagatttaaaaaccctcaaaaaaaaaaaaaaaaaaaaaaaaccctagcaaaccaaatccaatagcacatcaaaaaagtaatatgtcatgatcaagggggttttattccacataaacaagtatgattcactctatgccaaatgtgattcaccacataaacagatttaaaaacaaaaccattctgattatctaaagggatgcaaaaac

SEQ ID NO: 584197 - DNA, 629 bp, Homo sapiens
aaacattaaaattgataccatagaaacacaaaagatcatcagtgactactatgaaaaactgtccttacaaactagaaaatctagaggaaatgggtaagttcagtaaacatacaacctttcaatattaaaccaggaagaaataaatatcctaaagagactaataacaaatatgagattgaatcagtaataaaacctttttcagcaacaacgacaacaaataaaaaacaagatcaggtaaattcacaaccaaattctacaaaatgtacaaagaactgacaccaatcctatggaaattgttccagaaaatcaaacagaagagaattctttccatctcatactttgaagccagaatcacccggatacaaagccaagcaaggacacacaatgagaaagacaactacagatcaacctccctgatgaacacagatttaaaaaccctcaaaaaaaaaaaaaaaaaaaaaaaaccctagcaaaccaaatccaatagcacatcaaaaaagtaatatgtcatgatcaagkgggttttattccacataaacaagtatgattcactctatgccaaatgtgattcaccacataaacagatttaaaaacaaaaccattctgattatctaaagggatgcaaaaac

SEQ ID NO: 584198 - DNA, 629 bp, Homo sapiens
aaacattaaaattgataccatagaaacacaaaagatcatcagtgactactatgaaaaactgtccttacaaactagaaaatctagaggaaatgggtaagttcagtaaacatacaacctttcaatattaaaccaggaagaaataaatatcctaaagagactaataacaaatatgagattgaatcagtaataaaacctttttcagcaacaacgacaacaaataaaaaacaagatcaggtaaattcacaaccaaattctacaaaatgtacaaagaactgacaccaatcctatggaaattgttccagaaaatcaaacagaagagaattctttccatctcatactttgaagccagaatcacccggatacaaagccaagcaaggacacacaatgagaaagacaactacagatcaacctccctgatgaacacagatttaaaaaccctcaaaaaaaaaaaaaaaaaaaaaaaaccctagcaaaccaaatccaatagcacatcaaaaaagtaatatgtcatgatcaagggggttttattccacataaacaagtatrattcactctatgccaaatgtgattcaccacataaacagatttaaaaacaaaaccattctgattatctaaagggatgcaaaaac

SEQ ID NO: 584199 - DNA, 582 bp, Homo sapiens
actctgttgcccaggctacagtgcaatggcttgatcttggctcactgcaacctctgccccccaggttcaagcgattcttctgcctcagcctcccgagtagctgggactacaggtgcgtgccaccacgcccggctaatttttgtatttttagtacagattgtgtttcactatattggtcaggctggtcttgaatgcctggactgatgatacacctgcctcagcctcccawagtgctgggattacaggaataagccactgagcccagcctaatttttgttttttttagtagagacagggtttcgccatgttagacgggctggtctcaaacacctgacctcagatgacccgcctccgtaggcctcccaaagagctgggattacaggcatgagtcacggtgcccggcctaatccttacttttgatgcatttcaaagtaagttacagacatctgaatgtttcaccctaaacattccaggctgcatattattaactacttcagtatttgtttatgggggtgtgtgtgtgtgtgtgtttgtgtgtatgtgtgagagagagagacagagagatggagagagagagagatg

SEQ ID NO: 584200 - DNA, 385 bp, Homo sapiens
agttcgagagcagtctggcccacatggtgaaaccctgcttcttctaaaaatacaaaaattagccaggcgtggtggcacacgcctgtggaccccactactcaggaggctgacgtgggagaaytgcttcagcccgggaggtggaggttacagtgagtcgagattaggctattgcactccagcctgggcaacagagcaagactccatctcaaaaaataaataaataaataaataaataaataaataaataaataaataaataaaataaaacaaaatacaaatggctgaaccccgcctcccaagtttgacttgacagccaaggatttgcatctttatcaagtttggggatgatgttgatgctactggtccaggtacctaaccttaggaa

SEQ ID NO: 584201 - DNA, 563 bp, Homo sapiens
aatataaaatatatgtactatacaattatcattgtaatgttcattgactcaatcctactgtagataaaatgttgagaatttttttttccatargtttttgggaaacaggtgatatttggttacatgagtaagttctttagtggtgatttgtgagatttttatgcatccatcacctcagcagtctataatgaacccaatttgtagccttttctcgttcactcacttctcaccatttccccctgagtgcccaaagtccattgtgtcattcttattcctttgtatcctcacagcttagctcccacttatgagtgagaacatggaatgtttggttttccattcctaagttacttttacttcacttagaataatagtctccaatcccatccaggttgctgcaaatgccattaattccttcctttttatggctgagtagtattccactgtacatatatataccacagcttattgactgatgggcatttgggctggttccatatttttgtaattgtgaattgtgctgctataaacatgaaagtgaagtattttttttgtataatgacttc

SEQ ID NO: 584202 - DNA, 586 bp, Homo sapiens
tttataatctgaaaataaagtgaaatgaagtaatttattcatatcgccaataattttctgtaacaaaatgaaaaggaatcctttttagtactacacatcttaacactgactaatccttcattcaaaggaagaaagagaattaacaacaataataataatattagtagcaaacaatcaaatgagattaccatgtgccaggcactaatgcccacaggtgttaactcatttaatcctcaccgaacccagagagggaagtttattattattatcccttttttataaagtaaggaaaataagaccttgagaagttaaggaatttttgcaagaactagcaggggcaggagacataggaggaggcttttgattcctgaactcactttcaaagccatacyctactcagtccatgagcaaagtaccacgcctcccctttatacagatcatttccttcatacatctgtaccactcaattaaagtatcaccaactctcttttagtaatgaacaagctccaaaaatgtaacatactcaacaagctccaaaaatttaacacactcaaagtcccacaaatgaatagaaaccagattttta

SEQ ID NO: 584203 - DNA, 553 bp, Homo sapiens
atgcttcaagcaaaggcctaaagagtggtgtttgcagttacttgtgatgacttgcattttgaaactgtttctaagtcttgatgctaggtaaaatatctgattattgtgtgctaggtcaaatactttgtattatctcagatatattagrgaaaaaaatgtcttttccccattccttgatttccatgaggaaggttttccttaagcattgttagtttcttgcctcatcccttatttacttctccctatgaaagcaaaatgaatctttgcatttgtggggtaacagtatagtatgctcctcatgtgggcatacaaattcatcaaagttatttttcacatgtgttttgattttttttttttggtttctctagtgggaataaatctgcttatgtctgctctgtggaaaaatgcttgcctctagtgggctgttctaagagagaggcttggaggagagagatggcaaaacacttggctctcaggattggctgcgatggagaggatgtggagaaataggaagatttttacactgttggtgagactgtaaactagttcaacc

SEQ ID NO: 584204 - DNA, 553 bp, Homo sapiens
atgcttcaagcaaaggcctaaagagtggtgtttgcagttacttgtgatgacttgcattttgaaactgtttctaagtcttgatgctaggtaaaatatctgattattgtgtgctaggtcaaatactttgtattatctcagatatattagggaaaaaaatgtcttttccccattccttratttccatgaggaaggttttccttaagcattgttagtttcttgcctcatcccttatttacttctccctatgaaagcaaaatgaatctttgcatttgtggggtaacagtatagtatgctcctcatgtgggcatacaaattcatcaaagttatttttcacatgtgttttgattttttttttttggtttctctagtgggaataaatctgcttatgtctgctctgtggaaaaatgcttgcctctagtgggctgttctaagagagaggcttggaggagagagatggcaaaacacttggctctcaggattggctgcgatggagaggatgtggagaaataggaagatttttacactgttggtgagactgtaaactagttcaacc

SEQ ID NO: 584205 - DNA, 457 bp, Homo sapiens
tgtgacgattgcattcaactcaaagcgttgaaccctcctatggatagagcagttttgaatctctctttttgtggaatctgcaagtggatatgtggtcctctttgaagatgtctttggaaacgggaatatcttcacataaaaactaaacagaagcattctcagaaacttctctgtgatgtttgtgttcaactcacagagtttcacgttgcttttcatagagcagatgagaaacatgcttttcgtagggtctgcaagtggacatttggagagmtttcaggcctgtggtggaaaacgaattatcgtcacgtaaaaactagagagaagcattgtcagaaacttgtttgtgatgactgcattcaactcacagagttgaaggttccttttcaaacagcagtttccaaacactctttctgtggcatctgcagtggatgtttgggcctctttgaagatttcgttg

SEQ ID NO: 584206 - DNA, 430 bp, Homo sapiens
aaacttctctgtgacgattgcattcaactcaaagcgttgaaccctcctatggatagagcagttttgaatctctctttttgtggaatctgcaagtggatatgtggtcctctttgaagatgtctttggaaacgggaatatcttcacataaaaactaaacagaagcattctcagaaacttctctgtgatgtttgtgttcaactcacagagtttcacgttgcttttcatagagcagatgagaaacatgcttttcgtagggtctgcaagtggacatttggagagctttcaggcctgtggtggaaaackaattatcgtcacgtaaaaactagagagaagcattgtcagaaacttgtttgtgatgactgcattcaactcacagagttgaaggttccttttcaaacagcagtttccaaacactctttctgtggcatct

SEQ ID NO: 584207 - DNA, 461 bp, Homo sapiens
agctcttccctttactaccataggcctcaaagcgctccaaatctccactcgccgattctacaacaagagtgtttccaaactgctctgtcaataggaatgctccactccgtgaggtgaatgcaatcatcacaaagtagtttctgagaaggcttctatctagtatttatgtggagatatttccttttccaccacamacctcacagccctcccaatgtccacttgcagattctagaaaaagagtgtttcatagctgctctttccgaaggaaagttcaactctggaagttgaatacaaacatcaccaaggagttcctgagaatgcttctgtgtaatttttatgtgaagatgattccgtttccaacgaaaccttcaaagaggtctgcatgtccccttgcagattccagagaaagagagtttcaaaactgcgctctcaaaaggagtgttcaactctgtgagttgaat

SEQ ID NO: 584208 - DNA, 461 bp, Homo sapiens
agctcttccctttactaccataggcctcaaagcgctccaaatctccactcgccgattctacaacaagagtgtttccaaactgctctgtcaataggaatgctccactccgtgaggtgaatgcaatcatcacaaagtagtttctgagaaggcttctatctagtatttatgtggagatatttccttttccaccacacacctcacagccctcccaatgtccacttgcagattctaraaaaagagtgtttcatagctgctctttccgaaggaaagttcaactctggaagttgaatacaaacatcaccaaggagttcctgagaatgcttctgtgtaatttttatgtgaagatgattccgtttccaacgaaaccttcaaagaggtctgcatgtccccttgcagattccagagaaagagagtttcaaaactgcgctctcaaaaggagtgttcaactctgtgagttgaat

SEQ ID NO: 584209 - DNA, 461 bp, Homo sapiens
agctcttccctttactaccataggcctcaaagcgctccaaatctccactcgccgattctacaacaagagtgtttccaaactgctctgtcaataggaatgctccactccgtgaggtgaatgcaatcatcacaaagtagtttctgagaaggcttctatctagtatttatgtggagatatttccttttccaccacacacctcacagccctcccaatgtccacttgcagattctagaaaaagagtgtttcatagctgytctttccgaaggaaagttcaactctggaagttgaatacaaacatcaccaaggagttcctgagaatgcttctgtgtaatttttatgtgaagatgattccgtttccaacgaaaccttcaaagaggtctgcatgtccccttgcagattccagagaaagagagtttcaaaactgcgctctcaaaaggagtgttcaactctgtgagttgaat

SEQ ID NO: 584210 - DNA, 466 bp, Homo sapiens
agattctagaaaaagagtgtttcatagctgctctttccgaaggaaagttcaactctggaagttgaatacaaacatcaccaaggagttcctgagratgcttctgtgtaatttttatgtgaagatgattccgtttccaacgaaaccttcaaagaggtctgcatgtccccttgcagattccagagaaagagagtttcaaaactgcgctctcaaaaggagtgttcaactctgtgagttgaatgcagtcatcacagaaaagtttctgagaatgcttctgtctagatgttatgtgaagatatacccgtttcgaacgaagtccacagagtggtccgaatatccacttgtagatcctgcaaaaagagtgtttccaacctgaactttcaaaggaaggttcaattctgggatttgaatgcaaacatcacaagaagattctgagactgcttctgtttacttagctgaaattatcccg

SEQ ID NO: 584211 - DNA, 461 bp, Homo sapiens
agctcttccctttactaccataggcctcaaagcgctccaaatctccactcgccgattctacaacaagagtgtttccaaactgctctgtcaataggaatgctccactccgtgaggtgaatgcaatcatcacaaagtagtttctgagaaggcttctatctagtatttatgtggagatatttccttttccaccacacacctcacagccctcccaatgtccacttgcagattctagaaaaagagtgtttcatagctgctctttccgaaggaaagttcaactctggaagttgaatacaaacatcaccaaggagttcctgagaatgcttctgtgtaatttttatgtgaagatgattccgtttccaacgaaaccttcaaagaggtctgcatgtccccttgcagattccagagaaagagagtttcmaaactgcgctctcaaaaggagtgttcaactctgtgagttgaat

SEQ ID NO: 584212 - DNA, 466 bp, Homo sapiens
agattctagaaaaagagtgtttcatagctgctctttccgaaggaaagttcaactctggaagttgaatacaaacatcaccaaggagttcctgagaatgcttctgtgtaatttttatgtgaagatgattccgtttccaacgaaaccttcaaagaggtctgcatgtccccttgcagattccagagaaagagagtttcaaaactgcgctctcaaaaggagtgttsaactctgtgagttgaatgcagtcatcacagaaaagtttctgagaatgcttctgtctagatgttatgtgaagatatacccgtttcgaacgaagtccacagagtggtccgaatatccacttgtagatcctgcaaaaagagtgtttccaacctgaactttcaaaggaaggttcaattctgggatttgaatgcaaacatcacaagaagattctgagactgcttctgtttacttagctgaaattatcccg

SEQ ID NO: 584213 - DNA, 466 bp, Homo sapiens
agattctagaaaaagagtgtttcatagctgctctttccgaaggaaagttcaactctggaagttgaatacaaacatcaccaaggagttcctgagaatgcttctgtgtaatttttatgtgaagatgattccgtttccaacgaaaccttcaaagaggtctgcatgtccccttgcagattccagagaaagagagtttcaaaactgcgctctcaaaaggagtgttcaactytgtgagttgaatgcagtcatcacagaaaagtttctgagaatgcttctgtctagatgttatgtgaagatatacccgtttcgaacgaagtccacagagtggtccgaatatccacttgtagatcctgcaaaaagagtgtttccaacctgaactttcaaaggaaggttcaattctgggatttgaatgcaaacatcacaagaagattctgagactgcttctgtttacttagctgaaattatcccg

SEQ ID NO: 584214 - DNA, 568 bp, Homo sapiens
  misc_feature 545, 546, 547, 548, 549, 550, 551, 552, 553, 554, 555, 556,557, 558, 559, 560, 561, 562, 563, 564, 565, 566, 567, 568: n = A,T,C or G
tctgtgacgattgcattcaactcaaagcgttgaaccctcctatggatagagcagttttgaatctctctttttgtggaatctgcaagtggatatgtggtcctctttgaagatgtctttggaaacgggaatatcttcacataaaaactaaacagaagcattctcagaaacttctctgtgatgtttgtgttcaactcacagagtttcacgttgcttttcatagagcagatgagaaacatgcttttcgtagggtctgcaagtggacatttggagagctttcaggcctgtggtggaaaacgaattatcgtcacgtaaaaactagagagaagcattgtcagaaacttgtttgtgatgactgcattcaactcacagagttgaaggttccttttcaaacagcagtttccaaacactctttctgtggcatctgcagtggatgtttggrcctctttgaagatttcgttggaaacgggataatcttcacagaaaagctaaacagaagcattctcagaaacttctttgtgatgtttgctttcaactcacagagttgnnnnnnnnnnnnnnnnnnnnnnnn

SEQ ID NO: 584215 - DNA, 526 bp, Homo sapiens
aaacttctctgtgacgattgcattcaactcaaagcgttgaaccctcctatggatagagcagttttgaatctctctttttgtggaatctgcaagtggatatgtggtcctctttgaagatgtctttggaaacgggaatatcttcacataaaaactaaacagaagcattctcagaaacttctctgtgatgtttgtgttcaactcacagagtttcacgttgcttttcatagagcagatgagaaacatgcttttcgtagggtctgcaagtggacatttggagagctttcaggcctgtggtggaaaacgaattatcgtcacgtaaaaactagagagaagcattgtcagaaacttgtttgtgatgactgcattcaactcacagagttgaaggttccttttcaaacagcagtttccaaacactctttctgtggcatctgcagtggatgtttgggcctctttgaagatttcgttggaaacgggatamtcttcacagaaaagctaaacagaagcattctcagaaacttctttgtga

SEQ ID NO: 584216 - DNA, 460 bp, Homo sapiens
caaacctgaactatcaaagaaaggttcaacactgtgggttgaatgcaaacatcacgaagaaggttctgagaatgcttctgtttagttctgtgcggtttatcccgtttccaacgcaatcctcagagaggcccaagtatccgcttgcagatcctacagatagtgtgtttccaaactgctccatccaaaggaatgttcagccctgtgagttaaactcagtcgtcacaaagagttttctgagaatgctgctgtctagtttttatatgaagctgtttcctttactaccataggcctcaaagcggtccatatctccacttgcagattctacacaacgagagtttccaaagtgctctctgaaagggaatgttcaccwctgtgacttgaatgcaatcgtcacaaagtagtttctgagtatgcatctatctagttcttacgggaagataattccttttccacctcaggc

SEQ ID NO: 584217 - DNA, 460 bp, Homo sapiens
caaacctgaactatcaaagaaaggttcaacactgtgggttgaatgcaaacatcacgaagaaggttctgagaatgcttctgtttagttctgtgcggtttatcccgtttccaacgcaatcctcagagaggcccaagtatccgcttgcagatcctacagatagtgtgtttccaaactgctccatccaaaggaatgttcagccctgtgagttaaactcagtcgtcacaaagagttttctgagaatgctgctgtctagtttttatatgaagctgtttcctttactaccataggcctcaaagcggtccatatctccacttgcagattctacacaacgagagtttccaaagtgctctctgaaagggaatgttcacctctgtgacttgaatgcaatcgtcacaaagwagtttctgagtatgcatctatctagttcttacgggaagataattccttttccacctcaggc

SEQ ID NO: 584218 - DNA, 460 bp, Homo sapiens
caaacctgaactatcaaagaaaggttcaacactgtgggttgaatgcaaacatcacgaagaaggttctgagaatgcttctgtttagttctgtgcggtttatcccgtttccaacgcaatcctcagagaggcccaagtatccgcttgcagatcctacagatagtgtgtttccaaactgctccatccaaaggaatgttcagccctgtgagttaaactcagtcgtcacaaagagttttctgagaatgctgctgtctagtttttatatgaagctgtttcctttactaccataggcctcaaagcggtccatatctccacttgcagattctacacaacgagagtttccaaagtgctctctgaaagggaatgttcacctctgtgacttgaatgcaatcgtcacaaagtagtttctgagwatgcatctatctagttcttacgggaagataattccttttccacctcaggc

SEQ ID NO: 584219 - DNA, 582 bp, Homo sapiens
tctcagaaacttctctgtgacgattgcattcaactcaaagcgttgaaccctcctatggatagagcagttttgaatctctctttttgtggaatctgcaagtggatatgtggtcctctttgaagatgtctttggaaacgggaatatcttcacattaaaactaaacagaagcattctcagaaacttctctgtgatgtttgtgttcaactcacagagyttcacgttgcttttcatagagcagatgagaaacatgcttttcgtagggtctgcaagtggacatttggagagctttcaggcctgtggtggaaaacgaattatcgtcacgtaaaaactagagagaagcattgtcagaaacttgtttgtgatgactgcattcaactcacagagttgaaggttccttttcaaacagcagtttccaaacactctttctgtggcatctgcagtggatgtttgggcctctttgaagatttcgttggaaacgggataatcttcacagaaaagctaaacagaagcattctcagaaacttctttgtgatgtttgctttcaactcacagagttgaactttccttttgagagagaagctt

SEQ ID NO: 584220 - DNA, 556 bp, Homo sapiens
gcattcaactcaaagcgttgaaccctcctatggatagagcagttttgaatctctctttttgtggaatctgcaagtggatatgtggtcctctttgaagatgtctttggaaacgggaatatcttcacattaaaactaaacagaagcattctcagaaacttctctgtgatgtttgtgttcaactcacagagtttcacgttgcttttcatagagcagatgagaaacatgcttttcgtagggtctgcaagwggacatttggagagctttcaggcctgtggtggaaaacgaattatcgtcacgtaaaaactagagagaagcattgtcagaaacttgtttgtgatgactgcattcaactcacagagttgaaggttccttttcaaacagcagtttccaaacactctttctgtggcatctgcagtggatgtttgggcctctttgaagatttcgttggaaacgggataatcttcacagaaaagctaaacagaagcattctcagaaacttctttgtgatgtttgctttcaactcacagagttgaactttccttttgagagagaagct

SEQ ID NO: 584221 - DNA, 541 bp, Homo sapiens
ttgcattcaactcacagcgttgaaccctcctatggatagagcagttttgaatctctctttttgtggaatctgcaagtggatatgtggtcctctttgaagatgtctttggaaacgggaatatcttcamataaaaactaaacagaagcattctcagaaacttctctgtgatgtttgtgttcaactcacagagtttcacgttgcttttcatagagcagatgagaaacatgcttttcgtagggtctgcaagtggacatttggagagatttcaggcctgtggtggaaaacgaattatcgtcacgtaaaaactagagagaagcattgtcagaaacttgtttgtgatgactgcattcaactcacagagttgaaggttccttttcaaacagcagtttccaaacactctttctgtggcatctgcaagtggatgtttgggcctctttgaagatttcgttggaaacgggatactcttcacagaaaagctaaacagaagcattctcagaaacttctttgtgatgtttgctttcaactcacagagttgaacttt

SEQ ID NO: 584222 - DNA, 557 bp, Homo sapiens
tgcattcaactcacagcgttgaaccctcctatggatagagcagttttgaatctctctttttgtggaatctgcaagtggatatgtggtcctctttgaagatgtctttggaaacgggaatatcttcacatwaaaactaaacagaagcattctcagaaacttctctgtgatgtttgtgttcaactcacagagtttcacgttgcttttcatagagcagatgagaaacatgcttttcgtagggtctgcaagtggacatttggagagatttcaggcctgtggtggaaaacgaattatcgtcacgtaaaaactagagagaagcattgtcagaaacttgtttgtgatgactgcattcaactcacagagttgaaggttccttttcaaacagcagtttccaaacactctttctgtggcatctgcaagtggatgtttgggcctctttgaagatttcgttggaaacgggatactcttcacagaaaagctaaacagaagcattctcagaaacttctttgtgatgtttgctttcaactcacagagttgaactttccttttcagagagaagc

SEQ ID NO: 584223 - DNA, 541 bp, Homo sapiens
ttgcattcaactcacagcgttgaaccctcctatggatagagcagttttgaatctctctttttgtggaatctgcaagtggatatgtggtcctctttgaagatgtctttggaaacgggaatatcttcacataaaaactaaacagaagcattctcagaaacttctctgtgatgtttgtgttcaactcacagagtttcacgttgcttttcatasagcagatgagaaacatgcttttcgtagggtctgcaagtggacatttggagagatttcaggcctgtggtggaaaacgaattatcgtcacgtaaaaactagagagaagcattgtcagaaacttgtttgtgatgactgcattcaactcacagagttgaaggttccttttcaaacagcagtttccaaacactctttctgtggcatctgcaagtggatgtttgggcctctttgaagatttcgttggaaacgggatactcttcacagaaaagctaaacagaagcattctcagaaacttctttgtgatgtttgctttcaactcacagagttgaacttt

SEQ ID NO: 584224 - DNA, 543 bp, Homo sapiens
ttctctgtgacgattgcattcaactcacagcgttgaaccctcctatggatagagcagttttgaatctctctttttgtggaatctgcaagtggatatgtggtcctctttgaagatgtctttggaaacgggaatatcttcacataaaaactaaacagaagcattctcagaaacttctctgtgatgtttgtgttcaactcacagagtttcacgttgcttttcatagagcagatgagaaacatgcttttcgtagggtctgcaagtggacatttggagagmtttcaggcctgtggtggaaaacgaattatcgtcacgtaaaaactagagagaagcattgtcagaaacttgtttgtgatgactgcattcaactcacagagttgaaggttccttttcaaacagcagtttccaaacactctttctgtggcatctgcaagtggatgtttgggcctctttgaagatttcgttggaaacgggatactcttcacagaaaagctaaacagaagcattctcagaaacttctttgtgatgtttgctttcaactcacag

SEQ ID NO: 584225 - DNA, 559 bp, Homo sapiens
tgcattcaactcacagcgttgaaccctcctatggatagagcagttttgaatctctctttttgtggaatctgcaagtggatatgtggtcctctttgaagatgtctttggaaacgggaatatcttcacataaaaactaaacagaagcattctcagaaacttctctgtgatgtttgtgttcaactcacagagtttcacgttgcttttcatagagcagatgagaaacatgcttttcgtagggtctgcaagtggacatttggagagatttcaggcctgtggtggaaaacgaattatcgtcacgtaaaaactagagagaagcattgtcagaaacttgtttgtgatgactgcattcaactcacagagttgaaggttccttttcaaacagcagtttccaaacactctttctgtggcatctgcaagtggatgtttgggcctctttgaagatttcgttggaaacgggatamtcttcacagaaaagctaaacagaagcattctcagaaacttctttgtgatgtttgctttcaactcacagagttgaactttccttttcagagagaagctt

SEQ ID NO: 584226 - DNA, 502 bp, Homo sapiens
tggactgctttgaggcctatggtagtaaaggaaacagcttcatataaaaactagacagcagcattctcagaaaactctttgtgacgactgagtttaactcacagggctgaacattcctttggatggagcagtttggaaacacactatctgtaggatctgcaagcggatacttgggcctcyctgaggatttcgttggaaacgggataaaccgcacagaactaaacagaagcattctcagaaccatcttcgtgatgtttgcattcaacccacagtgttgaacctttctttgatagttcaggtttgaaacactcttttagtagaaactgcaagtggataactgcacttctttgaggcctatcgtagtaaaggaaataacttcctataaaaacaagacagaagctttctcagaaaattctctgggatgattgagttgaactcacagagcagtactttccttgggatggagtagtttcgaaacacactttctgtagaatctgcaagt

SEQ ID NO: 584227 - DNA, 502 bp, Homo sapiens
tggactgctttgaggcctatggtagtaaaggaaacagcttcatataaaaactagacagcagcattctcagaaaactctttgtgacgactgagtttaactcacagggctgaacattcctttggatggagcagtttggaaacacactatctgtaggatctgcaagcggatacttgggcctctctgaggatttcgttggaaacgggataaaccgcacagaactaaacagaagcattctcagaaccatcttcgtgatgtttgcattcaacccacagtgttgaacctttctttgatagttcasgtttgaaacactcttttagtagaaactgcaagtggataactgcacttctttgaggcctatcgtagtaaaggaaataacttcctataaaaacaagacagaagctttctcagaaaattctctgggatgattgagttgaactcacagagcagtactttccttgggatggagtagtttcgaaacacactttctgtagaatctgcaagt

SEQ ID NO: 584228 - DNA, 502 bp, Homo sapiens
tggactgctttgaggcctatggtagtaaaggaaacagcttcatataaaaactagacagcagcattctcagaaaactctttgtgacgactgagtttaactcacagggctgaacattcctttggatggagcagtttggaaacacactatctgtaggatctgcaagcggatacttgggcctctctgaggatttcgttggaaacgggataaaccgcacagaactaaacagaagcattctcagaaccatcttcgtgatgtttgcattcaacccacagtgttgaacctttctttgatagttcaggtttgaaacactcttttwgtagaaactgcaagtggataactgcacttctttgaggcctatcgtagtaaaggaaataacttcctataaaaacaagacagaagctttctcagaaaattctctgggatgattgagttgaactcacagagcagtactttccttgggatggagtagtttcgaaacacactttctgtagaatctgcaagt

SEQ ID NO: 584229 - DNA, 544 bp, Homo sapiens
acttctctgtgatgattccattcaactcaaagcgttgaaccctcctatggatagagcacttttgaatctctctttttgtggaatctgcaastggatatgtggtcctctttgaagatgtctttggaaacgggaatatcttcacataaaaactaaacggaagcattctcagaaacttctctgtgatgtttgtcttcaactcacaaagtttcacgttgcttttcatagagcagatgaaaaacatgcttttcgtagggtctgcaagtggacatttggagagatttcaggcctgtggtggaaaacgaattatcgtcacgtaaaaactagagagaagcattgtcagaaacttgtttgtgatgactgcattcaacacacagagttgaaggttccttttcaaacagcagtttccaaacactctttctgtggcatctgcaagtggatgtttgggcctctttgaagatttcgttggaaacgggatactcttcacagaaaagctaaacagaagcattctcagaaacttctttgagatgtttgctttcaactcaca

SEQ ID NO: 584230 - DNA, 544 bp, Homo sapiens
acttctctgtgatgattccattcaactcaaagcgttgaaccctcctatggatagagcacttttgaatctctctttttgtggaatctgcaactggatatgtggtcctctttgaagatgtctttggaaacgggaatatcttcacataaaaactaaacggaagcattctcagaaacttctctgtgatgtttgtsttcaactcacaaagtttcacgttgcttttcatagagcagatgaaaaacatgcttttcgtagggtctgcaagtggacatttggagagatttcaggcctgtggtggaaaacgaattatcgtcacgtaaaaactagagagaagcattgtcagaaacttgtttgtgatgactgcattcaacacacagagttgaaggttccttttcaaacagcagtttccaaacactctttctgtggcatctgcaagtggatgtttgggcctctttgaagatttcgttggaaacgggatactcttcacagaaaagctaaacagaagcattctcagaaacttctttgagatgtttgctttcaactcaca

SEQ ID NO: 584231 - DNA, 403 bp, Homo sapiens
tatcgtagtaaaggaaataacttcctataaaaacaagacagaagctttctcagaaaattctctgggatgattgasttgaactcacagagcagtactttccttgggatggagtagtttcgaaacacactttctgtagaatctgcaagtggatatttggacctgtctgaggaattcgttgcaaacgggataatttcagctaagtaaacagaagcagtctcagaatcttcttgtgatgtttgcattcaaatcccagaattgaaccttcctttgaaagttcaggttggaaacactctttttgcaggatctacaagtggatattcggaccactctgtggacttcgttcgaaacgggtatatcttcacataacatctagacagaagcattctcagaaacttttctgtga

SEQ ID NO: 584232 - DNA, 568 bp, Homo sapiens
cttctctgtgacgattgcattcaactcaaagcgttgaaccctcctatggatagagcagttttgaatctctctttttgtggaatctgcaagtggatatgtggtcctctttgaagatgtctttggaaacgggaatatcttcacattaaaactaaacagaagcattctcagaaacttctctgtgatgtttgtgttcaactcacagagtwtcacgttgcttttcatagagcagatgagaaacatgcttttcgtagggtctgcaagtggacatttggagagctttcaggcctgtggtggaaaacgaattatcgtcacgtaaaaactagagagaagcattgtcagaaacttgtttgtgaagactgcattcaactcacagagttgaaggttccttttcaaacagcagtttccaaacactctttctgtggcatctgcaagtggatgtttgggcctctttgaagatttcgttggaaacgggataatcttcacagaaaagctaaacagaagcattctcagaaacttctttgtgatgtttgctttcaactcacagagttgaactttccttttgagagag

SEQ ID NO: 584233 - DNA, 533 bp, Homo sapiens
aaacttctctgtgacgattgcattcaactcaaagcgttgaaccctcctatggatagagcagttttgaatctctctttttgtggaatctgcaagtggatatgtggtcctctttgaagatgtctttggaaacgggaatatcttcacattaaaactaaacagaagcattctcagaaacttctctgtgatgtttgtgttcaactcacagagtttcaygttgcttttcatagagcagatgagaaacatgcttttcgtagggtctgcaagtggacatttggagagctttcaggcctgtggtggaaaacgaattatcgtcacgtaaaaactagagagaagcattgtcagaaacttgtttgtgaagactgcattcaactcacagagttgaaggttccttttcaaacagcagtttccaaacactctttctgtggcatctgcaagtggatgtttgggcctctttgaagatttcgttggaaacgggataatcttcacagaaaagctaaacagaagcattctcagaaacttctttgtgatgtttg

SEQ ID NO: 584234 - DNA, 378 bp, Homo sapiens
caactcacagagtttcacgttgctwttcatagagcagatgagaaacatgcttttcgtagggtctgcaagtggacatttggagagctttcaggcctgtggtggaaaacgaattatcgtcacgtaaaaactagagagaagcattgtcagaaacttgtttgtgaagactgcattcaactcacagagttgaaggttccttttcaaacagcagtttccaaacactctttctgtggcatctgcaagtggatgtttgggcctctttgaagatttcgttggaaacgggataatcttcacagaaaagctaaacagaagcattctcagaaacttctttgtgatgtttgctttcaactcacagagttgaactttccttttgagagagaa

SEQ ID NO: 584235 - DNA, 568 bp, Homo sapiens
cttctctgtgacgattgcattcaactcaaagcgttgaaccctcctatggatagagcagttttgaatctctctttttgtggaatctgcaagtggatatgtggtcctctttgaagatgtctttggaaacgggaatatcttcacattaaaactaaacagaagcattctcagaaacttctctgtgatgtttgtgttcaactcacagagtttcacgttgcttttcatagagcagatgagaaacatgcttttcgtagggtctgcaagtgracatttggagagctttcaggcctgtggtggaaaacgaattatcgtcacgtaaaaactagagagaagcattgtcagaaacttgtttgtgaagactgcattcaactcacagagttgaaggttccttttcaaacagcagtttccaaacactctttctgtggcatctgcaagtggatgtttgggcctctttgaagatttcgttggaaacgggataatcttcacagaaaagctaaacagaagcattctcagaaacttctttgtgatgtttgctttcaactcacagagttgaactttccttttgagagag

SEQ ID NO: 584236 - DNA, 378 bp, Homo sapiens
caactcacagagtttcacgttgcttttcatagagcagatgagaaacatgcttttcgtagggtctgcaagtggacatttsgagagctttcaggcctgtggtggaaaacgaattatcgtcacgtaaaaactagagagaagcattgtcagaaacttgtttgtgaagactgcattcaactcacagagttgaaggttccttttcaaacagcagtttccaaacactctttctgtggcatctgcaagtggatgtttgggcctctttgaagatttcgttggaaacgggataatcttcacagaaaagctaaacagaagcattctcagaaacttctttgtgatgtttgctttcaactcacagagttgaactttccttttgagagagaa

SEQ ID NO: 584237 - DNA, 402 bp, Homo sapiens
tgcattcaaatcccagagttgaaccttcctttgatagttcagctttgaaacactctttttgtaggatctgcaagtggatatttggaccactctttggccttcgttcgaaacgggtacatmttcaaataaaatctagaccgaagccttctcagaaacttctctgtgacgattgcattcaactcaaagcgttgaaccctcctatggatagagcagttttgaatctctctttttgtggaatctgcaagtggatatgtggtcctctttgaagatgtctttggaaacgggaatatcttcacataaaaactaaacagaagcattctcagaaacttctctgtgatgtttgtgttcaactcacagagtttcacgttgcttttcatagagcagatgagaaacatgcttttc

SEQ ID NO: 584238 - DNA, 506 bp, Homo sapiens
ggatatttggacctgtctgaggaattckttgcaaacgggataatttcagctaagtaaacagaagcagtctcagaatcttcttgtgatgtttgcattcaaatcccagaattgaaccttcctttgaaagttcaggttggaaacactctttttgcaggatctacaagtggatattcggaccactctgtggacttcgttcgaaacgggtatatcttcacataacatctagacagaagcattctcagaaacttttctgtgatgactgtattcaactcacagagttgaacactcctttcgagagcgcagttttgaaactctctttctctggaatctgcaaggggacatgcagacctctttgaaggtttcgttggaaacggaatcatcttcacataaaaattacacagaagcatcctcaggaactccttggtgatgtttgtattcaacttccagagttgaactttccttcggaaagagcagctatgaaacactctttttctagaatctgcaag

SEQ ID NO: 584239 - DNA, 506 bp, Homo sapiens
ggatatttggacctgtctgaggaattctttgcaaacgggataatttcagctaagtaaacagaagcagtctcagaatcttcttgtgatgtttgcattcaaatcccagaattgaaccttcctttgaaagttcaggttggaaacactctttttgcaggatctacaagtggatattcggaccactctgtggacttcgttcgaaacgggtatatcttcacataacatctagacagaagcattctcagaaacttttctgtgatgactgtattcaactcacagagttgaacactcctttygagagcgcagttttgaaactctctttctctggaatctgcaaggggacatgcagacctctttgaaggtttcgttggaaacggaatcatcttcacataaaaattacacagaagcatcctcaggaactccttggtgatgtttgtattcaacttccagagttgaactttccttcggaaagagcagctatgaaacactctttttctagaatctgcaag

SEQ ID NO: 584240 - DNA, 234 bp, Homo sapiens
tctcagaaacttttctgtgatgactgtattcaactcacagagttgaacactcctttcgagagcgcagttttgaaactctctttctctggaatctgcaaggggacatgcagacctctttgaaggtttcgttggaaacggaatcatcttcacataaaaattacacagargcatcctcaggaactccttggtgatgtttgtattcaacttccagagttgaactttccttcggaaaga

SEQ ID NO: 584241 - DNA, 230 bp, Homo sapiens
agaaacttttctgtgatgactgtattcaactcacagagttgaacactcctttcgagagcgcagttttgaaactctctttctctggaatctgcaaggggacatgcagacctctttgaaggtttcgttggaaacggaatcatcttcacataaaaattacacagaagcaycctcaggaactccttggtgatgtttgtattcaacttccagagttgaactttccttcggaaaga

SEQ ID NO: 584242 - DNA, 356 bp, Homo sapiens
gccttctcagaaacttctctgtgacgattgcattcaactcaaagcgttgraccctcctatggatagagcagttttgaatctctctttttgtggaatctgcaagtggatatgtggtcctctttgaagatgtctttggaaacgggaatatcttcacataaaaactaaacagaagcattctcagaaacttctctgtgatgtttgtgttcaactcacagagtttcacgttgcttttcatagagcagatgagaaacatgcttttcgtagggtctgcaagtggacatttggagagctttcaggcctgtggtggaaaacgaattatcgtcacgtaaaaactagagagaagcattgtcagaaac

SEQ ID NO: 584243 - DNA, 356 bp, Homo sapiens
gccttctcagaaacttctctgtgacgattgcattcaactcaaagcgttgaascctcctatggatagagcagttttgaatctctctttttgtggaatctgcaagtggatatgtggtcctctttgaagatgtctttggaaacgggaatatcttcacataaaaactaaacagaagcattctcagaaacttctctgtgatgtttgtgttcaactcacagagtttcacgttgcttttcatagagcagatgagaaacatgcttttcgtagggtctgcaagtggacatttggagagctttcaggcctgtggtggaaaacgaattatcgtcacgtaaaaactagagagaagcattgtcagaaac

SEQ ID NO: 584244 - DNA, 356 bp, Homo sapiens
gccttctcagaaacttctctgtgacgattgcattcaactcaaagcgttgaaccctcctatggatagagcagttttgaatctctctttttgtggaatctgcaagtggatrtgtggtcctctttgaagatgtctttggaaacgggaatatcttcacataaaaactaaacagaagcattctcagaaacttctctgtgatgtttgtgttcaactcacagagtttcacgttgcttttcatagagcagatgagaaacatgcttttcgtagggtctgcaagtggacatttggagagctttcaggcctgtggtggaaaacgaattatcgtcacgtaaaaactagagagaagcattgtcagaaac

SEQ ID NO: 584245 - DNA, 297 bp, Homo sapiens
aacttctctgtgacgattgcattcaactcaaagcgttgaaccctcctatggatagagcagttttgaatctctctttttgtggaatctgcaagtggatatgtggtcctctttgaagatgtctttggaaacgggaatatcttcacatwaaaactaaacagaagcattctcagaaacttctctgtgatgtttgtgttcaactcacagagtttcacgttgcttttcatagagcagatgagaaacatgcttttcgtagggtctgcaagtggacatttggagagctttcaggcctgtggtgga

SEQ ID NO: 584246 - DNA, 563 bp, Homo sapiens
  misc_feature 544, 545, 546, 547, 548, 549, 550, 551, 552, 553, 554, 555,556, 557, 558, 559, 560, 561, 562, 563: n = A,T,C or G
ctgtgacgattgcattcaactcaaagcgttgaaccctcctatggatagagcagttttgaatctctctttttgtggaatctgcaagtggatatgtggtcctctttgaagatgtctttggaaacgggaatatcttcacataaaaactaaacagaagcattctcagaaacttctctgtgatgtttgtgttcaactcacagagtttcaygttgcttttcatagagcagatgagaaacatgcttttcgtagggtctgcaagtggacatttggagagctttcaggcctgtggtggaaaacgaattatcgtcacgtaaaaactagagagaagcattgtcagaaacttgtttgtgatgactgcattcaactcacagagttgaaggttccttttcaaacagcagtttccaaacactctttctgtggcatctgcagtggatgtttgggcctctttgaagatttcgttggaaacgggataatcttcacagaaaagctaaacagaagcattctcagaaacttctttgtgatgtttgctttcaactcacagagttgnnnnnnnnnnnnnnnnnnnn

SEQ ID NO: 584247 - DNA, 629 bp, Homo sapiens
ccattcctcattgtgtaatgtctctctctaaatttgcagatttcaggaaagaggcttcaaatctaaaattaccaaaggtaaacggtgagtaagaactttgtatatgagaaaattttcaataataagagatattttttagaataattgccaagtaccaatgtatttctcatttttcctgctgacttcagccagattactatttttccacaatagtaatctgatcatgttacctccccctatttataactcttcaaacatttcctgttattaggataaaaattaaaatcctccatgccctatctttctagcgttattttgtaccattatccttgctttctgtacttcaactaaattggctttactttagttccttagatactcccctttcctcccactacaagacttttgcatattctattccctggaatattcttccctgatcctctttgcctactgttgtartctgttttgtgttgctgtaacagaataccacagactggataatttgtataaaaaaaaaaaagagattcatttcttacaattctagaggctgggaaatccaaggtcaagaggcccacatctagtgagggccttattgctgtgtcatactatggcagaaggcagaaggg

SEQ ID NO: 584248 - DNA, 589 bp, Homo sapiens
gtggtacgatctcaagacctttcataacayaaacattccacaaaccaggggtccccaaactctggcccatgaaccaaaactcgtctgcacagtaggaggtaagtggctggcgagtaagcattaccacctgagctccacctcctgtcagatcagcagcggcattagattctcatagggacacaaatcctattgtgaactgtgcatgcaagggatctaggttttgcctccttatgagaaactaatgcctgatgatcttctgaggtggaacagtttcatccagaaaccacccctgcctcctccccatcccctcgtccatggaaaaattatctcccattaaactggtccctagtgccaaaaagtctggagaccactgccataaactacacaacaataagataaaatgtaattatgaattacatttgaattaaattttagaagagaagacacatactcttagaaagtgcttcaagtaatctagggtagacttaaatttcaagaacaacccatcaggacagtgactaactagattatatctacaacagcttcaggtgaactcagccctaagcaaaactgtgacataaaaaaatat

SEQ ID NO: 584249 - DNA, 491 bp, Homo sapiens
tgatagcttcacagaagttttctaaatacacaaaatgtagagaactattaggcaacagaatttatgtgtcaaaagcaataatactcaaaatctttagaaattagagaacaagttttatctattttatattaccttatagattttataagactgcttttctctccatatctgtttatattacattatatttaatctttctcttacagctcaaacacagaaccgtcctaacattctataaacatttataatctacttgtttgggggaacagyctgttccagtggcccagccaatgctgcttgcttctgattaaaataaaattaatggggccaggtatggtggctcctgcctataatcacggcacttcgggaagccaaggcaggtgggtcattggaggtcaagagtttgagaccggcctggccaacatggtgaaaccctgtctctactaaaaatacaaaaattagctgggtgtgatggtgcatgtgtgtagtcc

SEQ ID NO: 584250 - DNA, 613 bp, Homo sapiens
tcctgctaaaagaagacatagcactgcaggtactgttccagcatcttatttttgcatttggtatattgttggagatgataggtagatratatgttcatctttatagatgtttgcaatgagggagaaggaattagccccctgaaattttcaggaaagtccaaggaggatttgctttattaagatatggcaagaagtgccatatggaaaatcagctgatggcagttcttagagggtcaggtattttggtttctgaaatactgtattggtatagcagttttttttttttttctctcatggaggttagagatctggaaattgaactgggtgggaagttgtgactagtgcagtttttgctagaggaggctttcaatattgtggagctacctgaagattacagaaatgtagtgttaatggtcacttagcaccttcagagtaacgttgccttgcatatatgaccttaataattaggatcatttttttcctctcacagtaggtagctgcattttccaggatgaatttcctccagaattatataccttagagtaggaggctgttttgagctccctttaggaaataagtgatacctatgaccatattgattgccttagtttca

SEQ ID NO: 584251 - DNA, 613 bp, Homo sapiens
tcctgctaaaagaagacatagcactgcaggtactgttccagcatcttatttttgcatttggtatattgttggagatgataggtagataatatgttcatctttatagatgtttgcaatgagggagaaggaattagccccctgaaattttcaggaaagtccaaggaggatttgctttattaagatatggcaagaagtgccatatggaaaatcagctgatggcagttcttagagggtcaggtattttggtttctgaaatastgtattggtatagcagttttttttttttttctctcatggaggttagagatctggaaattgaactgggtgggaagttgtgactagtgcagtttttgctagaggaggctttcaatattgtggagctacctgaagattacagaaatgtagtgttaatggtcacttagcaccttcagagtaacgttgccttgcatatatgaccttaataattaggatcatttttttcctctcacagtaggtagctgcattttccaggatgaatttcctccagaattatataccttagagtaggaggctgttttgagctccctttaggaaataagtgatacctatgaccatattgattgccttagtttca

SEQ ID NO: 584252 - DNA, 377 bp, Homo sapiens
acttccctggccttgatatccaagatgctagagacctagatatccaaamacaagaagcacaaagaacacctgggaaattcatagcaaaacaatcttcgcctaggcacattgtcatcaggttatccaaagttaagacgaaggaaagactcgtaagagctgtgagacagaagcaccaggtaacctgtaaacgaaaacctatctgattaacagcagatttctcagtagaaaccctacaaggtagaagggattagggccctatcttcagcctcttcaaacaaaacaattatcagccaagaattttatatccagtgaaactaagcatcatatatgaaggaaagatacagtcttattcagacaaatgaatgctaagagaattc

SEQ ID NO: 584253 - DNA, 545 bp, Homo sapiens
attttatatccagtgaaactaagcatcatatatgaaggaaagatacagtcttattcagacaaatgaatgctaagagaattcatcattaccaaaccaccactacaaaaactgctaaaaggagctctaaatcttgaaacaaatcctggaaacacatcaaaacagaacatttttaagcacaaattacacaggacctataaaacaaaaatacaagttaaaaagcaaaaacaaaaaacaaaaaaccaaagtactcagacaacaaagaayatgatgaatgtaaccatacctcacatttcaatactaacactgaatgtcaaaggcctaaatgctccacttaaaagatacagaactgcagaatgggtaagaactcaccaaccaatcatctgctgccttcagaagactcacctagcacataaggactcaaataaacttaaagtaaaggggtggaaaaaggcatttcatgcaaatggacaccaaaagtgagcaggggtagctatccttacatcagacaagcaaactttaaagcaacagcagttaaaagagacaaa

SEQ ID NO: 584254 - DNA, 577 bp, Homo sapiens
aagcttcaaaacagagccttaactgagttattcaagtagcagtacttaaagatataatttttgaagcagtttcaatggtttgtgatccaaataatcagtttctgaacattactacttcacgtaatagagtccatcttcagtttcttctcactttctctttcccttttgggtttcctttttctggcctgaggctaccagttctttgggtactatcaagatacttccatcatgggtacactgaagagcatagtggtttggattgactggcctaccttggtcatctcttaatctactaaaaatatcatgataaaggtcatgcagtttgtttcattatgttaatagctttgatacattgtgctcgctctctcttaagagtttccttctttgcttgcaagttacatacatcatcttctarattcaaaattatgtccaatttgcgtttacgatagttctgcgcagcaactttatttttccctcttcgtctgatatcacggataagtgagacttgtaggtctgtcagatagtacctacttaacatgctattgaatcaacaggcatgccgacaatttcatctaca

SEQ ID NO: 584255 - DNA, 613 bp, Homo sapiens
ctgtagttgcatcccagtgatgttagaggaatagaaagtgaggcaggacataagacttaaactgtgattactatttgcagctagtttctgttgactttaataataataataaaactaattttattctataaatatgacatttattgaggcattatatgtctaatrctatcttaagtactttttatacattgttatatttactctccacatcaaccttgtgaggcagatagtattatcccattttagacgagacattaagtagtaataatttgctcacagttgcacagttccaggttacaaatcctggagccagactttgaatgctggtctgacttaaccagtgctggaaataaagcaacattccagacactagggtacaattgggtcctggtggaactgaaaaggaaaactgaatgagcccttgtaaatcttgtctcatattttacgtttttcataattctgaaagttattttgcctatatctgatgagttaattttatttgatatcattagaggtccacagcaaaataattactttgtataattgcagtgaaaaattcagctatatgagtgattttggttgtgcaaattttataaacgcaccagagaaacgt

SEQ ID NO: 584256 - DNA, 595 bp, Homo sapiens
tctgtcgcccaggctggagtgaggtggcacgatctcggctcactgcaacctccgcctcccgggttcaagcaattctcctgcctcaccctcccgagtagctgggattgtagatgcatgccaccatgcctggctaatatttgtatttttagtacagacggagtttcaccatgttggccaggggtgatctcaagctcctgacctcaagtgatccaacgrccttggcctcccgaagtgctgggattatacgtgtgagccaccatgcctggccaaaatgcagcacttgttcctgatagtcacactgtgcttagcattatgcggtttcagaatttcactgactgtagctgtgagctggccgacttcagggctggtgtctctgttggtgcgcagcttgcatacaagtagtgcaaaaatactcaggaagacagctttggtcgggggtgttgctgtttattaatttttttcaaaactttgtgttttgaaataatttcagactcaagaattcgcaaaaacagtaacataattctgtgtactcttcagccagcttcccctaaaggtggcattttattttttattaattaaaaaaaattttttttta

SEQ ID NO: 584257 - DNA, 595 bp, Homo sapiens
tctgtcgcccaggctggagtgaggtggcacgatctcggctcactgcaacctccgcctcccgggttcaagcaattctcctgcctcaccctcccgagtagctgggattgtagatgcatgccaccatgcctggctaatatttgtatttttagtacagacggagtttcaccatgttggccaggggtgatctcaagctcctgacctcaagtgatccaacggccttggcctcccgaagtgctgggattatasgtgtgagccaccatgcctggccaaaatgcagcacttgttcctgatagtcacactgtgcttagcattatgcggtttcagaatttcactgactgtagctgtgagctggccgacttcagggctggtgtctctgttggtgcgcagcttgcatacaagtagtgcaaaaatactcaggaagacagctttggtcgggggtgttgctgtttattaatttttttcaaaactttgtgttttgaaataatttcagactcaagaattcgcaaaaacagtaacataattctgtgtactcttcagccagcttcccctaaaggtggcattttattttttattaattaaaaaaaattttttttta

SEQ ID NO: 584258 - DNA, 595 bp, Homo sapiens
tctgtcgcccaggctggagtgaggtggcacgatctcggctcactgcaacctccgcctcccgggttcaagcaattctcctgcctcaccctcccgagtagctgggattgtagatgcatgccaccatgcctggctaatatttgtatttttagtacagacggagtttcaccatgttggccaggggtgatctcaagctcctgacctcaagtgatccaacggccttggcctcccgaagtgctgggattatacgtgtgagccaccatgcctggccaaaatgcagcacttgttcctgatagtcacactgtgcttagcattatgcggtttcagaatttcactgactgtagctgtgagctggccgacttcagggctggtgtctctgttggtgygcagcttgcatacaagtagtgcaaaaatactcaggaagacagctttggtcgggggtgttgctgtttattaatttttttcaaaactttgtgttttgaaataatttcagactcaagaattcgcaaaaacagtaacataattctgtgtactcttcagccagcttcccctaaaggtggcattttattttttattaattaaaaaaaattttttttta

SEQ ID NO: 584259 - DNA, 597 bp, Homo sapiens
gagtttttccttaaaaactgcttttaaatacagcttataattcactactttcatgcatatgaacaaagtaaggagctgtacataccacgcatccatcagaggacagatcttcaattgyagtaaggagtacttgtctttcttgctgctctattaagcttagctaagtaaatgctattgaatagagctagattccttggactcttcaggcagccgtctctgttactattgattctctaaaagtgcactattgattctctaaaagtacactacagtttcttttgggaatgttaagacaatgagctgaattttatatatatatatatatatatatatatatatatatatttgttcttttgttgtatatatatatatatacatatatatatatatatatagagagagagagagagagagagagtgcatgtaaagtgattatctggttgttgaacaaactattaacaaacctggaaagaatacctccttaaattccttcaacgtaacaaatatttactgcctgttatttgttaagtcctattctatgcactttatgctagttaagaagtttttcacttaatccttactttcaaagacttattt

SEQ ID NO: 584260 - DNA, 597 bp, Homo sapiens
gagtttttccttaaaaactgcttttaaatacagcttataattcactactttcatgcatatgaacaaagtaaggagctgtacataccacgcatccatcagaggacagatcttcaattgtagtaaggagtacttgtctttcttgctgctctattaagcttagctaagtaaatgctattgaatagarctagattccttggactcttcaggcagccgtctctgttactattgattctctaaaagtgcactattgattctctaaaagtacactacagtttcttttgggaatgttaagacaatgagctgaattttatatatatatatatatatatatatatatatatatatttgttcttttgttgtatatatatatatatacatatatatatatatatatagagagagagagagagagagagagtgcatgtaaagtgattatctggttgttgaacaaactattaacaaacctggaaagaatacctccttaaattccttcaacgtaacaaatatttactgcctgttatttgttaagtcctattctatgcactttatgctagttaagaagtttttcacttaatccttactttcaaagacttattt

SEQ ID NO: 584261 - DNA, 529 bp, Homo sapiens
tgccactgcactccagcctgggcgacagagcaagaccctgtctcgaaaaaaataaatcaatcaatcagtgtaaatgccaaagcaattgttcttaaaaggtaccaaaaaaaaatctcaatatactaaattgtgatttaaaaacaatctttctaraatcccaaagtcacagaaataggactggtaaaggggaaaagtgaatgcatgctaaatgtttaatcacacatgggttctcctcaataggaaaaaatgagagtgagaacctcctgagtgctagcaagcagtgagggtgtgcttaaaacaaacaaacaacaaaaaagcataaaagccaaaataaagaggggcaaaaaaagacagtatgcatataaggtagaatagtacactgcattaaaaatcatgttctaggccaggcgtggtgtctcatgcttgtaatcccagcactttgggaggctgaggtgggtggatcacctgaggtcaggagttcaagaccagcctggccaacatggcaaaaccccatctctactaaaaatac

SEQ ID NO: 584262 - DNA, 611 bp, Homo sapiens
tgaaaccctgtctctactaaaaatacaaaattagccgggcatggtggcatgcgcctgtaagcccagctacttaggagactgaggcaggagaattgcttgaaccccagaggtggaggttgcagtgagctgagatcacaccattgtactccagcctgggcarcaagagcgaaactctgtctcaaaaaaaaaaaaaaaaaaaaaaagactatgttactggtttatgtatttactatacacaaatataaaaatgctaaatattaaaaaaattcagacataaatgttataaacattcaaattcagattcatacacaccagatgtatataaatatgacaaaggagaaaaatagcaaaatctcagtaaatatataaaaatcctttaataaaattcaacactcattatttaagaaaaaatttttttcttaaaaaaatcttagaaagctagaaataaaaagaaacttccttaatatggtaaagtgcatctgtcaaaaccctacagcagcaaatgtccataacagcacaacatgagaagcatccccctccagagcccggagcaagacagactcctgctagctcatccgcgctctcaatgccatcatcacttccggttaact

SEQ ID NO: 584263 - DNA, 611 bp, Homo sapiens
tgaaaccctgtctctactaaaaatacaaaattagccgggcatggtggcatgcgcctgtaagcccagctacttaggagactgaggcaggagaattgcttgaaccccagaggtggaggttgcagtgagctgagatcacaccattgtactccagcctgggcaacaagagcgaaactctgtctcaaaaaaaaaaaaaaaaaaaaaaagactatgttactggtttatgtatttactatacacaaatataaaaatgctaaatattaaaaaaattcagacataaatgttataaacattcaaattcagattcatacacaccagatgtatataaatatgacaaaggagaaaaatagcaaaatctcagtaaatatataaaaatcctttaataaaawtcaacactcattatttaagaaaaaatttttttcttaaaaaaatcttagaaagctagaaataaaaagaaacttccttaatatggtaaagtgcatctgtcaaaaccctacagcagcaaatgtccataacagcacaacatgagaagcatccccctccagagcccggagcaagacagactcctgctagctcatccgcgctctcaatgccatcatcacttccggttaact

SEQ ID NO: 584264 - DNA, 611 bp, Homo sapiens
tgaaaccctgtctctactaaaaatacaaaattagccgggcatggtggcatgcgcctgtaagcccagctacttaggagactgaggcaggagaattgcttgaaccccagaggtggaggttgcagtgagctgagatcacaccattgtactccagcctgggcaacaagagcgaaactctgtctcaaaaaaaaaaaaaaaaaaaaaaagactatgttactggtttatgtatttactatacacaaatataaaaatgctaaatattaaaaaaattcagacataaatgttataaacattcaaattcagattcatacacaccagatgtatataaatatgacaaaggagaaaaatagcaaaatctcagtaaatatataaaaatcctttaataaaattcaacactcattatttaagaaaaaatttttttcttaaaaaaatcttagaaagctagaaataaaaagaaacttccttaatatggtaaagtgcatctgtcaaaaccctacagcagcaaatgtccataacagcacaacatgagaagcatccccctccagagcccggagcaagacagactcctgctagctcatccgygctctcaatgccatcatcacttccggttaact

SEQ ID NO: 584265 - DNA, 449 bp, Homo sapiens
tctcaacagcttctcagctagaatctgtttaagcctgccaagctccttgggggaggggccaccagaaccacagctgtggctgccagctgtctgagccatttgagctctttaggggaggggcagcagccagcaagggatctcataactgcctaacacgctgagcyccctgggcaggggaagggtggcatccatctctaaagctccaggccatgcttttcccctgctggagccaggggggttggatgacttggttgcaagaggtgtctcccccagcccaacacaccggttgtggcagactgtggtcagagcgcctcttcaggcctgtccctgtcccatccttcctcaatgggtggggcctccctgcaggaactccaacacctacagccagaggctcagggacagagaaccctgacttccctgggcctgagcccctagtgggaggggtggcc

SEQ ID NO: 584266 - DNA, 630 bp, Homo sapiens
ctattactgggtatatacccaaaggaatataaattattctaccattaagacacatacacatctatgttcatcacagcactattcacaatagcaaagacctggaatcaatctatatgcccaccaatagtggattacataaagaaaatatgatacatatacaccatggattactacacaaccataataaagaatgagatcatgtccttttcagcaacttggatggagctggaggttatcatcctaagcaaattaatgcaggaacagaaagcaaatactacatgttctcacttataagtggaagctaaacatcaartacatatggacacaaagaaggaaacaacagacacctgggcctacctgatggtggagggagggaggagggtgaggaataaaaaattacctatcaggtagtatgcttattacctgcgtgatgaaataatctgtacaccaaacccctgcattccacaatttacccatgtaacaaacttgcacatgtacttcgtgaacctaaaataaaagttggaaagaaaagaaaaactcactgtgaatactgtgccatctattcttcccatccttggccaaggaattaacgtaattgggaagatttgagattatcaaaggtaaaccatt

SEQ ID NO: 584267 - DNA, 548 bp, Homo sapiens
gtttgctctgtcgaagatcagttggctgtaagtatttgggtttatttctggcttctctattttgttccattagtctatgtgtctatttttctaccagtactatgctgtttyggtgaatatggccttatagtatagtttgaagtcagataatgtgatgcctccagctttgttctttttgcttagtcttggtttggctatgtgagctcttttttgtttctgtatgaattttaggattgttttctctagttcttttattacttctattcaacatagtattggaagtcctagtcagagcaatcagacaagagaaagaaataaagggcatccaaatcgggaaagagaaagtgcaactgtcactgtttgcagatgatatgattatatgcatagaaaactttaaagactcctccaaaaggcccctagaactgataaataaattcagcaaagtttcaggatacaaaattaatgtaagcaaatcagtagttctgctatacaccaacagtgaccaagctgagaatcagatcaataactcaaccccttttacaatagct

SEQ ID NO: 584268 - DNA, 444 bp, Homo sapiens
ggtttgtcagttttgtttaacaaatcaatttttttgttttatagatcttttgttttctaaaatttcaattttatttctttcccaattttcattatttattttcctctactaattttgagtttgatttgctcttgctttttaaattcttttaggtgtaatgttagatagtttatttgaagtttttcttcttttttgatgtacgcacttacagctataaacttgcctcttattattgcttttgctgaatcccatagttttggtattttgtggttctattatttgtttcwgtacaattttagtttgcttcttaatttctttattgacccactggtcgttcaggagtatattgcttaatttccatgtatttgtatagtttccaaaattcttcttgatattaatttctagttttattccattgtagtcagagaagatgtttgatattat

SEQ ID NO: 584269 - DNA, 535 bp, Homo sapiens
ttcaagtgattctcctgccttagtctcccaaatagctgggattacaagcgcccaccaccatgccaggctaatttttgtatttttagtagagattgggtttcaccatgttggccaggctggtctygaactcctgacctcaagtgatctgcatgtctcggcctcccaaagtgctgagattacaggtgtgagccactgcacctggccatcaatgtagaattctatatccagtataatggtttgtctatctacctatatatttatatccatattcatgaatagtttttctcttaatttttaattgcataaagtacaatttataacactatattgttttattttataggtaatgtaacatgtatgaatataatatagcaaggatagtggggtaaatagaactatatttttcaagattcctatattaatacttgtgattcaatattgaatttaagtagattttgaagatttaaaaatgataattcccagcgcaacctctaaaaagaattcaaagaaacacagctataacagcaatagaaga

SEQ ID NO: 584270 - DNA, 452 bp, Homo sapiens
tgtgagtctctggccacaatatttttatcamccaatcaatgcataaccttgttttatatgtacttccatttaaattgaaatgaattgtacaattcaatcataaggcagagattgtcagaaaggataaattaacaagatccaactatatgttgtctgtcgaatacacactttagattcaaagatacaaatagattgaaaagaatagggaaaggaaacaccattaaacagtaacagtaagcataagagagttggagtaactatactaatatcaggcaaaataaacctataaaccaaaaatgtaaaaggaagttaaacagggatgtcctaaaatggtaaaagggtaaattcatcagtacaatataacactaataataggtacataaaataaacctgaaagacctgaaacaagagctgataatttgaaggaagaaataaacaattcaacaaaagca

SEQ ID NO: 584271 - DNA, 452 bp, Homo sapiens
tgtgagtctctggccacaatatttttatcaaccaatcaatgcataaccttgttttatatgtacttccatttaaattgaaatgaattgtacaattcaatcataaggcagagattgtcagaaaggataaattaacaagatccaactatatgttgtctgtcgaatacacactttagattcaaagatacaaatagattgaaaagaatagggaaaggaaacaccattaaacagtaacagtaagcataagagagttggagtaactatactaatatcaggcaaaataaacytataaaccaaaaatgtaaaaggaagttaaacagggatgtcctaaaatggtaaaagggtaaattcatcagtacaatataacactaataataggtacataaaataaacctgaaagacctgaaacaagagctgataatttgaaggaagaaataaacaattcaacaaaagca

SEQ ID NO: 584272 - DNA, 614 bp, Homo sapiens
catataccacatggactgccaagacatgccaaggcaaccacctctcagtcacagactccacggaacttgtgcctgcttgctctaaacccatcagttagaattccctgcaggaaaccaaactgggtcacactctggaccccaataagggctttggctcacaggtattttgctctctcttttgctcccctcccactaggtgagcatgtgtcctggatggctttcctcttctggttggctcagcaagacatgctgttccctgttcttgggcaaataataaaactgcttctggttatctaatgggctttgttgtgctgcctcctctgtgtctttccttactggcaatctcaatctaatactcctcccagtyggggcttttctagagagtggctgtcttggcttatggccacttaccagaaagagactttaagacaaaaaattagaaaatcacaacagaagttaagctggtataaattcaaattatagtgctataactttaggatgttaaatgtaatctctatggtaaccacaaagaaaatagctataaaatacacacaaaggaagtaattgaaacatttcactactaaaaaagtcaactaaacacaaaagaagacagt

SEQ ID NO: 584273 - DNA, 614 bp, Homo sapiens
catataccacatggactgccaagacatgccaaggcaaccacctctcagtcacagactccacggaacttgtgcctgcttgctctaaacccatcagttagaattccctgcaggaaaccaaactgggtcacactctggaccccaataagggctttggctcacaggtattttgctctctcttttgctcccctcccactaggtgagcatgtgtcctggatggctttcctcttctggttggctcagcaagacatgctgttccctgttcttgggcaaataataaaactgcttctggttatctaatgggctttgttgtgctgcctcctctgtgtctttccttactggcaatctcaatctaatactcctcccagtcggggcttttctagagagtggctgtcttggcttatggccacttaccagaaagagactttaagacaaaaaattagaaaatcacaacagaagttaagctggtataaattcaaattatagtgctataactttaggatgttaaatgtaatctctatggtaaccacaaagaaaatagctataaaatacacacaaaggaagtaattgaaacatttcactactaaaaawgtcaactaaacacaaaagaagacagt

SEQ ID NO: 584274 - DNA, 495 bp, Homo sapiens
gtatgttgtttcttgttttctctgaatattcagacattttgatttttatttaaagtaatctttatttcagattgttcccatttgaagtattaagtatattttctaagttttgggggattaaaaatatagttttaaacattgctttgttgaaaaaatattcacagaaagacctttatgctgattcttcatagtgtccttcttttgaactactagtccttttcatcatatatgtartatttctcacttttttcatgactagtagaaagcaattatatgtgttctatatcattttctttgggaaggtttctacaattatgtgtttacctgtccagtttgttagttttattccaaaagggctgaggagattttaagatatctggtgattgaaacttgttattttaaaattctacttacacataagaaatgagaatgaagctacagctaactttgtcttttgacagggagctttctcattctggtaaagacttgacaccc

SEQ ID NO: 584275 - DNA, 521 bp, Homo sapiens
atggactaagacagatagttttataaaaattaaactacagttggcattttgtatctgtaggtccacacctatggattcaaccaactgaagaataaaaatatttttaaaatatatatggccagtccgggcgcggtggctcacgcctgtaatcccagcactttgggaggtcaaggcgggtggatcacaaagtcaggagatcaagaccatcctggctaacgcggtgaaaccccrtctctactaaaaatgcaaaaaaattagccgggcatggtggcgggcacctgtaatcccagctacttggaaggctgaggtaggagaatggcgtgaacctgggaggcagagtttgcagtgagctgatatcctgccatagcactccagcctgggtgacacagcaagactgtcagaaagaaagaaaggaaggaaggaaggaaggaaggaaggaagggaagggaaggaaggaaggaaagaaagaaaaaataatacaaataaaaaatacagtataacatatatttatacagcattta

SEQ ID NO: 584276 - DNA, 406 bp, Homo sapiens
cacccgagtagctgggattacaggcacccaccaccacgcccagctaatttttctgtatttttagcagagatggggtttcaccatgttggctgggctggccttgaactcctgacctcatgatcctcccgcctgggcctcccaaagtgctgagattacaagcgtgagccaccatgcccagcctaaaaatcatctttcaatggcattgtcctttcaatggagatgctaagtcacttccataaattaaaatcccatgggtacaactgatacattgctgaactagtcttgcaacttcctgtgaagctataattatttaaaataaaaaggtttaaaaaagtaaagtgagatggrcaactttcacacttttgaagtttgctggaacaactgagattgtatattgtaagaagtt

SEQ ID NO: 584277 - DNA, 217 bp, Homo sapiens
tttgacagcaaagggttaagtcaactgatttttttctgtcaagagccagagaaatacttgatattcttagytgtgtttctgtaatagttagttaataaattacatgacaaaaacctgactatataaatctattggtctaactacgtatttgtaacttttatagtagtccagccctttcgttactttccctccttgtgctcttaaagccagccttgca

SEQ ID NO: 584278 - DNA, 484 bp, Homo sapiens
tgcatacttttataatattgcagttgttcagtacacctaataactcccaaacaagtttcatgctttgtcacttttattttttttgtacctgttaattcttcaggttgaaatcacttctacaaacactgcctcctggaatccagtgcagctttcaagggaaaaacacctatgttgtgtccttttgtaattattttctgatcctaatttaccttcttccttaccacccccacccaattgtgacatatatttctcttatgtgctcataatacttatctagtacattttagtatcacataggtatagamgtatttatacttgccttaaaactaaaggttaggatttatgccaattacatgagttggtttagtttaggaaataaattaatcttaatgtggacatatttgggtatctattttgtggaactgaaaaaagggctgaaaaaatttcttaaggtggaaaggtaatattgtggagattaaaatgt

SEQ ID NO: 584279 - DNA, 579 bp, Homo sapiens
aagacagtgagaagttgttttatgccagttgattaatcactagtaatagagtcctataattaaaaaaaawtaattttccaaccctctgattgaaaatcttttttgattccacattaaaatgcattaataaagtgcaatcctgttagcattatatgctagaatcccgacaacgtaatcatttatgttactaatctcatttctgtccattttacaggcccactcacttttctagttatgccaaatctcttcctgttttgtacagcaccacatgcatatccttgccttcatggcattgaacttactcatttaatcttttcatcccaaggaaaactcttcaatcttaacgaggtaatttaaaattgatttctttaaatactgaaatttttagatttatatatgaacatcttactgccactatcacgactatttagcaaaggtcctagcatgtgatgcttagtcactcaacaaacaaaaaataagaaagagaaaaaaagacaataaagtattcactgtaatgaaaatatttatgaatggcttacattttcatacaattatcttgttgtaataacatattttgca

SEQ ID NO: 584280 - DNA, 601 bp, Homo sapiens
ttgtaatatttttatgacacatttttgaacctgagtaaatattaagcataggttggcagtaagacagtgagaagttgttttatgccagttgattaatcactagtaatagagtcctataattaaaaaaaaataattttccaaccctctgattgaaaatcttttttgattccacattaaaatgcattaataaagtgcaatcctgttagcattatatgctagaatcccgacaacgtaatcatttatgttactaatctcatttctgtccattttacaggcccastcacttttctagttatgccaaatctcttcctgttttgtacagcaccacatgcatatccttgccttcatggcattgaacttactcatttaatcttttcatcccaaggaaaactcttcaatcttaacgaggtaatttaaaattgatttctttaaatactgaaatttttagatttatatatgaacatcttactgccactatcacgactatttagcaaaggtcctagcatgtgatgcttagtcactcaacaaacaaaaaataagaaagagaaaaaaagacaataaagtattcactgtaatgaaaatatttatgaatggcttacat

SEQ ID NO: 584281 - DNA, 526 bp, Homo sapiens
ttttaaagctctattattttaaatgagtattttctcaaaattttaatcatggaactatcttttgaaagcatattaatattttagagatattagtattatatttttaaatgctctgctatttttgtgattgatatttatgtacttgattcttatataatattgcattaactttaacgattttttttattcagttaagcttttcaagtatgttattgtytatacttatggaaaattttattacaacctgtccgatattcactctactaatatgagtattagattggcctaaacttttttttatttttttttttaagacagagtctcactttgtcacccaggcttgagtgcagtggcgccatttcaggtcactgcaacctctgcctcccagattcaagcaattctcctgcctcagactcctgagtagctgaaattacaggtgtgcgccaccacacctggctaatttttgtatttttagaagagatggggtttcaccacgttggccaggctggtcttgaactcctgacct

SEQ ID NO: 584282 - DNA, 563 bp, Homo sapiens
taaggagaatgtaatctctgtctcacccactagaataacttgaattagttcaaaatgtttggattataagcttccatattaataagtctaaggtgtcaatggcatgatttcctgctttttcaaattctggaacccaaggtactgtttgcttctaagtataatcatcactagaggaacttattgtgggaggacttggaatttctactcagttacactgacaattaacaccaaaatgtctgatattagtcttagacttcatagttcctagtcccttgaacgcttatctaatcataacaccaaacacacacataaatgatgcactgtactcaattaaaactttgaattttattttaaaayggactgggaagctatcatgtaagacaccctgcagtgacttgtagtgccaatcatcactctctatttaaatttattctgtttcaattttgcatatttggtttcttaaacaggagcacatatatggcatatcccatcccaggtcttgagttatacattgagaggtatattttccaggcacaattatttttctggcacaattatttttc

SEQ ID NO: 584283 - DNA, 627 bp, Homo sapiens
atcctggatgtctcctataaatggaggcatgcaaggtgcgggcatttgtggctggcttctttcactggccatggtgttttccaggttcacccacgttgtagcgtgagtcagcccttcattccttcacagggctgactacaaccccactgtatggagatacccgatttcatgtgttcatttatctgttgatggaaacttgggtagtttccacatcgtggccatcataaataatgctgctataaatgttcctgtacaagtatctgaagaccagtttcagctcttttgggtgtgagagatgcctgcaactcttttgggtgtgagatgcctgtagctcttttgagtgtgtgtgatgcctgcagctcttttgagtgtgagagatgcctgcagctcttttgactgtgagagatgcctgcagctcttttgggtgtgtgtgatgtctgcagytcttttgggtgtgtgagatgcctgcagctctttcgggtatgagatgcctgcaggtcttctgggtgtgagatgcctgcaggtcttctgggtgtatgagatgcctgcggctcttttgggtgtgagatgcctgcggctcttttgggtgtgagagatgcctgcagctcttctgtgtgtgtgtgatgc

SEQ ID NO: 584284 - DNA, 586 bp, Homo sapiens
atctctactaaaaaaaaatacaaaaattagccgggcatcgtggtgcatgcctgtaatcccagctactagggagactgaggcaggagaatcacttgaacccgggaggcrgcggttgcagtgagccaagattgcatcactgcacaccagcctgagtaacagagcaaggccctgtatcaaaaaaaaaattaatctatattttagaaaatttatgtgtggtaaagacctaaaactagcaaaagtgtggggattgagattctgtttctctgtgttgtttatctttcacagtagacaaatattttgcaggcagggattatgtcttatttgtcttgggaatcctaatgttcagctcactgagggatttaaaaaaaatgtaaatgaataaatgatttaatgttagaaacaagaagcctaaaatctctgcctttacagagaatactgttgagtaataggtactttaaagaaaaataaagacatttaaaaaatccttcatgaattgtgaagttttcaatagagtgttttagagttggggaaggagagcagagaccctcaagaactcataagaccatgaattctgttgaagtttcag

SEQ ID NO: 584285 - DNA, 547 bp, Homo sapiens
tgtgtgtgtgtgtgtgtgtgtgtgtgtatatctcacaatttctttatccatttgttgattgatggacatttgggctggttccatatttttrcaattgtgaattgtgctgctataaacatgcgtgtgcaaatatcttttccatataatgacttcttttcctctgggtagatacccagtagtaggattgccagataaaatggttgttctactattagttctttaaggaacctccacaccgttttccagagtggttgtactagtttacatttccaccggcagtgtagaagtgttcccttttcaccacatccagagcaacatcgatttttaaaaaattttttgattatggccatttttgcaagaataagggggtgtcgcattgtggtttacaaattgccaacaaacatgaaaaaatgctcaacatcactaatgatcagggaaatgcaaatcaaaaccacaatgtgattgcaatatacttctaatgttttgcttgaaaagaagttgcgattaaagttcacatgttgtatgtgcatctcctgttggtaatgtc

SEQ ID NO: 584286 - DNA, 580 bp, Homo sapiens
cagtgctccctgctcacattctgagatgttccaattcctaattatttcagaaaaaaaaaaaaaaaaaaacccacacccttctattcatcaatattctccttcccgcttccttgctgactgatcataagcagggtccttcttctgtctcaaatttatcccttatttttgaggccctcatgtcccattccccaggacgctcctctgtcaatcactaaccattgtagcttcaatcttttttgtcagcctcagaaccactcatttgctgtcatctcaaaaaggatgtgtttgcctyatgtccattccagctgccagtctttgattttccttccagagccaagctacctaaaataattaccaacacgtggtcccagtttttaacctctttttcattcatcaatgtctcaagtcccacctttccccccaaaactgctctccaagattaccaagtgaccattttgttgctcagctcaatggataaacttcagtcttcattgcattgactattctgtagacgtggatatactttcttttgttgggttggggtttttgtttttgttttgggaaacagctttattgagat

SEQ ID NO: 584287 - DNA, 639 bp, Homo sapiens
tgtttgtttttttccttgctgatttgtttgaattcattatagagaaactactaaccttaatcagagggttttctagttgcttataaccaaagaaccttgatggtacaatttttcttttggagttctgtctttcatatgtttagaaagatcttcccaagaagaattataaaaatgtttcttgaaattgtcctctagcttgtttagagcttttaatctaaacttcccaaattggtgttatactttgaaaataaaaagagytccatgtaattatgccaaatgaatttcatagacttcaccataaaactattttttcatgttaaccctattaatagctcacatgttagtgttccttcaaacacatttagaaaatgctattttctcttaactggaatttattttgtttgccaggaggtagaggtctacatttttaatccaaagaggtaaccaattgtcctgacaccatagattaaataaattttactttacctagtagtttgatatgttatttttatcagaaaccaaatttttatctatactcggggttgattctggtgtttatgtttcattgctctttctttcagttttggcacaagcaatacattgttttaatcattatggttttatcatgtttatttatcc

SEQ ID NO: 584288 - DNA, 591 bp, Homo sapiens
atgttaattcagatcgggtttaagtttccatagtcaactaaaaatgtcttttcataccaacagaaaaacatgggcctttctatcagtgacctgggttcttgtcccagcttgatctgactagccactagctatttattctccacttacatcaccacaggaaggagagaatttgcacttttctcctcagaagggcaaagcctaaaagcaatattttctattaccctctgcacccacatttccaccttctcatctgactggttggtttgcaaacaggaaactggcatgctctctgcaggcctgttgctgaagctcttttgaatattctggtatgttctctgacatgtggtgctaaaggggtaggttccacccctacaacagacccatagggtaggtctgtcaatatgtgaactacttggaagcttttcagaacacacatgtaggctacatcctttcctccagctttgatcaggaataaagctgtaatttggaactctggctggcttctgtgtcttacytctcaatagatttcaagtggaggagggaaatgaaggagtgttatttagtggctcccctaaactttagtatccctca

SEQ ID NO: 584289 - DNA, 598 bp, Homo sapiens
aatttataatcactctgtgtattttgataatcacaaaagcctgtgatttcatacaatgttagagacctgctatcttccttattaaaatgagaacaacactttttagaaaagttctccagattcttttcatatatctttcctatttataggaaatgtgaaatataagacatttgtatttgtaatagcataaagaattctgtatgtttacaatattactattcttaggaatatgctcttaccaatgagatactcatagagaagatataaagtaaaaatacaaataaatatgcatactctcagaaggttgggtttaccagtaatacatgtggaatacacgcatcacatgcatccattgggacaaataaaatgagtgctatccttttattatgatctaaattaaattcaaggaagtacagacctggcctgttgacaaactcagaattggaattaataataaaaacagaaaattaacttgaatttatgaactacagtatatagtttttttcagaaatgagtaccttcatttctttctatgatatcatatgctgaggatgactggtcatcaraaggccactaaaaatacaaacacatgaaagtc

SEQ ID NO: 584290 - DNA, 505 bp, Homo sapiens
gaatctgtagattgctttgggcagtatggtcattttcatgatattgattgtttcaatatattagcatgggatttgtttccatttgtttgtgtcatctatgatttctttcagcagtgttttgtagttctctttgtagaaatattttacctccttggttaagtatatacctagatattttatttatttattctattgcagctcttgtaaaagggattgagttcttgatttgattctcagctaagttgtttttggtgaatagcagcrcaactagtttgtgtacattgattttgtaacctgagactttactgaattcatttatcaaatctaggagtctttggaagagtttttagggtttactaagcatacaattttactattaggaaacagcaatagtttgacttcctcttttccaatttgatgccctttatttatttctcttgcctgattgctctggctaggacttctagtactgtgttaatcagaagtggtgaaagtaggcatcatt

SEQ ID NO: 584291 - DNA, 622 bp, Homo sapiens
atctgggatccagatcttatgaagggtgtattagttttctattgctgctttaaaagttgaccacaaatttagtggctttaaagcaaaagaaatttaatatcttacagttctggagatcagaaggctgaaatggcttccactgagttaaaatcatggtgtcagtagggctacattcctttctggaggctgtaggggacaatccatttccttgtatttttcggcttctagaggctgcttgcattccttggcttctatacccttcctccacattcaaagccagcagaatagcactttcaaatgtctctccgactctggcaycccgcttccctcttgtaatatctttgtgatcacattgggcccactggataatccaggatcatctttccttaacataattgcacctgcaagtcccttttgccatgtaagataacatagtcacaggttccagggaatagcatgtgaccatgtttgggggccatcatctggctactaaagaggacttccaggttgatattattctatcctattacttcccttgttttattcatgctattgaagatgtaataagatttttttgtttaatttagcttttgtttttacagcaattctacatgatgatgct

SEQ ID NO: 584292 - DNA, 371 bp, Homo sapiens
aggtctggaggctggtcctggcacccagcaatgctgagcaggcagccctgctctctctctcttcactcatggtgtcttctgttgcctctttattgaattttagtgttctctttcaaaaaatcttttcaacgtgtgaatgtttacctgatattttggttcatctttgtggcagaggctcatcctggctgccatctggaacccttccctccaaaatgttctaatttttttccttgctctgtttttctgtgttcctccaccacccccctttcactctctctctctstgtgtgtgtgtgtgtgtgtgtgtgtgtggtgagtggtgtatatgtgagtgtgtgtgtttcttctttatgtaatctcataatgtggaat

SEQ ID NO: 584293 - DNA, 422 bp, Homo sapiens
ctcatgcctgtaatcccagcactttgggaggtagaggtgggcggattgcttgaggccaggggttgaarccagcatggccaacatgacaaaataccacctccactaaaaatacaaaaattagcctgtaatcccagctactgaggaggctgaggcaggagaatcgctggaacccgggaggcgaaggttgcagtgacctgagatcgcgccactgcactcaagtctgaatgacagagcgagactccatctcaaaaagaaaaaaaaaaaaaaagaaacagaaaagaaaagagggtaattttggacttcggtgagggctcaaccaccttaaatatggcaggttgcaagcacacagcttgcagcacccattcaccaaatggagtaatgctaaccttctcaatttttgtcaaccataagacaaacaatcc

SEQ ID NO: 584294 - DNA, 564 bp, Homo sapiens
gcttctattaatgttaaatgagacttaaaaataagattatactgtttgctatttaattggatcttactcttctgtgaatgttattcttgaagccatgcacagagatgtttaagtttattgaaggtagagatcatgctttataattttactattgtctctaaagtaccttagaagcagtggatactaccaataaagagggtctggtttgccctcattagaccacagaaggaaaggaaggcaataycaacataggaacctgtcaaagaaaaatctgtcaaaggagaaatgtgcatattctacttcaatttatcctagcaacagaactttttgccttatgaaaaaaaaatggcattataaggtaactatagttaattatattgtatgatgtattttagaataactagaagagaagagtttaaatgttcacaccacaaagaaatgataatgtttgaggtgatggataagctaaatactctgatttcatcattacacaatgcatatatgtatcaaaacatcatactgtaccccataaatgtgtacaattattatgtgtcagttgaaaat

SEQ ID NO: 584295 - DNA, 545 bp, Homo sapiens
aaacacacgacaattacatacaaacttcttctctctatgctgtggatataaacggagttcttctaactaaaaaagtcctcttctcaaatttctggagatcctcaragttgtctaggactctaaaacttttctcatctagttctctaaatgttttccagcatcaacttgaactccaacttcagggccagatcctatcagcataaaacttgctatgtatggcatgctcaaagaaaggtgactgtcaggcaaaagcaaagctcagggaggcctggtagtgacagctcaagagggtgactgcaaactgcttgatgaatcttgctgagatctgtctttgcttttggaccggactttcatttaaaaaatggctgggtaacacattcaacacagagatgagcacacaaattgccctatcaaatggttttgggataatgaagtcttgcaggataaaagaggccaatgaagtatagccagaaacagcaaaaaaagcaaggggtgcaggcttccctgttttgccttggtagtggtgaaaagcataggaatgtgga

SEQ ID NO: 584296 - DNA, 545 bp, Homo sapiens
aaacacacgacaattacatacaaacttcttctctctatgctgtggatataaacggagttcttctaactaaaaaagtcctcttctcaaatttctggagatcctcaaagttgtctaggactctaaaacttttctcatctagttctctaaatgttttccagcatcaacttgaactccaacttcagggccagatcctatcagcataaracttgctatgtatggcatgctcaaagaaaggtgactgtcaggcaaaagcaaagctcagggaggcctggtagtgacagctcaagagggtgactgcaaactgcttgatgaatcttgctgagatctgtctttgcttttggaccggactttcatttaaaaaatggctgggtaacacattcaacacagagatgagcacacaaattgccctatcaaatggttttgggataatgaagtcttgcaggataaaagaggccaatgaagtatagccagaaacagcaaaaaaagcaaggggtgcaggcttccctgttttgccttggtagtggtgaaaagcataggaatgtgga

SEQ ID NO: 584297 - DNA, 545 bp, Homo sapiens
aaacacacgacaattacatacaaacttcttctctctatgctgtggatataaacggagttcttctaactaaaaaagtcctcttctcaaatttctggagatcctcaaagttgtctaggactctaaaacttttctcatctagttctctaaatgttttccagcatcaacttgaactccaacttcagggccagatcctatcagcataaaacttgctatgtatggcatgctcaragaaaggtgactgtcaggcaaaagcaaagctcagggaggcctggtagtgacagctcaagagggtgactgcaaactgcttgatgaatcttgctgagatctgtctttgcttttggaccggactttcatttaaaaaatggctgggtaacacattcaacacagagatgagcacacaaattgccctatcaaatggttttgggataatgaagtcttgcaggataaaagaggccaatgaagtatagccagaaacagcaaaaaaagcaaggggtgcaggcttccctgttttgccttggtagtggtgaaaagcataggaatgtgga

SEQ ID NO: 584298 - DNA, 545 bp, Homo sapiens
aaacacacgacaattacatacaaacttcttctctctatgctgtggatataaacggagttcttctaactaaaaaagtcctcttctcaaatttctggagatcctcaaagttgtctaggactctaaaacttttctcatctagttctctaaatgttttccagcatcaacttgaactccaacttcagggccagatcctatcagcataaaacttgctatgtatggcatgctcaaagaaaggtgactgtcaggcaraagcaaagctcagggaggcctggtagtgacagctcaagagggtgactgcaaactgcttgatgaatcttgctgagatctgtctttgcttttggaccggactttcatttaaaaaatggctgggtaacacattcaacacagagatgagcacacaaattgccctatcaaatggttttgggataatgaagtcttgcaggataaaagaggccaatgaagtatagccagaaacagcaaaaaaagcaaggggtgcaggcttccctgttttgccttggtagtggtgaaaagcataggaatgtgga

SEQ ID NO: 584299 - DNA, 590 bp, Homo sapiens
tgttccaacctctgcctgttacccagttccaaagttttttccagatttttgggtatattttcagcagtaccccactctattggtaccaatttactgtattagttcattttcatgctgctaataaagacatagtcatgactaggtaatttatacaagaraaagttttaatgtacttacagttccaagtggctggagaggcctcacaatcatggtaggaggcaaggaggagcaagttacatcttacgtggatggcagcaggcaaagggagagaacttgtgcaggggaactcctctttattaaactatcagatgtcatgacacttattcactatcacaagaacagcatgcgaaagacttgcccccatgattcaattacctcccaccggttccctcccacaacatatgggaattcaagatgagatttgagtggggacacagccaaaccaaaaccatatcaatgcccatgtttgtagtaaatcagatgaggttagcaggaagggaaatatgtagcctggctaggccttcatcacaagggaaccatggttgttatgtgggagggtggtagtgaggttaactccgcctggaatgcca

SEQ ID NO: 584300 - DNA, 632 bp, Homo sapiens
tgcaattacacttccttaactgttaattttttgcatggtgttttgtaatgatgagttttatctaggggttgatatggagtttttgtcttgctaaggctacattgagcttgttgaacctgagaaatcatatagtttatcacatcaaacaaaaataagccgttatcctccttttcttttggtccaactctttactttacagtcatccctcagtgtgcatggttccaggacccccttgggtcctggctgaggtggcatctgtcagttcatactgcctgamttgtagacccatatcctcttcccttttccttgtgtggacattagatccaaaggcccttggtgactaaccatctacctgacagcaacaacaccttcttatggtcttactttactgattatcagctcctactttatttctagtagttggtgatttttctctcttgcaagctcagctactcatttaaaataatgtttactatatatcatctttctcttttctgggtatttgtagcaggagagtttcaggtttaatagtataattttttattagacctggaactggttttagccacagtttacaaaatgttatatagtgtacatatgacttctgaattaaattagggtttaagcatttt

SEQ ID NO: 584301 - DNA, 538 bp, Homo sapiens
tccattataactatttaaatttctggctgggtgtgttggttcactcctgtaatcccagcactttgggaggcctagtcgggtggatcacaaggtcaaaagatcaagaccatcctggccaacatggtgaaaccctgtctctactaaaaatacaaaaattagctgggcatggtggcacacgcctgtagtcccagctactcgggaggctgaggcaggagaatcccttgaacctgggaggtggaggttgcagtgagccaagatcgtgccattgcactccagtgtggagacagagcaagactcgtctcaaagaaaaaatamatttctgattcatggtgttttcatctgcatgacgattgattctgaagaaaaattttcaccagaaataatttattctcgtttcataaattatttatattatttcccttctatggatataatccatcattttcagttcatttgataatatcttgttgtccttgtatacaaccattccccatgaaatacattatgatagataaataaaactgtactccattgtagc

SEQ ID NO: 584302 - DNA, 623 bp, Homo sapiens
ggccagttatacttcgcccctcgagacaaaatgatccaggaagcatgactactcgtactacaatttccagataaaattcaagtttcccattaaatgtgaatttcagatatacaatgaataacttttaagcataagtatatcccatgcaatattttttatatattttaactatttatttatctgtaattcaaatttaactgagaaacttatatttttatttgataaatcwgtcattcctaacttgtacctctccctccttttgaaaactttcatttcattttctctagagtttaatccttctgaagtaatagtttagtcttaataatgttccttattgtttcaagtttctttgcaggagttcctatgctgatacaaatgtatatgcacaagtacatatgggcatgtacctgtactcagaaaagtttaatgtcaataatgacaataacaaaaggctgaagaataaaacttccagccttcccctgaggatcttctgatacttttcaatgtcatccaacataaattcttcaaaaatggccaaaattgaaaaatttttgaaaaatttatgttggatgacatggaaattttcaatttttgaaattttcaatttcaaaaattgaaattat

SEQ ID NO: 584303 - DNA, 609 bp, Homo sapiens
ttgtttctttctttctcacttcgatgatcgaaacaagttggtcatttttaaatacttattacaatgttaggatgtgttttgtaagygtcatagtaaccacatagcaaaaatttataacaggtacactaaacataaaaagcaatgaatttgggggaagtttttttttctttttcatttatatgattaaaataagttggtcacttttaaatacttgttataactgtaggatttttttgtaaacctcatggtaaccacagagcaaaaatttataatagatacactaaacataaaaagcaatgaattaaagcataccatcagagaaaaaccacataaccagaaaggatgaaagaaaggaagagaggggttacacaatggctagaaaacaaataacaaaatggcaatagtaaggcattgcctatcaataattgaacataaatgaactaaattctccaattaaaaaacatagaagggtagaacatattaaaaaaactatatgctacctacaagaaattcactttatctataaagacatgcacaacctgaaagtaaagaaatgtaaaaagaaactccataccaatgaaaaccaaaaaagaacaagagtagctatac

SEQ ID NO: 584304 - DNA, 609 bp, Homo sapiens
ttgtttctttctttctcacttcgatgatcgaaacaagttggtcatttttaaatacttattacaatgttaggatgtgttttgtaagtgtcatagtaaccacatagcaaaaatttataacaggtacactaaacataaaaagcaatgaatttgggggaagtttttttttctttttcatttmtatgattaaaataagttggtcacttttaaatacttgttataactgtaggatttttttgtaaacctcatggtaaccacagagcaaaaatttataatagatacactaaacataaaaagcaatgaattaaagcataccatcagagaaaaaccacataaccagaaaggatgaaagaaaggaagagaggggttacacaatggctagaaaacaaataacaaaatggcaatagtaaggcattgcctatcaataattgaacataaatgaactaaattctccaattaaaaaacatagaagggtagaacatattaaaaaaactatatgctacctacaagaaattcactttatctataaagacatgcacaacctgaaagtaaagaaatgtaaaaagaaactccataccaatgaaaaccaaaaaagaacaagagtagctatac

SEQ ID NO: 584305 - DNA, 449 bp, Homo sapiens
tcagctttgcatgtcacagaatctctgtcactagaactctactgttgtagcacaaaagcagccatagaaaatacataaatgggctgggcacggtggctcatgcctataatcccagcactttgggaggccgaggtgggtggatcaagaggtcagaagatcgagtccatcctggctaacatggtgaaaccctatctctactaaaaatrcaaaaaattatctgggcgtgttggtggcatgtgactgtaatcccagctacttgggaggctgaggcaggagaatctcttgaacccatgaggcagaggttgcagtgagccaagatggcgccactgcactccagcctggtggacagggcaagactccttctcaaacaaaagaaaaaaaaatacataaatgaataagtgggactgtgttccaataaaactttatttataaccctaaaacttaaattt

SEQ ID NO: 584306 - DNA, 533 bp, Homo sapiens
gaaaacacagtgggcttgtcccattttttataagtttcaagctttccactcagctctgtacaaatgttccactaatttctctagtcaaattttttccttatgctcaaaatatctatattagactttttccgtctcttcaaaccttcaccatccatttcttattcttcactctcarctgataagacaagcagaataaaaaaccttttcctatttattacagttcccaaatttatcagttccactgtatttgtgctcatttccttattctttcagtataatggataaactgcctctgactttacttaagaccaacactttgttggatcccccatcttctttctcaaagattttacttctgaattatctcctctctgttctcataatcaatttctcattttttctaggtttatccccttagcatagtgatatgccttaataattcttattttaaaaattgaagagacctgtcattgaatctacaccaccatccagctgttccatgtttctctctttccctttagaacaaatttcct

SEQ ID NO: 584307 - DNA, 533 bp, Homo sapiens
gaaaacacagtgggcttgtcccattttttataagtttcaagctttccactcagctctgtacaaatgttccactaatttctctagtcaaattttttccttatgctcaaaatatctatattagactttttccgtctcttcaaaccttcaccatccatttcttattcttcactctcagctgataagrcaagcagaataaaaaaccttttcctatttattacagttcccaaatttatcagttccactgtatttgtgctcatttccttattctttcagtataatggataaactgcctctgactttacttaagaccaacactttgttggatcccccatcttctttctcaaagattttacttctgaattatctcctctctgttctcataatcaatttctcattttttctaggtttatccccttagcatagtgatatgccttaataattcttattttaaaaattgaagagacctgtcattgaatctacaccaccatccagctgttccatgtttctctctttccctttagaacaaatttcct

SEQ ID NO: 584308 - DNA, 290 bp, Homo sapiens
gtggtttgctatatttatctcaaagctatgcttttgaaaataagtacattctaccttgtcaatttaaaaagagaatttagctgcacttgattgaatatgctagacctggtatacagtgttcctatggagacaccaacatttaatgtgcacccccaatttttaagctaataaaacaatatgatgaagaagaagaagatgatgatgatgatgatgagaatccatccatcattccatcacaggtaacattgaatattttgtrtgctttaaattttttactcaacactcatgga

SEQ ID NO: 584309 - DNA, 561 bp, Homo sapiens
catatccagccaaactaagcttcataagtgaaggagaaataaaatcctttacatacaagcaaatgctgagagattttgtcaccaccaggcctgccctaaaagagctcctgaaagaagcactaaacatggaaaggaacacctattggggaacctktccccaatagtcacataggttcttttctattttcctaaacatcagctgggttgagaaataaagggacagagtacaaaagagagaaattttaaagccaggcatccgggggagacatcacatgtcagtaggttctgtgatgccctctgagccgtgaaaccagcaagtttttattagtgattttcaaaaggggagggagtgtacgaatagggtgtggttacagagatcatgtgcttcacaaggtaataatagaatatcacaaggcaaatggaggcagggagagatcacaggaccacaggactggggcgaaattaaaattgctaatgaagtttcaggcaccattgtcattgataatatcttatcaggagacagggtttgagagcagacaaccagtctgaccaaaaatttat

SEQ ID NO: 584310 - DNA, 561 bp, Homo sapiens
catatccagccaaactaagcttcataagtgaaggagaaataaaatcctttacatacaagcaaatgctgagagattttgtcaccaccaggcctgccctaaaagagctcctgaaagaagcactaaacatggaaaggaacacctattggggaaccttyccccaatagtcacataggttcttttctattttcctaaacatcagctgggttgagaaataaagggacagagtacaaaagagagaaattttaaagccaggcatccgggggagacatcacatgtcagtaggttctgtgatgccctctgagccgtgaaaccagcaagtttttattagtgattttcaaaaggggagggagtgtacgaatagggtgtggttacagagatcatgtgcttcacaaggtaataatagaatatcacaaggcaaatggaggcagggagagatcacaggaccacaggactggggcgaaattaaaattgctaatgaagtttcaggcaccattgtcattgataatatcttatcaggagacagggtttgagagcagacaaccagtctgaccaaaaatttat

SEQ ID NO: 584311 - DNA, 561 bp, Homo sapiens
catatccagccaaactaagcttcataagtgaaggagaaataaaatcctttacatacaagcaaatgctgagagattttgtcaccaccaggcctgccctaaaagagctcctgaaagaagcactaaacatggaaaggaacacctattggggaacctttccccartagtcacataggttcttttctattttcctaaacatcagctgggttgagaaataaagggacagagtacaaaagagagaaattttaaagccaggcatccgggggagacatcacatgtcagtaggttctgtgatgccctctgagccgtgaaaccagcaagtttttattagtgattttcaaaaggggagggagtgtacgaatagggtgtggttacagagatcatgtgcttcacaaggtaataatagaatatcacaaggcaaatggaggcagggagagatcacaggaccacaggactggggcgaaattaaaattgctaatgaagtttcaggcaccattgtcattgataatatcttatcaggagacagggtttgagagcagacaaccagtctgaccaaaaatttat

SEQ ID NO: 584312 - DNA, 561 bp, Homo sapiens
catatccagccaaactaagcttcataagtgaaggagaaataaaatcctttacatacaagcaaatgctgagagattttgtcaccaccaggcctgccctaaaagagctcctgaaagaagcactaaacatggaaaggaacacctattggggaacctttccccaatagtcacataggttcttttctattttcctaaacatcagctgggttgagaaataaagggacagagtacaaaagagagaaattttaaagccaggcatccgggggagacatcacatgtcagtaggttctgtgatgccctctgagccrtgaaaccagcaagtttttattagtgattttcaaaaggggagggagtgtacgaatagggtgtggttacagagatcatgtgcttcacaaggtaataatagaatatcacaaggcaaatggaggcagggagagatcacaggaccacaggactggggcgaaattaaaattgctaatgaagtttcaggcaccattgtcattgataatatcttatcaggagacagggtttgagagcagacaaccagtctgaccaaaaatttat

SEQ ID NO: 584313 - DNA, 595 bp, Homo sapiens
caccttcacagaattatactcagaggatgagaaggaagataaaataggacaggataaataaggtaaaagaaagatctcaatagctgagaactttcaaaatttctacaaaaatgattactaatatagccaggaaactcataaaatctgaaggaggggaaagctataacaaatatcttatttagataccttgtcatcacacttataaaaccaaagttaaaaagaaagtgttaaaagcaaccagagagaaagcagacatgttatgtgatatattggtgacaataatatggtgtaatggctgacttcttattcaaaataatggaggctgaataacaatggaataatacctgtaaagcgctaaaattttttaaaaaggaaaaaaaaatctgtcaaacctaaaattctatatccaaataaaataaaatatcattgaaaatgaaagttaaacaaatatattttcaggcacataaaggctgagagaattcaattataacagacctrcacaataaatgctaaaagactcctaattctgaaaaatctggatctaattacatatgtggtaggcaatttaataacgtcctacaaatctcacatattc

SEQ ID NO: 584314 - DNA, 584 bp, Homo sapiens
ttgtcatactcagttcatctgtcgtctccctcttttttgtcaaagtaaaaatctcagatgtgtcatttcacccttatttactttaggttatttctcagaaaaatggagagttctcatataacaatgatgctattatcaagcctaacaatattagtatcatctaatacctaacccataatcaaattaactcaattgtcccaaaacagccttttccaagtaggtttgtgtcaatcaggatcccgacaaagtccacacattacattggttgttatatctcttgagtctttttaatctgtctctgcttcctcactctcccccattaacacattagggaacatgttttgaataatttggaaacatagccatcgagtactcttaggaaagagtaatggggttgaggatggttaatttagcccatcctaacttctgtgagatttttttcagaatattttggatggttctctcacttttgttattaagcatttgggaagaagattctgcagcctactcaggtgagccaatctcatggcattgaacagagaagatatgttttcacrtctctaaccagtgtttttcatagtgta

SEQ ID NO: 584315 - DNA, 498 bp, Homo sapiens
gtctctacagttttcccccctctctttacccttctgctctgtatgttgggattctgacatctgtggactgtttcaccctgaatctcttgcctcttgtttccattcaagtttggccaatgagaggcactgacagaaaattgaagggcagacatgttatttgttccctcagttccttcccagcagggctaccagtccctcctggcttccttcctgtaggccacagttctccagtgatcctctcctgcarctgtggttggaattctggttgcaacttcctctcctgcccccgttaggcctgggaatggtaatgtgagagccaagtggcttcactgtctcctgtgggtccctcttcaccctctccaaacctttgtaaatcatccctttattaaactttccttagttactccattttaatgtgccatctgttttctgccaagaagctaatgatatctagggaactgtagaaatgaactcaggaggtaccactgggattattat

SEQ ID NO: 584316 - DNA, 647 bp, Homo sapiens
agtgggataatgcatactctggtctcagaaagaagaagagaaaccagagcaaatcgtgacacagatattgcttttaaccacataggattaagaatgtcattatttctcagagagaaaagatttgaaaatatatattattaaaattaattttaaatagtaatagtgcttaatttaactggatataattttcatactagtttatctcagtttccttggatgggctcctcagcttgcagacctcttgatggagaaaccacagcttactctgtgatgggcaattttatatatcaacttacatgggccacagatgcccagatatttggttaaacattatttctgagtgtgtctgtgagggtgtttccaggtgatatttgcatatgaatccataaactgtrtgaagtagagtgccctccccaacgtgaatgggcctcatccaattcaatgagggcttgcataaaacaaaaaggtagaggagggaagaatttgcagtctctgcttaactgcttgagctagaacatcagtcttctcatgccctcatactggggcttacaccaccagcttcctgggtctccagctgtcagaagacatctcttgggacttagcctccatatttgtgtgagccaattcctaaatattatacacataca

SEQ ID NO: 584317 - DNA, 531 bp, Homo sapiens
gctgtcgttggagattaaaaaatgmgtgttttcaagaaagaagaaatggtcacagtgtcaactaaaggagaggtgccaaagatatgaagcattgaccattggattgagcaacaaagatgacactgtttattttatcagatgatcagagaagaggggaggacaagattgctagtttgaaggaaagggtatgattaagtggatattacccttgatgatcttgatgttgacttccattgaaaaggaaagtgaaagatattagatataaggaggggtactttcaggtatgaaaaatgaggcaaggtctcacaaaagaaaagggaggaaatggaatcaagagatcatgtgatggggttgtacattgatgagctaaggtgactctcttcctttgaaactgaaaaagtagatgggggtgagaggagaatcacatttaaagctgtgcctattggagcctggaagattatgcaattgcctctgctaaggcagatataaacttcacttgttgaaagagggacaatggattggtagttgctt

SEQ ID NO: 584318 - DNA, 426 bp, Homo sapiens
atcctttttgcctgttattcctacctaccattacttcaacttggaagctcaaatatcccattcttcatgattctgctacctgatgttccagtcagaattaatattactccaattggttttccyataaaattatgttatgttataacctgatgtatatatatcaccttgaattacacccacttctgactcttcaattctagataagctacttggacatttcatactctgccccactctaaacccctcagtctcctacctaagtttagaaatagtagatgcttcctaaaaaagatgctgactgaatcactggaataattctatcactggaatcatttcataagaaggagtttgaccaggttgaatgataccttttatttctgattcaatgtgttacttttataaaagcacaacttaaatgttattaaa

SEQ ID NO: 584319 - DNA, 591 bp, Homo sapiens
ccctcaggggaactggctgcagatgatgtcagaaaggaggctgcctcctggagagcaagggacccgaatggctgcagcagaggtgggggtgcagggaggtttgggaaggaggggctaactccactgtccccagcagctaagcaggcagccaccttcggacccccggcagcccatctggctgtctgaccctttgccacctcctagctctcctggcgcctcaggagctgaggaggcacattcctgttgaggtcctccaaggacctgggatgggaggacagggaggaagggatcatccccacagggtcttacctcctggcagcacgtttcacagcttgcaaaatgagtcgctcttccaaacacattttgtgtagagtctcttagtcactttgcaaggtaggtattattattcccattttacaggaatggaaaaccaaggaaactagttatctgaggactcgaggctcagggagatacgaagtgacctgttgaaggtcattcagctrgtaagatgcagaacccacatttgaactccattgtaaagaacaggcttctctcattccacctgatttccagccatgaacaagagctgag

SEQ ID NO: 584320 - DNA, 609 bp, Homo sapiens
tacacacacacatatgcacacatacaaatacaatgaaatattattcagcctttaaaaagaaggaaatttgcaatgacttgaatgtacctagaggacattatgctaaataaagtaagccatgcacagaaagaaaaatactgcataatatcacacatatgtggaacttttaaaagtcaaactcataagaacagaaagtagaakggtggtaaccaggggctggagggtgggaaaaatgaggagatgttggtcaaagggtataaattttcagttataagatgattaagttctgaagatctaatgtacagcatggtgactacagttaataatactgtattctgtacttgaaatttgctaagagagtagatcttatgagttctcaccacaaaaagggtaactatgtgagctgatagagatgttaattagcttgattgtggtaatcatttcacaatgtattcatgtatcaaatcatcatgctgtacaacttaatatataacatttgtattggtcaatcgtacctcagtaaagttggggagggggcgggaagaaaacaattctgtgtgcaagatcatcaaaaagaataagaatatttagtaataaatttaaccaagc

SEQ ID NO: 584321 - DNA, 609 bp, Homo sapiens
tacacacacacatatgcacacatacaaatacaatgaaatattattcagcctttaaaaagaaggaaatttgcaatgacttgaatgtacctagaggacattatgctaaataaagtaagccatgcacagaaagaaaaatactgcataatatcacacatatgtggaacttttaaaagtcaaactcataagaacagaaagtagaatggtggtaaccaggggctggagggtgggaaaaatgaggagatgttggtcaaagggtataaattttcagttataagatgattaagttctgaagatctaatgtacagcatggtgactacagttaataatactgtattctgtrcttgaaatttgctaagagagtagatcttatgagttctcaccacaaaaagggtaactatgtgagctgatagagatgttaattagcttgattgtggtaatcatttcacaatgtattcatgtatcaaatcatcatgctgtacaacttaatatataacatttgtattggtcaatcgtacctcagtaaagttggggagggggcgggaagaaaacaattctgtgtgcaagatcatcaaaaagaataagaatatttagtaataaatttaaccaagc

SEQ ID NO: 584322 - DNA, 559 bp, Homo sapiens
tgtcaggtgaaactattattttgttattgtctttttttttgtttttttgaggtggagtttcactctgccgccctggttggagtgcagtggcacgatcttggatcacttgcaacctctgtctcctagtttcaagtgatcctcccacctcattctccctagtacytgggactacaggtgcagtacccccatgcccagctaatttttgtatgtttagtagagacggagttccaccatgttggccaggctggtctcgcactcctgacctcaagtgatctgcacaccttggcaccttggcaccctcttactgtctttatgcagaataaaatgaatttcaattgaatccccaaaccataatgacagatttggaattaggtgcaattaaggtttctaaaaatgaatttcaaggtgtttccaataaagtttgtttttttttccattcacccgagtgtatttgacagaaaattaagaagaatcaattggccatgaggtacggcaatgaggaaaactttagtttgaaaatgtgtcatttacctgcattggcattctttccagttgatgg

SEQ ID NO: 584323 - DNA, 615 bp, Homo sapiens
tcagcctcccaaagtgttgggattacaggcttgagccattgcacccggcctgtaacagattcttacactggcattggtgaaaactaaacaagtattcaaggttagtaatgtaatactcattgttcctgccatttagaagattaaccaaattgctagatacagttgtttaaaatcctatattcctattggaaaagttaaacacacacacacatatctaatattcttggttgcatgacaaacattaggaacagatacacagaatataatagtaagactaagaatctttctgtaactagaaactttcctgtgttgccttgtccattcttatttgtagcttgaattatacctggagatgaggcaaggaagagaagtgaagttttcatgggtttctaagacccatcaataaaacacaagttttttaggcagtctgtttcctgctactatgaccatttctgttgaatcaytcaactccatgggtgaaacagaatgggtgtactcaagcacagagttaatatttatgacacagaagtctccttatatgcttaaaaatttttaatagcctttaatttgtagagcaattttaggtccacagcaaaactgagcagaaggtacaga

SEQ ID NO: 584324 - DNA, 686 bp, Homo sapiens
atctccttgccctttcaggtatcctagcgggagctgggggacagaagccattgacaggaggccccagagagtcatctcctaccctctacagctcagctctctctctctgccttataggtctccaaggagcctccagctgtggaagctgcctcatttcagaggaccactttaaaaatgtgtcctgctttctccttttccccatgcacatttctttacaagactaatgtattaaaggttagttggtttcactgctgtttcttgtttaagtggtacttcattttgaatttgtgccaccagtttctttcattctttctggagtgttcagattatcttctcttgtctcactatttctcttcttcttcctttttaaatcttggtttgtaaatcatttgagttgttcttaacttagtttccctgaggtgatgtaattttgaaygtttagtccccttttctacttttactaacttattgctagcatttattttaaatttccctttagtattttactctttgggctttaactttgtttcccctctgaaatctcagttttctagtgttatatataactttgttgcctcagtctccctaatttgcacatggcagataggaaaggcaatgtagggatggcaatggagaggcgaactttccctcaaggaagagaggatggatttgtcctctgcttgcca

SEQ ID NO: 584325 - DNA, 602 bp, Homo sapiens
aaagaccagatcaaaatatcagttgcwtggctaggtgggactggctcacccctgtaatcccagcactttgggaggcagaggtgggtggatcacttgaggtcaggagttcgagaccagcctgaccaacacggtgaaaccccgtctctactaaaaaaaatacgaaaattagctgggtgtgatggcccgcacctctagtcccagctactcaggaggctgaggtagaagaattgctagagtccaggggtggaggttgcagtgagctgagatcacaccactgcactccaacctgggccacatagcaagactccatctcaaaaaaaaaaaaaaaaaaaaaatcaattacctaaatacatggagtttttttattttttcctccaaatgatccataataaatataataatgaaattaacagtgactagcagatttatataccacctattatgtggcagacagtattctctgtgttttacatgtacatatatgtatgaattcattcactgcttgcgactatccaattaggtcactatccaattaggtaatattacccttgttttataggtgaggaaacagactcagtggcttaagtaacttgccgaaaatc

SEQ ID NO: 584326 - DNA, 649 bp, Homo sapiens
aaatcagtgtttggcagatagtaagatatttkagcaggaactggtccatcattggtatccccagcatctaacacacccatgaatacatacaggatagctacttaacatagcgtggattccatacatgcttggagaataaatgagtgaatgaatgcatggataaaattggttgtaaccttcttctttttaggagttagaagaatttactatggtctgtttgagaacatagatgcaatttgcttttgttgaacactagggctggcactaggcaagtgaggtgtgtatggtgacaaacgtaaagaggcactcgctctcagcgtcccacaagtgcttccttaaattttgtgtcctagatgtctcacttttgtctccatggcccaggccctgttgaatgtgttaatcttacatgtatgactatgcttgatttctacctgtgtttgaaattccccctcaattttattttgaaaaatttcaaagctacggaaaagttgaaagaatagtacaagaaacactctgcataccttttacttatgatcatcaatagctaatactttgccacatttactatatctctttctgtatatatgaattcaaactttgtcctaattcactatagaaatcatgttgtaacctcgatacaacattctca

SEQ ID NO: 584327 - DNA, 649 bp, Homo sapiens
aaatcagtgtttggcagatagtaagatatttgagcaggaactggtccaycattggtatccccagcatctaacacacccatgaatacatacaggatagctacttaacatagcgtggattccatacatgcttggagaataaatgagtgaatgaatgcatggataaaattggttgtaaccttcttctttttaggagttagaagaatttactatggtctgtttgagaacatagatgcaatttgcttttgttgaacactagggctggcactaggcaagtgaggtgtgtatggtgacaaacgtaaagaggcactcgctctcagcgtcccacaagtgcttccttaaattttgtgtcctagatgtctcacttttgtctccatggcccaggccctgttgaatgtgttaatcttacatgtatgactatgcttgatttctacctgtgtttgaaattccccctcaattttattttgaaaaatttcaaagctacggaaaagttgaaagaatagtacaagaaacactctgcataccttttacttatgatcatcaatagctaatactttgccacatttactatatctctttctgtatatatgaattcaaactttgtcctaattcactatagaaatcatgttgtaacctcgatacaacattctca

SEQ ID NO: 584328 - DNA, 570 bp, Homo sapiens
tgctattggcctgtttaggttttctatttttttcatgatttattcttgctaagctgtatgtatctagaaatttacttcattgttctagattattcaattttttgcatataatagttcataatattctcttctgaatgtttttacttctgtgacatcaattataatgtctgttatttcatttcgattttgttattttaaacttcttttcattaatgtagctatagttttttcagttttgttgagctttccawaaataacaaacccttcattttgttgaaattttcgtttgctctactccttattattttattctttctgctaaccttgggtttagtttggcttactgtttttagtttctttaggtgtaaaggtaagttgttgagataatttttatttttaatgtaggcatttgcctctataagcttccctcttggtgtagcttttgctgaatcctatgtttttggtatattttatttttgttttatttgtctcaatatattttctaatttttcttttgattttttttgacgcttttaatgttcaatagtgtcttatttaattatgtttgta

SEQ ID NO: 584329 - DNA, 570 bp, Homo sapiens
tgctattggcctgtttaggttttctatttttttcatgatttattcttgctaagctgtatgtatctagaaatttacttcattgttctagattattcaattttttgcatataatagttcataatattctcttctgaatgtttttacttctgtgacatcaattataatgtctgttatttcatttcgattttgttattttaaacttcttttcattaatgtagctatagttttttcagttttgttgagctttccataaakaacaaacccttcattttgttgaaattttcgtttgctctactccttattattttattctttctgctaaccttgggtttagtttggcttactgtttttagtttctttaggtgtaaaggtaagttgttgagataatttttatttttaatgtaggcatttgcctctataagcttccctcttggtgtagcttttgctgaatcctatgtttttggtatattttatttttgttttatttgtctcaatatattttctaatttttcttttgattttttttgacgcttttaatgttcaatagtgtcttatttaattatgtttgta

SEQ ID NO: 584330 - DNA, 552 bp, Homo sapiens
attcttcttttggtttcattctttgtatattatgaataatgtggtgataaacatttttatacatgattcctgatgcacataaacacattttatttatttttttgtttttttatttcaatargtttttagggaacaggtggtatttggttacatgaataagtcctttagtggtgatttctgagattttggtgcacccatcacccgagtagtgtacactgtacccaatgtgcagtcttttagccctagctagcccaaccctttcccctgagtgtccaaagtccaatgtatcattcttacacctttgcatcctcatggcttaactcacacatatgaatgagaacgtatgatgtttgatttttcattcctgagttgcttcacttagaataatagtctctaattccatgcaggttgctgtgaatgccattattttgttcctttttatggctgagtagtattccatgtatatatatatatatatactacaatttctttatcaactcgttgattgttgggcttttgggccagttccatatttttgagattacaaattct

SEQ ID NO: 584331 - DNA, 552 bp, Homo sapiens
attcttcttttggtttcattctttgtatattatgaataatgtggtgataaacatttttatacatgattcctgatgcacataaacacattttatttatttttttgtttttttatttcaataggtttttagggaacaggtggtatttggttacatgaataagtcctttagtggtgatttctgagattttggtgcacccatcacccgagtagtgtacactgtacccaatgtgcagtcttttagccctagctagcccaaccctttcccctgagtgtccaaagtccaatgtatcattcttacacctttgcatcctcatggcttaactcacacatatgaatgagaacgtatgatgtttgatttttcattcctgagttgcttcacttagaataatagtctctaattccatgcargttgctgtgaatgccattattttgttcctttttatggctgagtagtattccatgtatatatatatatatatactacaatttctttatcaactcgttgattgttgggcttttgggccagttccatatttttgagattacaaattct

SEQ ID NO: 584332 - DNA, 329 bp, Homo sapiens
tggccttgtaatatagtttgaattttggaaatgtaatgcctccagatttgttctctttgcttagtcttgctttggctatgtgggctcttttttggttatacaagaattttaggattgtttttctagttctgtgaaggaatgatggtggtgttttgatgrgaattgcattgaatttgtagatttcctttggcagtatggtcattttcacaaaattgattctacccatacatgagcatgggatgtgcttccatttgcttgtgtcatctatgatctctttcagcagtgtttggtagcttttcttgtctttcacctctcagtattttattgtc

SEQ ID NO: 584333 - DNA, 550 bp, Homo sapiens
caatggcacgatctcagctcactgtagcctccacctcccgggttcaagcgattctcatgcctcagcctcccaagtagctgggactacaggcatgccccaacatgcctggctaattttgtatttttagtaaagacagggtttcaccatgttggccaggctagtctcgaactcccraccccaagtgatccccctgccttggcctcccaaagtgctgggattataggcatgagccactgtgcccggcctacacagaagtcttgtgtagtactcctgggaagccttctgaaagagagatttacaatactggagagatgaaaaatgtaggtttccaggccccatcccaaacctgctgagaccacattatgcacagtatcccaatggcgaaggcagggtaagaccaagcccaggagaagggtcaggacaatgtgattccatttaatgcagcaaatattactgacagccctgactacatgccaggtgcctggacttccctcagctactcaggaggctaagtcttgaggatcacttgagcccagaagtttgaggctgc

SEQ ID NO: 584334 - DNA, 534 bp, Homo sapiens
cacatatttaatacatacaatacacatagtatgtgaaagttgtagataccacgataaagtcattcttattggccctaatcaaattagaactaggaaagcacggaggagggcagctcatgcttgcatgtgtaagataaggattgtctcaaggactctctaaaatgaccctagaaggagtttcttcttcaggactgcagcaattcaagtaagatgctctggaaagaacacttgcccagtaaaggcatctccaccaatggactgatgccaattttatctttgagcctccagaaccaaagagctctattccaagcagcttagaggtactaatttttttgccactaaaagctgccctttatcctcccttatttgaatgcaccgatgkcttgtgatggctatgcttccagattaaaatcttttttgtacactcccaaataaactcatcatattctgacatatttttctctgatgtcctttttttttgtttctcattttttgttttttttaggttgatataatctggtgtcagaagtggcc

SEQ ID NO: 584335 - DNA, 466 bp, Homo sapiens
tagtgggaatgggagtgaactccaaggtgagaagaatgaaaccactttgcaactgtctgagcgactcctgcaggcctggctgggtgttcaagacttgcatggcaaaaacattagtaccctcatctatagttttactccagtgtttaagtgaccacggttgtaaataatgtagtaaataatgagtaaataattagggaaataatgagtcctaggatgaggagtacagatcccarttttgtttgtttatttatttatttatttatttttatttcttgagatggagtcttgctccgttgcccaggctggagtgcagtggcataatcttggctcaccacaacttttgcctcctgggttcaagtgattctcctgcctcatcctcccgagtagctgtgactacaggcacgagccaccatgccaggctaaattttgtatttttagtagagatggggtttcactatgttggcca

SEQ ID NO: 584336 - DNA, 466 bp, Homo sapiens
tagtgggaatgggagtgaactccaaggtgagaagaatgaaaccactttgcaactgtctgagcgactcctgcaggcctggctgggtgttcaagacttgcatggcaaaaacattagtaccctcatctatagttttactccagtgtttaagtgaccacggttgtaaataatgtagtaaataatgagtaaataattagggaaataatgagtcctaggatgaggagtacagatcccaattttgtttgtttatttatttatttatttatttttatttcttgagatggagtcttgctccgttgcccaggctggagtgcagtggcataatcttggctcaccacaacttttgcctcctgggttcaagtgattctcctgcctcatcctcccgagtagctgygactacaggcacgagccaccatgccaggctaaattttgtatttttagtagagatggggtttcactatgttggcca

SEQ ID NO: 584337 - DNA, 577 bp, Homo sapiens
attctcctgcctcagcctcccgagtagctgggactacaggcacccgccaccacgcccggctgataytttgtatttttagtagagacaggatttcactgtgttagccaggatggtcttgatctcctgacctcgtgatccacccacttcagcctcccaacaaaatctgcaagtcttatttgtcactgcaaattacagtgacatccaaaggccattaaacactgctgtgacccttccaagcactttacactctaataattatcaggagaaatggcattttcaaaacaaaagggctgtgtttgcctgctggggaccacatggggtttatgaggaagagcccagagtcacagagttgcagctctgggcacctgtcgtgacactttcactacttatgcaacttgggagggtcactgaagctcactgggcctcagttcctggggtcttaccttgtccaggtgttgtggagtataaacagagtaaggtgaaccttgagcacacttggtggcaccacatttgcttcagtacatgatcaattccatctaccaagaaatgtatcagggaccagctgaaatgtgaacag

SEQ ID NO: 584338 - DNA, 577 bp, Homo sapiens
attctcctgcctcagcctcccgagtagctgggactacaggcacccgccaccacgcccggctgatattttgtatttttagtagagacaggatttcactgtgttagccaggatggtcttgatctcctgacctcgtgatccacccacttcagcctcccaacaaaatctgcaagtcttatttgtcactgcaaattacagtgacatccaaaggccattaaacactgctgtgacccttccaagcactttacacyctaataattatcaggagaaatggcattttcaaaacaaaagggctgtgtttgcctgctggggaccacatggggtttatgaggaagagcccagagtcacagagttgcagctctgggcacctgtcgtgacactttcactacttatgcaacttgggagggtcactgaagctcactgggcctcagttcctggggtcttaccttgtccaggtgttgtggagtataaacagagtaaggtgaaccttgagcacacttggtggcaccacatttgcttcagtacatgatcaattccatctaccaagaaatgtatcagggaccagctgaaatgtgaacag

SEQ ID NO: 584339 - DNA, 577 bp, Homo sapiens
attctcctgcctcagcctcccgagtagctgggactacaggcacccgccaccacgcccggctgatattttgtatttttagtagagacaggatttcactgtgttagccaggatggtcttgatctcctgacctcgtgatccacccacttcagcctcccaacaaaatctgcaagtcttatttgtcactgcaaattacagtgacatccaaaggccattaaacactgctgtgacccttccaagcactttacactctaataattatcaggagaaatggcattttcaaaacaaaagggctgtgtttgcctgctggrgaccacatggggtttatgaggaagagcccagagtcacagagttgcagctctgggcacctgtcgtgacactttcactacttatgcaacttgggagggtcactgaagctcactgggcctcagttcctggggtcttaccttgtccaggtgttgtggagtataaacagagtaaggtgaaccttgagcacacttggtggcaccacatttgcttcagtacatgatcaattccatctaccaagaaatgtatcagggaccagctgaaatgtgaacag

SEQ ID NO: 584340 - DNA, 559 bp, Homo sapiens
ccagcaatcacacttatggacttttttttaaggaatggacacttgtgtctttacaaactctagtacaaaattgttcatagtagcattatttacactagaaaaaaatctgaataaaatttctcataatagactaatgaataaacaaactgtgatagaaccataacatgaaaaattactcaataataaaaattaaataaacaagaaactattgatctatctaatgacttgaatggatcacaaggaaattatgctgagtgaaaaagaagaatccaccatcaaaatgtcacatattttgcagttctatttatgtttgtatttatttatttatttatttatttatgagtatactttaagttttagggtacatgtgtacaatgtgcaggttagttacatatgtatacatgtgccatgctggtgcacgctgcacccactaactcrtcatctagcattaggtatatctcccaatgctatccctcccccctccctccatcccacaacagtccccagagtgtgatgttccccttcctgtgtccatgtgttctcattgttcaattcccat

SEQ ID NO: 584341 - DNA, 634 bp, Homo sapiens
cacactgccctggcagatgttttccatgagagccctgcccctgcagcaaacttctgcctgcacatccasgtgcttccattcatcctgtgagatctaggtagaggttcccaaaccccaattcttggcttctatgctctggcaggctcaaaaccacatggaagctgccaaggcttgatgcttgcaccctctgaagccacggccaaggtctactttggcctgtttcagccacggttggagtggctgggaaacagggcaccatatccgtaggctgcacatagcactgggactctgggcccagctcacaaaaaacactttttttctcctagacctccaggcctttgatgggaggggctgctgtgaagacctctgacatgccctgtagaaattttccccattgtcttggggaataacagttgggtcctcattacttatgcagatttcttcagtgggcttggattccttctcagaaaatggaattttcttttccagtgcattgtcaggctgcaaagttttcaaacttttatgctctgttttccttatgcctttaacaggacccaagtcacatcttgaatggtttgctgcttagaaatttcttccaccagataatcatctcttggaagttcaaagttccaca

SEQ ID NO: 584342 - DNA, 634 bp, Homo sapiens
cacactgccctggcagatgttttccatgagagccctgcccctgcagcaaacttctgcctgcacatccacgtgcttccattcatcctgtgagatctaggtagaggttcccaaaccccaattcttggcttctatgctctggcaggctcaaaaccacatggaagctgccaaggcttgatgcttgcaccctctgaagccacggccaaggtctactttggcctgtttcagccacggttggagtggctgggaaacagggcaccatatccgtaggctgcacatagcactgggactctgggcccagctcacaaaaaacactttttttctcctagacctccaggcctttgatgggaggggctgctgtgaagacctctgacatgccctgtagaaattttccccattgtcttggggaataacakttgggtcctcattacttatgcagatttcttcagtgggcttggattccttctcagaaaatggaattttcttttccagtgcattgtcaggctgcaaagttttcaaacttttatgctctgttttccttatgcctttaacaggacccaagtcacatcttgaatggtttgctgcttagaaatttcttccaccagataatcatctcttggaagttcaaagttccaca

SEQ ID NO: 584343 - DNA, 622 bp, Homo sapiens
taattttacgattttgatagatcttggtgttktttctacttttattgcactgtgctttgagactgtggttagtatgatttcatttttttttttaatttgttaaggtgtgctttatggacgactgtgtgttcagtcttagagtatgtgtcatgtgttgatgagaagtgtgtatattctgttgtcgttgggtggagttttccatagatgtctcttacatccaattagtcaaatgtctagtttatgtccataatttctttgttagttttctgcctcaataatctgtctaatgctgtcagtggggtgttgaagtcttgcagtattattgtgcagttgtttaaatctctccgtagatgtctaataatttgttttatgaatctagatgcttcgatgttgcgtgtatatatttaggacaattaagtcttgctggattgagcccttcatcattatgtgatgcatttatttgtccattttgattatcatgaatttaaagactgtttttatctcatataaggatagctatccctgctcttctttgttttcctttggcttgatatatatttatccatccctttagtttgagcctatgggtattcttacatatgagcatacaattaatgggttt

SEQ ID NO: 584344 - DNA, 585 bp, Homo sapiens
gaagaaaaaaggcactccaggggttggcccatttggctgctccagccttttgtgcatctttgttccagggagaacccagagggtctggtctttgcaaagtcaatgcagacattctgtgcaatacttgctgccttatttctggattttgacatccattacgcatttgcctgcaaaaaaataaaaaatcagtttgagtatcagaaagagtacgtgatgtgatttcaaggactttccacccccaaccaaagaccaaacaacaacaaaaaatccacttattgggaagtgaccctagagaraggttcctcctaatttaaattaatttttattctttctacaaatgcaattcaagtaaaaaagtgtgtctttgacatgaggctggaatttgcttcaaaataatccagtgactataagtaaaacaagactgattttgcatgtcattgctgaaggtgggtgctgggtacatggggggtttattctgattttctctctacttttatatgtgcttgaaagtttccatattgtttggttaataaaaagattataaaaatacaagtattagggccgggcgcagtggctcacgtctgt

SEQ ID NO: 584345 - DNA, 553 bp, Homo sapiens
attggaaaatctctagcaatttctgttgatgttagcaacaaggtttcttccttctcctccacttcttcctcttccttcttcctcttttgagcctagtgattttccttccaacctctaaatgttacttaaaagccatatgttctcaggttttgggtcaatttatacctgcaatttctcacatctgctccatctatgaacttcatctcttcaagttctcaaaggtctaggatttttaaaagttgctacacagtaacaattttttaaaaattaaaatttggccaggcatggtggctcacgcctgtaatcccagcactttgggaggctgaggcgggtggattgcttgagcccaggagttcaagaccagcctgggcaatgtggtaagatcttgtctctaccccccccmaaaaaaaaatttactggtcttggtgctgtatgcctgtagtcccagcttcttgggaggctgaggcaggaggatcatttaagcctaggaggtcgagattgcagtgagccaagatgcaccactgcactctagcatggccaagagagcgagaca

SEQ ID NO: 584346 - DNA, 492 bp, Homo sapiens
tactgacatttttctaagcctcattagatgagtgacaaattgaatatctcaaaagagaaaggggataatacctgtgtcaaattgcgcattttaattcatataaaaatatttaattatcagttctaataattaaaaaacacttataatcaatctcaacaatctttgccagaattttgggtttagtggtattttacaggatttcagaatattctcttttattacttaagctagggcttaagaatttggggtgaggtggatttgagataaatatatatttataaatattatagataaatatacrtatgttttatatatatatatttcatttaaactcatttaaaaaaatagacattccctaaaaaggtcatctctgggatgacaaagcaggataccctgcatcataatcagtttcacacctttacttaccaaattttagttaacatagaggtattccatatataaaacaaaaaaaaaaatttgttttaatataga

SEQ ID NO: 584347 - DNA, 492 bp, Homo sapiens
tactgacatttttctaagcctcattagatgagtgacaaattgaatatctcaaaagagaaaggggataatacctgtgtcaaattgcgcattttaattcatataaaaatatttaattatcagttctaataattaaaaaacacttataatcaatctcaacaatctttgccagaattttgggtttagtggtattttacaggatttcagaatattctcttttattacttaagctagggcttaagaatttggggtgaggtggatttgagataaatatatatttataaatattatagataaatatacgtatgttttatatatatatatttcatttaaactcatttaaaaaaataracattccctaaaaaggtcatctctgggatgacaaagcaggataccctgcatcataatcagtttcacacctttacttaccaaattttagttaacatagaggtattccatatataaaacaaaaaaaaaaatttgttttaatataga

SEQ ID NO: 584348 - DNA, 547 bp, Homo sapiens
acaaatgataatgagatacacaaaacatttctggaaagttctgcccgctatacggtattcaccacataccaccacacaccatacaacagatggtttgctactacattgtttctttgccattctaactcttcttggtttcccccaattttttactctcawagtgtagtaagtaaattcaccaatgaagtttataaacaataaattacaatttcttttactaaattgttccatttcattcctaaggatatgttaaaatttcacttctggttctaaaactgccacctgaaaagatttataaatgtatttttagttataaacttgagatctctttttctcatttccttcctccctctttccttcctccttccacccttccttcattttctccttgccatctctctctctctctctctctttccccaattctgttactcttccagtcttccagcaggattcaaatccgtgctttaaataatataagttggcctgatggctacagtcctcaggcttgtggggagaccaagggctcttgctaagtcccatgttt

SEQ ID NO: 584349 - DNA, 455 bp, Homo sapiens
attataagggacaaaactcaagtgacaaaacatgtagcaagaaaatagaagctttgagagagttaaaactgcttatcagtttccaaaacaaastggggctttgttagtttattggaaatatttcatggggatatctgatttcactagatgcttgtttctgactttaggaagtttacattgacttctaaggggttcgagacatctaacaccttatttttccctcctttatgattttgctgtaatgctgttttcatcaatatatattccatagattttataatataaatatatttaatttggcatttgttttttatgaaaatgcaatgaaggaagacttggggactcagttaaataaattagcttaagattattttaataataataatgttttaatcatgtctgggcttagaagggatagtctaatgtacaaatatatcacaagagaaaaaaaggag

SEQ ID NO: 584350 - DNA, 455 bp, Homo sapiens
attataagggacaaaactcaagtgacaaaacatgtagcaagaaaatagaagctttgagagagttaaaactgcttatcagtttccaaaacaaagtggggctttgttagtttattggaaatatttcatggggatatctgatttcactagatgcttgtttctgactttaggaagtttacattgacttctaaggggttcgagacatctaacaccttatttttccctcctttatgatkttgctgtaatgctgttttcatcaatatatattccatagattttataatataaatatatttaatttggcatttgttttttatgaaaatgcaatgaaggaagacttggggactcagttaaataaattagcttaagattattttaataataataatgttttaatcatgtctgggcttagaagggatagtctaatgtacaaatatatcacaagagaaaaaaaggag

SEQ ID NO: 584351 - DNA, 455 bp, Homo sapiens
attataagggacaaaactcaagtgacaaaacatgtagcaagaaaatagaagctttgagagagttaaaactgcttatcagtttccaaaacaaagtggggctttgttagtttattggaaatatttcatggggatatctgatttcactagatgcttgtttctgactttaggaagtttacattgacttctaaggggttcgagacatctaacaccttatttttccctcctttatgattttgctgtaatgctrttttcatcaatatatattccatagattttataatataaatatatttaatttggcatttgttttttatgaaaatgcaatgaaggaagacttggggactcagttaaataaattagcttaagattattttaataataataatgttttaatcatgtctgggcttagaagggatagtctaatgtacaaatatatcacaagagaaaaaaaggag

SEQ ID NO: 584352 - DNA, 642 bp, Homo sapiens
gccaacaaattcatgcatccatttatgtattagacaagyttttaatgagtgaattttggctcattatttatttcccctcaaaaatcccacagagttacacttaaacagcttttgaaggaaagactggagtatacataatgagttgacctaataatttagaaattatttggaagtatgactcaaatcatttgtcatttcagataaaccatttcccttctttgcttggcataaatgaaattattagacatataatagcataatattttctatgtaaggatattgcaaaactgaaaaaaaaaatctaaccacactcatggctttgaggagaacctggattcagttcttaaagaagtcaagtaatagacattatatgcagtctacattaagcccagttccatagcttaacaagtctcactgatagcttagcactaaagatcaacttaattttaagtaactgctccttaaaggagcagtcagcatcatttgttacattaagcaaaccaaagtgaggaatgttcctgtaacttaccatatatttggatttaattgcagttggtggtaggagtcaaagtcatctctcaggataatgctgtcactatgtatttcagctgaaagaaaaaggaagtatttaggaaagaaata

SEQ ID NO: 584353 - DNA, 547 bp, Homo sapiens
accctgtctctactaaaaatacaaaaatttgccrggcatggtggggggcctatagccctagccactcgggaggctgaggcaggagaatcacttgaaccccagaagtggaggttgcagtgagccaacattgtgccattgcattccagcctggctacagagcaagactctgtcttaaggaaaaaaataaacataaaaataaaaataaaaataatacacgggatatagacccagacatgcccctctggaagtgaaactgttgattttttgctgctttccctgccctggtagagtgaccatggagcagctccaggccagaacaccagagacatccactgttcttacttaaagttgagtggtttttccatcaataaccacttcttaattgtttgtatgcctttgatcaatttccagaaccctgaaatgattgcttttgaaaatgttgccctgtttgtcattggttttcaggagtatttgctgccatatggaagttccccacgttttgaaagaaacaaaaaagtctatgaacaaagaaaacattaagtgtata

SEQ ID NO: 584354 - DNA, 547 bp, Homo sapiens
accctgtctctactaaaaatacaaaaatttgccgggcatggtggggggcctatagccctagccactcgggaggctgaggcaggagaatcacttgaaccccagaagtggaggttgcagtgagccaacattgtgccattgcaytccagcctggctacagagcaagactctgtcttaaggaaaaaaataaacataaaaataaaaataaaaataatacacgggatatagacccagacatgcccctctggaagtgaaactgttgattttttgctgctttccctgccctggtagagtgaccatggagcagctccaggccagaacaccagagacatccactgttcttacttaaagttgagtggtttttccatcaataaccacttcttaattgtttgtatgcctttgatcaatttccagaaccctgaaatgattgcttttgaaaatgttgccctgtttgtcattggttttcaggagtatttgctgccatatggaagttccccacgttttgaaagaaacaaaaaagtctatgaacaaagaaaacattaagtgtata

SEQ ID NO: 584355 - DNA, 580 bp, Homo sapiens
tgctaggttaaatagtagatccacttttagttctgtaaggaatctccatactgttttccatagtagttgcactagtttayattcccactggcaatgtaaaagtgttcccttttcaccacatccaacatctatttatgattttttaatcatggccattcttgtaggggtacagtggtatcacattatggttttgatttgcatttccctgatcattagtgatactgaacatttttaaatatgtttattggccatttgtatatcttttgaaaattgcctattcatggccaggcacggtggcttatgcctgtaatcccagcactttggcaggccaaggcaggtggattacctgaggtcaggagttcaagaccagcctggccaatgtggtgaaaccccgtctctactaaaaatacaaaagttagtcaggcatgatggtgggcaccagtaatcccagctactcaagacgctgaggcaggagaattgcttgaacccggtaggcagaggttgcgatgagccgagatcatgccattgcactccgtccagactgggcgacaagagtgaaactccatctcaaaaaaaaaaa

SEQ ID NO: 584356 - DNA, 580 bp, Homo sapiens
tgctaggttaaatagtagatccacttttagttctgtaaggaatctccatactgttttccatagtagttgcactagtttatattcccactggcaatgtaaaagtgttcccttttcaccacatccaacatctatttatgattttttaatcatggccattcttgtaggggtacagtggtatcacattatggttttgatttgcatttccctgatcattagtgatactgaacatttttaaatatgtttattggccatttgtatatcttttgaaaattgcctattcatggccaggcacggtggcttatgcctgtaatcccagcactttggcaggccaaggcaggtggattacctgaggtcaggagttcaagaccagcctggccaatgtggtgaaaccccgtctctactaaaaatacaaaagttagtcaggcatgatggtgggcaccagtaatcccagctactcaagacgctgaggcaggagaattgcttgaacccggtaggcagaggttgcgatgagccgagatcatgccattgcactccgtccagactgggygacaagagtgaaactccatctcaaaaaaaaaaa

SEQ ID NO: 584357 - DNA, 551 bp, Homo sapiens
aaattatatatgaaatagaaaattatttaatattttcatatagtgttaatacaatttgatttcagtatatayaaaaacagcgggtcacttttggaattgatgaaccttttaattatgatacattacatatattttaaacaaacatttgccattatgacaggtgacatagacacatttatctataaagcattaattttaaaaagaaaattgttggatgcttgagaagtaggaattttatgtgtcaatgatgtccttttgttttccattaaagggaacctgctgtatgtataaaaacatttttgagtctctgtttctaaatagtgttttctcagttagttttgaaaatcacagtctcaaaggctagcattattcaaaggataaaaattaaacttggtattattgaatgtagtttagtgatatgcagtaggggctcaaaatagcagtggcttacacagatagaagttctttcttatctgagtgaagcatgaagaattgcactcatccttcactcacatggtgatatggtttggctctgtgtccccacccaaatc

SEQ ID NO: 584358 - DNA, 551 bp, Homo sapiens
aaattatatatgaaatagaaaattatttaatattttcatatagtgttaatacaatttgatttcagtatatacaaaaacagcgggtcacttttggaattgatgaaccttttaattatgatacattacatatattttaaacaaacatttgccattatgacaggtgacatagacacatttatctataaagcattaattttaaaaagaaaattgttggatgcttgagaagtaggaattttatgtgtcaatgatgtccttttgttttccattaaagggaacctgctgtatgtataaaaacatttttgagtctctgtttctaaatagtgttttctcagttagttttgaaaatcacagtctcaaaggctagcattattcaaaggataaaaattaaacttggtattattgaatgtagtttagtgatatgcagtaggggctcaaaatagcagtggcttacacagatagaagttctttcttayctgagtgaagcatgaagaattgcactcatccttcactcacatggtgatatggtttggctctgtgtccccacccaaatc

SEQ ID NO: 584359 - DNA, 584 bp, Homo sapiens
gtagcttaactccaaagtttctttgttgattttctgtctggatgatctggccattactgagtgtggggtcttgaagtccactactattcttgtattgcactctgtttccatttagatatattaatgcttgctttatatacttgggtgctctgatgctgaatgcatagatttttataattgttatgccctcctgctaaattgaaccttttatcattacatagtgaaattatttgtttctttacaattttagatttgttgtctattttatctaagtataactactcctgttccttttatgtttccatatgcatggagtatcttttttcatctctccacttgcagtctatttgtgtctctggaggtgaggtgggttccttgtaggcagtgtattgttgggtcttgtttatttattcagacactctatgaatttttaaagttttacattatttttctttctcagactgttttttataaaaatactctgtgacttttaataggagaatttagtccatttacattcaacattgttattgatcagtaaggactttctactgmtattttgttgcttatttcctgattgtttc

SEQ ID NO: 584360 - DNA, 515 bp, Homo sapiens
tcacttaatgtttgatacagtctacttaaattacaataattctgaagccttttctgacttttactctcttatcctttggtgaatgagaaataactgacatgtgagtttgacagtagaactgagcaggtgttgtgcagcttcttactatttttatttgagacctgcctgcatgaataaagaacatggtccggtttgtattttgtcattcttaagcatcctaaattgcaatgaaggttttcagtactgtctatggcccccataggcaagcttgcttaattcacaaaagcaatgttagcaactgaccatttaaattctgttgtaattgtgcttgaaaacaaaacgtattgaatgtaatcagaaataatataaccagtatatccaagatatttatgtttaggcagcggggtttagcaaataaggcccatgtgtcacattttcttggcagttcgtagtgggatatttgaacttggtaaattttctttttctttrgttggggaagaaagggtgtgttagat

SEQ ID NO: 584361 - DNA, 651 bp, Homo sapiens
aatattaaaaattctagccagagaaactaggtaagaaatgaggtagaaaaagaaacatgtgaggtacttagaggtacctctacttatgtgaggtacttagagtatttataatcatagagacagaaagtagaatggtggttgccaggtgctgaaaggaggggaaatgagaaagtattgtttcctttttgtttttcttacatagtttattacctagagaaatacaaacaaaaracattcaaattagagaaatagaaatagaattatctttattcacagaagaaatattcttatttgtacaaaatcctaaagattctgcaaaagacctgttagaactaacaaataattcacccgaagttgtaggcaacaggtaaaatcattatatttctagacactaaaaataaacaatttgagtagaaatttataaaaataatttcatttatcatagcatacaaataataatatacttgagaagtaacttaaccaagaaggtgaaagacttgtagaatgaaaattatgaaacattggtgaaagaaattaaagaagacataaataaatagaaatatatttcatatttatggattggaaaacttaatatttttaagaatattgccaatcctacctcaagttatctgcagatttaatgcaattcct

SEQ ID NO: 584362 - DNA, 481 bp, Homo sapiens
ttttgtgtgattctttatgtaagtatcaactgcataaattaaaacatgaatgtaatacttaatattcttttaaagatttttattaaaatggtggccttarcatgtctatccaaattgatagataaatagaaagtggttgagagtttaggttctggagccagactgagttttaatcacttttctaccttttcttagttatgtgattatgaggaaataaattagttgatatttctatgcctctgaatcttcacctggttaataggaataatatttttatcatttttagatttttacattaaagggttcaacaaaaattgtgaaaagcacttatgacagtgcctggaacattgtacttacataaaaagtaatatgccttttcattattacctatgcaatttttcacatagcctaatttatacacatatattcacaattgttagaataatcttctttggctttcttttttctttctttttttttt

SEQ ID NO: 584363 - DNA, 369 bp, Homo sapiens
gaactctccacccaaaaacaacaaagtatacattcttctcaatacctcatgagaaatactctaaaatggatcacataatcaaaaggaaaatactcctcagcaaatgcaaagtaactgaaattataatcatcagtctcttggaacctaatgccatcaaattaaaaatcaagatgaagaaattcactcaaaaccatgcaattaaatggaaatggaataacctgctcctgaatgrcttttaggtaaataatgaaattaagatagaaatcaagaacttctttgaaactaatgagaacaaagatacaacataccagaatccctgggacatagccaaggcagtgttaaaagggaaatttatagcactaaatgcct

SEQ ID NO: 584364 - DNA, 695 bp, Homo sapiens
ttccctttgtaggcgaactggcctttctctctgactgcctctaacattttttttcccttcatttcaaccttggagaatctgataagtatgtgtcttggagttgrtctcctcatagagtatcttattggggttctctggatttctcgaatttgaatgttggcctctcttgcttggttagggaaggtttcctggatgatatcttgaaatatgttttccaaattgattccattctcctcatcccttttgggtacctcaattagtcatatatttgagttttttacataactccatatttcttggatgttttgttcattcctttccattattttttctctattcttgtctgcctgtcttatttcagaaaaacagtcttcaagctctgagcttctttcctttgcttggtctattctgctattaatacttatgattgcattttgaagttgttgtagtgtgtttttcagctctattacattggttttgtttctctctataatggctattttggctgtaagttcctgcattgttttatcatgtttcttatcctctttgcactgggttacaatgtgcttctttagctcagtgaagtttgtttttattcacactctgaagcctacttctatcatttcagccatctcagcctcagaccagctctgaacccttgcttgagaggtgttgtggtcatttggaggaaaggg

SEQ ID NO: 584365 - DNA, 650 bp, Homo sapiens
atgtgtattaacaaaatatattaaaaaactacttcatctgaaatgagttaaataaagtactcagaatgtcttaagagttcaaaaatttctgcatttctgatttccaagattaaactcaacaactcccaggtgttaaaagtcaaattcatctgtaactagaggatatttttaggataactgtgacttccaacaaagtataaagaaattataagtcatctatttcaagtcatctattatatttaaattataagtcatctattatatttaaagaaatataattaattttcagtgctcactttcaattaagttgtgtgtgtgtgtgtgtgtgtgtgtgtgtgtgtgtgtatactaatggatataaaggcaaaataaagtctgtggtttgttttacaataatttgggataaaaaattaagtatagawgaagcaaatgtggtaaacccataagaaatcacaacatgtaatagcaaaagtcccaaaataggcttttagtgtttaaagattaggatggaaggaagtttcacccaggattcagtctgtcagttagatccatttcttttgcctgaatacaaagaaagactataaagttacctttaaaaaatatggtgtaaaagtcttgaggttagattttctatcctagttgaggaaatg

SEQ ID NO: 584366 - DNA, 643 bp, Homo sapiens
atccccttgaggtaaaattttctaaatgttaatgaaaacttagtttttacaaaagtaacaaacattataatatggccttggtaggaataagagtgtaataatgtacatttgacaaaacaaaacaaaacatagtagtagagacaatgctatatgttcattaaacccttacttattttatgtttttcttcaaggacaaatagctaaaccatactggtcagctttattgcatccaagtgctgctatgtgattactgctcccaatgaaaagtgggagaaagtggattgtcatgttcaggtgaagataatgaagagagttaaaagtacctacgtcttctccactctctctttccttccccatttaccacctcagtgatgcagatgcccctggagccttctgtggaaggaacctgagtcttcaaatgaatgcaaacatcaaagatctccgagccacactgcactttgaggtgagcaaaaaacaatgttttattgtgctaatccacaagatcgtgggctatgtgttacagtagccaggttatgcaccttcaataatatcrgggtaatttgaatacatctgaatactctttcagctaatcttctcaaataatagaaactatctttattcatgatacatttcatgataaata

SEQ ID NO: 584367 - DNA, 590 bp, Homo sapiens
tagtttattttagaaattattattttatatttgctraatattttattggttttcagtgtttcttcctatagtttataaggaatttagagtttgttttcagtaaccttcacaactctaattcatctagagttcccagtaaaattgtgacagtgcccatattactttttacaaaagcaatgaaaaagagctgaaatgcctcctgaccattttccaaactgatttatctaaaagccacacaaatgaacacatttcccagagaaatcaagtttcttataagagatatctggcactgacatattattcaataaaactaagtacttcctaaggcaacctatctagagcatttctcaagaggactacattactaactgctgaaagaatcctccgcaaagtaaacaagttcacaaaatcaagaatagcaatgaaaacatatctatatctattggtgctttgttttaaagtcaggattaaatacaaaaacttacttacattgcaagtatgtctttatgtattcaggtgcatattatattgtgccttatttccaattttgttactgatttagaaatataaagattatagtttttatattt

SEQ ID NO: 584368 - DNA, 525 bp, Homo sapiens
gtgagaccaaagcatcagacaaccaataaagcaaaagctaagtttctacttctcagtaaaaacttacaagccagaagggattttaatttatctttagctttyttaaacagagcaactgtcagccaagaattttgtattcagcaaaactaattttcataaatgaaggagaaataaagtcattttcagacaaacaaatgctgagtaaatttgtcactatcagagaagccctacaagaaatgctaaaagaagtttcaaatcttgaaacaaaagctcagtatgcaccagaataaaatctcttgaaagcataaaactcacaggagctataaaacagtaacacaatgagtaaaacaaagtgggtaacaactaacatgatgactggaacagtacctcacatctcaatattaatattgattgtaaatggcctgaatactccacttaaaagatactgattggttgcatggataaaaaaaaaattgcaaacctaatatctgctgccttcaagagactcacctaacatataagaat

SEQ ID NO: 584369 - DNA, 525 bp, Homo sapiens
gtgagaccaaagcatcagacaaccaataaagcaaaagctaagtttctacttctcagtaaaaacttacaagccagaagggattttaatttatctttagctttcttaaacagagcaactgtcagccaagaattttgtattcagcaaaactaattttcataaatgaaggagaaataaagtcattttcagacaaacaaatgctgagtaaatttgtcactatcagagaagccctacaagaaatgctaaaagaagtttcaaatcttgaaacaaaagctcagtatgcaccagaataaaatctcttgaaagcataaaactcacaggagctataaaacagtaacacaatgagtaaaacaaagtgggtaacaactaacatgatgactggaacagtacctcacatctcaatattaatattgattgtaaatggcmtgaatactccacttaaaagatactgattggttgcatggataaaaaaaaaattgcaaacctaatatctgctgccttcaagagactcacctaacatataagaat

SEQ ID NO: 584370 - DNA, 555 bp, Homo sapiens
gtcacccctttctttgactaggaaagggaattccctgaccccctgcacttcccaggtgagatgatgcctcaccctgcttcggctcatgctcagtgcactgcacccactgtcctgyggccactgtccgacactccccagtgagatgaacatggtacctcagttggaaatacagacatcacctgtcttctgcatcgctcatgctgggagctgtagactggagctcttcctatttggccatctagcctccaccccctcattagttatttttcctggtcatccccctcctcccacctgtcaccctctgaaaagccccaggtgtcttgctcccctctatgtgtccatgtgttctcatcatttagctcccacttataagtgagaagatgtggtatttggtttcctgttcctgtgctagtttgctaaggattatggcctccagctccagtttacgggcaggggtggaaccatgtgtataagaatctgatttggttcttggaatctggacactgctgatttttagtcatcatcagtgatgctcccattatgattgaccacagg

SEQ ID NO: 584371 - DNA, 555 bp, Homo sapiens
gtcacccctttctttgactaggaaagggaattccctgaccccctgcacttcccaggtgagatgatgcctcaccctgcttcggctcatgctcagtgcactgcacccactgtcctgcggccactgtccracactccccagtgagatgaacatggtacctcagttggaaatacagacatcacctgtcttctgcatcgctcatgctgggagctgtagactggagctcttcctatttggccatctagcctccaccccctcattagttatttttcctggtcatccccctcctcccacctgtcaccctctgaaaagccccaggtgtcttgctcccctctatgtgtccatgtgttctcatcatttagctcccacttataagtgagaagatgtggtatttggtttcctgttcctgtgctagtttgctaaggattatggcctccagctccagtttacgggcaggggtggaaccatgtgtataagaatctgatttggttcttggaatctggacactgctgatttttagtcatcatcagtgatgctcccattatgattgaccacagg

SEQ ID NO: 584372 - DNA, 393 bp, Homo sapiens
agttggaaatacagacatcacctgtcttctgcatcgctcatgctgggagctgtagactggagctcttcctatttggccatctagcctccaccccctcattagttatttttcctggtcatccccctcctcccacctgtcaccctctgaaaagccccaggtgtcttgctcccctctatgtgtccatgtgttctcatcatttagctcccacttataagtgagaagatgtggtatttggtttcctgttcctgtgctagtttgctaaggattatggcctccagctccagtttacgggcaggggtggaaccatgtgtataagaatctgatttggttyttggaatctggacactgctgatttttagtcatcatcagtgatgctcccattatgattgacca

SEQ ID NO: 584373 - DNA, 479 bp, Homo sapiens
ggaattcaagaccagcctggccaaaatggcgacaccccgactctactaaaaacacaaaaattagccaggagtggtggcgggtgcctgtaatctcggctacttgggaggctgaggcaggaaaatcacttgaatccaggaggtggaagttgcagtgagccaaaatcgcaccactgcactccagcctgggcaacagagcaagactgtctcaaaaaaataaataaaacatacaaacaaacctatccttaaaaagtgtaaactgaagaatgaggaggttcataaacttggaaaggagagttttatttctcataaatggttgcggcttgtgccatactgacaggctggggagcacagcttytggccagaagccagaaacagacacttcaagggaaaggcaaagggaagtggaatttatgatgaacgaggtggctgaatatacatatttaacaagttctaagagtcatgaatattataaaaggaga

SEQ ID NO: 584374 - DNA, 581 bp, Homo sapiens
atgggtatgttttgtgacttattttcaggagcgtgtatatttctagtattagattcacatgttgaatttaacataggaagatctccttatctggaatataaatagtttaatcaggcaggtggataacacaacaaatccagtcaggaaatggactcaaagtaaatgtatactaatatcttaagtgttagatagcttctagtaatttaggattcctatctaaattgctctgtgtttggaggcattgtcagatgtcattctgtgcttaggtgatagctgcagcaagtccatgtatgtatgttttargatatcagttctacaggtttctgcactttgactatgtgctgataattacacttggactttctacattatattgatgaatgaaaaataatatggttagaaaattatgacaagaatatgttcagaatattaactcactgcatggctccccatgtatccttgacaactcatgtgacatagaagactcattgatttggctgagtgcagtggctcatgctggtaatcgcagcacttcgggaggctgaggcggacaggtcacttgagcccaggagtttgaaacc

SEQ ID NO: 584375 - DNA, 572 bp, Homo sapiens
ggttcctacagattgatagcatasttcaaagacagaaaaccatgaaatctttttattttctctttgtatttgcctctgacatcatcactcagagagatttccaaggagatattgattctttgcttttttagtttttttttatgattgtgaagatagagtgatgacatggaatttccttaggagtcaccccaaaaactggaactccattttatttttgatatatatttattactgtttatcttatatacatggtatttggcaattgcatgtcagtataattacaaataggcttcaattacacaaaatatttaatgctcaaatcctacaatgagaggacattatattttaatacaataatctgcaaaataaactaaaaataaaacatcacatagtataataatatagttattatatgcatttctgttttagacaagcatgaaacacacatcaatatgttatttcagccattaatataggttacactgggaccagctctttggaggcaaatgtgtggaaacgaatgaagagattagacagggtctctggggtttgtgtttctctgtgtagttttt

SEQ ID NO: 584376 - DNA, 583 bp, Homo sapiens
gaaatggaagaaatgctgaagaaaattagaagggatttcagagcaagaattatagtaatggcataaagaatgataagtattttcatgggaaaaactttaaatgcttttatccttttaaaagcaattcaaatatgttcctaacattgatgcttagaaagcagctaagtgtgttgtagggtacaaagtgtctgtaaattttctctggagcattataaaatgtgacctggatctggcccataggtttctgtggaagtctatctaatgcaatcagaagagagtggatggctgaagttactatcatctgtgaggtttatgttttggaagagttaatctaggaggctcttcttatttttttccacttgcatcttatcagtaagagctttttttcaaaraaaatgagatagcttcttgctctatcacctaggctggagtgcagtagcaagatctctgctcacggcaacctatgcctcctgggctcaagggatcctcccacctcagcctcccaagtagctggcaccactggcatgcacattgtgcctggctaatttatgtattttttatagagaagaggttctgctccatt

SEQ ID NO: 584377 - DNA, 583 bp, Homo sapiens
gaaatggaagaaatgctgaagaaaattagaagggatttcagagcaagaattatagtaatggcataaagaatgataagtattttcatgggaaaaactttaaatgcttttatccttttaaaagcaattcaaatatgttcctaacattgatgcttagaaagcagctaagtgtgttgtagggtacaaagtgtctgtaaattttctctggagcattataaaatgtgacctggatctggcccataggtttctgtggaagtctatctaatgcaatcagaagagagtggatggctgaagttactatcatctgtgaggtttatgttttggaagagttaatctaggaggctcttcttatttttttccacttgcatcttatcagtaagagctttttttcaaagaaaatgagatagcttcttgctctatcacctaggctggagtgcagtagcaagatctctgctcayggcaacctatgcctcctgggctcaagggatcctcccacctcagcctcccaagtagctggcaccactggcatgcacattgtgcctggctaatttatgtattttttatagagaagaggttctgctccatt

SEQ ID NO: 584378 - DNA, 531 bp, Homo sapiens
aagcctggtgtagctctgtcttagcttgcaggcttatgtctgggttccagtaattggagcttgcagaaatgtttccccgattgttgttcttctgtagaatttcaacgctcatatgtatttttgtgagtcaccacgaaaacagttaaactgatcaaccgttttccaaactgcagacaccaaattgaaatcacaaagcactttctttttttcccctaagttgactcttctattcctgcctgctgtgctttatgtcagcaagtgaccctttcctgtattataatgcagtatagtatagatgcatcatgtaagaccagagagaaaccgattccaaaaccacctttcctcaagccgccgtttgtaacgaccatatgggcggttkgaaggacacagagagagcctattgacacttcactttcgctacacgtggtgatttttccagtgcttccggagacactgaaatttagttccaaacattgccttagaggattctgcattttattcattctaccgatgatccactcagaaaatcaa

SEQ ID NO: 584379 - DNA, 531 bp, Homo sapiens
aagcctggtgtagctctgtcttagcttgcaggcttatgtctgggttccagtaattggagcttgcagaaatgtttccccgattgttgttcttctgtagaatttcaacgctcatatgtatttttgtgagtcaccacgaaaacagttaaactgatcaaccgttttccaaactgcagacaccaaattgaaatcacaaagcactttctttttttcccctaagttgactcttctattcctgcctgctgtgctttatgtcagcaagtgaccctttcctgtattataatgcagtatagtatagatgcatcatgtaagaccagagagaaaccgattccaaaaccacctttcctcaagccgccgtttgtaacgaccatatgggcggttggaaggacacagagagagcctattgacacttcactttcgctacacgtggtgatttttccagtgcttccggagacactgaaatttagttccaaacattgccttagaggattctkcattttattcattctaccgatgatccactcagaaaatcaa

SEQ ID NO: 584380 - DNA, 556 bp, Homo sapiens
gcaggagaagagtcatcacctgagtgcgaagacaagtaatgtgttatttgccttctttggacaatgccaatgcaggagaatagagtcacattacctagttgttgggtctagcaatgtcacaatcccatctgtggactgggctctcacagaaaagtaaaataactcaaatgctggagaggcatatttcatatcacctttgagctgggcccrccaatatttcacaatgccttttgagggcacaatcacacctgcatgaaaggccagggatgagattaacaatcctgcacatttctcaattacaggtatgagaggaaacacttcctgtatgttgagtctaagtacgtgattcacagtctcaacagtggaccggagccatgcgtgaaagcctcaatccgtcccgcagcctgtctccttagcggagtcacaacctcacgagagtgctgagtcttggtctgagagtcaccaacccacctgtggaccggattcacatatgagagtcaattttccaactttcaactgcttctgggtgtgagattcaggacctcagcaatgggct

SEQ ID NO: 584381 - DNA, 556 bp, Homo sapiens
gcaggagaagagtcatcacctgagtgcgaagacaagtaatgtgttatttgccttctttggacaatgccaatgcaggagaatagagtcacattacctagttgttgggtctagcaatgtcacaatcccatctgtggactgggctctcacagaaaagtaaaataactcaaatgctggagaggcatatttcatatcacctttgagctgggcccaccaatatttcacaatgccttttgagggcacaatcacacctgcatgaaaggccagggatgagattaacaatcctgcacatttctcaattacaggtatgagaggaaacacttcctgtatgttgagtctaagtacgtgattcacagtctcaacagtggacyggagccatgcgtgaaagcctcaatccgtcccgcagcctgtctccttagcggagtcacaacctcacgagagtgctgagtcttggtctgagagtcaccaacccacctgtggaccggattcacatatgagagtcaattttccaactttcaactgcttctgggtgtgagattcaggacctcagcaatgggct

SEQ ID NO: 584382 - DNA, 530 bp, Homo sapiens
ttgaggctgctgacacaccctgataactggtagctatagttatatttgctaagatttgggtgcatgaggcttggctttggttagttcccttgatcttactttctgataaaagaaagctctgggttattggcaccttatttatttctatcacccagccagatttgcagaataattgcttagaactagaatattgatttagatttttacattacccatccctatctttttttgatgagctgcaggcagagattgctggttggcttacaggaataagccgggtaggtttaaaatgtcatcaaaacgtttgaaacaatgaatgagactagaagttcatgagaaatgtatgacaagttttgaaacaattactttcttttagtttttttttttgttagaaactactcacaaaattccttctttaaggacatggatgaaattggaagtcatcattctcagtaaactatcacaagaacaaaaaaccaaactgcataktctcactcataggtgggaattgaacaatgagaacacatgga

SEQ ID NO: 584383 - DNA, 589 bp, Homo sapiens
ctttgttcatttcttctttctctttttctctaagcttgtcttctcattttatttcattaatttgatcttcaatcactggtaccctttcttccgcttaactgaattggctattgaagcttgtgcatgcatcgtgttctcatgccatggttttcagctccatcaggtcatttaaggtcttcttttcactgtttattctagttagccattcatctaaccttttttcaaggtctttagcttccttgtrtttgttttgaacatgctcctttagctcagaagtttgttactaccgaccttctgaagcctacttctgtcaactcagcaaagtcattctccatccagctttgttccattgctggtgaggagctgtcatcctttggaggagaaaaggtgccctggtttttagaattttcagcttttctactctggtttctccccatctttgtggttttatctacctttggtctttaatgttggtgacatacagatggggttttggtgtatatcctttttgctgatgttgcttctattcctttctgtttgctggttttctttctaacaggtctctcagcttcaggtttgttggaatttt

SEQ ID NO: 584384 - DNA, 381 bp, Homo sapiens
ttataatgagtaaaaggtcagtttgaggaaaggtaaaatcaaaatgtgcatgctgtttacaggggagtttctctattggagagagctttgcttgaataagctggaatacaatgygaatgctggggcttattgtgttggcaatatgcagccactgtacaatggccatgtttgctgcatcccaaagacatagtcactttcttgactacccatccttcctcaatagtacttgtcttgatttattccaaactaccagctctgagactaagatttagctgttatgtcaacattgtcaacagtgggaaaattaacatttttaaatcaaacatatttcagcttgatttgggtaattagctgtgtgcccaggaaacaatactttacatc

SEQ ID NO: 584385 - DNA, 345 bp, Homo sapiens
aatcaaaatgtgcatgctgtttacaggggagtttctctattggagagagctttgcttgaataagctggaatacaatgtgaatgctggggcttattgtgttggcaatatgcagccactgtacaatggccatgtttgctgcatcccaaagacatagtcactttcttgactacccatccttcctcaatagtacttgtcttgatttattccaaactaccagctctgagactaagatttagctgttatgtcaayattgtcaacagtgggaaaattaacatttttaaatcaaacatatttcagcttgatttgggtaattagctgtgtgcccaggaaacaatactttacatc

SEQ ID NO: 584386 - DNA, 381 bp, Homo sapiens
ttataatgagtaaaaggtcagtttgaggaaaggtaaaatcaaaatgtgcatgctgtttacaggggagtttctctattggagagagctttgcttgaataagctggaatacaatgtgaatgctggggcttattgtgttggcaatatgcagccactgtacaatggccatgtttgctgcatcccaaagacatagtcactttcttgactacccatccttcctcaatagtacttgtcttgatttattccaaactaccagctctgagactaagatttagctgttatgtcaacattgtcaacagtgggaaaattaamatttttaaatcaaacatatttcagcttgatttgggtaattagctgtgtgcccaggaaacaatactttacatc

SEQ ID NO: 584387 - DNA, 345 bp, Homo sapiens
aatcaaaatgtgcatgctgtttacaggggagtttctctattggagagagctttgcttgaataagctggaatacaatgtgaatgctggggcttattgtgttggcaatatgcagccactgtacaatggccatgtttgctgcatcccaaagacatagtcactttcttgactacccatccttcctcaatagtacttgtcttgatttattccaaactaccagctctgagactaagatttagctgttatgtcaacattgtcaacagtgggaaaattaacatttttaaatcaarcatatttcagcttgatttgggtaattagctgtgtgcccaggaaacaatactttacatc

SEQ ID NO: 584388 - DNA, 375 bp, Homo sapiens
agcaacttgataaatgtgcagaaatttgtctttgttaatagacattttattcaaagaccaaagttggtcaggtgcggtggctsacacctgtaatcctagcactttgggaggctggcagtggtagatcacaaggtcaggagttccagaccagtctggccaacatagtgaaaccccatctctactaaaaatacaaaaaaattagctggctgtggtggtgtgcacctgtaataccagctactcagggggctgaggcaggagaattgtgtgaacccaggaggcggaggttgcagtgaaccaagattgcaccattgcattccagcccggatgacagtgcaagactctgtctgaaaaaaagaaagaaaagaaagaaagaaa

SEQ ID NO: 584389 - DNA, 647 bp, Homo sapiens
tatttgaggtgactctcctctctaacctgggccttgcccataaaaaacattgtggcttatctctgggcccaaaacctaggtratgtgactgtcttcttagggtcatgcccacagtagagagatgccttattgctaaacccagcacacaggtgaggtgattcttctgtctggtccctgcccacaggggtcatgatgacatctctctaagcccatcacctagattatgtgagttctctttttcttctgttagctatatagaagattgtgacatattgcttggcccagacctcatgtgatgtgaatctcctctcatgccttggtcctgtttttttttggccgttgttgttttgttttgttttttgagatggagtcttgctctgttgcctaagctggagtgcagtggcataatctaggctcactgcaacctctgcctcctgggttcaagttattctcctgcctcagcccctgaatagctaggattaaaggtgagtgccaccacactcagctaatttttgtatttttagtagagatggggtttcaccatgttggttaggctggtattgaactcctgacttcgtgatcaactcgcctctgcctcccaaacttttgggattacaggcatgagccaccatgcccagtcaagatga

SEQ ID NO: 584390 - DNA, 522 bp, Homo sapiens
atctcattctttgccttatacatattaaaaatgtattcacagttcataaaacataatcaatctatcaaaaaatattccaaactaaaaacattctttttatagaacctagtaatgcaccttaattccttacaatttgtgttgagaattactagtattatgatgttttctaacatgtatcaagtacttttagatgtttagcacttgagatatattataaaaaccttctcaatattaacctgggactccaaagaatatgtatggcccaaacagttgttttcttcccaacaccaaggaatggcatacaagattgtcttcaagttgaggacaggtcataaagaaaaatttttaaaaagagaaaaaaaaayctgcaaacttgtttctacacatgggtcttacatacatttcttcatcaattatattaattctgaatgaaccatattacctgaagttgtacaaataattgcttcaaattgtagaatccccaggaaacagaaagaagcaaaagcaaacactcccaaagaa

SEQ ID NO: 584391 - DNA, 369 bp, Homo sapiens
ggacttatccacagtgaagattgtaacacattgcttgggccagtgtttatatgatatgactttcctcttatcctgctggctagggtaattggaacatttaggtggcccagcctctagtttatgtaaatctccttttttttcctgagcctaacccacaggggggcatttcaatgtatttctgggcttttcacctaggtgatgtgactttgctgcctgggcccttccctcaggagctattgtgacgtattgccagaacaagcacctarctgatgtgtctctccactacagacagtgtcatcacagggccaatcaaaaatatgagattgtgtttctcatatgcatacttaaccaagtgttataattgtcact

SEQ ID NO: 584392 - DNA, 591 bp, Homo sapiens
ctagcctgggtgacaaagtgaaactccgtctcaaaaagaagaaaaagaaaaaaaaaggtaataaaatcatagtatactgcttgggtgtttagtaaataatatttgattaatcaccttacagcattcgctgactacaagtttaggtaaaaataatgttattagtattctgaattgctagaatggtggggaagggcagttaacagaaaagtggtttccaagtatctctcagtattaaagggcagtttttagagtttatatggtttaaggtcaaatagatgaggaaaaaattaactgaaagaaggagaaaaactaaactttacaaaaaaaactcttcatatttattatcttcattaaaataataattttctcaaggataaatctcaagaattagcaaattsagggtcccaaaagtaacagatgctgtggaactggatgctctaaaaccaagtataacaaaatctcaggaaaataagcttctcaacgaaaaacttgattcacatgcaagccaactagaaaaaaagaaaatacagctttttaccatcaactgaaaggactaataaggaggggaacaaagaaaaactactttatatg

SEQ ID NO: 584393 - DNA, 611 bp, Homo sapiens
catgtgaaattctatttattatggagaagttaataactaatatgttaccagcaataaaatataaatcatttctcactgtgttaccaatggccagtccgcacaggtttgcagtgattttggtttttgtcttctcaaaagaaagtatctagccaagagacaaaaagcaaatttgaagcaaaagttggactttattgaaagaaagcaaagtagctttggaaagggaccaaatgggtgacttagagatcaagtgccctacctggcccttggctccagtttcttacrcattcacttattttctagtattatggactcctcccctggtccctttggcatgattaatgctcactgttgcttgtgcggtacttgccagcagtagggaagtcgtctgcatgcttcatgagtgttctgaggttctatgcttgctctattggagatattatttttaccagttgagcacctccagagaaaggcatatattggttaaactccactattttgcctctcactgtccatgcttggatggtcttgccaaatttttgagattttattaagttgttgcccaagcactcaaaatgttttctatttgttagaagggtgcccctacttgtcac

SEQ ID NO: 584394 - DNA, 593 bp, Homo sapiens
ctgagggacctccgctcctggatacatgtccgtaatcattcatggagtgagaaaatcggcctgtatgttaccactaaagaagctagtctgtaagaatgtattgatttaagtatatataaaaatacatagagtaaattataactcccstaggcacaatttcattatataccttaaaaaatacatagatgccactcacttcactgctaacaaaaatgacaatatcatttatcattccaaccatggtacttttttttttttttttttgagtcagagtcttgctctgttgcccaggctggagtgcagtggtgcaatcttggctaactgcaatctccgcctcccgggttcaagcgattctcctgcctcagcctcccgagtagctgggactacaggcgtgtgccaccacgcccagataataattttttgaatttttagtagagatgaggtttcgccgtgttagccaggatggtctcaatctcctgacctcgtgatccgcctgcctcggcctcccaaagtgctgggattacaggcatgagccaccacacccggccccatggtattttgactacaaaatgagacacaatacatgaaaaagt

SEQ ID NO: 584395 - DNA, 593 bp, Homo sapiens
ctgagggacctccgctcctggatacatgtccgtaatcattcatggagtgagaaaatcggcctgtatgttaccactaaagaagctagtctgtaagaatgtattgatttaagtatatataaaaatacatagagtaaattataactcccctaggcacaatttcattatataccttaaaaaatacatagatgccactcacttcactgctaacaaaaatgacaatatcatttatcattccaaccatggtacttttttttttttttttttgagtcagagtcttgctctgttgcccaggctggagtgcagtggtgcaatcttggctaactgcaatctccgcctcccgggttcaagcgattctcctgcctcagcctcccgagtagctgggactacaggcgygtgccaccacgcccagataataattttttgaatttttagtagagatgaggtttcgccgtgttagccaggatggtctcaatctcctgacctcgtgatccgcctgcctcggcctcccaaagtgctgggattacaggcatgagccaccacacccggccccatggtattttgactacaaaatgagacacaatacatgaaaaagt

SEQ ID NO: 584396 - DNA, 582 bp, Homo sapiens
caatctccgcctcccgggttcaagcgattctcctgcctcagcctcccgagtagctgggactacaggcgtgtgccaccacgcccagataataattttttgaatttttagtagagatgaggtttcgccgtgttagccaggatggtctcaatctcctgacctcgtgatccrcctgcctcggcctcccaaagtgctgggattacaggcatgagccaccacacccggccccatggtattttgactacaaaatgagacacaatacatgaaaaagtggtctactgtggatcactactctcaatgaaaagaaacaaactattgatacatttgacaaaccaagactttctccccaaaactgggctgtgtggtcccctaactctacctgatagggaaaagaaaagtgagttgggaatgaggaaagtatttttttggagggaggtttgttttaggttggtttttgttgttgttatgatttgactgtgattcctccatagagtaaaacacagtcagttcttgttgtttgtggttattatgttctttaaagaacataattgctgtgagcactgaattagcaaatactgaactgtt

SEQ ID NO: 584397 - DNA, 582 bp, Homo sapiens
caatctccgcctcccgggttcaagcgattctcctgcctcagcctcccgagtagctgggactacaggcgtgtgccaccacgcccagataataattttttgaatttttagtagagatgaggtttcgccgtgttagccaggatggtctcaatctcctgacctcgtgatccgcctgcctcggcctcccaaagtgctgggattacaggcatgagccaccacacccggccccatggtattttgactacaaaatgagacacaatacatgaaaaagtggtytactgtggatcactactctcaatgaaaagaaacaaactattgatacatttgacaaaccaagactttctccccaaaactgggctgtgtggtcccctaactctacctgatagggaaaagaaaagtgagttgggaatgaggaaagtatttttttggagggaggtttgttttaggttggtttttgttgttgttatgatttgactgtgattcctccatagagtaaaacacagtcagttcttgttgtttgtggttattatgttctttaaagaacataattgctgtgagcactgaattagcaaatactgaactgtt

SEQ ID NO: 584398 - DNA, 604 bp, Homo sapiens
ttctttatagtcacttcgtttatgatgctagatggtcaacatattcaatacatttcacaaaatgtgaatgcagtagtcatcattgtatgacactgtctagttaatttactccccaagagttggagttgaaaatgtcttttatctttttattcttattttttcatttaatatcctacaagaaaaaaaaatccttccaatatttttttctttgaagtattgggaaaaaataataagaaaactcaaaaataacatgtttgttatagagaggctgggcccaccctcaaagtatctatcctgagaagactgtaactcttggagtcaaaaatgtctaacctgggtcctgtcttctccactggacctatartataaataaagaattattgtccattattatttataaaagatacctattcctaatgactttgttaagaagagtggttcatataagccttttctagtgatcctaacgtgtacatgtatacactatttcaaactgtaatgacactccctctctttctctctctctctctgtccacctctcattttctctttttcttttcacagtatagggttgtataactccagcaatttcaaagaaaagctt

SEQ ID NO: 584399 - DNA, 642 bp, Homo sapiens
gatatttgaactctgatgaaagataatttatcaagcccagatcaaattattagttgtaattatgtctataaatattcttcctgtttctgagaggactatatctcccaaactttattctatgttagacaccactgccaactcccatgacctgatttttggaatatgtaacagctcttgccaaagaagtctgacacaaatgaagcgtcctctagcctccaggcttccttattcacactttctctttaaaaacatttctgactgatgtccgaggcatctatttcacaatcttaatttcaatttgcctcacccttaggtgaggccagaatgggagccmgcattctatggggaccacagcttcagatttcctattggagagagaaaggtcactcctctacatgcaatttgaaaaatcctggaaaataagctggcttgaactgtgcatctatcgctggatcatcatggtggaccaggataccattcccacaataagcactttattcaaaggaccagggttgaagtagctcctgaaataatggagtgcaacttggagaaaggaaaggaacaggagcttgttagacaaaacatgacaagtccactgtagtatgcagtaacgatctaatcactcaattttatattttaaag

SEQ ID NO: 584400 - DNA, 632 bp, Homo sapiens
cacttccttctccttgatttcagaatattctacctgatgttggtgctgccctcatccttccaactgtaccctttagccccaggctccaggattgtaaaattttattcctgattaaagtcgtcctaaaccatgttattttccacgagtatactgagttattggggaaaacaatgaaggctaattctactcttcaggaaagtttaatttctacatcacttatcctaagacaataataggaactggtctcaaggtttgccttaatgttcccagaaaggggtccccattcagaccccaagagaaggttcttggatctcacacaaaaaggaattcagggcaagtcccttttgtaaagtgaaagcaagtttatcaggaaagtaaaggataaagaatggttatttattcctttacttcccagggctgctgattgcccatttttatgrttagttcttgattatatgctaaacaaggggtggattatttatgcctcccctttttagaccatatagggtaaattcctgacattgccatggcatttgttcttgattatatgctaaacaaggggtggattatttatgcctcccctttttagaccatatagggtaaattcctgacattgccatggcatatgtaag

SEQ ID NO: 584401 - DNA, 546 bp, Homo sapiens
ctctattttttctttcaggaactgtataattttggatattgaactgttctactttttttttttwaatttttattccccctatctttgccttgttcttctaagtctgaaaattttttctttttttcttttcaatgttgttgtcctagacttctatgtagttttaagactggctaatatgtatttaatttccaggtttttttagttttctatttcttttcacataacgtttcttcttgcttcagtcatataatatcctgtgtttctgaatattaatcttcatttgttttgaacatttttttttcttagcagatgaagaggctgattgatttggagttttcctggacagtgatatacatgagctttttttaaaaaagaaacatgatgttattaggtgtagcttttttcttttgaagtaataaaatacctcagaaatgtatcatctagtgttcttctagaagggtctaggactggctggcacagccatagaagtcaactagaggaagaaggttgagagtgtctgcaatcagcattcagtgttcataaggt

SEQ ID NO: 584402 - DNA, 593 bp, Homo sapiens
caaaacctggaaaggagaaaagattgtttttaagtaggaggaggatggcaggaagagtgcaggattttttggaagggagagtatatgataacggaattaaatgagttcyctatttggttatgctggatttgagcactcagatggagaagtgcagctggcaattgaatattttggtttaaatatcaggaaagagagaaagactggggatgaaattttataatgtttctgtatggaagctggtatataaaaggagattcagggcttttaaatcttttaggcctttagctaaccacttttttttgtctgtttgatgagtcatatgagtctatgaaatagttatttaaaatatttaaactctgaggcactttttaaacaaaggtttgacataggcatgatttttaactgagaaaaatatctagccaagtgtgatataaaagttaaaaccacacctcaagaataggcatttcattttttttttttaccctgagcaaaatataatgatctattttcaaataatgtgtatgtgtgtgtggacacggatggggagggattgggttttatacgcacattttaaaggctcaaagggcttatac

SEQ ID NO: 584403 - DNA, 593 bp, Homo sapiens
caaaacctggaaaggagaaaagattgtttttaagtaggaggaggatggcaggaagagtgcaggattttttggaagggagagtatatgataacggaattaaatgagttccctatttggttatgctggatttgagcactcagatggagaartgcagctggcaattgaatattttggtttaaatatcaggaaagagagaaagactggggatgaaattttataatgtttctgtatggaagctggtatataaaaggagattcagggcttttaaatcttttaggcctttagctaaccacttttttttgtctgtttgatgagtcatatgagtctatgaaatagttatttaaaatatttaaactctgaggcactttttaaacaaaggtttgacataggcatgatttttaactgagaaaaatatctagccaagtgtgatataaaagttaaaaccacacctcaagaataggcatttcattttttttttttaccctgagcaaaatataatgatctattttcaaataatgtgtatgtgtgtgtggacacggatggggagggattgggttttatacgcacattttaaaggctcaaagggcttatac

SEQ ID NO: 584404 - DNA, 593 bp, Homo sapiens
caaaacctggaaaggagaaaagattgtttttaagtaggaggaggatggcaggaagagtgcaggattttttggaagggagagtatatgataacggaattaaatgagttccctatttggttatgctggatttgagcactcagatggagaagtgcagctggcaattgaatattttggtttaaatatcaggaaagagagaaagactggggatgaaattttataatgtttctgtatggaagctggtatayaaaaggagattcagggcttttaaatcttttaggcctttagctaaccacttttttttgtctgtttgatgagtcatatgagtctatgaaatagttatttaaaatatttaaactctgaggcactttttaaacaaaggtttgacataggcatgatttttaactgagaaaaatatctagccaagtgtgatataaaagttaaaaccacacctcaagaataggcatttcattttttttttttaccctgagcaaaatataatgatctattttcaaataatgtgtatgtgtgtgtggacacggatggggagggattgggttttatacgcacattttaaaggctcaaagggcttatac

SEQ ID NO: 584405 - DNA, 593 bp, Homo sapiens
caaaacctggaaaggagaaaagattgtttttaagtaggaggaggatggcaggaagagtgcaggattttttggaagggagagtatatgataacggaattaaatgagttccctatttggttatgctggatttgagcactcagatggagaagtgcagctggcaattgaatattttggtttaaatatcaggaaagagagaaagactggggatgaaattttataatgtttctgtatggaagctggtatataaaaggagattcagggcttttaaatcttttaggcctttagctaaccacttttttttgtctgtttgatgagtcatatgagtctatgaaatagttatttaaaatatttaaactctgaggcactttttaaacaaaggtttgacataggcatgatttttaactgagaaaaatatctagccaagtgtgatataaaagttaaaaccacacctcaagaataggcatttcattttttttttttaccctgagcaaaatataatgatctattttcaaataatgtgtatgtgtgtgtggacacggatggggagggattgggttttatacgcayattttaaaggctcaaagggcttatac

SEQ ID NO: 584406 - DNA, 489 bp, Homo sapiens
accaacttaatatataatgatatgagcttgtcaaaagtaaatgatggaaaaatatatatcatgcacatattaataaaaataaaagatgaacagctatgttaatgttagataaaataaagttcagagcaaagaatagtatcagagacagacattatgataaaacagaccaatccaccaataagatataacaatcctaaatgtatatgcaccaaacaacgcatttggcaagcaaaatatgtgaagcaaaaactgacagaaatgaaatgagaaatagacacatccacattcacagttagagatttcaacatccttctttcaaaaattgatggaactagacaaataatcagaaggatatgraactcaataataccattcaagaacagatataatcaacatttttagaacactctatgcaagaatagcagaatatgctttttttaaagcaacgatggaatgtataccaagatagactacatttttgccataaaa

SEQ ID NO: 584407 - DNA, 581 bp, Homo sapiens
tatttttgatatatgaaatgaagggacaagaaaatacatactttttaaaattaaaatggcactgcatagacatagtttccaactaaaattttaaaagatattctataagtatcattttttaaatactattaaaaatatatttagatagcgacctccaggggccatagcaatgcatcttgtactggaattttctttttgcagtaaacaaagaacaacaagaataatataggaggcaattctttttaaggattgtacaataggctgagcagaactatgatccttgagaaaaggaaaatattaagatgagtccagattcactgcagactttgagctagggaggtggagtccaaacaatgcagtggtctcccttagttraggagctgtgtgtagggggtgaatgtcccccataggctcttctctgagggctgaatgtaaggtaattcccatgagcccaagcagggatgtctactgtgatcctcagcttcactgagatacgaggtattgcatgacatagggagaagttagagatgagctcagaaggaaaggagctaacttactagatatttcacattcagttgaga

SEQ ID NO: 584408 - DNA, 598 bp, Homo sapiens
cactgcaaggagaggttagtgggacaaactggtgcagccttttaaggggatttgttatactcacaaaagaagcccagtgtgagggatactttttttttttwaaaaaaatgaagggttgggaacctgatcccaggtttaataaatctgggaaagtggccaaggtccctgaattttaaagactttaaagagtctccgagaatgtgtcccaggtcactgaattttaaagaagccctccaggtgagaaccaatgctctgagagttgcaaaccagggttttgtttgtcagtgcaacattttagctggctctaggtacagagccttcagatgtgggtataaggggagattttcaaaaagttccacatactgagtgatctttttctaaaactgagaggcctcccagactcatcacaagccagaaaagtagccgttgctatttgttttccatcaaatgctgagagctgccactctcattcttagctcatttgaagcaacagggatttctcttgagagcaggagacagaattcattacgacaaagcatggttttagagtaaagtgtgaagtgtgtagccatgtctataaaagggataaagagccagg

SEQ ID NO: 584409 - DNA, 598 bp, Homo sapiens
cactgcaaggagaggttagtgggacaaactggtgcagccttttaaggggatttgttatactcacaaaagaagcccagtgtgagggatacttttttttttttaaaaaaatgaagggttgggaacctgatcccaggtttaataaatctgggaargtggccaaggtccctgaattttaaagactttaaagagtctccgagaatgtgtcccaggtcactgaattttaaagaagccctccaggtgagaaccaatgctctgagagttgcaaaccagggttttgtttgtcagtgcaacattttagctggctctaggtacagagccttcagatgtgggtataaggggagattttcaaaaagttccacatactgagtgatctttttctaaaactgagaggcctcccagactcatcacaagccagaaaagtagccgttgctatttgttttccatcaaatgctgagagctgccactctcattcttagctcatttgaagcaacagggatttctcttgagagcaggagacagaattcattacgacaaagcatggttttagagtaaagtgtgaagtgtgtagccatgtctataaaagggataaagagccagg

SEQ ID NO: 584410 - DNA, 598 bp, Homo sapiens
cactgcaaggagaggttagtgggacaaactggtgcagccttttaaggggatttgttatactcacaaaagaagcccagtgtgagggatacttttttttttttaaaaaaatgaagggttgggaacctgatcccaggtttaataaatctgggaaagtggccaaggtccctgaattttaaagactttaaagagtctccgagaatgtgtcccaggtcactgaattttaaagaagccctccaggtgagaaccaatgctctgagagttgcaaaccagggttttgtttgtcagtgcaacattttagctggctctaggtacagagccttcagatgtgggtataaggggagattttcaaaaagttccacatactgagtgatctttttctaaaactgagaggcctcccagactcatcacaagccagaaaagtagccgttgctatttgttttccatcaaatgctgagagctgccactctcattcttagctcatttgaagcaacagggatttctcttgagagcaggagacagaattcattacgacaaagcatggttttagagtaaagtgtgaagtgkgtagccatgtctataaaagggataaagagccagg

SEQ ID NO: 584411 - DNA, 332 bp, Homo sapiens
agttaatggcaattacaggacttttaaaatayattagactatgtgggagtagtgcatttgtggggtagaggacaacatggtactgcttcagtgaagaaataacttttacaccttattaaaatttgtattattatttacattctaataaataaaaactttattttcagatattttacattatgtttctactagttgaaccatcaatagtaagacttttcaaagatttgggaagttgtgagttgatgataaatatctgtatcaccatcagtgatcaaaaatcagacagcaactactacagattttggacacgtgaacttcatatttaaagaaag

SEQ ID NO: 584412 - DNA, 332 bp, Homo sapiens
agttaatggcaattacaggacttttaaaatatattagactatgtgggagtagtgcatttgtggggtagaggacaacatggtactgcttcagtgaagaaakaacttttacaccttattaaaatttgtattattatttacattctaataaataaaaactttattttcagatattttacattatgtttctactagttgaaccatcaatagtaagacttttcaaagatttgggaagttgtgagttgatgataaatatctgtatcaccatcagtgatcaaaaatcagacagcaactactacagattttggacacgtgaacttcatatttaaagaaag

SEQ ID NO: 584413 - DNA, 332 bp, Homo sapiens
agttaatggcaattacaggacttttaaaatatattagactatgtgggagtagtgcatttgtggggtagaggacaacatggtactgcttcagtgaagaaataacttttacaccttattamaatttgtattattatttacattctaataaataaaaactttattttcagatattttacattatgtttctactagttgaaccatcaatagtaagacttttcaaagatttgggaagttgtgagttgatgataaatatctgtatcaccatcagtgatcaaaaatcagacagcaactactacagattttggacacgtgaacttcatatttaaagaaag

SEQ ID NO: 584414 - DNA, 332 bp, Homo sapiens
agttaatggcaattacaggacttttaaaatatattagactatgtgggagtagtgcatttgtggggtagaggacaacatggtactgcttcagtgaagaaataacttttacaccttattaaaatttgtattattatttacattctaataaataaaaactttattttcagatattttacatyatgtttctactagttgaaccatcaatagtaagacttttcaaagatttgggaagttgtgagttgatgataaatatctgtatcaccatcagtgatcaaaaatcagacagcaactactacagattttggacacgtgaacttcatatttaaagaaag

SEQ ID NO: 584415 - DNA, 596 bp, Homo sapiens
ataaaatttgtaaagtaatgagcagagtgtatttctccagggacccagatatatacatttattcattcaatagaaattcattcttataatggccactgatacctatatcctaaatatttctgaaaacatctcttcaggcctgcatcatctttgcaacattgccttatattttatctttgttcattgatttatatgcctcagaattttatgctcctcacagtatttagagtaaattatccttaatgcaaatagatccgtgaaccactcttgaatacctaatgtctaagcatcttaarggtttatataaggatttcagaaactgacttctgggttgggcatggtggctcatgtctgtgatcccagcactttgggaggctgaggcaagtggatcatttgaggtcaggagttcaagaccagcctggccaacaaggtgaaaccccaactctaataaaatacaaaaattagcaggcggtagtggcacacgcttgtaatctcagctactcaggaggctgaggcaggagaattacttgaacctgggaggctgggttgcagtgagctgagatcatgccactgccctccagtctgggagacagagt

SEQ ID NO: 584416 - DNA, 560 bp, Homo sapiens
ttaagaatatttacagttttgtgtagcagatttctagattttttttttaatcttggaaaactctatacccattcaasaactattaatttccccttccttccacctcctggcaagtactattctactttgtgttatctaaaaatttggcttatatacctagggttatataatatttgttgttttgtaagtaggttccatgttatgtgtcaggatgtgtcaggattttcgttcctttctatggctgaataatatttcttcatatatatatattttctctctctatatatatatatccttttgtttatccatctattcctggatggacgttttggtttcttccaccttgtggctgtgtaatgctcctgtgaacataggtgtgcacatatctgtttgaggtcctgctactagttattctgtctctgtagaagttggatggctggatcatatggcattttatttatttatttattttttgaggagccagttcatatttccaccaacagtgttcaagggtttcagtttcacctgcacttgttactttctgttgggtttgaagtgat

SEQ ID NO: 584417 - DNA, 560 bp, Homo sapiens
ttaagaatatttacagttttgtgtagcagatttctagattttttttttaatcttggaaaactctatacccattcaacaactattwatttccccttccttccacctcctggcaagtactattctactttgtgttatctaaaaatttggcttatatacctagggttatataatatttgttgttttgtaagtaggttccatgttatgtgtcaggatgtgtcaggattttcgttcctttctatggctgaataatatttcttcatatatatatattttctctctctatatatatatatccttttgtttatccatctattcctggatggacgttttggtttcttccaccttgtggctgtgtaatgctcctgtgaacataggtgtgcacatatctgtttgaggtcctgctactagttattctgtctctgtagaagttggatggctggatcatatggcattttatttatttatttattttttgaggagccagttcatatttccaccaacagtgttcaagggtttcagtttcacctgcacttgttactttctgttgggtttgaagtgat

SEQ ID NO: 584418 - DNA, 536 bp, Homo sapiens
ttgtaagtatacagttttgtagagttaagaatatttacagttttgtgtagcagatttctagattttttttttaatcttggaaaactctatacccattcaacaactattaatttccccttccttccacctcctggcaagtactattctactttgtgttatctaaaamtttggcttatatacctagggttatataatatttgttgttttgtaagtaggttccatgttatgtgtcaggatgtgtcaggattttcgttcctttctatggctgaataatatttcttcatatatatatattttctctctctatatatatatatccttttgtttatccatctattcctggatggacgttttggtttcttccaccttgtggctgtgtaatgctcctgtgaacataggtgtgcacatatctgtttgaggtcctgctactagttattctgtctctgtagaagttggatggctggatcatatggcattttatttatttatttattttttgaggagccagttcatatttccaccaacagtgttcaagg

SEQ ID NO: 584419 - DNA, 560 bp, Homo sapiens
ttaagaatatttacagttttgtgtagcagatttctagattttttttttaatcttggaaaactctatacccattcaacaactattaatttccccttccttccacctcctggcaagtactattctactttgtgttatctaaaaatttggcttatatacctagggttatataatatttgttgttttgtaagtaggttccatgttatgtgtcaggatgtgtcaggattttcgttcctttctatggctgaataatatttcttcatatatatatattttctctctctatatatatatatccttttgtttatccatctattccyggatggacgttttggtttcttccaccttgtggctgtgtaatgctcctgtgaacataggtgtgcacatatctgtttgaggtcctgctactagttattctgtctctgtagaagttggatggctggatcatatggcattttatttatttatttattttttgaggagccagttcatatttccaccaacagtgttcaagggtttcagtttcacctgcacttgttactttctgttgggtttgaagtgat

SEQ ID NO: 584420 - DNA, 600 bp, Homo sapiens
ttaagaatatttacagttttgtgtagcagatttctagattttttttttaatcttggaaaactctatacccattcaacaactattaatttccccttccttccacctcctggcaagtactattctactttgtgttatctaaaaatttggcttatatacctagggttatataatatttgttgttttgtaagtaggttccatgttatgtgtcaggatgtgtcaggattttcgttcctttctatggctgaataatatttcttcatatatatatattttctctctctatatatatatatccttttgtttatccatctattcctggatggacgttttggtttcttccaccttgtggctgtgtaatgctcctgtgaacataggtgtgcacatatctgtttgargtcctgctactagttattctgtctctgtagaagttggatggctggatcatatggcattttatttatttatttattttttgaggagccagttcatatttccaccaacagtgttcaagggtttcagtttcacctgcacttgttactttctgttgggtttgaagtgatgtcccattgtggtttctatttgcatttctctaatgactag

SEQ ID NO: 584421 - DNA, 560 bp, Homo sapiens
ttaagaatatttacagttttgtgtagcagatttctagattttttttttaatcttggaaaactctatacccattcaacaactattaatttccccttccttccacctcctggcaagtactattctactttgtgttatctaaaaatttggcttatatacctagggttatataatatttgttgttttgtaagtaggttccatgttatgtgtcaggatgtgtcaggattttcgttcctttctatggctgaataatatttcttcatatatatatattttctctctctatatatatatatccttttgtttatccatctattcctggatggacgttttggtttcttccaccttgtggctgtgtaatgctcctgtgaacataggtgtgcacatatctgtttgaggtcctgctactagttattytgtctctgtagaagttggatggctggatcatatggcattttatttatttatttattttttgaggagccagttcatatttccaccaacagtgttcaagggtttcagtttcacctgcacttgttactttctgttgggtttgaagtgat

SEQ ID NO: 584422 - DNA, 600 bp, Homo sapiens
ttaagaatatttacagttttgtgtagcagatttctagattttttttttaatcttggaaaactctatacccattcaacaactattaatttccccttccttccacctcctggcaagtactattctactttgtgttatctaaaaatttggcttatatacctagggttatataatatttgttgttttgtaagtaggttccatgttatgtgtcaggatgtgtcaggattttcgttcctttctatggctgaataatatttcttcatatatatatattttctctctctatatatatatatccttttgtttatccatctattcctggatggacgttttggtttcttccaccttgtggctgtgtaatgctcctgtgaacataggtgtgcacatatctgtttgaggtcctgctactagttattctgtctctgtagaagttggatggctggatcatatggcattttatttatttatttattttttgaggagccagttcatatttccaccaacagtgttcaagggtttcagtttcrcctgcacttgttactttctgttgggtttgaagtgatgtcccattgtggtttctatttgcatttctctaatgactag

SEQ ID NO: 584423 - DNA, 600 bp, Homo sapiens
ttaagaatatttacagttttgtgtagcagatttctagattttttttttaatcttggaaaactctatacccattcaacaactattaatttccccttccttccacctcctggcaagtactattctactttgtgttatctaaaaatttggcttatatacctagggttatataatatttgttgttttgtaagtaggttccatgttatgtgtcaggatgtgtcaggattttcgttcctttctatggctgaataatatttcttcatatatatatattttctctctctatatatatatatccttttgtttatccatctattcctggatggacgttttggtttcttccaccttgtggctgtgtaatgctcctgtgaacataggtgtgcacatatctgtttgaggtcctgctactagttattctgtctctgtagaagttggatggctggatcatatggcattttatttatttatttattttttgaggagccagttcatatttccaccaacagtgttcaagggtttcagtttcacctgcacttgttactttctgttgggttwgaagtgatgtcccattgtggtttctatttgcatttctctaatgactag

SEQ ID NO: 584424 - DNA, 507 bp, Homo sapiens
gggtagatgtcccttctgtgtgttccagtagtgccctgctgtatacctgtcatggtatctrtgactctatatggacatttcctgcctgtctgtttctttagggttatagccatatgactgttgagaggtggaccatgccatcttcatcttgtaaatccagtgctggttctagtaccttagcatgtgactgttgattacatgaatgaagattgaaaaagctctgatatttaaacacaattagaattaatgccatgtggtaaataattaaataagtaattttttattgtaaatgtacatacataatttctaattcttaataactcctgataagagtctcaaggctttagttttttaaactccaacctaagttaactgaaatgttttaggtaaagaacataattctttatttttctttccagctgttgctgtattggacacttgctgccatctactttcttctctagaatccactggtaagtcacatctaatgaagagaatatttaacca

SEQ ID NO: 584425 - DNA, 507 bp, Homo sapiens
gggtagatgtcccttctgtgtgttccagtagtgccctgctgtatacctgtcatggtatctgtgactctatatggacattkcctgcctgtctgtttctttagggttatagccatatgactgttgagaggtggaccatgccatcttcatcttgtaaatccagtgctggttctagtaccttagcatgtgactgttgattacatgaatgaagattgaaaaagctctgatatttaaacacaattagaattaatgccatgtggtaaataattaaataagtaattttttattgtaaatgtacatacataatttctaattcttaataactcctgataagagtctcaaggctttagttttttaaactccaacctaagttaactgaaatgttttaggtaaagaacataattctttatttttctttccagctgttgctgtattggacacttgctgccatctactttcttctctagaatccactggtaagtcacatctaatgaagagaatatttaacca

SEQ ID NO: 584426 - DNA, 507 bp, Homo sapiens
gggtagatgtcccttctgtgtgttccagtagtgccctgctgtatacctgtcatggtatctgtgactctatatggacatttcctgcctgtctgtttctttagggttatagccatatgactgttgagaggtggaccatgccatcttcatcttgtaaatccagtgctggttctagtaccttagcatgtgactgttgattacatgaatgaagattgaaaaagctctgatatttaaacacaattagaattaatgccatgtggtaaataattaaataagtaattttttattgtaaatgtacatacataatttctaattcttaataactcctgataagagtctcaaggctttagttttttaaactccaacctaagttaactgaartgttttaggtaaagaacataattctttatttttctttccagctgttgctgtattggacacttgctgccatctactttcttctctagaatccactggtaagtcacatctaatgaagagaatatttaacca

SEQ ID NO: 584427 - DNA, 507 bp, Homo sapiens
gggtagatgtcccttctgtgtgttccagtagtgccctgctgtatacctgtcatggtatctgtgactctatatggacatttcctgcctgtctgtttctttagggttatagccatatgactgttgagaggtggaccatgccatcttcatcttgtaaatccagtgctggttctagtaccttagcatgtgactgttgattacatgaatgaagattgaaaaagctctgatatttaaacacaattagaattaatgccatgtggtaaataattaaataagtaattttttattgtaaatgtacatacataatttctaattcttaataactcctgataagagtctcaaggctttagttttttaaactccaacctaagttaactgaaatgttttaggtaaagaacataattctttatttttctttccagctgttgctgtattggacacttgctsccatctactttcttctctagaatccactggtaagtcacatctaatgaagagaatatttaacca

SEQ ID NO: 584428 - DNA, 271 bp, Homo sapiens
  misc_feature 257, 258, 259, 260, 261, 262, 263, 264, 265, 266, 267, 268,269, 270, 271: n = A,T,C or G
agctcagtgctaatagccaagagaatgggggaaacgcctagaagtcatttcataacttcacttcacagcattaattttctgtatctacataaagaawagaggtctatttgactcacagttcttcaggctgtaaagaaagcatagtggtttctgcttgtaggaggactcaggaagcctcccaattataccagaaggccaagcggcaatgaaatgtttcatatggcaggagtagaagcaagacagagagaggaaagagnnnnnnnnnnnnnnn

SEQ ID NO: 584429 - DNA, 271 bp, Homo sapiens
  misc_feature 257, 258, 259, 260, 261, 262, 263, 264, 265, 266, 267, 268,269, 270, 271: n = A,T,C or G
agctcagtgctaatagccaagagaatgggggaaacgcctagaagtcatttcataacttcacttcacagcattaattttctgtatctacataaagaatagaggtctawttgactcacagttcttcaggctgtaaagaaagcatagtggtttctgcttgtaggaggactcaggaagcctcccaattataccagaaggccaagcggcaatgaaatgtttcatatggcaggagtagaagcaagacagagagaggaaagagnnnnnnnnnnnnnnn

SEQ ID NO: 584430 - DNA, 341 bp, Homo sapiens
taatcttgtcttcattttataaaactttcttctctgyttttcttggtgtttcttttgttctattattttttcaaactctgctggctatgtattccaagtttttctatagacagaatcaagaggacatagaattacaggattttaaggaatcttggaatgaattaaaataccttctagtatttttacctgtgttgaacattctggtcaagtgattctctagatacagaatgtgaggctcaaaaagattaggatgctttttttttagacataggaattggcagaaatgagatttgaactcatggtaaagcccagtactcttgcttctttttatgtcctattgg

SEQ ID NO: 584431 - DNA, 341 bp, Homo sapiens
taatcttgtcttcattttataaaactttcttctctgcttttcttggtgtttcttttgttctattattttttcaaactctgctgsctatgtattccaagtttttctatagacagaatcaagaggacatagaattacaggattttaaggaatcttggaatgaattaaaataccttctagtatttttacctgtgttgaacattctggtcaagtgattctctagatacagaatgtgaggctcaaaaagattaggatgctttttttttagacataggaattggcagaaatgagatttgaactcatggtaaagcccagtactcttgcttctttttatgtcctattgg

SEQ ID NO: 584432 - DNA, 341 bp, Homo sapiens
taatcttgtcttcattttataaaactttcttctctgcttttcttggtgtttcttttgttctattattttttcaaactctgctggctatgtattccaagtttttctatagacagaatcaagaggacatagaattacagrattttaaggaatcttggaatgaattaaaataccttctagtatttttacctgtgttgaacattctggtcaagtgattctctagatacagaatgtgaggctcaaaaagattaggatgctttttttttagacataggaattggcagaaatgagatttgaactcatggtaaagcccagtactcttgcttctttttatgtcctattgg

SEQ ID NO: 584433 - DNA, 547 bp, Homo sapiens
cattttcaaaccaaaaattattagacccaaagctaaggagcaccttgtctcaacacataaactggaagaataacaaactaagagaagaaaaaaaaaaactcttcttgacattttccctcattacctaatttccaagtgacctgcaaatttctgattgctctccttttcccttcccatttttccctcttaagccttgtgccactgagagatgatayatcagttttttagaaaattatcagcagcagcaacatgtccacttattgtaaattgctttagttttgtttgagttttaaaataaaacctatttccagggcatattttctttcctgtgttgttttgtactaattaggggggaaaaaaaggaaagaacaaccctgcgtagaaaaaaagttgaaaaggttttacctttaacaaattcacaagtattttccaaagtgcgttttataaaactgtaccctttaatgcacctttaaaagcatcaatatttaaaataaaatcttagacaattatttcaaaataatttgcatttgcattcagggaatggttg

SEQ ID NO: 584434 - DNA, 668 bp, Homo sapiens
taatcatgatatgttattttattgagtactagctaaaactttcttttgttttatttaggattttcataatcatgaagaaatgaaagatctgatggatgaaaattgcattttgaagacagatatttctatactcagacaggaaatatgctcaatgaaaaatgacaacckggaaaagaaaataaatatcttaaggacgttaaaattgttagaaaaacaaatgctgcccttgtaaagtatataaaactcaatgaggaattgataacaaaaacagcattctggtatcaacaagagcttaatgatgtcaaagctgagaatacaaggctcaattccgaactgttgaaggaagaagaaagcaacaaaagactggaagctgaaactgaatcttatcagtctagactggctgctactataagtaaacacagtgaaagtgtgaaaacagaaagaaacctaaaacttgctttagagagaacgcaagatgtttccgtacaagtaaaaatgagttctgatatttccgaagtagaagataagaatgagtttcttactgaacaactttctaaaacacaaaataaattcaataccttaaaagataagttccgtaagacaagagatactctcagaaaaaagtcattggcttcagaaactgtacaaaacgacctaagccaaacaca

SEQ ID NO: 584435 - DNA, 570 bp, Homo sapiens
aagtaaacacagtgaaagtgtgaaaacagaaagaaacctaaarcttgctttagagagaacgcaagatgtttccgtacaagtaaaaatgagttctgatatttccgaagtagaagataagaatgagtttcttactgaacaactttctaaaacacaaaataaattcaataccttaaaagataagttccgtaagacaagagatactctcagaaaaaagtcattggcttcagaaactgtacaaaacgacctaagccaaacacagcagcaaataaaggaaatgaaagagatgtatcaaaatgcagaagctaaagtgggtaattccactggaaagtggagctgtgtagaagagaggatatgtcaattccaacatgaaaatccgtgcattgaacagcaactagatgatgttcatcagaaagagtatcataaagagatagtaactaatatccaaagaggctttattgagagtggaaagacctcgtgctagaagagaaaaataagaagctaatgaatgaatgtgatcatttaaaagaaagtctctttcaatatgagagagagaaagcagaaagagtagta

SEQ ID NO: 584436 - DNA, 376 bp, Homo sapiens
atagggacaaaaagtagattaatgtttgcaaagggctgggactggaagctggtagtgactgctaatgggcrtgagggatcttgcagtgatggaaatgctgtaaagctggattgtagagatggctgccaactcagtaaatggactaaaaatcttttaactttaagttaaaacagatacttctatagtatgtaaactatatttcaacaaagctgttttaataaaaaaaggaaaaatgtgtttactatatcccagcttagaaacatgcctcatttctaggaaataaaaggtagaggtgagagatgatttactttgagaaaagacattgtgtcacctatgaaattttattaggcacagagtcatattttaaggtagatag

SEQ ID NO: 584437 - DNA, 376 bp, Homo sapiens
atagggacaaaaagtagattaatgtttgcaaagggctgggactggaagctggtagtgactgctaatgggcgtgagggatcttgcagtgatggaaatgctgtaaagytggattgtagagatggctgccaactcagtaaatggactaaaaatcttttaactttaagttaaaacagatacttctatagtatgtaaactatatttcaacaaagctgttttaataaaaaaaggaaaaatgtgtttactatatcccagcttagaaacatgcctcatttctaggaaataaaaggtagaggtgagagatgatttactttgagaaaagacattgtgtcacctatgaaattttattaggcacagagtcatattttaaggtagatag

SEQ ID NO: 584438 - DNA, 376 bp, Homo sapiens
atagggacaaaaagtagattaatgtttgcaaagggctgggactggaagctggtagtgactgctaatgggcgtgagggatcttgcagtgatggaaatgctgtaaagctggattgtagagatggctgccaactcagtaaatggactaaaaatcttttaactttaagttaaaacagatacttctatagtatgtaaaytatatttcaacaaagctgttttaataaaaaaaggaaaaatgtgtttactatatcccagcttagaaacatgcctcatttctaggaaataaaaggtagaggtgagagatgatttactttgagaaaagacattgtgtcacctatgaaattttattaggcacagagtcatattttaaggtagatag

SEQ ID NO: 584439 - DNA, 376 bp, Homo sapiens
atagggacaaaaagtagattaatgtttgcaaagggctgggactggaagctggtagtgactgctaatgggcgtgagggatcttgcagtgatggaaatgctgtaaagctggattgtagagatggctgccaactcagtaaatggactaaaaatcttttaactttaagttaaaacagatacttctatagtatgtaaactatatttcaacaaagctgttttaataaaaaaaggaaaaatgtgtttactatatcccagcttagaaacatgcctcatttctaggaaataaaaggtagagrtgagagatgatttactttgagaaaagacattgtgtcacctatgaaattttattaggcacagagtcatattttaaggtagatag

SEQ ID NO: 584440 - DNA, 416 bp, Homo sapiens
tataccccccgttatattgttccttatgtccagcaagggagaaaatattaatcccaatatggaacagggtgtacacacccatgaggtattgttcctaatatccagggagggaaaggatgatattactcccaatgttgcagtggtgtataacccccccgtgatatwgttcctaatatctaggtggggaaagtacagtattactcccaatatagcaggggttgtacaccgcctttgtgatattgttctaaatatacatggggaaagaaaatgatagtactccccaatatcgcaggtggtgtacaaccccttgtgatactgtttctaatatccatgttgggggaggatattactcccaatattgcacgtgttgcacagaccccctttgatattgtttgtactatgcagggtgtgggggg

SEQ ID NO: 584441 - DNA, 416 bp, Homo sapiens
tataccccccgttatattgttccttatgtccagcaagggagaaaatattaatcccaatatggaacagggtgtacacacccatgaggtattgttcctaatatccagggagggaaaggatgatattactcccaatgttgcagtggtgtataacccccccgtgatattgttcctaatatctaggtggggaaagtacagtattactcccaatatagcaggggttgtacaccgcctttgtgatattgttctaaatatmcatggggaaagaaaatgatagtactccccaatatcgcaggtggtgtacaaccccttgtgatactgtttctaatatccatgttgggggaggatattactcccaatattgcacgtgttgcacagaccccctttgatattgtttgtactatgcagggtgtgggggg

SEQ ID NO: 584442 - DNA, 631 bp, Homo sapiens
tttatctgttgattcacatcttttattgctagctgaagattcaaagctccagaggaattgaaggcttaattgctatttcctagctactcagaataagtaggtagaagaatctacccctttggcagttgaagggaactacctttcatcaaggttgcatttgtgggagatttctgcaaaagaaagagtgagctgcatttggaaagagaggttggatgctaaacaaaagcaagcaaacaaacaaagcawaacaaaaaataaaacagtaatgacattctttaacagaaactggttaaaatagagtttcatactaattctaatgaaatccaagcaaccaactttacaagactgttagtataacaggatatgcaggctccagttatttactgctgctaacaaaatatctgcaaatcttagcagttaaagacaaccaccattgtattatatctcacaattttgagttaggaatttggacagggctcagctgggtgattcttctgctctatatggtatcagctaaggttatcagtgatatctagttggtgattaggttgatctggagcatcccagatggcttcatcatttctgttcacttgggagggatgactgaaaagctaaaatgaactgggactgt

SEQ ID NO: 584443 - DNA, 581 bp, Homo sapiens
tgagcaactaggaggtgagtcctctgaggctgaggaggcattctgccagatggctttttataatgtttctccagaggcatctgtctcattatcaatggcttttgtcttggaagtctctctttaattttataaactgacatgacctcttgttctgttatgaatgcaggtagctttagtccttcaatatcttcaatatctctatcacacattttcaccatgtcatctatacctttacactacagtccartttctccaacagcttgactttctgtgttataagtatttctacttttccttatcgttgctgctcgtagggatatctacaggtcttattgacattttcagtatgttaacatcacagagcagagaataagcaaaaatacacaatgggtaatgcacttaggtcccgtctgtggggatcctgcctttggcgtgtccagcttgcacatgtgccattctgtgaccctttttgggtgtacttacatggggaaatctgagcatgtgtacaaaagttatactgcagctgaagggggctgagagggtcttttttcactagagaacatcaaataaactgtgtgttg

SEQ ID NO: 584444 - DNA, 532 bp, Homo sapiens
agtcttctggaatcctatgtgagggtcaaacattcagaccccagcagtagtgttctggaatcctatgtgagggtcaaacattcagaccccagcagtagtgttctggaatcctatgtgagggcaaacattcagacccacgtggcagtgttctggaatcctatgtgagggacaaatattcagaccacagcaggagtgctctggaatcctatrtgagggacaaacattcagaaccttgtagcagtgtcctggaatcttatgtgagggagagacatttagaccctcacagcagtgttccggtatcccatgtgagggacaaacattcagaccctcccagccgtgttctggaattctatgtgagggaaagacattcaaaccccagcagcagtgttctggaatccgatttgaggggcagacattcagaccccagcagcagtgttctggaatccgatttaaggggcagacattcagaccccagcaacagtgttctggaatgctatgtgaaggacaaacattaagactctcgtagcagtgt

SEQ ID NO: 584445 - DNA, 312 bp, Homo sapiens
cagcagcagtgttctggaatccgatttgaggggcagacattcagaccccagcagcagtgttctggaatccgatttaaggggcagacaytcagaccccagcaacagtgttctggaatgctatgtgaaggacaaacattaagactctcgtagcagtgtcctggaatcatatgtgagggacaaccattcagacaccagcagaagtgttctggaatcctaggtgtgggaaaaacattcagaacctagtagcagtgttctggaatcctatgtgagggacatacattcagaccacggcagcagtgttctggaatggta

SEQ ID NO: 584446 - DNA, 531 bp, Homo sapiens
caaacattcagaccacagcagcagtgttctggaatcstatatgacggaccaacatgcagacccttgcaacagtgttctggaatactaggtgagggagaaatattcacaccctcgtagcagtgttctggaattctatgtgactgacaaacattcagactccagcagcagtgttctgtaatcctatgtgagggacaaacattcagaccccaagagcagtgttctgaaattctatgttaagggaaacattgagaccccagcatgaatgttctggaatcctatgtgagggacaaacattcagaccacggcaggagtgttctggaatcttatgtgaggaacaaacattcagaccacagcaggagtattctggaatcccatatgagggataagcattcagaccctcgtagcagtgttctggaatcctatgtgagggagaagcattcagagcacagcaggagtgctctggaatcctatgttagggacaaacattcagaacctcgtaacattgtgctgaaaacctatgtgagggacaga

SEQ ID NO: 584447 - DNA, 531 bp, Homo sapiens
caaacattcagaccacagcagcagtgttctggaatcctatatgacggaccaacatgcagacccttgcaacagtgttctggaatactaggtgagggagaaatattcacaccctygtagcagtgttctggaattctatgtgactgacaaacattcagactccagcagcagtgttctgtaatcctatgtgagggacaaacattcagaccccaagagcagtgttctgaaattctatgttaagggaaacattgagaccccagcatgaatgttctggaatcctatgtgagggacaaacattcagaccacggcaggagtgttctggaatcttatgtgaggaacaaacattcagaccacagcaggagtattctggaatcccatatgagggataagcattcagaccctcgtagcagtgttctggaatcctatgtgagggagaagcattcagagcacagcaggagtgctctggaatcctatgttagggacaaacattcagaacctcgtaacattgtgctgaaaacctatgtgagggacaga

SEQ ID NO: 584448 - DNA, 531 bp, Homo sapiens
caaacattcagaccacagcagcagtgttctggaatcctatatgacggaccaacatgcagacccttgcaacagtgttctggaatactaggtgagggagaaatattcacaccctcgtagcagtgttctggaattctatgtgactgacaaacattcagactccagcagcagtgttctgtaatcctatgtgagggacaaacattcagaccccaagagcagtgttctgaaatyctatgttaagggaaacattgagaccccagcatgaatgttctggaatcctatgtgagggacaaacattcagaccacggcaggagtgttctggaatcttatgtgaggaacaaacattcagaccacagcaggagtattctggaatcccatatgagggataagcattcagaccctcgtagcagtgttctggaatcctatgtgagggagaagcattcagagcacagcaggagtgctctggaatcctatgttagggacaaacattcagaacctcgtaacattgtgctgaaaacctatgtgagggacaga

SEQ ID NO: 584449 - DNA, 393 bp, Homo sapiens
ttctgaaattctatgttaagggaaacattgagaccccagcatgaatgttctggaatcctatgtgagggacaaayattcagaccacggcaggagtgttctggaatcttatgtgaggaacaaacattcagaccacagcaggagtattctggaatcccatatgagggataagcattcagaccctcgtagcagtgttctggaatcctatgtgagggagaagcattcagagcacagcaggagtgctctggaatcctatgttagggacaaacattcagaacctcgtaacattgtgctgaaaacctatgtgagggacagacatttagaccctcgcagcagtgttctggaatcccatatgagggtcaaacattcagatcctcgcagcagtgttctggaatt

SEQ ID NO: 584450 - DNA, 393 bp, Homo sapiens
ttctgaaattctatgttaagggaaacattgagaccccagcatgaatgttctggaatcctatgtgagggacaaacattcagaccayggcaggagtgttctggaatcttatgtgaggaacaaacattcagaccacagcaggagtattctggaatcccatatgagggataagcattcagaccctcgtagcagtgttctggaatcctatgtgagggagaagcattcagagcacagcaggagtgctctggaatcctatgttagggacaaacattcagaacctcgtaacattgtgctgaaaacctatgtgagggacagacatttagaccctcgcagcagtgttctggaatcccatatgagggtcaaacattcagatcctcgcagcagtgttctggaatt

SEQ ID NO: 584451 - DNA, 463 bp, Homo sapiens
aacattcagactccagcagcagtgttctgtaatcctatgtgagggacaaacattcagaccccaagagcagtgttctgaaattctatgttaagggaaacattgagaccccagcatgaatgttctggaatcctatgtgagggacaaacattcagaccacggcaggagtgttctggaatcytatgtgaggaacaaacattcagaccacagcaggagtattctggaatcccatatgagggataagcattcagaccctcgtagcagtgttctggaatcctatgtgagggagaagcattcagagcacagcaggagtgctctggaatcctatgttagggacaaacattcagaacctcgtaacattgtgctgaaaacctatgtgagggacagacatttagaccctcgcagcagtgttctggaatcccatatgagggtcaaacattcagatcctcgcagcagtgttctggaa

SEQ ID NO: 584452 - DNA, 463 bp, Homo sapiens
aacattcagactccagcagcagtgttctgtaatcctatgtgagggacaaacattcagaccccaagagcagtgttctgaaattctatgttaagggaaacattgagaccccagcatgaatgttctggaatcctatgtgagggacaaacattcagaccacggcaggagtgttctggaatcttatgtgaggaacaaacattcagaccacagcaggagtattctggaatcccatatgagggataagcattcagaccctcgtagcagtgttctggaatcctatgtgagggagaagcattcagagcacagcaggagtgctctggaatcctatgttagggacaaacattcagaacctcgtaacattgtgctgraaacctatgtgagggacagacatttagaccctcgcagcagtgttctggaatcccatatgagggtcaaacattcagatcctcgcagcagtgttctggaa

SEQ ID NO: 584453 - DNA, 393 bp, Homo sapiens
ttctgaaattctatgttaagggaaacattgagaccccagcatgaatgttctggaatcctatgtgagggacaaacattcagaccacggcaggagtgttctggaatcttatgtgaggaacaaacattcagaccacagcaggagtattctggaatcccatatgagggataagcattcagaccctcgtagcagtgttctggaatcctatgtgagggagaagcattcagagcacagcaggagtgctctggaatcctatgttagggacaaacattcagaacctcgtaacattgtgctgaaaacctatgtgagggacagacatttagaccctmgcagcagtgttctggaatcccatatgagggtcaaacattcagatcctcgcagcagtgttctggaatt

SEQ ID NO: 584454 - DNA, 393 bp, Homo sapiens
ttctgaaattctatgttaagggaaacattgagaccccagcatgaatgttctggaatcctatgtgagggacaaacattcagaccacggcaggagtgttctggaatcttatgtgaggaacaaacattcagaccacagcaggagtattctggaatcccatatgagggataagcattcagaccctcgtagcagtgttctggaatcctatgtgagggagaagcattcagagcacagcaggagtgctctggaatcctatgttagggacaaacattcagaacctcgtaacattgtgctgaaaacctatgtgagggacagacatttagaccctcgcagcagtgttctggaatcccatrtgagggtcaaacattcagatcctcgcagcagtgttctggaatt

SEQ ID NO: 584455 - DNA, 580 bp, Homo sapiens
aatattcacaccctcgtagcagtgttctggaattctatgtgactgacaaacattcagactccagcagcagtgttctgtaatcctatgtgagggacaaacattcagaccccaagagcagtgttctgaaattctatgttaagggaaacattgagaccccagcatgaatgttctggaatcctatgtgagggacaaacattcagaccacggcaggagtgttctggaatcttatgtgaggaacaaacattcagaccacagcaggagtattctggaatcccatatgagggataagcattcagaccctcgtagcagtgttctggaatcctatgtgagggagaagcattcagagcacagcaggagtgctctggaatcctatgttagggacaaacattcagaacctcgtaacattgtgctgaaaacctatgtgagggacagacatttagaccctcgcagcagtgttctggaatcccatatgagggtcaaayattcagatcctcgcagcagtgttctggaattctatgtgagtgacaaacattcagactccagcagcagtgttctgtattcctatgtgaaggacaaacat

SEQ ID NO: 584456 - DNA, 601 bp, Homo sapiens
ctgactctgggccctgttgacccaagcaggctcccgttgtggtgggttgtgtcacccaacaatgtcactgttactgagtccccatcgcctctgtgttgtggagcagttagagacacacagcagtgtctgtgagtagctctgcgtgaaggaccattttctaaatgagagtcacatctcaacacagctcactgatcagactcagatgagtgggatctgctctcttctattcctcctggcttggggacagtcactatcaggtgggtggttttggcctctgggcagctactgagggtaatccctgaacactcaccgggtgcctrttctgtgctgacagtcgtctcattcatcctcgcagcaattcctttctgcatcttttctgatcacccccgtgaccacccaggacaaccccatcagggccctgtcaccaggcccagtccagctccatgataaccaagacacaggtccagagacaaccgtcctgcatcatgcctgcatctgaccccccttgggggtagtgaccagcacaacatggaagaagccagggcagccagctgctctgcagccccaaatggctcctgggccttgggaagtcattcttaaa

SEQ ID NO: 584457 - DNA, 601 bp, Homo sapiens
ctgactctgggccctgttgacccaagcaggctcccgttgtggtgggttgtgtcacccaacaatgtcactgttactgagtccccatcgcctctgtgttgtggagcagttagagacacacagcagtgtctgtgagtagctctgcgtgaaggaccattttctaaatgagagtcacatctcaacacagctcactgatcagactcagatgagtgggatctgctctcttctattcctcctggcttggggacagtcactatcaggtgggtggttttggcctctgggcagctactgagggtaatccctgaacactcaccgggtgcctgttctgtgctgacagtcgtctcattcatcctcgcagcaattcctttctgcatcttttctgatcacccccgtgaccacccaggacaaccccatcagggccctgtcaccaggcccagtccagctccatgataacmaagacacaggtccagagacaaccgtcctgcatcatgcctgcatctgaccccccttgggggtagtgaccagcacaacatggaagaagccagggcagccagctgctctgcagccccaaatggctcctgggccttgggaagtcattcttaaa

SEQ ID NO: 584458 - DNA, 601 bp, Homo sapiens
ctgactctgggccctgttgacccaagcaggctcccgttgtggtgggttgtgtcacccaacaatgtcactgttactgagtccccatcgcctctgtgttgtggagcagttagagacacacagcagtgtctgtgagtagctctgcgtgaaggaccattttctaaatgagagtcacatctcaacacagctcactgatcagactcagatgagtgggatctgctctcttctattcctcctggcttggggacagtcactatcaggtgggtggttttggcctctgggcagctactgagggtaatccctgaacactcaccgggtgcctgttctgtgctgacagtcgtctcattcatcctcgcagcaattcctttctgcatcttttctgatcacccccgtgaccacccaggacaaccccatcagggccctgtcaccaggcccagtccagctccatgataaccaagacrcaggtccagagacaaccgtcctgcatcatgcctgcatctgaccccccttgggggtagtgaccagcacaacatggaagaagccagggcagccagctgctctgcagccccaaatggctcctgggccttgggaagtcattcttaaa

SEQ ID NO: 584459 - DNA, 486 bp, Homo sapiens
  misc_feature 58, 92, 93, 116: n = A,T,C or G
taggccatcacttaccagagatgccttcaagaacatcagtgagctctttgccaatcangtccaggtaaggattctggtacccacgccatggnnaccttgttagtgcgtgtctcagnggacatccatgaccaagcatcctggacatcatcytcatacacaaggaagctcttaccaaagtcacagagaacaggcaacatgtggcagaagggaagacagaggtgcagaggctgatggcatcattatcacaggaacaggatttctttggccactttggctgaaattcaccacttccatccaattcactcaagtgagatacttgaaatcacagatggagcatttcttgcaacaagagatactattttttcaaaaagtcacctaaaatttgatagtgttgaatgactagctattcgattgtggacttttttccagttcatgggtactttctacagcagaatgataacagtatcaaagagctggtgccagcta

SEQ ID NO: 584460 - DNA, 500 bp, Homo sapiens
  misc_feature 191, 225, 226, 249: n = A,T,C or G
agatggacacaggccacccagctcaacctcacagccaatgagttgacaagcaagcagatgacagtgacaggcttttagaaagagcatcagaaggtggccagttttcttagcctcaaccggccttggaacttgctaggccatcacttaccagagatgccttcaagaacatcagtgagctctttgccaatcangtccaggtaaggattctggtacccacgccatggnnaccttgttagtgcgtgtctcagnggacatccatgaccaagcatcctggacatcatcctcatacacaaggaagctmttaccaaagtcacagagaacaggcaacatgtggcagaagggaagacagaggtgcagaggctgatggcatcattatcacaggaacaggatttctttggccactttggctgaaattcaccacttccatccaattcactcaagtgagatacttgaaatcacagatggagcatttcttgcaacaagagatactattttttcaa

SEQ ID NO: 584461 - DNA, 500 bp, Homo sapiens
  misc_feature 191, 225, 226, 249: n = A,T,C or G
agatggacacaggccacccagctcaacctcacagccaatgagttgacaagcaagcagatgacagtgacaggcttttagaaagagcatcagaaggtggccagttttcttagcctcaaccggccttggaacttgctaggccatcacttaccagagatgccttcaagaacatcagtgagctctttgccaatcangtccaggtaaggattctggtacccacgccatggnnaccttgttagtgcgtgtctcagnggacatccatgaccaagcatcctggacatcatcctcatacacaaggaagctcttaccaaagtcacrgagaacaggcaacatgtggcagaagggaagacagaggtgcagaggctgatggcatcattatcacaggaacaggatttctttggccactttggctgaaattcaccacttccatccaattcactcaagtgagatacttgaaatcacagatggagcatttcttgcaacaagagatactattttttcaa

SEQ ID NO: 584462 - DNA, 500 bp, Homo sapiens
  misc_feature 191, 225, 226, 249: n = A,T,C or G
agatggacacaggccacccagctcaacctcacagccaatgagttgacaagcaagcagatgacagtgacaggcttttagaaagagcatcagaaggtggccagttttcttagcctcaaccggccttggaacttgctaggccatcacttaccagagatgccttcaagaacatcagtgagctctttgccaatcangtccaggtaaggattctggtacccacgccatggnnaccttgttagtgcgtgtctcagnggacatccatgaccaagcatcctggacatcatcctcatacacaaggaagctcttaccaaagtcacagagaacaggcaacatgtggcagaagggaagacagaggtgcagaggctgatggcrtcattatcacaggaacaggatttctttggccactttggctgaaattcaccacttccatccaattcactcaagtgagatacttgaaatcacagatggagcatttcttgcaacaagagatactattttttcaa

SEQ ID NO: 584463 - DNA, 486 bp, Homo sapiens
  misc_feature 58, 92, 93, 116: n = A,T,C or G
taggccatcacttaccagagatgccttcaagaacatcagtgagctctttgccaatcangtccaggtaaggattctggtacccacgccatggnnaccttgttagtgcgtgtctcagnggacatccatgaccaagcatcctggacatcatcctcatacacaaggaagctcttaccaaagtcacagagaacaggcaacatgtggcagaagggaagacagaggtgcagaggctgatggcatcattatcacaggaacaggatttctttggccactttggctgaaattcaccacttccatccaattcactcaagtgagatacttgaaatcacagatggascatttcttgcaacaagagatactattttttcaaaaagtcacctaaaatttgatagtgttgaatgactagctattcgattgtggacttttttccagttcatgggtactttctacagcagaatgataacagtatcaaagagctggtgccagcta

SEQ ID NO: 584464 - DNA, 486 bp, Homo sapiens
  misc_feature 58, 92, 93, 116: n = A,T,C or G
taggccatcacttaccagagatgccttcaagaacatcagtgagctctttgccaatcangtccaggtaaggattctggtacccacgccatggnnaccttgttagtgcgtgtctcagnggacatccatgaccaagcatcctggacatcatcctcatacacaaggaagctcttaccaaagtcacagagaacaggcaacatgtggcagaagggaagacagaggtgcagaggctgatggcatcattatcacaggaacaggatttctttggccactttggctgaaattcaccacttccatccaattcactcaagtgagatacttgaaatcacagatggagcatttcttgcaacaagagatactattttttcaaaaagtcacctaaaatttgatagtgttgaatgactagctattckattgtggacttttttccagttcatgggtactttctacagcagaatgataacagtatcaaagagctggtgccagcta

SEQ ID NO: 584465 - DNA, 448 bp, Homo sapiens
gaaaactctatatcactccctactctccgtgatttcctcttgccatgtgagacaattcactctttcattaccttgcacaatgattgaaagatttctgaggccccccagaagcagaagcactaagcttcctgtccactmtgcagaaccatgagccaattagacctctttttcaaaataaatcttaccaaaaatggcaaatgaggactggaacattgctataaagatacctgaaaatgtggaagcaacttcggaactgggtaatgggtagaggttggaagagtttggagggctccaaagaagacaaacagatgagaacacttttggaccatcttagagactggttaaatggctgtgacaagaatgctgacaaaaacatggacggtgaaggccaggctgagggggcctcagataaaaataagaagctttctggaaaatgtctcctttttgg

SEQ ID NO: 584466 - DNA, 448 bp, Homo sapiens
gaaaactctatatcactccctactctccgtgatttcctcttgccatgtgagacaattcactctttcattaccttgcacaatgattgaaagatttctgaggccccccagaagcagaagcactaagcttcctgtccactatgcagaaccatgagccaattaracctctttttcaaaataaatcttaccaaaaatggcaaatgaggactggaacattgctataaagatacctgaaaatgtggaagcaacttcggaactgggtaatgggtagaggttggaagagtttggagggctccaaagaagacaaacagatgagaacacttttggaccatcttagagactggttaaatggctgtgacaagaatgctgacaaaaacatggacggtgaaggccaggctgagggggcctcagataaaaataagaagctttctggaaaatgtctcctttttgg

SEQ ID NO: 584467 - DNA, 448 bp, Homo sapiens
gaaaactctatatcactccctactctccgtgatttcctcttgccatgtgagacaattcactctttcattaccttgcacaatgattgaaagatttctgaggccccccagaagcagaagcactaagcttcctgtccactatgcagaaccatgagccaattagacctctttttcaaaataaatcttaccaaaaatggcaaatgaggactggarcattgctataaagatacctgaaaatgtggaagcaacttcggaactgggtaatgggtagaggttggaagagtttggagggctccaaagaagacaaacagatgagaacacttttggaccatcttagagactggttaaatggctgtgacaagaatgctgacaaaaacatggacggtgaaggccaggctgagggggcctcagataaaaataagaagctttctggaaaatgtctcctttttgg

SEQ ID NO: 584468 - DNA, 448 bp, Homo sapiens
gaaaactctatatcactccctactctccgtgatttcctcttgccatgtgagacaattcactctttcattaccttgcacaatgattgaaagatttctgaggccccccagaagcagaagcactaagcttcctgtccactatgcagaaccatgagccaattagacctctttttcaaaataaatcttaccaaaaatggcaaatgaggactggaacattgctataaagatacctgaaaatgtggaagcaacttcggaactgggtaatgggtagaggttggaagagtttggagggctccaaagaagacaaacagatgagaacayttttggaccatcttagagactggttaaatggctgtgacaagaatgctgacaaaaacatggacggtgaaggccaggctgagggggcctcagataaaaataagaagctttctggaaaatgtctcctttttgg

SEQ ID NO: 584469 - DNA, 370 bp, Homo sapiens
ggtaatgggtagaggttggaagagtttggagggctccaaagaagacaaacagatgagaacacttttggaccatcttagagactggttaaatggctgtgacaagaatgctgacaaaaacatggacrgtgaaggccaggctgagggggcctcagataaaaataagaagctttctggaaaatgtctcctttttggatatggaaagcttacacaatgcctgtaccatcactgtaccttagacgcagtgaacttgccttttatttcagagactcgtaggcaaaagagaatgtagccttgacccagatgagactttggactttgtaactttgagttaatgctgaaatgagttaagactttgggagactgctggcaa

SEQ ID NO: 584470 - DNA, 370 bp, Homo sapiens
ggtaatgggtagaggttggaagagtttggagggctccaaagaagacaaacagatgagaacacttttggaccatcttagagactggttaaatggctgtgacaagaatgctgacaaaaacatggacggtgaaggccaggctgagggggcctcagataaaaataagaagctttctggaaaatgtctcctttttggatatggaaagcttacacaatgcctgtaccatcaytgtaccttagacgcagtgaacttgccttttatttcagagactcgtaggcaaaagagaatgtagccttgacccagatgagactttggactttgtaactttgagttaatgctgaaatgagttaagactttgggagactgctggcaa

SEQ ID NO: 584471 - DNA, 370 bp, Homo sapiens
ggtaatgggtagaggttggaagagtttggagggctccaaagaagacaaacagatgagaacacttttggaccatcttagagactggttaaatggctgtgacaagaatgctgacaaaaacatggacggtgaaggccaggctgagggggcctcagataaaaataagaagctttctggaaaatgtctcctttttggatatggaaagcttacacaatgcctgtaccatcactgtaccttagacgcagtgaacttgccttttatttcagagactcgtaggcaaaagagaatgtagccttgacccagatgagactttggactttgtaactttgagttaatgctgaartgagttaagactttgggagactgctggcaa

SEQ ID NO: 584472 - DNA, 561 bp, Homo sapiens
agcagattcaagtggaaggagcaatatataagggatagtacaggcaaacaggtataattactgaaactgaagttttgttcaattcccacttcattaccccaagccaataaatacagccatctaagccccatggagaaaacctagaagtgtgctactgagttgagaaaaggagctatagatataaataacacgtgccttaatgcaataattggaaaacaggttttcaactcaccgcagataacttttattctgatactttatagcctgaagataagaggaaaatgggcaactcttcataatcttgagatacatacacatacattgccactgtgtgaattatattgatatattgcctcttagctccaaatccactgtttttgccctggtgtaggatcctgtaagtgttcctctttgtgagtcagccattgtcagtagaatatgtgggagaatagaggacactgcaagagaagagagtttctcctccttgttcagttgcygtatatcttgctccaacaactcactgcagctctcctaccactggcttgaggagacccagtggtg

SEQ ID NO: 584473 - DNA, 498 bp, Homo sapiens
tttttgaatttctattaataatttatttaaacttctcatacacttcttggcactttctcccttatgttttaactataatgaatatgaattgttttgtaccactcagggggtgaataaaatcacwctgtttatttatcatattctatcagaacgaggttctagaaatataaaacagtttaaggttagcaggaagtccaggaccatattcttaaggccacctgtttaccatcttagataatacaaaaaaatcagcccaggaaataggtcccccagcttcccttgtccagagcgaaagggccagtgcttaccctttatgcagagtaagaaagcagaggtttagactgccagcaaaatagggcatcaataaggtgaggaaagtttactttactattattttttatagttttttcatctacaaatatagaaagtgtttttattttagcatgcacacaagtttagcattttatagtttagtattattttgactttgattcacac

SEQ ID NO: 584474 - DNA, 498 bp, Homo sapiens
tttttgaatttctattaataatttatttaaacttctcatacacttcttggcactttctcccttatgttttaactataatgaatatgaattgttttgtaccactcagggggtgaataaaatcacactgtttatttatcatattctatcagaacgaggttctagaaatataaaacagtttaaggttagcaggaagtccaggaccatattcttaaggccacctgtttaccatcttagataatacaaaaaaatcagcccaggaaataggtcccccagcttcccttgtccagagcgaaagggccagtgcttaccctttatgcagagtaagaaagcagaggtttagactgccagcaaaatagggcatcaayaaggtgaggaaagtttactttactattattttttatagttttttcatctacaaatatagaaagtgtttttattttagcatgcacacaagtttagcattttatagtttagtattattttgactttgattcacac

SEQ ID NO: 584475 - DNA, 498 bp, Homo sapiens
tttttgaatttctattaataatttatttaaacttctcatacacttcttggcactttctcccttatgttttaactataatgaatatgaattgttttgtaccactcagggggtgaataaaatcacactgtttatttatcatattctatcagaacgaggttctagaaatataaaacagtttaaggttagcaggaagtccaggaccatattcttaaggccacctgtttaccatcttagataatacaaaaaaatcagcccaggaaataggtcccccagcttcccttgtccagagcgaaagggccagtgcttaccctttatgcagagtaagaaagcagaggtttagactgccagcaaaatagggcatcaataaggtgaggaaagtttactttaytattattttttatagttttttcatctacaaatatagaaagtgtttttattttagcatgcacacaagtttagcattttatagtttagtattattttgactttgattcacac

SEQ ID NO: 584476 - DNA, 542 bp, Homo sapiens
tttgactttgattcacacgtggataagtgagtgagagtttcttaaacttttcagtgctctgggcctctgaacgtcttgccttggaagaatcttgacattgctgggtttgccaccaccaacccttgcttgcacacagaacaacaactgagttgctgggtcttccttcctctgcctattgctgctttcatcctatgtccctgcagaggccagcctggttttttgaaggacagtggctctgagtgtgatttcattccttcataaccagcttggttatggcttgccctggctcaaggcctcagtgctaatgtccagtcccatctgggtaccacacctggaaagccacattggaccctctggatctcagagggctcaaacacccacccacatggaacctgcagtctttatgtcctccatgtcctgagagatctatccagcatgaagggttcatttcacatgctggtgatygatctgaaaagccttaggtggtcaattagaaaagactgaaagggggacctaaccactctcaatgagtcactctccca

SEQ ID NO: 584477 - DNA, 542 bp, Homo sapiens
tttgactttgattcacacgtggataagtgagtgagagtttcttaaacttttcagtgctctgggcctctgaacgtcttgccttggaagaatcttgacattgctgggtttgccaccaccaacccttgcttgcacacagaacaacaactgagttgctgggtcttccttcctctgcctattgctgctttcatcctatgtccctgcagaggccagcctggttttttgaaggacagtggctctgagtgtgatttcattccttcataaccagcttggttatggcttgccctggctcaaggcctcagtgctaatgtccagtcccatctgggtaccacacctggaaagccacattggaccctctggatctcagagggctcaaacacccacccacatggaacctgcagtctttatgtcctccatgtcctgagagatctatccagcatgaagggttcatttcacatgctggtgattgatctgaaaagccttaggtggtcaattagaaaagactgaaagsgggacctaaccactctcaatgagtcactctccca

SEQ ID NO: 584478 - DNA, 542 bp, Homo sapiens
tttgactttgattcacacgtggataagtgagtgagagtttcttaaacttttcagtgctctgggcctctgaacgtcttgccttggaagaatcttgacattgctgggtttgccaccaccaacccttgcttgcacacagaacaacaactgagttgctgggtcttccttcctctgcctattgctgctttcatcctatgtccctgcagaggccagcctggttttttgaaggacagtggctctgagtgtgatttcattccttcataaccagcttggttatggcttgccctggctcaaggcctcagtgctaatgtccagtcccatctgggtaccacacctggaaagccacattggaccctctggatctcagagggctcaaacacccacccacatggaacctgcagtctttatgtcctccatgtcctgagagatctatccagcatgaagggttcatttcacatgctggtgattgatctgaaaagccttaggtggtcaattagaaaagactgaaagggggrcctaaccactctcaatgagtcactctccca

SEQ ID NO: 584479 - DNA, 463 bp, Homo sapiens
ctagcagggtaaaagagaagggtgaactttacttctgagtttcaatacattagacttcaatttaagattggctcccatctgttcattgagtggagagggcagtctgtaaagtggggagtccagtaggctggacctgttcataactattgccttctggtactataggtctctgaaaggggctggactcagggctagagattcagtgaagagggaggtgggccagcctwtaactcctcacctttatcccacacccctaggagacctgggctactgcagccttcaaactcttcatgtagatggatgaacctatgcccatgtcaacccctcttgacaataccatttagatgttcctatgttaatgtcctggatggcatcatgtgccaaatccttgggtgtctgaaaatatggcctatggaacagatctgacgagcagctgatttgacagaggtcaagaatatcttca

SEQ ID NO: 584480 - DNA, 218 bp, Homo sapiens
ttactcattttaaacagctatctgaaataggaagtgtaatataatytttaaagaatctgaaaacatgacagaaatgtttaaactataaacatatattgtatatgttagcatattgtatacattgcatattaacataagctagaatcattgacataaatttatataaacaaaaggtataaaatatgacaatgctcttcttgttttttgtctttgcatat

SEQ ID NO: 584481 - DNA, 392 bp, Homo sapiens
tgtaataccagctactgaggagctgaggcaggagaaytgcttgaacccaggaggtggaggctgtggtgagccgagatcacaccactgcgctctagcctgggcaacaagagcgaaacctgtctcaaaagaaaaaaaattagaaataaaagaacaaggaaacaaaagtaacaaggctgacaccagatgagcctgaatctaagcaagaaaagcccagaagaaatcccactttgggtcactggctgcatggtagtaataccatacacataagggaagagaggaggatgtggctttcactttgaattttttgagcttaaggtaacttttgcgtagctacaaagaagcattcaacagagagttaaacctatgatggaaagactgaaggggtccaagct

SEQ ID NO: 584482 - DNA, 392 bp, Homo sapiens
tgtaataccagctactgaggagctgaggcaggagaactgcttgaacccaggaggtggaggctgyggtgagccgagatcacaccactgcgctctagcctgggcaacaagagcgaaacctgtctcaaaagaaaaaaaattagaaataaaagaacaaggaaacaaaagtaacaaggctgacaccagatgagcctgaatctaagcaagaaaagcccagaagaaatcccactttgggtcactggctgcatggtagtaataccatacacataagggaagagaggaggatgtggctttcactttgaattttttgagcttaaggtaacttttgcgtagctacaaagaagcattcaacagagagttaaacctatgatggaaagactgaaggggtccaagct

SEQ ID NO: 584483 - DNA, 392 bp, Homo sapiens
tgtaataccagctactgaggagctgaggcaggagaactgcttgaacccaggaggtggaggctgtrgtgagccgagatcacaccactgcgctctagcctgggcaacaagagcgaaacctgtctcaaaagaaaaaaaattagaaataaaagaacaaggaaacaaaagtaacaaggctgacaccagatgagcctgaatctaagcaagaaaagcccagaagaaatcccactttgggtcactggctgcatggtagtaataccatacacataagggaagagaggaggatgtggctttcactttgaattttttgagcttaaggtaacttttgcgtagctacaaagaagcattcaacagagagttaaacctatgatggaaagactgaaggggtccaagct

SEQ ID NO: 584484 - DNA, 392 bp, Homo sapiens
tgtaataccagctactgaggagctgaggcaggagaactgcttgaacccaggaggtggaggctgtggtgagccgagatcacaccactgcgctctagcctgggcaacaagagcgaaacctgtctcaaaagaaaaaaaattaraaataaaagaacaaggaaacaaaagtaacaaggctgacaccagatgagcctgaatctaagcaagaaaagcccagaagaaatcccactttgggtcactggctgcatggtagtaataccatacacataagggaagagaggaggatgtggctttcactttgaattttttgagcttaaggtaacttttgcgtagctacaaagaagcattcaacagagagttaaacctatgatggaaagactgaaggggtccaagct

SEQ ID NO: 584485 - DNA, 512 bp, Homo sapiens
gcagtaagaactcttccctttgtatttattagatgcaaagaagaataaatttattaaaatttggtatctacaagtgaactgcagtatagaagtcatcctagccaaaccctatgagattgrgtaaaaatggtattgttagcagaacaggtgtgatgagtcaacagtgtcaaagagcatgatttctggaccaaaatatgaggggccattacagcagagtatacagtagtaccccttatccactatatgcacagaaagacatacttgacaagtttttctctgctgtcacaccacagcaacaatcatcaacaaagaaggcttctgtgaccaaatgtgtggagagtttttccccaccaacaaacaagcaatcatttctgctgatgacacaattcaattctcacaccctatctacagataacatcagatttaatttaatttataaattaaactttgtcatagatatgtatgtatagggaaaaacagcttatgattcagtactattcatggtttcatgc

SEQ ID NO: 584486 - DNA, 512 bp, Homo sapiens
gcagtaagaactcttccctttgtatttattagatgcaaagaagaataaatttattaaaatttggtatctacaagtgaactgcagtatagaagtcatcctagccaaaccctatgagattgggtaaaaatggtattgttagcagaacaggtgtgatgagtcaacagtgtcaaagagcatgatttctggaccaaaatatgaggggccattacagcagagtatacagtagtaccccttatccactatatgcacagaaagacatacttgacaagtttttctctgctgtcacaccacagcaacaatcatcaacaaagaaggcttctgtgaccaaatgtgtggagagtttttccccaccaacaaacaagcaatcatttctgctgatgacacaattcaattctcacaccctatctacagataacatcagatttaatttaatttataaattaaactttgtcatagatatgtatgtatagggaaaaacagcttrtgattcagtactattcatggtttcatgc

SEQ ID NO: 584487 - DNA, 580 bp, Homo sapiens
cactatcagccttatctcattaacaggacagagtgtatcccaggcatcaaatgtgaggtagatgtatacatgtgatgtgattggatttagaggacatagagcaatttgagttaatgaaattaaagttgagagtctaagaatagggaaagaccaagagaagtaaactgattcataacagctttgttaaatttttaaatcataggacagagttcttggaamaatttttaacagcaagtttccactaaaatagcaattaaaaccataaattaattctatagaatcacattatggtctatctaaatctactacttttcaatagatttggcattcatgtcttagtcataatgtatatttttcattttctaaatgacaaactggaacttttttatctagattatgaatcttatcagaaaaattctacaaagcaattggtactgtattatcttatatgacaccttaaccccaacattgtcatgattactatctgttgtgcgcaagggtaacagagaaataagaaactttctcacttcttctctcatgtaacaaatattcatcacactgattctcagacagcagaaat

SEQ ID NO: 584488 - DNA, 443 bp, Homo sapiens
agggtaaagacagctatgagttactagagatactaagaattactagaataactaatagttactagagatagtaagaatatcttaagtttcataaattgttaaaatgttttaaaaattaaatataaaattatgatctattggattctaaagctatagtctaaaaggtgatgtcatttggactatgctttgwtagtaaagcaaaaaaaaaaaacataatattaaacaagaacttaaattttcatatacctgtggttgcttcttttcacttctttcacacctttcttgctcttcctgtaaagccactggtaaggtttgttctgttgacaaattcattgatttagttcaaatgaactaagaagagttagataaagactataatctttataaaaataaatagagataacatttctttgtattttatattttgagagtttgaatgaaac

SEQ ID NO: 584489 - DNA, 602 bp, Homo sapiens
ttttcctttctcagtcttgctcctactcttgccatatgagacatctccttgccccttgacattctggtacgattgtgaggcttcctgagtcctgtcagatgcacaagccactatgcttccttacagcctgctgaatcattaaccaattaaacctcttttctttatgatcatggagcaaattatgactgcaaagtggatctattaaatgtcttcaaggccttctccctaatgtcttggcaatcagcactcagcttcttttcattcaagtatctgaagcctccttgaatttttccccagaaaatgggcttgtcttcctttaccacattgccagcctgcaacaaagatagctgataatgtagaagcaggttcagaagggggtagcagatgaagtttgggagagtttggaggacttcgaagacacggagatgagggaaagtttggatctttgtaaagaattgttaaatacttgtgrtcagcaggctcataggaaaatagacagtaaagatcagattgagaagctctgagatgaaaaggaggaacttcctgcaaacaggagccaaggttacttttgttttgctgcaacatggctgcacagtgaccct

SEQ ID NO: 584490 - DNA, 590 bp, Homo sapiens
ttgcgagcaaaaatttctgcccttgctatatattttatttttgaaaaaaccttaatactttaaatgcaaatatgaatcgaatgaatttcatcattatcccatgaagagttccagaaggatttctttggtgaatgaaacacaaatattaactattgcttcttctcccactcacttcataatcatgtaacagccagttatcaaggctacaaaaggtctgagtctgaccttctaacctgctcttggacataagcaagcacagcaggcaatgtatttcaaggcaattacaggcataactcgagtatttataggatacaacattgtaatagaactatctttttggtatttccgaggtaacacwtaaatcctgcaacagtggtggcccatcagtggtgggaaaagaccagttcctcctgagggtggaaaataatcttgtagttcaagttagtgaaggatgggcatttcttcttccattatattcaaagtggaatgagtgtgctgcagcttttttttttttttttttcatgatttcctcatgataatgttgcggttactttagcagggggtggaaaactgataagtgtaattgctgt

SEQ ID NO: 584491 - DNA, 590 bp, Homo sapiens
ttgcgagcaaaaatttctgcccttgctatatattttatttttgaaaaaaccttaatactttaaatgcaaatatgaatcgaatgaatttcatcattatcccatgaagagttccagaaggatttctttggtgaatgaaacacaaatattaactattgcttcttctcccactcacttcataatcatgtaacagccagttatcaaggctacaaaaggtctgagtctgaccttctaacctgctcttggacataagcaagcacagcaggcaatgtatttcaaggcaattacaggcataactcgagtatttataggatacaacattgtaatagaactatctttttggtatttccgaggtaacacttaaatcctgcaacagtggtggcccatcagtggtgggaaaagaccarttcctcctgagggtggaaaataatcttgtagttcaagttagtgaaggatgggcatttcttcttccattatattcaaagtggaatgagtgtgctgcagcttttttttttttttttttcatgatttcctcatgataatgttgcggttactttagcagggggtggaaaactgataagtgtaattgctgt

SEQ ID NO: 584492 - DNA, 430 bp, Homo sapiens
agggtgtgccaggaacaggtgggccaatcaccaacctcacatgctgccagtmacggtacatcagttcttctgccctagagttaggccccagtgccatctgcttttcctcaggactctgctccatcagccatcaggtggcagctactcatgctgttggaacctggccatccgggcttccttgagtgggtgaggttgctggcttgtccgcctgctacaggcacagccttgcagaggtggctggtttctctgagccagcttggccttgcctggcatgcataggccccaggtactgacactctgctcccagtcagcttgtcctgccttgggccaaattctaagtctggagaggaccacagaaggcagagtcccctggatggtaatcctgactactttctgcacttgaacataaagtcctcctcaagacagcctg

SEQ ID NO: 584493 - DNA, 430 bp, Homo sapiens
agggtgtgccaggaacaggtgggccaatcaccaacctcacatgctgccagtaacggtacatcagttcttctgccctagagttaggccccagtgccatctgyttttcctcaggactctgctccatcagccatcaggtggcagctactcatgctgttggaacctggccatccgggcttccttgagtgggtgaggttgctggcttgtccgcctgctacaggcacagccttgcagaggtggctggtttctctgagccagcttggccttgcctggcatgcataggccccaggtactgacactctgctcccagtcagcttgtcctgccttgggccaaattctaagtctggagaggaccacagaaggcagagtcccctggatggtaatcctgactactttctgcacttgaacataaagtcctcctcaagacagcctg

SEQ ID NO: 584494 - DNA, 430 bp, Homo sapiens
agggtgtgccaggaacaggtgggccaatcaccaacctcacatgctgccagtaacggtacatcagttcttctgccctagagttaggccccagtgccatctgcttttcctcaggactctgctccatcagccatcaggtggcagctactcatgctgttggaacctggccatccgggcttccttgagtgggtgaggttgctggcttgtccgcctgctacaggcacagccttgcagaggtggctggttkctctgagccagcttggccttgcctggcatgcataggccccaggtactgacactctgctcccagtcagcttgtcctgccttgggccaaattctaagtctggagaggaccacagaaggcagagtcccctggatggtaatcctgactactttctgcacttgaacataaagtcctcctcaagacagcctg

SEQ ID NO: 584495 - DNA, 430 bp, Homo sapiens
agggtgtgccaggaacaggtgggccaatcaccaacctcacatgctgccagtaacggtacatcagttcttctgccctagagttaggccccagtgccatctgcttttcctcaggactctgctccatcagccatcaggtggcagctactcatgctgttggaacctggccatccgggcttccttgagtgggtgaggttgctggcttgtccgcctgctacaggcacagccttgcagaggtggctggtttctctgagccagcttggccttgcctggcatgcataggccccaggtactgacactctgctccsagtcagcttgtcctgccttgggccaaattctaagtctggagaggaccacagaaggcagagtcccctggatggtaatcctgactactttctgcacttgaacataaagtcctcctcaagacagcctg

SEQ ID NO: 584496 - DNA, 237 bp, Homo sapiens
tctaagtctggagaggaccacagaaggcagagtcccctggatggtaatcctgactactttctgcacttgaacataaagtcctcctcaagacagcctgtggtctgcagctaggcaaccaagaaacccgcagtgccataggagccctgaggcatcgactggagccccaaaggcagggcacaccccgttcctgagcctgctgctcgtttcstctatatggctccatttgtagcacacttg

SEQ ID NO: 584497 - DNA, 237 bp, Homo sapiens
tctaagtctggagaggaccacagaaggcagagtcccctggatggtaatcctgactactttctgcacttgaacataaagtcctcctcaagacagcctgtggtctgcagctaggcaaccaagaaacccgcagtgccataggagccctgaggcatcgactggagccccaaaggcagggcacaccccgttcctgagcctgctgctcgtttcctctatrtggctccatttgtagcacacttg

SEQ ID NO: 584498 - DNA, 593 bp, Homo sapiens
tataccattaattttgctctgatctttatttcctttcttctacttattttaattgaagccatatttttctagttttataaaaggaataattagataatttatttcatgtctttattccactctaatataaacatttaaagctataaattttcttataagaactgctttagctatgcctatcaccaaaatttaaacatttagttttcattatgactcagataaaaataatttctaatttctcccatgacctctttgtgggttttctacaagwgacttgcttaaatgtgaaaaatatcatcctggcacccaggttaagttacttggaagtagttggttttttctcaggtcttgcttttatgtggagatccagagcctgctctgtctagagctcatgcttcccctctattgagcagtttccccaaagctccatgaattaagagtttttctagctggttcgttggtaaaggcacggttctcagccttgtgtgattgctggacactattcactctaatcttttcagactttttttgttcttactttggacaaaatcttcacaaacctgctcgaagagttttgaatactcaaagatctc

SEQ ID NO: 584499 - DNA, 620 bp, Homo sapiens
ctggttatataacggtgtggcacctctttcttctcyaagccttgctcctactcctgccgtaagaaacatttcattgctgttttcctactggtatgattgggaggcttcctgagtcccccgagaagcagaagccactatgctttctttacagcctacagaaccatgagccaattaaaccccttttcattatcatcatacagaaaataaagtactgtgaagtggagctatgaaatatctttaatgacatttccccatcgtcttggctgttagcactggacttcttttaatgcaaatatctgaagccttcttgaactttccccctgaaaatggacttctttttcttctacattgtcaggctgcaacaaagatagctgaaaatgtaaggcaggttcagaagtgggtaacagccagaggttggagagtttgcagagcttgaaagaagacaggaagatcaaggaaattttggaccatcgtaggcacttgttgaatagttgtgattaaaaggctggcagaaggatggacagtgaaggccaggcttacaaggtctcagatgaaaatgaggaaattactgggaacaggagccaaggttacttttgttttgctgtagcaaagaacatggc

SEQ ID NO: 584500 - DNA, 620 bp, Homo sapiens
ctggttatataacggtgtggcacctctttcttctccmagccttgctcctactcctgccgtaagaaacatttcattgctgttttcctactggtatgattgggaggcttcctgagtcccccgagaagcagaagccactatgctttctttacagcctacagaaccatgagccaattaaaccccttttcattatcatcatacagaaaataaagtactgtgaagtggagctatgaaatatctttaatgacatttccccatcgtcttggctgttagcactggacttcttttaatgcaaatatctgaagccttcttgaactttccccctgaaaatggacttctttttcttctacattgtcaggctgcaacaaagatagctgaaaatgtaaggcaggttcagaagtgggtaacagccagaggttggagagtttgcagagcttgaaagaagacaggaagatcaaggaaattttggaccatcgtaggcacttgttgaatagttgtgattaaaaggctggcagaaggatggacagtgaaggccaggcttacaaggtctcagatgaaaatgaggaaattactgggaacaggagccaaggttacttttgttttgctgtagcaaagaacatggc

SEQ ID NO: 584501 - DNA, 618 bp, Homo sapiens
ttatataacggtgtggcacctctttcttctccaagccttgctcctactcctgccgtaagaaacatttcattgctgttttcctactggtatgattgggaggcttcctgagtcccccgagaagcagaagccactatgctttctttacagcctacagaaccatgagccaattaaaccccttttcattatcatcatacagaaaataaagtactgtgaagtggagctatgaaatatctttaatgacatttccccatcgtcttggctgttagcactggacttcttttaatgcaaatatctgaagccttcttgaactttccccctgaaaatggacttctttttcttctacattgtcaggctgcaacaaagatagctgaaaatgtaaggcaggttcagaagtgggtaacagccagaggttggagagtttgcagagcttsaaagaagacaggaagatcaaggaaattttggaccatcgtaggcacttgttgaatagttgtgattaaaaggctggcagaaggatggacagtgaaggccaggcttacaaggtctcagatgaaaatgaggaaattactgggaacaggagccaaggttacttttgttttgctgtagcaaagaacatggctg

SEQ ID NO: 584502 - DNA, 200 bp, Homo sapiens
gtggttctttttccagatgtctctaaaggaaggctattcccctgctattcagagctgtgtccaaggaccagcacmaacatcacctgagtgctcatgagaaatgcagactcccatacctgctgagtcagaatgtgcactttccagaagttcctcaacgaattcatgacaatttgaatgccctgttctacactgatgtgctt

SEQ ID NO: 584503 - DNA, 617 bp, Homo sapiens
gacattctggaaaaggcaaaaccagggacacagtgaaaagatcaggggttgagaggggaaaaaaggagggatgagtaatcagaacatagaagatttttttaaggcagtggaactgctctgtataataccataatagtggatacgtgtcattatgcattcatccaaactcctagaatgtacagcacaaatagtgaactgtaatgtaaatgcagtgtgtaggtgtttatacaaaaaaacagatggaaagattttgtacatagctctatgtgaaaatgtatttatttattaagagcaaaaatatgcttatttcaaatttccacgtacgactttttcaaaaagacacgatccactgaaataaccctccaaaagaatttctataatctatagcaggtrtacatgttgttaatcaagtgcttaatgttactcgagctagcccattaattttagatcactgcaatatatggcatgggtgaaattatatttttataggctatacattcattttattgtactttggggccttttgtaaaatcaataaaaacattttcatgctttttttctaagacatgaaatacaagtttgctatttaaatataaaggtgcacatttgcatagtta

SEQ ID NO: 584504 - DNA, 500 bp, Homo sapiens
ggcttagaaaatgtgtcagagagaaagggctcaatgaactttcttgtgaatgaagggtatgggctttagcactcagacttttatgaagatggttttggcaactcaaaggccttgtttattttttattttttattttttttttggtgtctggaatgttgagattgacaaataggtgagttattataaatgaaatgatatcaaacaattgttctcttggcaacttgctataaatctgcaacttttacaacttcttttctagatcttgtagttaacaaatgccttaacaatgctaatgtagaatttaaagcatagaacacatttcagaatgttgtaaatgtttttatgaaaaacataatgttggtgaattttaaactctgtggagcctaccattagactttatttttccattatttttgagataaagaatacatctgattattctaaaatctraggaacttcaaatatgtacctctacataatttggagctaaataactgttt

SEQ ID NO: 584505 - DNA, 397 bp, Homo sapiens
gccaccagatctactcttaatccttttttccctactccctagaggttgaccattaagggctgcatcagtgggccttcttgccctttgtcttcaagtgaggttgaaccaatgaagagcacctgcaggggatcagaaagagggaagagagtgggtggtgatatgtatttccccatccccttcctacatgtcaccctaggatgagagagtcccttgactgaaggacacagctgctgcaagtgggtcctctctacagtcttcatatctccaggttctgctggagcaattacctcccycatctggctccttaggacctagaggtagtaaaggccccagagtaactggcccctgtggtctccctgtactctacccacaccttaataaacagtccctttattaa

SEQ ID NO: 584506 - DNA, 451 bp, Homo sapiens
cctctactgcccccttttacaagcaaaagcctagccaatgactgggcaattggatagcctaaccaaaagatctaaacaaaataaatcacagaatccagtagcttgatatttatgaggaactgaaatagaggctgatggattagctttttatattaaattaatttatttccatcaattataaattatccttgtctcctgaatgctcacctatctcaatgatataagagacaagcatttcttcttattttaatatgacagttactgaggttgatggcttacaaatgagaaaccgacccctggaaactgtcttcagaaaacaaatttttgagtwaacatatttaatagtatgccttgaaactgagtgggtattattcattagcaaataattgcataactggaattcttaattaaaatttgtgacgagaaatgaatctgtttattttataattat

SEQ ID NO: 584507 - DNA, 617 bp, Homo sapiens
attaaacacatttgtgaatgtgctcaaactattcaaagtttggtgtttggccagcaatgtttttctgcatgatttgaaaattttgcatacttggaacagaatttgcatttgattaggcaattaaaaaaaataaaagatatgacactgcaagaaaatgctacaaaaatgtaggcaggattcataaaacgacttctctttcactatacttccatatttgtttcctgtagcttcttttaaatgagaaataagatacccctgccagattaacactttgaaacatcatagtaaacacgagccgtaattatgaaggcayttttatctcttgagaggtggagacacagatgctaactcgattctcttcaactctgtaagacatttcatgattataaattcacattttctcatggttcctacttcaaaaagctcattaacccttaaagctctaaagctaaagtttcgtagtgtttctgttacatgtgataaattctgtatctactgaggacaggtacccactcacttttttttaatctttcttatcacttaatgaaatacactgcaaactacctaagtggaactcttggcctggctccgagtcctccttcaccctgtcctgttta

SEQ ID NO: 584508 - DNA, 611 bp, Homo sapiens
tggtttggttctgtttctttgtatttttttcccactttagaacatacaggaatgttgtagaacattctctctttctttgagaaacatttagcacggtttctaaatataccctgcagwgttaaattcctgtgtttggtttagactgagatctgttgacctaaggcaagacttcgacagattcagttttttcacctgtaaaatgggatggtacctacctcttagggctgagctagagattaattgagttaatctatataaacacttagaacattgcctggcacaaagcaagagctagatgctgtgtaactattagttactcttaacatctccctctcatttgagttcatttcctccaactgatatttcactgggcatccatttggtatggtcctgataagatgtctcgtctaattccttgtctcttctcccttaattgagttgattctcaaggttaatgcatttttattgatttattcttgggaacacagaagacagttcagagaatattcaaactaggagaaacaattttggccccagtgtagcctgctgggtgacctaacccttgctgggctttaatcctctgtctgtaagatggggataatacttaattg

SEQ ID NO: 584509 - DNA, 584 bp, Homo sapiens
gaagtccctggtggcactactgagaggggtgattgaacaggaccaaaaactcacctaggactcatcagggtagattgctggtggttgaggttataaataacttactgaccaaaactttttgaggtagctttaaatcagtgagtcttttgaatctatgcatatgcaggtgaaacccagccaaaaaaaaaaaaaaaaaagaaatgaaaatatgggagggattgctgactcagctaccttcattcacagagagtctcaaaacgtgggaataacagtaaccaaagttcagcttcctcaattgcaaataaagctgaaattctgtctgatttccatgaggtttcctctaatgttacctctctcctcagcatggaaccggagtatgctaaagccaggaaattcagcctatccaaaggaagcatcacagaagccactgtagaatcagccaaatctgcaggagttcagtttgtctttagcrtccttgaccttttaatgcatctcttcaactttgcttctccttgctcctgatatcctcttaggaattctgcagaagccgaccccaaaaccaccatttgggtatgagcaagtta

SEQ ID NO: 584510 - DNA, 543 bp, Homo sapiens
ccttagtagacttttaaaatatataacttgtgcccaatttataggctttctaggcaggtagagttggaagacttctttggtcaggaatgactgataagacttaaggtcctaggagggcataagcattgctcacctaagagttgtgagatgtgcatcacaaccgtgtgggctctacatgaaatcaggggtctgtctaaggaaacttccccaaatgtccaaggacagaagagcagacacagagttccctggatgtgcttactaagacactatggtttgtggtttattcttttatgagaatgtgagttccytgagtgtgtggctgcccttccatgggcatgtcactgctacttccactcagaagtgctcttcttaatcaaagtggccagtaacctacatgcttatctgagtgtggactttctgaattcctgttgtcattggcttcccaaagacttggagaaactgaggacattccatgaagccctacgtttgtcatcctataaaaacaaaaagagttttcaatgtctttatttgaccaagaaaaca

SEQ ID NO: 584511 - DNA, 560 bp, Homo sapiens
gaatgtgtgttgtttgaaaccaccaagtttgtggtaattttttacagcacccgtgggaaaccaatatattcttctttattataatgtgtcttggcatggatttcttttaatggtaagcatttctaatgtaagcatttagtgctatataatttcctctcaccactggctttagctgcatcccacataatttgatatgttgtattttcatttttattgagctctctattttttttaaaatttcctttgagactttcactttgaccatgggttatttagaagtgtgttgtttaattttcaagtatttggagatttcyctgttgtctttctgttttttgttttttagatttttgttttcttcctagtttgattccattttggtcagagaacacactctgtatgatttaatttattttaaaattgttgaggtttattttatggcgcaagttatggtctatgttgaagaatgtttcatggttacttttttttataaagtctattctgctgttttgggatagagtgttctctctgtgttgattaggtcctacttggttaattgtatt

SEQ ID NO: 584512 - DNA, 619 bp, Homo sapiens
gtactgtgcttcacttggttgccttgtcggcctcccctgctagccttgagggttgtatctccagggctcagcacagtatctgccacaaggtagccactcggtaaatgtttgctaaatgaattatgatctgtttccccagccttcttaatggaggaagcccacctaacttaatgataatgacagcatcaaatctttctgtagtttagagacaaattgatggccattactttttggtacagatatgtcatatgcctgttaaagtggattctgaatcagccagtgctggtagaggcattaactatggacaataacagaaatagagcaagtctgggctggaaagaaacataaagatcattagttcagccctttgcttttacagatgagtaawctggggtgcagagattaaacatcttggtgaagatcattcagactctacgtgatttttttttactcaaaacccagtgctttttccactcttctgtaccatgtgacagaaacagatgcacacacacacacacactagctgctgagcatacactgtgagtacagcagagggtatgccttttcggacacccagagtcacattccttgccctcaaaggcttcactgtctagttgga

SEQ ID NO: 584513 - DNA, 625 bp, Homo sapiens
aaaatcatatatgacttccccagtcagtcaccacatactctaattgacccataaaatgttatctctggcatgacactttataattgaccaatatggttagatcacagatcatataactaacaagcagccttagaaatttcctactttctcaatttatagacagacaaatggaggttcatcaagattaatgactgtctccaggtgacaaagcaagctagtggcagcagcagcatgtaactcagaacatctggatccttgtccctttccacctacctactataccaagtagttggtgtgtatttcctctatcactctaagtaaatatctacttaccttttatttaaaacaagcaagcagacagtttgagaaggagagcattattggcttgaagggaaaagtgccaatgtgtctaagaaaatattttcatttaacagtgcaggcctaattaagattcagccctctgttttataartcttgcaaatgcgtaaccttgttcttatgagaagctgttttggagaaccatgaaatatgggcttgtagcccatttacattgtactctgtgacatgtgaggtattgatgaagcattggaaggggtacactggcctttctttaaagagagagaag

SEQ ID NO: 584514 - DNA, 573 bp, Homo sapiens
gggaaattataactcctggtggtcaggaaatatttcttacacttggaattccctgctgtctttaaaaagtactttgcatgtagaagcttcattcaagtaatgtggagtgaatgagtgcttctgatatatagaaatatgagagacaaagaggagaaaaaacccaaaatctattattttcaagggatattcccacctggtctttgtgtggttttctgtttatagggagctagtaccttaagggttaagatcagttttaccaacaacagcagctgttcctggaggagctcaaggacattatgagattagcaggaataggactttgaagtctgtgctagtctctggaattccccagaccccctcctcaccccgcctgcccgctccgctccccttcttcaaaaacccacccgtctccaatttcccgagagtgttaaaaatgtaactgtggaatggtgtagctagataatgttgagtgtttttgcatcatayataaacagaaaagccttgggggcattttttagtccacttcacgtgtagactgctttcccttggtgcttgccattgcccagtgagacg

SEQ ID NO: 584515 - DNA, 573 bp, Homo sapiens
gggaaattataactcctggtggtcaggaaatatttcttacacttggaattccctgctgtctttaaaaagtactttgcatgtagaagcttcattcaagtaatgtggagtgaatgagtgcttctgatatatagaaatatgagagacaaagaggagaaaaaacccaaaatctattattttcaagggatattcccacctggtctttgtgtggttttctgtttatagggagctagtaccttaagggttaagatcagttttaccaacaacagcagctgttcctggaggagctcaaggacattatgagattagcaggaataggactttgaagtctgtgctagtctctggaattccccagaccccctcctcaccccgcctgcccgctccgctccccttcttcaaaaacccacccgtctccaatttcccgagagtgttaaaaatgtaactgtggaatggtgtagctagataatgttgagtgtttttgcatcatacataaacagaaaagccttgggggcattwtttagtccacttcacgtgtagactgctttcccttggtgcttgccattgcccagtgagacg

SEQ ID NO: 584516 - DNA, 609 bp, Homo sapiens
tataaggcatctaacagtgtatgttacagtgcaggtactcaataaacatcaactcccttaattcagtgggcagtgggagtccttaaagattacacagatgctaacaaattccaggaggaatgttscaagaacattgctcactgtgaaaaaggctaagtgtgttcagtaatggaaaattactttgttccagctagtaagatgcttgaaatgtgtaattccttttggccagtaaactgtttatcctgactcaattcagtgtcactagaaccaaattaccttatttcctgatcctgaattaatcttggattgatctctgaagtaacaaaattaggattttgctttgttttgtttctgcaatagtaatagggttgggagctttgaaaagaggcatttacttgtaaactattgctagtcctaatggtgcccagaaatgaaaaaaatatacaacttagcatcatagaatattagaactagaggggagtatagggaatacagtgatcatagttcttcaccagaattctggaaacgacacccctcagaagatcccgatgttttgtgaattcgaggcgcctgtgaatgtaattcgaaaacagagttgctagaaattcc

SEQ ID NO: 584517 - DNA, 554 bp, Homo sapiens
tcatctcatccaatgcagtgactctgggcagaagagtacaaattatatacacccactgagatagtcatctagagattaaattatttccccagcatcaaacaatgagtcagcagctgagctgtggcaaaaaggtaaagttctcgacttttcagccacagacaagcagaagtccccagtcaytgagagtcaaaaaatgctttatggtttccaagtgttttcatagcttccctccctcccatccttcctttctttcacaatattttgttatggatatattatatatcagaaaatgctgtccaggttattttgtttgatccttacatcaacactatgatacttctaaatactattctttgcatttcacagctgaggaaaatggaacccattcgagttgagagacttcccaaagggcacatagctagtaagcagcaaagtgccatggatgggagtggcaaagtactgatttcttatcctaaccttttttttttttaagcacattttctattcccctttagccataatatttgttctaatggctaagatttatttagtcc

SEQ ID NO: 584518 - DNA, 517 bp, Homo sapiens
tgtcaaagagatatttgcactccaatgtccactgcagcattagtcacaatagccaagatatagaaacactgtaaatgcatatgaaaatatgaatagatggatttatgaatgggcagagaaaatagtatgtacatacattgagatattattcagcctacaaggaaggagatcctgtcatatcctgccatatggatgaaccttgagaagattaagctacgtgaaataagccagtcacagaaggacaaatactgtatgattccatttatctgaggtatctaaagtagccaaacgcatagaagcagaaagtagaatggtggtttccagggactgggaggaggagaaaatggagagttgctgtttaatgagtaaagagtctcagtgatgcaagatgaaaaatttctagagctgtactgtacaacattgtacttagagatascaatactgtactatacactttaacatgttaagaggatagatctcatgtgctatttagcaaaataaaaaaatagaatgaatg

SEQ ID NO: 584519 - DNA, 579 bp, Homo sapiens
tacttgatatcaatgttttaatattgatgatgttcactttgatcacttggttaaagcagagtcttccaygttgctcctctgtaaagttactatttttccctttgaaaccatggtttttcaaagctagagtttcaggatgatacctgaagacctgtgtaacccatgatagtaatcactttgtccctctgggcttgaagggagggcaggaagtcaaatcatgttgtttctcctttggatctacatttactagaggtggtaggcagtataaatactttctccatctttgtcactgtagtcaaagaggagtacagagactcaagggacaattgttagtctcatgatgaaatgagaataatatgggttagattgtccaaggtttgaatcataggtctgcagtgttggacaagtctttaaccttctctttaacaaaatagtgataatagtttctatcttgcatgattgatttgaatattagagattataaatataaggtttccatgtaaggccagaccaatagtaggtacttaattaaaagtattagccgtatcttttgggagatgggatagatgtctctgtcct

SEQ ID NO: 584520 - DNA, 559 bp, Homo sapiens
gttattttttgcagcagggcacggaaagaatayggcagcttttctcaaatcagatcatttttctatgatagtgacaaagatgaaaagtcatggcagggaaggttggtaattaaaatacatctgtgtccaattagagtatgtattacaattattgagttggtagtgatatatgctggtaccaaggagaggatccgaagccctgaacaccataggcatgtgagcagggcattgcgttaggcaaaaattaaagtcaatatggatggagattatttatttattgaacagcaacactgtgcctggcatatgcccccagggcttaagacctaagttacatagacaggcagattgcctagccactaggtggtccatgcttgttggtgggcccacttaatgaagttcctcatctgtgcccaaatgtaaatcaagattctgtggactcaagctgatttataatattaatgccaaaactgaattctcgtttttcaaaggcagaaaagaaaaaagataatgtgcccctgttcacctttaagaatcttgctagaatagccgtgcaaattaa

SEQ ID NO: 584521 - DNA, 559 bp, Homo sapiens
gttattttttgcagcagggcacggaaagaatatggcagcttttctcaaatcagatcatttttctatgatagtgacaaagatgaaaagtcatggcagggaaggttggtaattaaaatacatctgtgtccaattagagtatgtrttacaattattgagttggtagtgatatatgctggtaccaaggagaggatccgaagccctgaacaccataggcatgtgagcagggcattgcgttaggcaaaaattaaagtcaatatggatggagattatttatttattgaacagcaacactgtgcctggcatatgcccccagggcttaagacctaagttacatagacaggcagattgcctagccactaggtggtccatgcttgttggtgggcccacttaatgaagttcctcatctgtgcccaaatgtaaatcaagattctgtggactcaagctgatttataatattaatgccaaaactgaattctcgtttttcaaaggcagaaaagaaaaaagataatgtgcccctgttcacctttaagaatcttgctagaatagccgtgcaaattaa

SEQ ID NO: 584522 - DNA, 622 bp, Homo sapiens
tggtagtgatatatgctggtaccaaggagaggatccgaagccctgaacaccataggcatgtgagcagggcattgcgttaggcaaaaattaaagtcaatatggatggagattatttatttattgaacagcaacactgtgcctggcatatgcccccagggcttaagacctaagttacatagacaggcagattgcctagccactaggtggtccatgcttgttggtgggcmcacttaatgaagttcctcatctgtgcccaaatgtaaatcaagattctgtggactcaagctgatttataatattaatgccaaaactgaattctcgtttttcaaaggcagaaaagaaaaaagataatgtgcccctgttcacctttaagaatcttgctagaatagccgtgcaaattaatattcttttcagtgaagctctgtattgtttcctaataggttatagggacagtttgagcatcttccttcctttgcaaggtgccagtaatcatctcagccaacaccagctggaagagatttggtgctcctggcttagctttgttaatctgaattatggaagccctgataacctctacataggaaagagggaaatgttacacacacacacgcatagacacaca

SEQ ID NO: 584523 - DNA, 622 bp, Homo sapiens
tggtagtgatatatgctggtaccaaggagaggatccgaagccctgaacaccataggcatgtgagcagggcattgcgttaggcaaaaattaaagtcaatatggatggagattatttatttattgaacagcaacactgtgcctggcatatgcccccagggcttaagacctaagttacatagacaggcagattgcctagccactaggtggtccatgcttgttggtgggcccacttaatgaagttcctcatctgtgcccaaatgtaaatcaagattctgtggactcaagctgatttataatattaatgccaaaactgaattctcgtttttcaaaggcagaaaagaaaaaagataatgtgcccctgttcacctttaagaatcttgctagaatagccgtgcaaattaatattcttttcagtgaagctctgtattgtttcctaataggttatagggacagtttgagcatcttccttcctttgcaaggtgccagtaatcatctcagccaacaccagctggaagagatttggtgctcctggcttagctttgttaatctgaattatggaagccctgataacytctacataggaaagagggaaatgttacacacacacacgcatagacacaca

SEQ ID NO: 584524 - DNA, 573 bp, Homo sapiens
ttttacttctaaattccaattatttttaggtaataatttaataaactggatttgttagaaatcaaactccaaaacccttttagcccattgtttgatatttttaattgtcctttaatctctttcaaaatctctccttctgtatagggaaggtctgatgaatttgaaattaattctaattaatctaattccatcactgattaaagctttctgatgtttccatctcaacctgcgcccccacttccccccgccttaggcgaagggcttatagcatcctcagcacgtacaccaccatctcatgtctgacacagttcttttgaagatcagtaacatttgttggaaaatactgagagccatgaaacttagattccattccaacccaatgcttccctaacttgctaaggccaaaagattgccaactgctctgggtcgcagttttcccattagtaaaatagaagacttggccataggtgatcttttagaatccattcaatttttttattctatcagaagtcacctaatgtttaamatatgcttgtaggataattcactttttcatttctcctcaaaatggtt

SEQ ID NO: 584525 - DNA, 607 bp, Homo sapiens
gctttagaacttactccttcaggaaagcaactctcactgaagtgtgggagcggagcagagaaaagactaggtaggaagagagccgagctcaattttatattccacaactaactggttctgactttctcaacaagtcgccaaagctagctgagtccaagttcctcatctgtaaaataaagatgttaccatctgtcccgccaaccccattttacttaatttcattgtgcgtgtctaaaatgaagttataaatgtgcgaaaagtccctcgtaatttataaattccatacaaatttgagggaatatatataattattattcttattaagtcccctccccctcgccccgattatttccttctgttgattcctgcagcccttgcaatttaaatggtacttctaaaaacgccctcttttatttcctggtgtattgtttctgtactttctgtttccttttgagtgtctaagaacccaaaggctggcactatgttgcttatttcttttctgtttttcctaacatttaatttattttctgaccccctgagatggagtgatgtgtcgaggmattgcattgtgtttataccctcttttgttttcctcccatgactgcaa

SEQ ID NO: 584526 - DNA, 577 bp, Homo sapiens
gaataaataaataataagtaaataaataatttttaaaaattgatttcaaagtttatattgaaaggcaaaagactcagaatagcctattgaaggagaaagtatagactaggtgcagtggcatgcacctgtagtccttggtatttgggaggctgagacaggagaatcgcttgagcccaggggttcgaggccagcctgggcaacatagcaagttcatatatcattttttaaagtatagtattggcaaaagaacagacaaataggtcaatggaatggaatggagagcccagatatttgacaaagaagcaaatgtaatacaatggagaagagacagctatttcaacaaattttactgtaacaactggatacmcacttggaaaaaaacattaatctagacagagaccttatacctttcacaaaaagtcacagacctaaatgtaaaactataaaatttctattagataatataggaaaaattctagatgaccttgggtttggcagtgacattttagatacagcaccaaaggcacagtctatgaaagaaggaagtggtaagctggaattcattaaaatcaaaaat

SEQ ID NO: 584527 - DNA, 570 bp, Homo sapiens
cacattttagtatttacccagaggagctgaaaacttatgtccacgcaaaaacttgtatatggatatttatacagctttgcttataatggccaaaacctggaagcaaccagaatgtccttcagtaggtgaatggataaactataatacattcggaccatggaatattattcaatattagaatgaaatgagctatcaatctatgaaaagacatgtgaggaaattaaatatatattattaagtgaaagaagccaatataaacaggctatgtactgtatgattccaaatatgacattctggaaaaggcaaaaccagggacacagtgaaaagatcaggggttgagaggggaaaaaaggagggatgagtaatcagaacatagaagatttttttaaggcagtggaacygctctgtataataccataatagtggatacgtgtcattatgcattcatccaaactcctagaatgtacagcacaaatagtgaactgtaatgtaaatgcagtgtgtaggtgtttatacaaaaaaacagatggaaagattttgtacatagctctatgtgaaaatgtatttatt

SEQ ID NO: 584528 - DNA, 548 bp, Homo sapiens
agttactgagcacccactgtgtgccagatggtgtccaaggttctgtagatatggacagcagggaaactaaagagacgatcttggctgtcacagaacccctgttctggtgtggggtgggagaccatggagtgaaaaagacagtaaacagccccacacccctacctagcagtgagggctctagaacaataaagtgtcagggcagagggttctggggtcagrcagatgcctgttcttgaatcttctgttgcttctagccactctcttctttacccttcatttcagtcttttgcattctcttcttgttttctgtctgctaattctctctcctttactcttctccatcttgttgaacatgagagaattatccaagaaagggaaattgatataaatgagaactgacacattatccaatttaagcacttatcaacgtcagctaaatttttgtgctcctccgcctgtcactgagctgggcctgtgagtttgggtggagtgaccgctcctccccatgcaggaaggaggggcccctgtggctctgggagagtgacagt

SEQ ID NO: 584529 - DNA, 639 bp, Homo sapiens
ctgaggtggtcagtgtgggctttactgagaacattacaggtgagtgaagacttgaggaaagagaaagagtaaggggcatgccaggcagagggaatagccagtgcagaggccctgaggtggaagcatgcttggtgtgtttgagaaacactaaggaacacagggtggttgtagcagtgtaaatgaaaggggaagtggtrggaaatgaagtcagagagaattgggctcagatcactcagggtcctgtatgccatttgatggacaatttttactctgagtgaaatgaggagcccttaaaggattttgagcagataagtgacataatctctttctggctgctattttgggaagagactgttggggacaaggatagaagcagttaggggggttgttacagtaattcaggagagataatggtggccccagcatgagatgctagaagtagccagatgctggatgaaaccaacagaatttcccaatgaactggacctgggtgtaagaaaaaaaagtcagggatgatgcttaggagagactttcaggagtttatcttaagacattttaattaaaaaatatctgttaggtcaagtaggcagttgatcattaagtcagaaattcagaggcagtctaaaagttgttggcaat

SEQ ID NO: 584530 - DNA, 547 bp, Homo sapiens
ggggaataatagagtattttacatgggaatgaattgtgttgtcgtargtgaatgtgagggagctcataaatcaatcgtgatcccgggggaccatggagggcctcctggccctggccagtgctctttagacctctttatgctaataaaacagagatttctctaggaagggctccacctttgcaaatgacactcataataagctcagagcagtgttgcaataataggctgtttacctgctggtaattggtaatttagccagtgtaaaggggctaatggtctatcttctccatttggagaattaagaagtagaattttgtccaaataaactgtatttgtctgtgggaggccctgcagagagccaaggatagggagtttgtcttccaagggtatccttgctgaaaatacagatgcgtgaaaacatatagggctagtcatttccagatttctagacgagttactgagtttctgtgaagggactttgtcatttatttatttgaccatcttggtaagagagaaatggggcaatttatcaaatggcaaagaatat

SEQ ID NO: 584531 - DNA, 601 bp, Homo sapiens
taatatacaccatggaatactatgcagccataaataagaatgagatcctatccttttcaggaacatagatggagctggaggcccttagcaaactaaggcagaaacagaatatcaaatactgcatgttctcacttataagcaaatccccatgacacaagtctacctaacaaacctgcacgtgtagccctgaaattaaaataaaarttttaaaaaaaaagaaacccagatatgcatgactttctctcctatagcctctgttgcctcctctcatcccctgtggtgacagttctgctgctgctgggttacagccctgccctgtccctgtagttctgcctatcctgccaacacctttgttgttagtccctttgtaaatagcctctccttgaattctcctaattgagtgtgccacctgtttcctattgggatctggactgatacattgatcatgacttctaagagacatacttccattgtccttttaaaaaaaattttttttttgcttaagttactttaagtaggattttcattccttgtaaccaaaagtatgctgcgttagagattacaatgctgccttctttgtagctacaacaataataaaagc

SEQ ID NO: 584532 - DNA, 601 bp, Homo sapiens
taatatacaccatggaatactatgcagccataaataagaatgagatcctatccttttcaggaacatagatggagctggaggcccttagcaaactaaggcagaaacagaatatcaaatactgcatgttctcacttataagcaaatccccatgacacaagtctacctaacaaacctgcacgtgtagccctgaaattaaaataaaagttttaaaaaaaaagaaacccagatatgcatgactttctctcctatagcctctgttgcctcctctcatcccctgtggtgacagttctgctgctgctgggttacagccctgccctgtccctgtagttctgcctatcctgccaacacctttgttgttagtccctttgtaaatagcctctccttgaattctcctaattgagtgtgccacctgtttcctattgggatctggactgatacattgatcatgacttctaagagacatacttccattgtccttttaaaaaaaawtttttttttgcttaagttactttaagtaggattttcattccttgtaaccaaaagtatgctgcgttagagattacaatgctgccttctttgtagctacaacaataataaaagc

SEQ ID NO: 584533 - DNA, 502 bp, Homo sapiens
tgggcacaaatataccctcaattatccacaagtggattatccacttgctctattacccacaacatattttaaattaaagctgctgtcattaggtgactcagtagccctaggccaatttctatcataacttctctgtgcagccggaaatgcaaactcattttgatagccttttctaatatgatgggtgggaatatactattggggttgttgccaaaaatgtaagtgtaaaagactttgacattgtgttttgttttggataaccctttcaaattagcaagattccttccctcagcaagaaaaatcaagatagcaattacaagcgtgggctsatcaacctgttgtaaatataaagtatctcaagaaatagctttgcctggtgctctctgtaaatgactggcaaaataatttgggctgaaatgctacctgatttatgaggtctccctgcatttgccattcataattgttcaagtcttcttctggggaagccttgagtagtgaaaca

SEQ ID NO: 584534 - DNA, 502 bp, Homo sapiens
tgggcacaaatataccctcaattatccacaagtggattatccacttgctctattacccacaacatattttaaattaaagctgctgtcattaggtgactcagtagccctaggccaatttctatcataacttctctgtgcagccggaaatgcaaactcattttgatagccttttctaatatgatgggtgggaatatactattggggttgttgccaaaaatgtaagtgtaaaagactttgacattgtgttttgttttggataaccctttcaaattagcaagattccttccctcagcaagaaaaatcaagatagcaattacaagcgtgggctcatcaacctgttgtaaatayaaagtatctcaagaaatagctttgcctggtgctctctgtaaatgactggcaaaataatttgggctgaaatgctacctgatttatgaggtctccctgcatttgccattcataattgttcaagtcttcttctggggaagccttgagtagtgaaaca

SEQ ID NO: 584535 - DNA, 426 bp, Homo sapiens
tggccaggctggtctcaaactcctggcctcaagagatctgcgcacctcggcatcccaatgtgccgggattgcaggcatgagccactgcacctggccaaaagtaataattttattcttttttatggctgtatagtattccgtggtgtatatgtaccacattttccttatccagtccaccactgatgggcatctaggttgattccatgtctttgctattgtgcatagtgctgcaatgaacatagggatgcatgtgtctttccagtaaataatttattttccttctggtacgtacmcattaatgggattgctaggtcaaatcgtagttgtatttttagttttttttttttttttgagaaatctccaaactgctttccacagtggctgaactagtttacattcccaccaacagtgtgtaagtgttccctt

SEQ ID NO: 584536 - DNA, 619 bp, Homo sapiens
taatcccactagtgtatttttgcttttgttgcctgtgagttcgggttcacagccaaaaaattatctcccagataaatgtcatggagcctttcctctatgttttcttctggtttctggtattatgtttaagtatttaattctttttgagttgatttttgtatatgatgtgagatgagggtctaattttatttttttgcatgtggaaatccagttttttagtggcgtttattgaagagrctgtccattccccattgtgtgtttttgttacctttgttggaaatcaattgatcataaatatgtagatttatttctgagctctgtattgttttctgttcatctgtgtgtctgtcttcatgccagtaccatgctgttttgattcctatagctttgtagtaggttttttaaatcaggtagtgtgatgcctccagctttgtttttttcctcaagattgctttgtgtatctgggtcttttgtgcttccataaaaatttttgttttttctatttctgcgtaatacatcataggaactttggagctttgatagggattgctttactaaagatagctttgggtagtatgtgcattttaacaatattaattcttccaatccatgaacatgg

SEQ ID NO: 584537 - DNA, 619 bp, Homo sapiens
taatcccactagtgtatttttgcttttgttgcctgtgagttcgggttcacagccaaaaaattatctcccagataaatgtcatggagcctttcctctatgttttcttctggtttctggtattatgtttaagtatttaattctttttgagttgatttttgtatatgatgtgagatgagggtctaattttatttttttgcatgtggaaatccagttttttagtggcgtttattgaagaggctgtccattccccattgtgtgtttttgttacytttgttggaaatcaattgatcataaatatgtagatttatttctgagctctgtattgttttctgttcatctgtgtgtctgtcttcatgccagtaccatgctgttttgattcctatagctttgtagtaggttttttaaatcaggtagtgtgatgcctccagctttgtttttttcctcaagattgctttgtgtatctgggtcttttgtgcttccataaaaatttttgttttttctatttctgcgtaatacatcataggaactttggagctttgatagggattgctttactaaagatagctttgggtagtatgtgcattttaacaatattaattcttccaatccatgaacatgg

SEQ ID NO: 584538 - DNA, 200 bp, Homo sapiens
tcctttaacagctttgtcttctctgtgatgcccatcctaatttctcttggtggatggatcatcccatttagctactttaaagcatgtacagaacacagtggtgtttacttataaataaatatccttagtttctacttatkagaaattacagattattaatcaggaacttcttaatttcttgtctccttgtctacaaactt

SEQ ID NO: 584539 - DNA, 557 bp, Homo sapiens
gatgcaccctttaaccatccagcaaccccaccaggtagagcatggcatctccctgtgttacactggagaaaactagagactctgagggtttagtcaccttgctgtaggtcatgtgtagcaggggcagaccttgcatcccaacaggaggttctgctggctctgggacctgggctctgccctgtaccgtctccctgcttacagactcaaaagcagtatctcctaacatctcagcctctgcacgtgccattctccaggcttacatacagctctgctaactccccttctttctttattgagttccaggacactctaaagaggtcacttcctgctgggcacagtggctcatgcctgtaatcccagagtcttggaaagctgagacgagaagataacttgagtccataaattcragatcagcctgggcaacatagtgagacagaccctgtctctacaaaaaattttaaatattagttgggccatggtggcacacacctgtaatggcagctactcaggaggctgacgtggggggatcacttgagcccaaaagtttaaggttgcag

SEQ ID NO: 584540 - DNA, 519 bp, Homo sapiens
gtatttatatacatagaatgtatacaaatacatatatttgtatataatgtatacaatattaaattaatagaatgtatacaatattaattgtggtttttgccattacttttaaatggcaaaaactgcaattacatttgcaccaacttaatacacattctgcacatgtctacgttcctttccctttgttcaacctatttgagccatgcaggccttcttggtgcttctccaggcccacgatctctgcagcctctggatgtttttctgttctctccacctggaaaacyctcttgccaaatagacacatggattgcttcctcattttctttaggtccctcctccaatgttaactattagaaaggcctttcctgactatttcatacatacacacacacaggtatacacatacaataagtatgttttatatatatatatcacaatttccccagcttcacattctctattcttcttactttacttttccatcatagtacttaccacctacttgacatattttatatt

SEQ ID NO: 584541 - DNA, 381 bp, Homo sapiens
gggcctgtcagggagtcaggggctaggggagggatagcattaggagaaatacctaatgtagatgacaggttgatgggtgcaacaaaccaccatagcacatgtattcctatgtaacaaacctgcacattcttcacatgtatcccagaacttaaagtataatttaaaaacaaaacagttcaaaacaattaacaaatagcattagtaagcccttatctatcaataatttctttaaatgcaaatggactaaactctccaatcaaaagacatacagtggctgaatgaatttaaaaacaagatcaaaccttatgctgcctataagagattaatkttagatttaagcatacacatatgctaaaaatgaagagatggaaaaagatattc

SEQ ID NO: 584542 - DNA, 552 bp, Homo sapiens
ctattttttttttgtggttccatgtaaattttaggattgttttctatttctgtgaaaaatgccattggaatttaaayagaaattacactgaatctgtgtatcacttggatagtatggacattttaacaatattaattattctaatccactgacaaaggaaatcctttcatttatttttatgttcttcaatttcttttatcagtggtttatagttttcagtgtacagatctttcacttccttggttaaattcattcctaagtatttgattgtttttgatgctgctgtaaatatagttttctttatttatttttcagatagttcattgttagaattgcaactaattttttttgttttgtttttagttattattattatactttaagttctagggtacatgtgcacaacgtgcaggtttgttacatatgtatacatgtgctatattggtgtgctgcacccattaactcatcatttacattaggtatatctcctaatgctatccctccccacttcccccaccccacaacaggcccaggtgtgtgatgttccccatt

SEQ ID NO: 584543 - DNA, 552 bp, Homo sapiens
ctattttttttttgtggttccatgtaaattttaggattgttttctatttctgtgaaaaatgccattggaatttaaacagaaattacactgaatctgtgtatcacttggatagtatggacattttaacaatattaattattctaatccactgacaaaggaaatcctttcatttatttttatgttcttcaatttcttttatcagtggtttatagttttcagtgtacagatctttcacttccttggttaaattcattcctaagtatttgattgtttttgatgctgctgtaaatatagttttctttatttatttttcagatagttcattgttagaattgcaactaattttttttgttttgtttttagttattattattatactttaagttctagggtacatgtgcacaacgtgcaggtttgttacatatgtatacatgtgctatattggtgtgctgcacccattaactcatcatttacattaggtatatctcctaatgctatccctccccacttcccccaccccacracaggcccaggtgtgtgatgttccccatt

SEQ ID NO: 584544 - DNA, 461 bp, Homo sapiens
tatttgaagaaataatgataaaaaattttcccaaatttttaaaattcaaaatatataaatatgctaatcaaaaagcataacaaccccaagcataggaaatttgaagaaatttacaccaggcacatcataatcaaatctcccaaaaataatgataatgagaacatcttaaaagcrgaatatttgtgcagaggagcaaatacaaaaatgaaagaaaatttattgaaacaatttagacaaaagtagtagagcaagatcttgaaaatattgaagaaatgagaaaaactgggacaaagaaaaaacaaataacaagatggtagactaaacctaatcatattaatgatagccttaaatgtaaatagtttaaatgccccaatgaaaagacagagatttttcagattggctaaaagagcaagtctcaactatatgctacctacaaaacattcactctaaatataaagaca

SEQ ID NO: 584545 - DNA, 581 bp, Homo sapiens
gaactttcctcctagcactgcctttgctgtatcccagagattttgataggttgtatcacaattgtcattcagttcaaagaattttttaatttccatctttatttcatttttgacccaatgatcattaaggaacagattatttaatttccatgtgtttgcatggttttgaaggttccatttggagttgatttccagttrtattccactgtggtctgagagagtgcttgatataattttaattttcttaaatttgttgaggctcattttgtggcctattatatagtctatcttggagaaagtttcatgtgctgttgaatagaatgtatattctgtggttgttgggtaaaatattctctatacatctgttaagttcatttgtttcagggtatagtttaaatcagttgtttctttgttgactttctgttttgatgtctagtgctgtcagtggagtattgaagtcccccactattattgtgttgccatctatctcatttcttaggtctcttagtaattgttttataagtttgggagctccagttttagatgcatatatatatttaggattgtgatattttcctgtt

SEQ ID NO: 584546 - DNA, 581 bp, Homo sapiens
gaactttcctcctagcactgcctttgctgtatcccagagattttgataggttgtatcacaattgtcattcagttcaaagaattttttaatttccatctttatttcatttttgacccaatgatcattaaggaacagattatttaatttccatgtgtttgcatggttttgaaggttccatttggagttgatttccagttatattccactgtggtctgagagagtgcttgatataattttaattttcttaaatttgttgaggctcattttgtggcctattatatagtctatcttggagaaagtttcatgtgctgttgaatagaatgtatattctgtggttgttgggtaaaatattctctatacatctgttaagttcatttgtttcagggtatagtttaaatcarttgtttctttgttgactttctgttttgatgtctagtgctgtcagtggagtattgaagtcccccactattattgtgttgccatctatctcatttcttaggtctcttagtaattgttttataagtttgggagctccagttttagatgcatatatatatttaggattgtgatattttcctgtt

SEQ ID NO: 584547 - DNA, 458 bp, Homo sapiens
accccatttgttgttttaacaagtatttactgagggcctactctgtgctaggcaactgtaacaagtgctgamaatacaggagtaaacaagagattaggtccttactcccaggagacttacattcttaaaatggggaagggaagagaagagagtcagctattttaaattaaacaactaatgggtgatagggttggagaagtggaccatctaaagttctatacaatggcctataaagccctatacaatcagacttcattcttcagtcttttttttttttttgagacggagtttcactctagttgcccaggctggagtgcaatggtgtgatctcagctcaccataacctccgcctcctgggttcaagcaattctcctgcctcagcctcctgagtagctgggattataggcatgtgccaccacacccggctaactttgtgtttttagtagagcagggtttct

SEQ ID NO: 584548 - DNA, 621 bp, Homo sapiens
tgctctgtaagatgacattttagcaaaactctgaaagatgtgaaggaatgatctgctgaaaatctgaggaaagcatttcaggcctaaggaaacaagggcaaaggcctcaaggtgagaaggagtctattatgtaagaaacagtagaagcccagtgtggatacagctgggtgagcttgaggaaagccttgcaagatgtagctggagacagacaggagccagcactgtgaggtcttccaggccatgataacaagtttggattgtattttatgtgtaacagttacaaagtttttagttggaaggggacacgacctgatttgcatttctaaattatttctttctggctgttctatggagaacagcttaaaggagggcaagagtgaaagcaccaagtccagtctgaaagcttttgcagtaatcaaaataagaaatgatggcagtttgtactagggtgaatgtattttgaaaatagactgaatagccgggcacggtggctcatgcctataatcccagcactttgggaggccgaggcaggtggatcacctgaggtctgaagttggagaccagcctggccaacatgacaaaatgctgtttytactaaaaacacaaaaattagccgggtga

SEQ ID NO: 584549 - DNA, 553 bp, Homo sapiens
ttatttttgttttttaaaatgtcacaaattcttttagtaaatatatatcttagagaatataaaacaaattaaatcctaattagcttttacttcttttgctttggcatgaatggaaatataccaatgtttataaaaggaccaatcaatcagtaaccttatacttgatggggtgaaataaayagttctggtacaatatagatcttctgtccaatttgtattttggactgtgcgccaagaataatgctcaatcctttttaaagatccttttggcttctactccttcatatacataagtctgaaaggtgttaacaaacagaagaatttatctttaaggtttacatctaagttaagaaaaagtagtattatagttttatactatatgagtttatactatttttatattatatattcatatatattatatgagtatgagtttatacaattttttcttgtacttgatagcaagatttatacagatatgggatacagccattttaaaacacatgttggtttgtagtcatttatattttcagttaaaataggcattgattat

SEQ ID NO: 584550 - DNA, 516 bp, Homo sapiens
cttgtcattcacaataaaaggatagaactggagatcattatgttaaataaaataagccaggcacagaaagacaaacttcacatgttctcatttgtttgtaggtgctaaaaaaactaaaccaattgaactcacagagatcgatagtagaatgagggttaccagaagttaggaagggtactcatgtagggtcagagaagtaggatggttaatgtgtgcaaaaatatagttaaatgaaatgaatgaaaactagtatttgatagcacaacagggtgactgtagtcaacactaatttattgtaccttttagaataactaaagagtataattgtattgtttaaaacacaaagtaagaataaatgcttgaggtattggataccccatttcccctgatatgatgattactcattatatgcctgtatcaaaatatcttacrtaccccataaatatatacaactccaatgtacccacaaaaattaatgattaaaaataaataaataataatttttttaaaatgaag

SEQ ID NO: 584551 - DNA, 594 bp, Homo sapiens
ggctgctgtcttgtggcgagagtgactaaacaattggatatctcctataattaatgaaacaagcaaagcagatctgggacttcactggagagaaaccagtaatcactcaaagtggtgtcttcatgacattttacaactgcagcatgaccttgggagatacagtgttgttaaatttgcagctgactttatctgtgtctgtcttcccatcctgattaatggcaggttgctttttgcttttatagtcaaagccgattttcactcttcagtcctatgtagtttttgactctttcacaactaaaggaaaaatcagtaagatggccaaataaaagatcactttacaaattcaattgtttgtttcaattacaccaagaataagtggaaataaaatttaggaaggaagatataaattaaatctcatccaaacagggaaaaaaawgttgaaattctatttaataacataaaagaatgtgtaaacaaatgatgttaaaacattatactcttgatcaggataacttaatattgaaaaaatatcaatttccaccaatctcacagaattaattatcaagttcaagtcaatttataccaatatttttg

SEQ ID NO: 584552 - DNA, 485 bp, Homo sapiens
ccaatgacattcttcacagaactggaaaaactattttaaattcacaagtaaccaaaaaagagcccaaatagcattggtaatcctaagcaaaaagagtaaatctggaggcatcatgttaccaggcttcaaactatacyacaaggatatggtaaccaaaacagcatggtactcataaaaaaacaggcacatagaccaatggaacacaatagaaagtccagaaataaggccacacacctatgactatctgctcttcaacaaacctgacaaaaacgagcaacaggaaaaagactcccaatgcaataagtgatcctgggatgactggctagccatatgcagaggattgattctggactccttcctcacaacatatacaaaaatcaatttaaatgaattaaagacttaaatgtcaaaccccaaaccataaaaaccctagaagacaacctaggcagtaccatcctggacataggaatgggcaaaaatttcat

SEQ ID NO: 584553 - DNA, 485 bp, Homo sapiens
ccaatgacattcttcacagaactggaaaaactattttaaattcacaagtaaccaaaaaagagcccaaatagcattggtaatcctaagcaaaaagagtaaatctggaggcatcatgttaccaggcttcaaactataccacaaggatatggtaaccaaaacagcatggtactcataaaaaaacaggcacatagaccaatggaacacaatagaaagtccagaaataaggccacacacctatgactatctgctcttcaacaaacctgacaaaaacgagcawcaggaaaaagactcccaatgcaataagtgatcctgggatgactggctagccatatgcagaggattgattctggactccttcctcacaacatatacaaaaatcaatttaaatgaattaaagacttaaatgtcaaaccccaaaccataaaaaccctagaagacaacctaggcagtaccatcctggacataggaatgggcaaaaatttcat

SEQ ID NO: 584554 - DNA, 518 bp, Homo sapiens
aagaaatccaaaacttgaacagaccaataacaagtaacgagattaaataataacaaataataagtaacgagatcaaagcccagcaaagaaagtcccaggacccaatggcttcaatgatgaattttaccaggcatttaaagaagaactaatactgatcctacccaagctatcctaaaaaataaaggaggaggtaatacttccaaactcattttatgaggccagtattaccctgataccaaaaccaaagaygcattaaaaaaaaaaaaagaaaactacgggccagtatccctgatgaacatgaatgcagaaaatcctcaacaaaatactagcaaactgaattcaacaatgtattaaaaagatcattcatcatgatgaagtgggatttatcccagagatgcaagcatgcatggttcaacacacacaaaacaattaatgtgatacattgtatcaacagaatgaaggacaaaaaccatatgatcatttcaattgatgctgaaaaagcatttgataaaattcaa

SEQ ID NO: 584555 - DNA, 518 bp, Homo sapiens
aagaaatccaaaacttgaacagaccaataacaagtaacgagattaaataataacaaataataagtaacgagatcaaagcccagcaaagaaagtcccaggacccaatggcttcaatgatgaattttaccaggcatttaaagaagaactaatactgatcctacccaagctatcctaaaaaataaaggaggaggtaatacttccaaactcattttatgaggccagtattaccctgataccaaaaccaaagatgcattaaaaaaaaaaaaagaaaactacgggccartatccctgatgaacatgaatgcagaaaatcctcaacaaaatactagcaaactgaattcaacaatgtattaaaaagatcattcatcatgatgaagtgggatttatcccagagatgcaagcatgcatggttcaacacacacaaaacaattaatgtgatacattgtatcaacagaatgaaggacaaaaaccatatgatcatttcaattgatgctgaaaaagcatttgataaaattcaa

SEQ ID NO: 584556 - DNA, 434 bp, Homo sapiens
caacggccccgtactgtgatcatcgttcaggaatgaagtaaaggagatgaaaactaggacattctctttgacttagcgtcagttatgaaagatgaataagttcagcatgtctactgtatagtaatgtgactatagttaaaaacactttatcatgtacttgaaatttgccaagaaggtagattttaaatgttcataccacaaaaataaaaaggaaatggtaactaagtgacctaataaatatgttattcacaatgaatatatgtatcagagcatcaccttgtatacctgaaatatacacaaatttttatttgtcaatcatacctcaatacagctggaaaaaaaaagtagttgatctagttaattattacaaaaatattyttatcttcaacattaaaattagaaattttctgaaccaaaaaaaaaaaaaaaaaagt

SEQ ID NO: 584557 - DNA, 550 bp, Homo sapiens
cattacctgcttggaaagcgacatgttaaaaaatactgataatatatgggcacagggagagcgatttccatgcctgggctcctccaagctaaaatatgcacacctgcacaagaggcagcagatgacagaggaagtcaccagggccctaggagcagcttctgtgtcaagctgtgactccgatactccaaacaaaagacagtacaagcctgtctaggtgtcctctcttctccccagtgtggggcatcttggatgaaggaggccagagttgggggcatctgatcctgttcttttccctccagaatcaaatgcacttagggtttacaccaggagggagagacwggaggaggaattagagtgatggaggggggacttactgctgagggaagctcaaggcatgaattagagaaactattcattttcttttttccgtttcacctcctctggacttgttcatctcccagttaccccattggcagcctctgcaggcttctgtcaccataaggtcttcttgtcttatttatttattcctgcctgttcttgggtaagtcaa

SEQ ID NO: 584558 - DNA, 550 bp, Homo sapiens
cattacctgcttggaaagcgacatgttaaaaaatactgataatatatgggcacagggagagcgatttccatgcctgggctcctccaagctaaaatatgcacacctgcacaagaggcagcagatgacagaggaagtcaccagggccctaggagcagcttctgtgtcaagctgtgactccgatactccaaacaaaagacagtacaagcctgtctaggtgtcctctcttctccccagtgtggggcatcttggatgaaggaggccagagttgggggcatctgatcctgttcttttccctccagaatcaaatgcacttagggtttacaccaggagggagagacaggaggaggaattagagtgatggaggggggacttactgctgagggaagctcaaggcatgaattagagaaactattcattttcttttttccgtttcacctcctctggacttgttcayctcccagttaccccattggcagcctctgcaggcttctgtcaccataaggtcttcttgtcttatttatttattcctgcctgttcttgggtaagtcaa

SEQ ID NO: 584559 - DNA, 645 bp, Homo sapiens
aataaataaatgaaattaattaattaattaaaatgtcatgaagggaaatgaaacaagtactgcacctttcactttacctctctaagcctgtcctcatcaatataattgtgataacagyactgtctgtagtgaaaacaagcaagattttaatcttaatgaatcacctgttttgaaattaaatgtcctttacaacattcatttgctttttaaaaatacctgtaatgccattttaattgtctatcccataaacccatatattttattatatctcaatttcactagtaacaattaccaacaatgatatttttcatgaatatgatccttgtggttggcaaagttatcattcccaaaaagatggagtagcacatgcagttaggctgtttctatgataagatacatcaaggaccattttgtacaaaaaggttttcatgtgtgtttaatgggaagtgaactgccatttcttggaaaggcaccccagaatgtcctgtaaggacagagaactttatgataactactgtttagtcagtgtctactggctcccagaggcatgcttgatacttgaaatacattatcatagttgatctcatgtcacaccttcaaatagttatcattatatcccttttaaaaaatgggaaagttggctgg

SEQ ID NO: 584560 - DNA, 645 bp, Homo sapiens
aataaataaatgaaattaattaattaattaaaatgtcatgaagggaaatgaaacaagtactgcacctttcactttacctctctaagcctgtcctcatcaatataattgtgataacagcactgtctgtagtgaaaacaagcaagattttaatcttaatgaatcaccwgttttgaaattaaatgtcctttacaacattcatttgctttttaaaaatacctgtaatgccattttaattgtctatcccataaacccatatattttattatatctcaatttcactagtaacaattaccaacaatgatatttttcatgaatatgatccttgtggttggcaaagttatcattcccaaaaagatggagtagcacatgcagttaggctgtttctatgataagatacatcaaggaccattttgtacaaaaaggttttcatgtgtgtttaatgggaagtgaactgccatttcttggaaaggcaccccagaatgtcctgtaaggacagagaactttatgataactactgtttagtcagtgtctactggctcccagaggcatgcttgatacttgaaatacattatcatagttgatctcatgtcacaccttcaaatagttatcattatatcccttttaaaaaatgggaaagttggctgg

SEQ ID NO: 584561 - DNA, 645 bp, Homo sapiens
aataaataaatgaaattaattaattaattaaaatgtcatgaagggaaatgaaacaagtactgcacctttcactttacctctctaagcctgtcctcatcaatataattgtgataacagcactgtctgtagtgaaaacaagcaagattttaatcttaatgaatcacctgttttgaaattaaatgtcctttacaacattcatttgctttttaaaaatacctgtaatgccattttaattgtctatcccataaacccatatattttattatatctcaatttcactagtaacaawtaccaacaatgatatttttcatgaatatgatccttgtggttggcaaagttatcattcccaaaaagatggagtagcacatgcagttaggctgtttctatgataagatacatcaaggaccattttgtacaaaaaggttttcatgtgtgtttaatgggaagtgaactgccatttcttggaaaggcaccccagaatgtcctgtaaggacagagaactttatgataactactgtttagtcagtgtctactggctcccagaggcatgcttgatacttgaaatacattatcatagttgatctcatgtcacaccttcaaatagttatcattatatcccttttaaaaaatgggaaagttggctgg

SEQ ID NO: 584562 - DNA, 523 bp, Homo sapiens
tgtggtggctcacacctgtaatctcagcaatttgggaggccgaggtgggagggtcactggaccccaagagttcaagactagtgtgggcaaaatggcaagtctcaaaaaagaaaacaaaacaaagacacacacagtatagataggtaaaaagacattttaaatagtacgtaggaacaatatgtatgtgcaaagcaaagaaaattctaatcacaatttgtacctctatacaatatgcaatctagccaacgaggcttacacacacaaagctagtgagttttaaaataaatagctggccgggcgcggtggctcatgcctgtaatcccagcactttgagaggccaaggtgggtgaatcacttgaggtcaggagttcaaaaccagactggtcaamatggtgaaaccccgtccctaggaaaaatagaaaaattagccaggtgtggtggtgggcgcctgtaatcgcagctactcgggaggctgaggcatgagaatcacttgaacctggggggcagagcttgcagtgagcca

SEQ ID NO: 584563 - DNA, 598 bp, Homo sapiens
gttctaacacattctcctatttattttcttcatggcttgtaacactccctgaaatgatcctatgtatttatttgcttatttacagtaggccttctccaccttggcactgttgacattttggaccagacaattctttgtggttggggctgtcctgtgagttgtagaaagtttcacagcatctttgggctctacccactagatgccagcagcactcctcccaggcataacaataaaatatgtttccagacttcgacaaatgttccctggggggaagaattacactgtttgagaggcactgattttaggcctgagtcttgaagcagggattgtctatcttgttctcttttgtctcccccgcgcctggaatagtgtgcttacacagtgtcactaagtaaatgtacgttggcaagtagactgaagagctactgcagagctaagtttgctgttttgtaggaactcagaagagaagtaccccatctctggttggaaaacactccaggagaggcagcttcaaggagatggcatgtggatggaaatgtttagcaagagcaagctttatcctggtcaggggcagkcagtgggcattctaggcagaggg

SEQ ID NO: 584564 - DNA, 624 bp, Homo sapiens
cagcgatcatctatggggccaggtacccatacactatcattaacatatayttctataggattatccatccatgtgactggtgttaccatctccgtggaggcccttttctttgcatctccaatgggttcattgtagaacttcaaatgtctagtgggtatccaaacaggaagctgattttctcctggtgaaacacaagcaaaacctctcccccacgttatcaccttccctatttcccatgtcttatttttattatctttccaccaaattagttttccttcatgtgggctgttctttttaccagtaagatgttgttctgcagaagtagtagtctgatttctataaatgtttaaaaaatttaaagtatagagtgctagattaagttgcatctgaggagtggtacactccttactgtctcccccttctttttgtttaactaattgagttttgagtgttctattagttctttcaactatggcctgtccttgggaattataaggaattcctgttgtatgtgaaattttccactgacttaagaatttttggaaagctttactacaatatcctggtccattgtcagttttgattttttctggaactcccattacagcaaaacaagacaataaa

SEQ ID NO: 584565 - DNA, 624 bp, Homo sapiens
cagcgatcatctatggggccaggtacccatacactatcattaacatatatttctataggattatccatccatgtgactggtgttaccatctccgtggaggcccttttctttgcatctccratgggttcattgtagaacttcaaatgtctagtgggtatccaaacaggaagctgattttctcctggtgaaacacaagcaaaacctctcccccacgttatcaccttccctatttcccatgtcttatttttattatctttccaccaaattagttttccttcatgtgggctgttctttttaccagtaagatgttgttctgcagaagtagtagtctgatttctataaatgtttaaaaaatttaaagtatagagtgctagattaagttgcatctgaggagtggtacactccttactgtctcccccttctttttgtttaactaattgagttttgagtgttctattagttctttcaactatggcctgtccttgggaattataaggaattcctgttgtatgtgaaattttccactgacttaagaatttttggaaagctttactacaatatcctggtccattgtcagttttgattttttctggaactcccattacagcaaaacaagacaataaa

SEQ ID NO: 584566 - DNA, 560 bp, Homo sapiens
tcctgtctcctggactggcactccaaggaattgaagagctaataaccaactgaatttcgcctttatagtctgaatcaaccacactagtatgaatttgaactccttttagatttagacttgatcttcccaagattagtcctacagtcccctcaggcagkgggccatatacccctgtagggattttttgtgggggctcccctggaagcagagagactgcttgtatagtatataaatctactgctgcactgccgcttgtggcgggggacaattgttgtattgtggtaactggcttattccctgaaacacttgggacagtgggggttgttgttcctgaaaaccctgaggaacaaatggctgaattgggaatgccccagtttgttgtggggcctgaggctggcccctttgctcatttcccgacaatggttgcccatttttatcaaatttagaacgacattgactagcccaatgttttccttttttacatcttggacataagtcaggtggctctctacctgttgtagttgcttgaatagttatattctgtttatttaagactggac

SEQ ID NO: 584567 - DNA, 560 bp, Homo sapiens
tcctgtctcctggactggcactccaaggaattgaagagctaataaccaactgaatttcgcctttatagtctgaatcaaccacactagtatgaatttgaactccttttagatttagacttgatcttcccaagattagtcctacagtcccctcaggcagtgggccatatacccctgtagggattttttgtgggggctcccctggaagcagagagactgcttgtatagtatataaatctactgctgcactgccgcttgtggcgggggacaattgttgtattgtggtaactggcttattccctgaaacacttgggacagtgggggttgttgttcctgaaaaccctgaggaacaaatggctgaattgggaatgccccagtttgttgtggggcctgaggctggcccctttgctcrtttcccgacaatggttgcccatttttatcaaatttagaacgacattgactagcccaatgttttccttttttacatcttggacataagtcaggtggctctctacctgttgtagttgcttgaatagttatattctgtttatttaagactggac

SEQ ID NO: 584568 - DNA, 594 bp, Homo sapiens
aataataatatttatctctatgaagttaggccacaaattctttctagtaggttcaagtatttaagcacctggagaggtgactggttaccctcctagtggcttcaggaagttttctcactgaatgaatatttattgagtgccaactctgctcagcacaattcaggggtgctgggaatgcagcagtgaataacacaagcagtgttcctgccctcatggggcttatgatctctggaagcactgctttgcacagggaagtagcaccaggagsgggtaaagaaagagggactttggagccccaagattggcaaaaactatagctaatgagagaggtgaactgtagagtctagataatggggaaggagaggtgccagagcaagaagggattctcacagggccctacgggtcagtcctgaattggctttactagaactcaggcccagcacaatggctcacatctgtaatcccagcgctttgggaggccgaggtgggtggatcacttgagatcaggagtttgagaccaacctggccaacctggagaaaccctgtctctactaaaaataaaaattagccgtcatggtggcacacgtctgtaat

SEQ ID NO: 584569 - DNA, 554 bp, Homo sapiens
atccagcaattccacttctgggcatatacccaaattaatcagaaacattatcttaaagagaatttttttttttactttttaaaattttttataaattcagggggggtacataggcaggtttgttacatgaatacattgcgtagtgaagtctgggatttcagtgtacctatgacccagctagtgaacattgcacctagtaagtaccttttgaaccttcatctccttccaaacatctccccttgtggagtccccagagtctattatacttctctgtatgtttatgtgtattcattgtttagctcctacttgtttagttcccacaaatgagaacgtgtggcatttgattttctaagttatttcacttaggataatggcctccagcttcccatgttgctgcaaaagacatgattttattatttttatggctgcataatatattccatgttgcatatataccacattttctttatccagttgcccattgatggactcttatgttgattctacagttttgctattgtgaatarcagtgtgataaacatatgagtgcaaaa

SEQ ID NO: 584570 - DNA, 460 bp, Homo sapiens
tcatccagattttgatatttaagtttgaaaatctatagagggattcctataatttgtgcttttgcttttcctttttccattttcttagttacctaggtgagctctttaaaaaataagcatggccacatctggacaaaattaactggtctgagggcaaagtgcatagcaagggtggagtgagtatcatgcctcaaagatacagtggttatcttaacattttccagttgaaaaacatggtaagatgtakgatgttggataaataaggcatgtgaatgtgtccctgaattgtctgaatgtgacccggcaagagttcttaaccttagatctcttaatccctgacaatgtatgcaaaattctgcttacattttatatgtaaatttttgaggtagagataggaacaaagtccacagctaccctcagattaaaagggcaaagcaccaatcatcttcagaatagtaga

SEQ ID NO: 584571 - DNA, 562 bp, Homo sapiens
aaaaaataacagatgctagtgaggttgtggagaaaagggaatgcttacacacagttggtgggagtgtaaattagttcagtcattgtggaagacagtgtgacgattcctcaaaggcctaaagatagaaaatccattcaacccagtaatcctactactgggtatatacccaaaggaatacaaattattctattataaggatgcatgcacacatatgttcattgcagtactattcacaatagcaaagacatgaaatcaacttaaacttacatgaatgttagactggataaagaaaatgtggtatatacacaccataaaatagtatgcagccttataaaagaatgggattatgtcctttgcgtggacatggatggagcaggaggccattattcttagcaaactaacctagcaacagaaaaccaaataacatatgttctcatttataaatgggagctaaatgatgatgacacatggacaaatgaargggaacaacactcactggggactttcagagggtggaaggtgagaggagggagaggatcaggaaaaataactaatggatact

SEQ ID NO: 584572 - DNA, 545 bp, Homo sapiens
ttcctcagcactatttgtacatacttgaaaattcttgaaatttaaggaattaaacgaactgattatcttcatttataatacaatttttttgaatatcataatttatccactaatgaaattgatatattactaagtttggtaaaaacttaacatccmcatcgtggttggtggtactttcatttcttagtttagagataataattggttcttcagagcttaaacaattctctagtcctctaataaatgtataggtttagatgctgcagctttatctggcttatacaattcttttcttaatttgcaatgttttgaagacagggataatgacaaatatatctttgatcatttttggcatatgatgccttgcttgtaagagattttcaatatgtatatgttaaaatagtaaaatatttagatcatatggtccaaagagagtcctagaagccaccagatcttccaaaatccattgtttcctaacctcccttcactctaaagaaagcgagcccctggcattttggtcagtctaatagtctacttgaagatga

SEQ ID NO: 584573 - DNA, 548 bp, Homo sapiens
gagttaatgggtgcagcaaaccaacatggcacatatatacctatgtatcaaacctgcacattgtgcccatgtaccctagaacttaaagtataatgaaaaaaagaaaaaaaaaaaaaagaaagaaagaaaaaagaaaaagaagtttaatggactcacagttccacgtggctggggacacctcacaatcatggcggagggtaaaacgcatgccttacgtggcagcaggcaagagagaatgagaaccaagcaaaagcggaaaccctttataaaagcatcatatctygtgagacttcagtttgtgcacacgaccacaagaacagcatgagggaaattgcccccatgattcaattatctcccaccgggtccctcccacaacacgtgaaaattatgggagctacaaatcaaggtgagatttgggtggggacacagccaaaccatgtcgcttacctacaaaagatgtgatgtttcaggtttttgaggtattgggagtgtccaaagcaagacttttatttttggattttgatttgtttttcagatttgtctcttct

SEQ ID NO: 584574 - DNA, 542 bp, Homo sapiens
atccacccgcctcgacctcccaaagtgctgggattacaggctgagccaccacgtccggccgtttggctgtactactaatgggcctgaggtggtggtcgccatgggstgaggctcttctgcctttggcaaggggaggaacgagtgggaaggattgtgccttgtggtttgactgccagctcagctgcagtacagcagaacaccagatagacttcaaaggtatttggctctagctcctggctcctggttggcacctctgtatgcccctagggcctggggtaactttctgtcccaaagggaaggacataggcctgactagaattgtcatctgctgattttagagtgccagggttttgagcaaccataggcagtagttagggagtcattagagcaggctttgggcaagacccagtgctgtgctggtttcaggtctgactcaactcagtcttaggggtgatggccacacaggtgcttatgtcactccacccctaggtccaggtagctcagaataaagagagactctgcttgcttgggagaaagtaagg

SEQ ID NO: 584575 - DNA, 628 bp, Homo sapiens
aataaatatacaaaactcttttcagtaaacagcttagaggagggtaaggctggatacaaagttccagatagacattgctgaagtgaaggtgaaaggwgttttacacgaggaaacagcagcggggcgcacagagggaattcacatgaaagcaggtaaggaggcagcaggggcgagacaagggttgcttggatttatgcaggagaaggaggcagaatccccacatccctcgcgggtttctaacctgcctacctgggaattttcccatccacctataatgggaagaatggaacaaatgtatctcagtggactcacaggagaaaagatcaagcgtttttcgtcttgcacaccaagatccagtaggaagcacagcacacagtaagcaaagaattgcctatgagtagtgcacttacgtaaaccatgaaaagtaagcataggacagcatttggaaaaaaggtagagaatttgaggagatgatttcatggacctatactgaaagccacgtgaccaaataaagatgctaaagaagccttttctagtaatttcatgttagatttttacagaagccagatacggatgtaataagacatcatagacactctgatatctagtttgtttgtttgtttgtttg

SEQ ID NO: 584576 - DNA, 628 bp, Homo sapiens
aataaatatacaaaactcttttcagtaaacagcttagaggagggtaaggctggatacaaagttccagatagacattgctgaagtgaaggtgaaaggtgttttacacgaggaaacagcagcggggcgcacagagggaattcacrtgaaagcaggtaaggaggcagcaggggcgagacaagggttgcttggatttatgcaggagaaggaggcagaatccccacatccctcgcgggtttctaacctgcctacctgggaattttcccatccacctataatgggaagaatggaacaaatgtatctcagtggactcacaggagaaaagatcaagcgtttttcgtcttgcacaccaagatccagtaggaagcacagcacacagtaagcaaagaattgcctatgagtagtgcacttacgtaaaccatgaaaagtaagcataggacagcatttggaaaaaaggtagagaatttgaggagatgatttcatggacctatactgaaagccacgtgaccaaataaagatgctaaagaagccttttctagtaatttcatgttagatttttacagaagccagatacggatgtaataagacatcatagacactctgatatctagtttgtttgtttgtttgtttg

SEQ ID NO: 584577 - DNA, 628 bp, Homo sapiens
aataaatatacaaaactcttttcagtaaacagcttagaggagggtaaggctggatacaaagttccagatagacattgctgaagtgaaggtgaaaggtgttttacacgaggaaacagcagcggggcgcacagagggaattcacatgaaagcaggtaaggaggcagcaggggcgagacaagggttgcttggatttatgcaggagaaggaggcagaatccccacatccctcgcgggtttctaacctgcctacctgggaattttcccatccacctataatgggaagaatggaacaaatgtatctcagtggactcacaggagaaaagatcaagcgtttttcgtcttgcacaccaagatccagtaggaagcacagcacacagtaagcaaagaattgcctatgagtagtgcacttacgtaaaccatgaaaagtaagcataggacagcatttggaaaaaaggtagagaatttgaggagatgatttcatggacstatactgaaagccacgtgaccaaataaagatgctaaagaagccttttctagtaatttcatgttagatttttacagaagccagatacggatgtaataagacatcatagacactctgatatctagtttgtttgtttgtttgtttg

SEQ ID NO: 584578 - DNA, 626 bp, Homo sapiens
tggtttacaactttgcttttttttcataatttaagaaatggatgcattaaaaaacaagtatttgtctatgttttggggaacaaaatgtataaggatgcaattatgtgacattaaataactgaaataatgaaaatggaactgttaaaagagtaagttaagctagtaygaattcaaattaaggcattataattttatgagcttaaatataactcctatgttaaccgaaaagaaaatagctatagaatatacagaaaagaaaatgggaaggcaattaatatgttttactgtaaaaaattaaaaataagatcgcaatgaagaaatggagaaaaattccataggtatatgtaaaacaatagaaaaatgacagaagttaaatttattctcattaataattcttttaaatgtaaatttaaatgaattaaactgcttgatcaaaatacaactattcacagaatgtatttttagtaacccatatatatgctgtctgtaagagacttgtgttagatccaaagacataaataggttgaaagtgaaagaatagaaagatatcacatgaaaatatttactaaaagagagcaaaggtgactggaactaatgtcagacaaaatagagtttatatttaaaat

SEQ ID NO: 584579 - DNA, 626 bp, Homo sapiens
tggtttacaactttgcttttttttcataatttaagaaatggatgcattaaaaaacaagtatttgtctatgttttggggaacaaaatgtataaggatgcaattatgtgacattaaataactgaaataatgaaaatggaactgttaaaagagtaagttaagctagtacgaattcaaattaaggcattataattttatgagcttaaatataactcctatgttaaccraaaagaaaatagctatagaatatacagaaaagaaaatgggaaggcaattaatatgttttactgtaaaaaattaaaaataagatcgcaatgaagaaatggagaaaaattccataggtatatgtaaaacaatagaaaaatgacagaagttaaatttattctcattaataattcttttaaatgtaaatttaaatgaattaaactgcttgatcaaaatacaactattcacagaatgtatttttagtaacccatatatatgctgtctgtaagagacttgtgttagatccaaagacataaataggttgaaagtgaaagaatagaaagatatcacatgaaaatatttactaaaagagagcaaaggtgactggaactaatgtcagacaaaatagagtttatatttaaaat

SEQ ID NO: 584580 - DNA, 626 bp, Homo sapiens
tggtttacaactttgcttttttttcataatttaagaaatggatgcattaaaaaacaagtatttgtctatgttttggggaacaaaatgtataaggatgcaattatgtgacattaaataactgaaataatgaaaatggaactgttaaaagagtaagttaagctagtacgaattcaaattaaggcattataattttatgagcttaaatataactcctatgttaaccgaaaagaaaatagctatagaatatacagaaaagaaaatgggaaggcaattaatatgttttactgtaaaaaattaaaaataagatcgcaatgaagaaatggagaaaaattccataggtatatgtaaaacaatagaaaaatgacakaagttaaatttattctcattaataattcttttaaatgtaaatttaaatgaattaaactgcttgatcaaaatacaactattcacagaatgtatttttagtaacccatatatatgctgtctgtaagagacttgtgttagatccaaagacataaataggttgaaagtgaaagaatagaaagatatcacatgaaaatatttactaaaagagagcaaaggtgactggaactaatgtcagacaaaatagagtttatatttaaaat

SEQ ID NO: 584581 - DNA, 750 bp, Homo sapiens
tgatagttttttagaatctttttttcttgctgtagtattctgttttagtctttcagttttatccttgctgttactagcaaacaaaaccagtagttatctcaattcagaagagatagtgatggttcgatttgatccatcagtatttagtgagcatttaacatgtgtattgcaaaatgtatgaaaagattgctgacctgccctgtagagtattatacatcaaagcttggtgtccatcctaaagacgctgccagtcacttccttactctctctagcctggttttctcaactgtctcagtgactgcagtcaattccctyctggtcttttcttcactgagctcaccatctgccacttccctgctggtgcctgtgtagttcgctacattccggattattccattgcctttagaattcctccagggatggtgcttctttccaaataagtgcccagtagcataagttatatggtatttggcaggtgtgagtttgtaggaaggctcacaggttttatttagcctatctgtttggatacagtttatgaagaggtctggtcacatataccaaatagtaatattttcttgtcagattttcttcataccttctgtatctgtctttcttaattctgtttcctgctcatttaccataacaaccactttccaggacgaaaatatgcctttggacttctttcttctctgggtactttcaacaaatgggttggcctcaaataatatgcatcccttcacttaaaattta

SEQ ID NO: 584582 - DNA, 528 bp, Homo sapiens
tgcagcatggtgactatagttaacaataatgtgttgtatacgtgaaaattgctaagagattagatcttaaatgttcttgccacaaaaaaagataaatatgtaaggtaattaatatattaaccagcttgatgtaatcatttcacaatatatacatatatcaaaacatcatgttgtgcaatataaatatacacaatttttatttgtcaattatacyttaataaatctggtggaaaatgtgatgaaagagaaacacggacgataaaatagcaacatatagttaatcgtgatcaactgaagtgtggtcttaaaagttcagactgtatctagcaaaagggtctaaagaatataatctttaagaaatttcaggatttacaaaactcacttgaagcggtttaaaattagagagacttttaatattgaaatcacatacttagaggatgggattacaaaaaatataccatataattaacataaatgtagacttttcacctaatgatttgaaagaactttgtaatattgacactttta

SEQ ID NO: 584583 - DNA, 528 bp, Homo sapiens
tgcagcatggtgactatagttaacaataatgtgttgtatacgtgaaaattgctaagagattagatcttaaatgttcttgccacaaaaaaagataaatatgtaaggtaattaatatattaaccagcttgatgtaatcatttcacaatatatacatatatcaaaacatcatgttgtgcaatataaatatacacaatttttatttgtcaattataccttaataaatctggtggaaaatgtgatgaaagagaaacacggacgataaaatagcaacatatagttaatcgtgatcaactgaagtgtggtcttaaaagttcagactgtatctagcaaaagggtctaaagaatataatctttaagaaatttcaggatttacaaaactcacttgaagcggtttaaaattagagagacttttaatattgaaatcacatacttagaggatgggattacaaaaaatataccatataattaacataaatgtagacttttcacytaatgatttgaaagaactttgtaatattgacactttta

SEQ ID NO: 584584 - DNA, 607 bp, Homo sapiens
actgactgcttttgttccacattatcttttcaaggatatttgtatagtgagcagtcttggcagataaagcctctggagcaaagagcaggcatggctaccaccsattatagaagattttaggtccctaaattcagggatcctctcttgtaataaaatccaaacatggcccagtgcccgctggccctctttgcatcatcctgtgggaagtgggggtcagggagccagtggaagaaaataatgatactctgcctgagtaatacgtcactctgagtaataaagtcctttgtctctgacccaggagtatcttgccttcttctagcatccatgaaactatgacagactaatttattagcttgcaagtgggctaaaatctcaagtctttcatagtctttgacactaagcttctatttattaaactattttactggtttacctactttattggctcaggtagatatttttatttagacaatcaccaatagataatggactgaaactttatcttttgctttatcaaaaacatcatatttcccaaactaaaattccatcaggccacattttttgtttctgaaacagttttaaccatctcaattgctatgccaattat

SEQ ID NO: 584585 - DNA, 548 bp, Homo sapiens
agtcctaataatccttaaattgctttcagggtaattattccattgtcctggataatagctcctggcttctgtttagatggttgatccacactaatctccttattaaacagtcacttgcccacacccttagtgttctttcccaaagaggctttctcgttcattataatatgaatatactgagagttttcagttttcccagtctttacattctgcttccattttgattaaaatcattgtccttatgtcatttctgtcttcttgcattttattataagcaatcaggaagaatcatgctgctctttcaacacttgrgtgagaactttcctcagccagatatccaatttcatcactcacaagttctactttccacaaaaaatatgaaacaaaaccaattctgccaagttatttgctacattataataacgatgatctttcttcagtttccaaaaacattcctttgcattctgagttctcatcagaatgccctttactatccatatttatatgaacatctgttcaagattacttaggtattctcttaaaatatt

SEQ ID NO: 584586 - DNA, 640 bp, Homo sapiens
tcaaaaaagaagattcccaaacccgatcccagacctgttaaatcgaattatcttagattggtacctggtagtttacatatttagatttacccattgtgattattataggtgttaaaacttgagaatgccaaatgttgaagaaagagtgaatggcatgttcttctaaaatacttcataaatattgctctttttaaagagttttcaatgaatgatgtgatttgcagaaagtttgagctcatattttatagtgattatcaggaacatacacactctgcgttattgattggtgaccattccatgtacatcagaaatcaaacaactagrcggcaaagctgaaatcttgacaaaaaaattgagaagtgtcaaaaaaactctcaccaatacaaatgatcatcctaattctaatattattttatccaaatacaatttcttttcattactacaataaccttataaaaatatttttatccatattactaagaattagaactaagccttaataagtatatagaccaagagtttttaactaaaagtaggtacaaatattcaaatagtttctaagcataaaaaaagaatataccaatgtgaaaactattttttctcaaaataaaaatgaaaaaaagtagaaattaggtatatt

SEQ ID NO: 584587 - DNA, 640 bp, Homo sapiens
tcaaaaaagaagattcccaaacccgatcccagacctgttaaatcgaattatcttagattggtacctggtagtttacatatttagatttacccattgtgattattataggtgttaaaacttgagaatgccaaatgttgaagaaagagtgaatggcatgttcttctaaaatacttcataaatattgctctttttaaagagttttcaatgaatgatgtgatttgcagaaagtttgagctcatattttatagtgattatcaggaacatacacactctgcgttattgattggtgaccattccatgtacatcagaaatcaaacaactagacggcaaagctgaaatcttgacaaraaaattgagaagtgtcaaaaaaactctcaccaatacaaatgatcatcctaattctaatattattttatccaaatacaatttcttttcattactacaataaccttataaaaatatttttatccatattactaagaattagaactaagccttaataagtatatagaccaagagtttttaactaaaagtaggtacaaatattcaaatagtttctaagcataaaaaaagaatataccaatgtgaaaactattttttctcaaaataaaaatgaaaaaaagtagaaattaggtatatt

SEQ ID NO: 584588 - DNA, 640 bp, Homo sapiens
tcaaaaaagaagattcccaaacccgatcccagacctgttaaatcgaattatcttagattggtacctggtagtttacatatttagatttacccattgtgattattataggtgttaaaacttgagaatgccaaatgttgaagaaagagtgaatggcatgttcttctaaaatacttcataaatattgctctttttaaagagttttcaatgaatgatgtgatttgcagaaagtttgagctcatattttatagtgattatcaggaacatacacactctgcgttattgattggtgaccattccatgtacatcagaaatcaaacaactagacggcaaagctgaaatcttgacaaaaaaattgagaagtgtcaaaaaaactctcaccaatacaaatgatcatcctaattctaatattattttatccaaatacaatttcttttcattactacaataaccttataaaaatatttttatccatattactaagaattagaactaagccttaataagtatatagaccaagagtttttaactaaaagtagrtacaaatattcaaatagtttctaagcataaaaaaagaatataccaatgtgaaaactattttttctcaaaataaaaatgaaaaaaagtagaaattaggtatatt

SEQ ID NO: 584589 - DNA, 584 bp, Homo sapiens
acatcaagtaattaaatttaaaaagtgtcttgattaactattgtgtttcaacatcaattcaacaatagaaaatataattactcagcataaccaattatattttattaagggatgcatgatgttataaatgagaaaaatgcatttataatgaatttattttagtttttataaaactagtaatattaaaggtaaatgattggcaaaccattgttcattcgtctattgtttgttgaagaattttgttttgaaaggtaattatatgyagagtactaacttgaatatttctttatgcagaaaggaaacttatacatagtcctgaaccctcaaaaatcatatttttacagggcatttattgtgtgtggagatacatatagtaatgaaaaatttataagttgcttacagaaaactatggttgaggaatgtgactggaataatttaatgagaaattcacagaagcaatcaatggacagagaagcatattagagaaaatgatggccaaattaacaacctaaataaagcatttgaggtgaaaagcaacaattttaaaatgaaaatgatattggttgaacatggcaagagcaatg

SEQ ID NO: 584590 - DNA, 591 bp, Homo sapiens
ctacttgaataaaattttattatatttcgcttttccaataatatatactttttcttcactttgattttaaaaagtccaattgcactcaggttttgagtttctttctcctacctgcgaaggctttcacaattaaataaaaactaaaacttctctaatgaaattccatatcctgaagtaaaattatattgatttaaatcaacaasactttgaggcaatttttcaactctatattggtttacttagttctctcttttatggttactgtatttatcctttagtatgagattatgtcctgaatttctctataccaggagcatggcatgaaaccattttcacatacatctttaatgggaagattctgtcactacttgtggagagctatactctgaattcagaagaaaagggaataaaataacagatttctagagagatttttaagatcaagtcattgtaataatagattattataaattaccactaaatggatattaagttagaaaacaacaatttcagccaaattctaaaaagtcagtttattttcctaaatgtataatgtatacatagtatgtgctgaaagtatttgcaagaatt

SEQ ID NO: 584591 - DNA, 591 bp, Homo sapiens
ctacttgaataaaattttattatatttcgcttttccaataatatatactttttcttcactttgattttaaaaagtccaattgcactcaggttttgagtttctttctcctacctgcgaaggctttcacaattaaataaaaactaaaacttctctaatgaaattccatatcctgaagtaaaattatattgatttaaatcaacaagactttgaggcaatttttcaactctatattggtttacttagttctctcttttatggttactgtatttatcctttagtatgagattatgtcctgaatttctctataccaggagcatggcatgaaaccattttcacatacatctttaatgggaagattctgtcactacttgtggagagctatactctgaattcagaagaaaagggaataaaataacagatttctagagagatttttaagatcaagtcattgtaataatagattattataaattaccactaaatggatattaagttagaaaacaacaatttcagccaaattctaaaaagtcagtttattttcctaaatrtataatgtatacatagtatgtgctgaaagtatttgcaagaatt

SEQ ID NO: 584592 - DNA, 544 bp, Homo sapiens
atgtatttcaaaggtgtgtggtactttttcttaaatatttttacataattgcattaatattataaatatcattttattgcttttgtaatttttttctggatgatgtcaattacctgcatgaacagataattacgccacccaagtaagatttttaaaaattttagcctctrtaagtttcattaatattttcatctactaattttctttaacaattctaaaactcacttcctattaaaattatatcaatgtcaatatcttgtgtttttttcctgaatattcttgaatttactaaggataaccatgtcataaaatattcttttttcctgatttttttttttttttagacagagtcacactctttcacccagtttagagtgtagtagcattatcatggctcactgtagccttgaccttctggactaaagccatcctcccacctcagttacctagtggctgggactacaggcacgctccaccatgctaggctaattttttgaattttttgtacagacaaagttccctgtgttgcccagactggtcttga

SEQ ID NO: 584593 - DNA, 544 bp, Homo sapiens
atgtatttcaaaggtgtgtggtactttttcttaaatatttttacataattgcattaatattataaatatcattttattgcttttgtaatttttttctggatgatgtcaattacctgcatgaacagataattacgccacccaagtaagatttttaaaaattttagcctctataagtttcattaatattttcatctactaattttctttaacaattmtaaaactcacttcctattaaaattatatcaatgtcaatatcttgtgtttttttcctgaatattcttgaatttactaaggataaccatgtcataaaatattcttttttcctgatttttttttttttttagacagagtcacactctttcacccagtttagagtgtagtagcattatcatggctcactgtagccttgaccttctggactaaagccatcctcccacctcagttacctagtggctgggactacaggcacgctccaccatgctaggctaattttttgaattttttgtacagacaaagttccctgtgttgcccagactggtcttga

SEQ ID NO: 584594 - DNA, 544 bp, Homo sapiens
atgtatttcaaaggtgtgtggtactttttcttaaatatttttacataattgcattaatattataaatatcattttattgcttttgtaatttttttctggatgatgtcaattacctgcatgaacagataattacgccacccaagtaagatttttaaaaattttagcctctataagtttcattaatattttcatctactaattttctttaacaattctaaaactcacttcctattaaaattatatcaatgtcaatatcttgtgtttttttcctgaatattcttgaatttactaaggataaccatrtcataaaatattcttttttcctgatttttttttttttttagacagagtcacactctttcacccagtttagagtgtagtagcattatcatggctcactgtagccttgaccttctggactaaagccatcctcccacctcagttacctagtggctgggactacaggcacgctccaccatgctaggctaattttttgaattttttgtacagacaaagttccctgtgttgcccagactggtcttga

SEQ ID NO: 584595 - DNA, 595 bp, Homo sapiens
ttaggcacgtggacacattgaaagttgaggagagcagaatttattaaaagaaagctctcagcaaaaaagaggggttctgccaataggctcccaccccacagattgaatactatgccaccacacacgagctgacaaggccaggttcttctgcagaaggtgcaaattcctgatggctccactgtgttctcccagtgtgcatgtcaggccccagtcagttgcaagcatccccagataagaccctgggcaggttccctcatctgcactaaagcatctgatgtaaacacttgtggggcaggccggagattctctggggactctcctacatctgcctctttcatctattagcatgattatttattgaggataatttctcagaaatgaacttatttagtcaagattatacacattttttaagaccccgtatgaattgcttggaagtttataccaatttacagtcccacctaaatctctaacatgtcatgagtgtgaactttaattaatattaactactttgtttttattatttattttaatatttattaagctgaaggtgaggaattataactgctytttaactgtgttcctttgatattta

SEQ ID NO: 584596 - DNA, 346 bp, Homo sapiens
tgaacttaaactgggctctagaccaaacagacctaatagacatttacagaatatacacagaatatacatttttctcatctgcacttggaacattctccaaaattgaccatatgcgtggccacaaagcaagtctcaacaaattaaaatatttatattttatatatatatatatatatataaawatatatatatatatatataatatcttcttagaccacagtggaataaaattagaaatcaataccaaaaggaaccctcaataatatgcaaatacatggaaattaaacaacttgctgctgaatgatcgttgcataagtgacaaaattaaggcagaaattaaaaaaaa

SEQ ID NO: 584597 - DNA, 559 bp, Homo sapiens
aaatgtcacacctgattttgttgtttagggaaaactaaatttcctttttctttttttttttttttttcttgagacagagtcttgcactatccyccgggctggagtgcagtggcacgatctcggctcattgcaagctccacctcccgggttcaagcgattctcctgcctcagcctcccaagtagctggtattacaggcacccaccaccacgcccggctaattttttgtatttttagtagagatagggtttcactatgttggccaggctggtcttgaacgcttgactttgtgatccacccacctcggccttccaaagtgctgggattacaggcatgagccaccacgcccggcctaaattttcttgaggaaatttgtcattgactaagccagcaggagaaattccaatattaatagcattttcattacatattgattcttcaaaactcttgtttgattccaaaccactttctatttactctaccataatttattttaaattcataataggccaggggataggagggagggacagtgtgtagaagacaatggaggctttttaa

SEQ ID NO: 584598 - DNA, 610 bp, Homo sapiens
cagaaaggttggcacagtgcagcacttasaggcagtggattctgtgtaaacagttgatgatcatatctgatgtgcctcagtgccagcactgtgaagaaatgtgcattagtggataatgtgatgtggtcgagggctcagggccgcccagtttgcttttggaatatgccaaagatgtcctgatgagccaacattctggtgttctctcccctcatcagttacaggaggctgtgaccaagcatcgttggcaatctcatggaaaatacgctctttgaagaaaagagttgtctatcaggaggctgaacttgctggtagatcagcacagtccttccaaatttttcaacaaattagatgttttactgcttcccttaacttttggtatcaaaaactgggcgccgggattcctatcaggagtggtaatgatgttttgaaaatatgctagcacttggcaggaatttgcttgtgggtagggagggagggagggatggttcaggattctgaaggctactttcctcacactatattgctgttggagaatgttgatatgcagaaatacattttagaaccccatttgaagactgagtttgggccatgcagaacagtttgagaaata

SEQ ID NO: 584599 - DNA, 584 bp, Homo sapiens
atgtgaaattagtttttgataaagagtccaggacagttgtcttgtagagtgtcccatatgtgggttaatctgattgcttacacaagattagatgcaggttgaatatctttggccagagttctgtactgcataggtgccactgtagacttctcagtcaagtatcacatctggagtaaataatgtcaatatcacatctggagtaaataatgtcaggcatcacawctggagtaaataatgtcagtatcacatctggagtaaataatgtcagtatcacatctggagtaaataatgtcagtatcacatctggagtaaataatgtcagttatcacatctggagtaaataatgtcagttatcacatctggagtaaataatgtcagttatcacatctggagtaaataatgtcaggtatcacatctggagtaaataatgtcagtatcacatctggagtaaataatgtcagtatcacatctggagtaaataatgtcagtatcacatctggagtaaataatgtcaggcatcacatctggagtaaataatgtcaggtatcacatctggagtaaataatgtcagtatcacatctgga

SEQ ID NO: 584600 - DNA, 584 bp, Homo sapiens
atgtgaaattagtttttgataaagagtccaggacagttgtcttgtagagtgtcccatatgtgggttaatctgattgcttacacaagattagatgcaggttgaatatctttggccagagttctgtactgcataggtgccactgtagacttctcagtcaagtatcacatctggagtaaataatgtcaatatcacatctggagtaaataatgtcaggcatcacaactggagtaaataatgtcagtatcacatctggagtaaataatgtcagtatcacatctggagtaaataatgtcartatcacatctggagtaaataatgtcagttatcacatctggagtaaataatgtcagttatcacatctggagtaaataatgtcagttatcacatctggagtaaataatgtcaggtatcacatctggagtaaataatgtcagtatcacatctggagtaaataatgtcagtatcacatctggagtaaataatgtcagtatcacatctggagtaaataatgtcaggcatcacatctggagtaaataatgtcaggtatcacatctggagtaaataatgtcagtatcacatctgga

SEQ ID NO: 584601 - DNA, 316 bp, Homo sapiens
caagaacttattttcctagactcctctgaacttargttaggagcaaccaatcaacagaccctctctggaatttacaactggatctattgattcaaagagggtggaccaagccaatgccattctgatgagtgatccagcaacaactgctgtcttggagcatatgtggccatgccagcagtgacacccaggattcagtggtagggctagcagtcctcacatgctctttgggggcatgaattcctgtggtcctggctgctgtctagccttccttgttcttcccttttcccaagactgtttctctgcccttctcagaaat

SEQ ID NO: 584602 - DNA, 420 bp, Homo sapiens
tttaagatcttattctatcatttgttgtaaaaatataatgagtcctaaaaagtttaagaggaaagactattagaaatttgatgccattcttgttttttctttaagtatttaaaagaatactgaagagcacaatcttttttttgccccttttacgccaaaatgatgtgaaattaacttgactttttttttttttttttgagacggagtctcgctctatcgcccaggctagagtgcagtggcctaatcttggctcaccaaaacctccacctcccgggttcaagcgattctcctgcctcagcctcccaagtagctgggactacaagtgtgcaccaccatgcccggctaatttttgtatttttagtaragacgggggtttcgctatgttggccaagctggtctcaaactcctgaccttatgatc

SEQ ID NO: 584603 - DNA, 605 bp, Homo sapiens
taaaaagaatgagaagatacaagaagagcaggagcatatatctccttactaggaagccaaaagaaaagagagttcaaagatcaaccccgaggccatggaagaaaagcactgaaaataatcccctgaaaatcaaatgtatgtgttaggttkaccacaggtagctccacacattgctgctgatgatactagcaatacatgttaacattcttggcctttctagatgtcagacactattctaagtactcttaatttgctgaattatttaatcctcacatcaactctgttattattcccattttgtaatgagaaaactagagagttaaaatagcctttttacagtggcatacctagctggcaaaagagcatctcaaaccttacgatgttcaaatcataactttttcccctgtcctaatgtgtacctcctcatgattccccatttcagtcattaaataaacctgccaatcattggcattttgtttctttttttttataggagatattcttttttttattgcctgtttttttaattattattatactttaagttttaggatacatgtgcccaacgtgcaggtttgttacatatgtatacatgtgccatgttg

SEQ ID NO: 584604 - DNA, 605 bp, Homo sapiens
taaaaagaatgagaagatacaagaagagcaggagcatatatctccttactaggaagccaaaagaaaagagagttcaaagatcaaccccgaggccatggaagaaaagcactgaaaataatcccctgaaaatcaaatgtatgtgttaggttgaccacaggtagctccacacattgctgctgatgatactagcaatacatgttaacattcttggcctttctagatgtcagacactattctaagtactcttaatttgctgaattatttaatcctcacatcaactctgttattattcccattttgtaatgagaaaactagagagttaaaatagcctttttacagtggcatacctagctggcaaaagagcatctcaaaccttacgatgttcaaatcataactttttcccctgtsctaatgtgtacctcctcatgattccccatttcagtcattaaataaacctgccaatcattggcattttgtttctttttttttataggagatattcttttttttattgcctgtttttttaattattattatactttaagttttaggatacatgtgcccaacgtgcaggtttgttacatatgtatacatgtgccatgttg

SEQ ID NO: 584605 - DNA, 443 bp, Homo sapiens
  misc_feature 428, 429, 430, 431, 432, 433, 434, 435, 436, 437, 438, 439,440, 441, 442, 443: n = A,T,C or G
aatgagtttaaactggaggaccatttattcaaaagaactccaaatacatgctaaagagcaaaaaagaaccctccaggtaaaagcaacctattggatattcctttgaaatacaagtctatatatctctctgaatatgaatacaaagacacaccagaaaaccaaacaaccaaccaaaaacaaaagaaaayactgattgctcttgctttaatgatctcctgcaagcacacaaaaagttaaccttcatgacggcccaagagggactactctcaaacatgaaggctgccaccagttactacattttgcgctgctctattgtaaatcagatatagaagagatggctagtttatctttaaaagaaatttcagatattaaattttaccaaagttagttctggtcatccaagcgatgactttgaagaacccagcttnnnnnnnnnnnnnnnn

SEQ ID NO: 584606 - DNA, 493 bp, Homo sapiens
agtatacacattgcatttagtgggaacttattttttaaagcgaattcattcttgggaacaaatccagctttcttgttttgattggttcatggtttagtctttctacttaggataagagtagtttacacaccgcagtcagtgttataatattctgtgtttctttgtgtacttattgttaccagtaagttttgtacyttcaggtgattatttattgctcattaaggtccttttctttcttattgaagtgcttcctttaacatgtcttgtaggacaggtctggtgttaatgcggtccgtgagcttttgtctgtctggaaaattctttatttctcctttgtgcttgaaggatgttttcaccagatatactattctgaggtaaaagtttttttccttcagcactttaaacatgccatgccagtctctcctggcttgtaaggtttccactgaaaagtctgctgccagatgtattggagctccagtgcatgttatttgtt

SEQ ID NO: 584607 - DNA, 493 bp, Homo sapiens
agtatacacattgcatttagtgggaacttattttttaaagcgaattcattcttgggaacaaatccagctttcttgttttgattggttcatggtttagtctttctacttaggataagagtagtttacacaccgcagtcagtgttataatattctgtgtttctttgtgtacttattgttaccagtaagttttgtaccttcaggtgattatttattgctcattaaggtccttttctttcttattgaagtgcttcctttaacatgtcttgtaggacaggtctkgtgttaatgcggtccgtgagcttttgtctgtctggaaaattctttatttctcctttgtgcttgaaggatgttttcaccagatatactattctgaggtaaaagtttttttccttcagcactttaaacatgccatgccagtctctcctggcttgtaaggtttccactgaaaagtctgctgccagatgtattggagctccagtgcatgttatttgtt

SEQ ID NO: 584608 - DNA, 547 bp, Homo sapiens
gtaatattttaatattcataygcattttgaaatgattaccacaatcaaacatacccatcacctcatacttaatttttaatgatccaattttagttctactgttggtttattagctattcctctttgtttaattgtatagtggttgctctgagatttacaatatacatctttaacctgcactttgctttcaaatagtaatccatattatatgccgcataagaattttatagcgcatacttctatttatttaatcctttctttatgtgattgctgtcatgcaaatgatttctgcctatcacatatatctcaaatacatgctttaaactataaattatcttttaattttatttttaactgtggtaaaatacatataacataaaatgtgccatcttagccatcttttaagtgtacagttcagtagagttaagggtattcacactgctttgcaaccaatccccagaacttttctcatttttcaaatgaaatttctatactcattaaacagcaactcccctttccattctccttgtgcctcttgacaaccacc

SEQ ID NO: 584609 - DNA, 599 bp, Homo sapiens
aacatgtgtttttctctgtgttaaaagtatttcaggctatgcattcacaaataataggtagtagctatatttatcaaaagtcatgtcaactatgcagttagacagctgtcaacctacaatcagtattgttcagtgaaacatcttagggaggtctaatattagtcatttagctcttagtataaaaggcatatgaagttttcattgagccatttaattcagtttctaagtttgcatttcacattatcagatcataaattcttcaagcccctgtaattactgaatgactgatgcattcagagatattatatttctagtgctaggtatgttccaggaattgtgataaaaaatgacaccaggtttgtattgctttttagtttatagcacgtttaatttctcatctattatgatataatagttgcttcaaacagcataatcggctcaactcacttgctgcaaatggctatctttaaataaatgcatattccaatgttcattctgaaaatatttgtgtgtgtgtgtatgtatgtgtgtgtgtatgtgtatatayatatatatatatatatatatatatatatatacatataagtatatatataaaa

SEQ ID NO: 584610 - DNA, 491 bp, Homo sapiens
aagtgttgtctaaaaacgaagagacaacctgcagcagatgaagttcattattccttaatgatgatccccccacaaagtttcaaaagatcaaaaagggcatccctgtacataagcattataggctactccaggaagcttcagaaatgtctggatgtcattctagttgaaggttgtttcacatttgtgaagaacaagctaatcaatatttagcatttttttcttaaagatgcctttttaaaaaacaaaaacaaaaacaagaaaacaaaaggccaggcacggtggctcatgcctgtaatcccagcactttgggaggccaaggtgggcagatcacaagctcaggagattgagaccatcctggctaacacggtgaaaccccatctctactaaaaatacaaaaacaaaaaattagctggttgtggtggtgggcacctgtagtcccagctactygggagaatggcgtggacccaggaagcagagcttgcagtgagccg

SEQ ID NO: 584611 - DNA, 632 bp, Homo sapiens
ccatataaacactatattaagtcatttagggaaaaacattttataaagccactcaagaaaattagaaaattatgattagaatatctgtaacttgggttctgtgacacagagctaaacaagacagaaaagtcatagccacttggctttttaatttatgatactttttagacaactacagttccaaagaaatatggaaataaaatagtgttaccacttctagcttttggtattctgctcttgagaacttttcaatcatgaaaatataaacaggaaactcaaagtaattatttaactatacacattttttcattttgctgctctttggcaccattcatattcaaagttaagattggcttttatttttattaatatttataaagtgatcatcatgactgagataatccctatcaaggccttgtgaggccagcactattatttttttctttttattataaaatttaaactttttgtaaagaaggggtcttgctatgttgctcaggctggtctcaaactcctggtctcaagctgtcctccagccccrgcctcccaaagtgctgggattacaggtgtgaactacacacccagccccagcattactattaaacccattgtgcagatgggaaaaccaaggc

SEQ ID NO: 584612 - DNA, 564 bp, Homo sapiens
aaaaacgtggccctcccaccctagccttttaatatgcaaatgtaggtcaccatgttgtcctgcacacatggggtcatctggaggtgtcaccttgaggtggtgactagaagaagagggtgggaatctccatgttgaatggacacagtttctaagygctggcatttgcatatcaaagcttggcagcctgtagtcccagctactcaggaggctgaggcaggagattcacttgaacctgggaggcagaggctgcagtgagctgagatcacaccactgcactccagcctgggtgacagagcaagattccgtctccaaaaaaaagataaaaagaaaagaaaaagaaatgtttctggagttgtttctattaaaagggaaagccttactgaggcctccttaccctctctatctgcctagtataatttctgaataactcctctattaaaagtaccactgaggtgcttaatatgacatttctgatatttcccaatgctcctccacaaattcaatttggaaaggtaatctgttccaggagggcaaaccaaagaaaaagtcctaggctcctgagtc

SEQ ID NO: 584613 - DNA, 564 bp, Homo sapiens
aaaaacgtggccctcccaccctagccttttaatatgcaaatgtaggtcaccatgttgtcctgcacacatggggtcatctggaggtgtcaccttgaggtggtgactagaagaagagggtgggaatctccatgttgaatggacacagtttctaagtgctggcatttgcatatcaaagcttggcagcctgtagtcccagctactcaggaggctgaggcaggagattcacttgaacctgggaggcagaggctgcagtgagctgagatcacaccactgcactccagcctgggtgacagagcragattccgtctccaaaaaaaagataaaaagaaaagaaaaagaaatgtttctggagttgtttctattaaaagggaaagccttactgaggcctccttaccctctctatctgcctagtataatttctgaataactcctctattaaaagtaccactgaggtgcttaatatgacatttctgatatttcccaatgctcctccacaaattcaatttggaaaggtaatctgttccaggagggcaaaccaaagaaaaagtcctaggctcctgagtc

SEQ ID NO: 584614 - DNA, 592 bp, Homo sapiens
cggagttcaccataaataattttgcaagcctgcaggcctcggctcactgcttattgaggttttgccacaaaatggcctattagcatggatttaattataatttacatagatcatggaaataatcctcgaccatgaaaataaggctcaatgattctgaatttagaaatatttaaactgggagtccacgtatggcggacagtttggcatcagaaacactggaatctagtccctgctctctgaatctagctaattgagtgatcttggaccagccaccacatccctctgggtctcaattttatcaatgaattgtggagataatagtaaaaatatctacatcacagarttaaatgaaattgagtcagcaaaaagcactttgccacctgtccaacattaaacagatatctatgctgttgttgatataaagcggagagtccacaagtgcagtgcagagagctagctttagagccagactttctgagagtcactcttgattccaattccttgtgttacattcagattttctggctcttggcttctgttttgtcatctgtaatattgggtcaccaacaactcctatttcacattgctgaga

SEQ ID NO: 584615 - DNA, 612 bp, Homo sapiens
tgcatggtggagtgtttcaatcattcatttatcctttcaataattatttatcgagcacctactataagttaatttgcactatagcattaagaaaacaagtataggccaggtgaagtggctcatgcctgtaatcccaacattttrggggactgaggtaggaagatgacttgagcccaggaattcaagaccagccctggcaacatagcgagaccctgtctctacaaaaaatttaaaaattagctgggtgtggtggcgtgttccagtagtcccggctacttgggaggctgaggtgagaggaatgcttgagcccaggagttcgaggttacagtcagctatgatcactccacttctctccagcctggccaacagagaaaggccctgcctcaaaaaaataaataaataaataaataaataaataaataaataaagtataaatactggtttaggcagtatttctttttatgatctttgataataagttctctgacctttatcttccataaaaacaagcaaattgtgcttattacattctagggtcccttctagttttaaggtgatatgagtcaggacttggaccaagaatctctaatggtagttttattataatatcat

SEQ ID NO: 584616 - DNA, 612 bp, Homo sapiens
tgcatggtggagtgtttcaatcattcatttatcctttcaataattatttatcgagcacctactataagttaatttgcactatagcattaagaaaacaagtataggccaggtgaagtggctcatgcctgtaatcccaacattttgggggactgaggtaggaagatgrcttgagcccaggaattcaagaccagccctggcaacatagcgagaccctgtctctacaaaaaatttaaaaattagctgggtgtggtggcgtgttccagtagtcccggctacttgggaggctgaggtgagaggaatgcttgagcccaggagttcgaggttacagtcagctatgatcactccacttctctccagcctggccaacagagaaaggccctgcctcaaaaaaataaataaataaataaataaataaataaataaataaagtataaatactggtttaggcagtatttctttttatgatctttgataataagttctctgacctttatcttccataaaaacaagcaaattgtgcttattacattctagggtcccttctagttttaaggtgatatgagtcaggacttggaccaagaatctctaatggtagttttattataatatcat

SEQ ID NO: 584617 - DNA, 612 bp, Homo sapiens
tgcatggtggagtgtttcaatcattcatttatcctttcaataattatttatcgagcacctactataagttaatttgcactatagcattaagaaaacaagtataggccaggtgaagtggctcatgcctgtaatcccaacattttgggggactgaggtaggaagatgacttgagcccaggaattcaagaccagccctggcaacatagcgagaccctgtctctacaaaaaatttaaaaattagctgggtgtggtggcgtgttccagtagtcccggctacttgggaggctgaggtgagaggaatgcttgagcccaggagttcgaggttacagtcagctatgatcactccacttctctccagcctggccaacagagaraggccctgcctcaaaaaaataaataaataaataaataaataaataaataaataaagtataaatactggtttaggcagtatttctttttatgatctttgataataagttctctgacctttatcttccataaaaacaagcaaattgtgcttattacattctagggtcccttctagttttaaggtgatatgagtcaggacttggaccaagaatctctaatggtagttttattataatatcat

SEQ ID NO: 584618 - DNA, 612 bp, Homo sapiens
tgcatggtggagtgtttcaatcattcatttatcctttcaataattatttatcgagcacctactataagttaatttgcactatagcattaagaaaacaagtataggccaggtgaagtggctcatgcctgtaatcccaacattttgggggactgaggtaggaagatgacttgagcccaggaattcaagaccagccctggcaacatagcgagaccctgtctctacaaaaaatttaaaaattagctgggtgtggtggcgtgttccagtagtcccggctacttgggaggctgaggtgagaggaatgcttgagcccaggagttcgaggttacagtcagctatgatcactccacttctctccagcctggccaacagagaaaggccctgcctcaaaaaaatawataaataaataaataaataaataaataaataaagtataaatactggtttaggcagtatttctttttatgatctttgataataagttctctgacctttatcttccataaaaacaagcaaattgtgcttattacattctagggtcccttctagttttaaggtgatatgagtcaggacttggaccaagaatctctaatggtagttttattataatatcat

SEQ ID NO: 584619 - DNA, 583 bp, Homo sapiens
gatcatttctctcctgggtgttatgaagaaatgtgtttattaaatactttgcatcccttaaaggaactatatgaatgataggaataagaattattgacagttttgaatggtctattgatattactatggctttgtttctaccaaatatggtaagtataatgtagaggaaaatacaaaatacaacttttatcccccatttttttcattcaactatacctcaatattcagtgacagggccacctyaatctccgcccatgaaaacgcatctagaggagtgtcacaagtttttcacagtgacatttttgcttactgatacaagacagtgatggtgactgatgatgtcccagtgatttctgagtagcttctaaccagcacataactcccccaacagtctttaagtctttaggtgcccatattttcctctttgttctcccccttcagactgagagtttgtagagagagggcaacagatcttttcaatacacaactaatgcaaaatgtatcaggtttttcttggatttcagctactccctgttaaacaatcagagcttagtgaacagtgattcagtgaggagggaaagca

SEQ ID NO: 584620 - DNA, 602 bp, Homo sapiens
ccactttttggttcatggatgtcacattyttgctgtgtcctcacatggtgaaagaggcaaggcacctctctgggcctcttttataagggcaccaatcccattcatgagggctctgccctcatgacttaattatgtttgaaaggtctcacctcttcataccatcaacatgagaattaggtttcaatttatgaatttggggaacacaaacattcatatcatagcaacatctatagaacatatagccaatagcagcataatatacattcttctcaattgcacatggaacattatctaaaacaatcctcaataagtttaaaaggattggtaccatccaaagcattccccttgagacttggaataagacaaggatgcccactgtcaccactcctattcaacatcctactggaagtcctggccagagaaatcaggcaagagaaagaaataaaaggcatccaaataggcagagaggaagtcaacctatctctcttagcagacaatataattttatacctagaaaaccctatattctctgccaaaaagctcctacatctgataaaacctccagcaaagtttcagcatacaaaatcaatgtacaaaaatca

SEQ ID NO: 584621 - DNA, 485 bp, Homo sapiens
ttatctaaagttaagaagaaggaaaaaaaacttacgagttgtgaggaaaaagcaccaggtaacttataaagggaaacctatcagattaacagcagatttctcagcacagaccttacaagctagaagggattatggccctatcttcagcctcctcaaacaaaacaattatcagccaggaattttgtatccagcaaaactatgcttcatatatgaagggacaatacagtctttttcagacaaacagatgctgagacaattcgccactaccaagccaccactaaaagaactgctaaaaggaggcctaatctttaaacaaatcctggaaacacatcgaaacagaatctctttaaagcataaatctcacaggacytacaaaaaaatacaatttaaaaaataaaaccataaaacaaaaaatcaagttacacaggcaacatggaagggtacctcacatctcaatactaacattgaatgtaaatggcctaaat

SEQ ID NO: 584622 - DNA, 470 bp, Homo sapiens
ctccagaaggacccctgggaggccaggcaaaaagggcttgctaggagacccagcgagttcccagggcttttccctctgcatcctttacccctgtatttcactkggctctctaaattgactcagctccaggtaaggtcaaaatcttctcccataatctaggccttcagtttcaccagtgacggtgtgtgtttgggggtggatgatcttcctttcccactttcacagtttgggcactcacagtatttgccgtatctctcacattctgcaggagcaatccacttccttcagggggtctgtgggtcctctcaggtttcctgacttattcctgcagtcattctggagcaaaaattcatgatgcaagcctccacatactgctctgtccatctgagtcagagctgcaatctttggttccatatttttgcaattgcaaattgtgctgctataaacatgcatgtgcaagtgtccttctc

SEQ ID NO: 584623 - DNA, 610 bp, Homo sapiens
taccaatttttgaaagctaaaaatgtgatgcctggctaattttatttttatttttattcttttgtagagagaggggtcttgttgtgttgcccaggctgatcttgaactcctgccctcaagcaatcctcctacctcagcctcccagagtgttaggattacaggtgtaagcatttgctcatatgctrtttgccttctgtgtatcttcttttggtgtctgttaaggtctttggttcattttttttaattgggttatttcctcattgctaagttttaagagttctttctactttttagataatagtcctttatcaggtatgtcttttacagatattttctcccaatctgtgacatgtcttcacattctcttggcagtgtctatcacaaagcagaaatttttaatattaatgatgttcagtttatcaattactttttcaatgattacaccttttattttttcatttttaagtattctatgtccttatattttgagagtgtctcttataatatcaaagagctgaatttttgtgtaattcaaacaccaacctcttttttaaaagagaaataatctttttatagttgttgcattttctaatatatttgaattatttct

SEQ ID NO: 584624 - DNA, 610 bp, Homo sapiens
taccaatttttgaaagctaaaaatgtgatgcctggctaattttatttttatttttattcttttgtagagagaggggtcttgttgtgttgcccaggctgatcttgaactcctgccctcaagcaatcctcctacctcagcctcccagagtgttaggattacaggtgtaagcatttgctcatatgctatttgccttctgtgtatcttcttttggtgtctgttaaggtctttggttcattttttttaattgggttatttcctcattgctaagttttaagagttctttctactttttagataatagtcctttatcaggtatgtcttttacagatattttctcccaatctgtgacatgtcttcacattmtcttggcagtgtctatcacaaagcagaaatttttaatattaatgatgttcagtttatcaattactttttcaatgattacaccttttattttttcatttttaagtattctatgtccttatattttgagagtgtctcttataatatcaaagagctgaatttttgtgtaattcaaacaccaacctcttttttaaaagagaaataatctttttatagttgttgcattttctaatatatttgaattatttct

SEQ ID NO: 584625 - DNA, 389 bp, Homo sapiens
atagttccatccaaactaaaactatagtttcatccaaactttcacttctggtagtcaatgaaatctacagtttggcctcactttccctattgaggcttattttccatcccctgtggttttaccttccacacatatccatactaggagtctatgcacatgataaatatatcataaacacatacacagacacacacacactgtctttcargttttcactgatatgatttcctttctttccaccattcttgaagctactgctcaaagactagcacatatgcctctttttcccaagcaatcttcccatatcactctaaatggaatcattctcctttaattcttctatatcatgccctgtataattcatttattcatttttatactcatttgta

SEQ ID NO: 584626 - DNA, 597 bp, Homo sapiens
tgaaacagtgtcttctaaatgtaacttaaacacaacaggccagtggtttatttataaatgctggaaacctttcataatttgcaattatgtgcaaaactccattatatgaaacatagaagatgagatgagtgagaatctggatggccagtaaatgtttagacagatatttaatcttattttgtgttactgagaaaatataacttaaacaaagatagcacttttcatccatcagatggttaaaaactcttacagtacaagtattgggatgtgtggagaaatgggaacacatgtgcatgccttgtggcttataaattagtatagctatttggaaaagcaatctggcagcatctagcaaaattaaaaatacaaatgccttaccacccattatacctattggtttatatacatggatatacatgtgagaatgtctattacastattgttggtaatcagatgttggtaaaacatctgatgttttgctgttacttaaaattaactagggcaatagataaattgtggtctatttatacaagggagtattatataagtttaaaagaagataactagatctaaaataaatacagatctcaaaaactt

SEQ ID NO: 584627 - DNA, 585 bp, Homo sapiens
ttttttcttcttacttttttaggctattgtttaaaatgtgtgcccaagggaattttagcagtactggaagcaatagctgcctgaactaaattaatttatcctttattcatgacagaaaatttgaagtttccattgygggttgggggggtaatacagaataaaaggatcttttagggtagagagagaaagagaaacagaaaagaaaaagaagggagaagtgggggaagaagaggagggaggaaggagagggagagacaaacacagatacagcagtgacaggagagaagacaaggggcagtgtttgtccaggagggtgaagccttgttcgttgttcacttgcctggtgagggagcccaatagcaggggatgctgcaggatgcatggctgacccttggtcgttagtcagcttccccaaagattctcctgtattgagttaggcttggataaagtgaaatgaaaaggtgtgatagtaccgtaatgtataggaaatgggcacatcagtggctaatgactgatacagaaaagtctcaaagctcagtgcaagggaagacttgtggctggaggagagcgtaaaataatagagat

SEQ ID NO: 584628 - DNA, 585 bp, Homo sapiens
ttttttcttcttacttttttaggctattgtttaaaatgtgtgcccaagggaattttagcagtactggaagcaatagctgcctgaactaaattaatttatcctttattcatgacagaaaatttgaagtttccattgcgggttgggggggtaatacagaataaaaggatcttttagggtagagagagaaagagaaacagaaaagaaaaagaagggagaagtgggggaagaagaggagggaggaaggagagggagagacaaacacagatacagcagtgacaggagagaagacaaggggcagtgtttgtccaggagsgtgaagccttgttcgttgttcacttgcctggtgagggagcccaatagcaggggatgctgcaggatgcatggctgacccttggtcgttagtcagcttccccaaagattctcctgtattgagttaggcttggataaagtgaaatgaaaaggtgtgatagtaccgtaatgtataggaaatgggcacatcagtggctaatgactgatacagaaaagtctcaaagctcagtgcaagggaagacttgtggctggaggagagcgtaaaataatagagat

SEQ ID NO: 584629 - DNA, 585 bp, Homo sapiens
ttttttcttcttacttttttaggctattgtttaaaatgtgtgcccaagggaattttagcagtactggaagcaatagctgcctgaactaaattaatttatcctttattcatgacagaaaatttgaagtttccattgcgggttgggggggtaatacagaataaaaggatcttttagggtagagagagaaagagaaacagaaaagaaaaagaagggagaagtgggggaagaagaggagggaggaaggagagggagagacaaacacagatacagcagtgacaggagagaagacaaggggcagtgtttgtccaggagggtgaagccttgttcgttgttcacttgcctggtgagggagcccaatagcaggggatgctgcaggatgcatggctgacccttggtcgttagtcagcttccccaaagattctcctgtattgagttaggcttggataaagtgaaatgaaaaggtgtgatagtaccgtaatgtataggaaatgggcacatcagtggctaatgactgatacagaaaagtctcaaagctcagtgcaagggaagacttgyggctggaggagagcgtaaaataatagagat

SEQ ID NO: 584630 - DNA, 214 bp, Homo sapiens
tcttgagacattcctgtgcagaaatactcccagggattgcaagggagcagagacaaagaaagatagcacagatakgaaacaaaaatctctctatttcccagcaatccccatggtattttccttccttttcctagataattatgggatgaaattagcctttctcaacctgccactgtggctgctgttgcaccaacttataagccactaagaattc

SEQ ID NO: 584631 - DNA, 592 bp, Homo sapiens
acacaaaagaataggcaatgccaaaaatggtaaatatgtgaatagatttttttattaattcaaacatgtttcttatatatatttactcttccaaataaaaataataccaatgtattacgtcctttgtaacatactagtgtagcaaaggcataaagttcagtggactagaatagagaatctagaaataaaccaacacatgtatgttcaaataactagacaaaagcacagcagaaattcattaggaaaacaatatcttttttaaaaatttaatgttaggttccaggatacatgtgcagtrcgtgcaggtttgttacataggtaaatgtgtgccagggtggtttgcagcatctatcaacccatcacctaggtattaaacactgcatgcattagctatttatcctgatactctccctccctaccataccatcttcccaaagtccccagtatgtgtttttcccctccctgtgtccatgtgttctcattgttcaactcccacttataagtgagaacatgtagtgtttggttttctgtttctgtgtgtgtttgctgaggataatggcttccagctccatccatgtccctgcaaaggaca

SEQ ID NO: 584632 - DNA, 265 bp, Homo sapiens
ttaacagcaatgaattgtacatttcaaaatagctagaagagaggacttgaaatgttcccaacacatagaaatgatgaatactctaggtgatgaataccctaaatatcttgacttgattattacacattttgtacgaatctaacaaaataccacatgtaccccacaaatatgtacaaatattatatatcaattaaaaggaataaaatatggggtgtctttggggagttttttasatattctaaatttctgcaaaaattgttagtta

SEQ ID NO: 584633 - DNA, 581 bp, Homo sapiens
tgagttgcttcgaaatttaattgaggctattgggactacagagttcttgcctttaagaaagttaagtttccaaatgtgtgtggtttcagttaattgcagtgtagtaccacatgcatgagattttatattcagaagggaggaaattgattttctttggcatgtttatagcaaatatattcagtattattgttcaaacaagctgaaattatttacagaatgttatatgtgtatgtgttttctggraagagggtccatagctcttgtcagatttttttttttcaagagggtccatgactatagaatcattaagaattaatgtatgggataatttctttttcttctaaaacccaataagctcactttttaaaaatttgatggcgttttatttatgttaaagaggatcatttaaaaaaatattatttaactaatattcacattaattgcaatcatttcatggtaaagctatgcttagatttaaaatttcccttctagaatttatttttttggactcagagactgctatggtgatcaataatgatttgtagaaaattatgatatagcttgaggtcttttattttaaa

SEQ ID NO: 584634 - DNA, 597 bp, Homo sapiens
gcagacagaacatttctttgcaattggaacatctaactctcgttaaaacaatttctatggatatcacttgtgaaaagagttcagggaactatgtcatagtagatgtaatcaattatacaagattactgtgtttcctgtaaagatatagggaagagaatgtcttcatcagaaatgttatttctagagactgcttctttgatatatatccacaagaaacataatttcctactcaaagtagcctttcctatttacaaaaaaaaaaattcagtaatctcgtgttagagctttacctcttttctmttctgcggggaggtgtgggggaagaaaaaggtgttaaatgtgattttatatacatccatgtattatttcattattgcattgctataaagaaatacctgatattgggtaattgatagagaaaagggatttaattggctcatggttctgcaggctatacaggaagcatgatgttggcttctacttggcttctggggatgtctcaggaaacttataatcactgtgtaaggtgaagggggagcaggcacatcacatggccagagcagaaacaagagagagaggagggaggtgctacacact

SEQ ID NO: 584635 - DNA, 535 bp, Homo sapiens
atctcctgcttaaaatccagattagaaagctcatgaggttctactttctcagtcttaactttttaaagttaagagattttgaagagcagacatgttttatatcttgatacatcagtctgtttatgttgctataaaggactcatgaggcaggataatttataaagaaaagaagtttattttggctcatggttctgcaggctgtacaggaagcatggtgccagcatctacttccggtgagggccttgggaagtctacagtcatagcagaaggcaaaggagagtcagcaagtcacgtggcaagagagggagcaagagagatggagggaggtgccatactgttttaaacaaccagatctcatgtgaactactcattaccatagggatgacaccaagccattcatgagggatcctcccccatgacccaracacccccatcaggccccacctccaacattgaggattacatttcagcatgagatttggagcggacaaacatctaaactatatcacttaatgtgcagtttttcaattaaaaa

SEQ ID NO: 584636 - DNA, 461 bp, Homo sapiens
attctctcattgatggacacttaggttgattccaaatattggctattgtgaatagtgctgcaataaacatgggagtgcagatatctcttcaatatactgatttcctttcactggggtatatatctacagtggaattgctagctctatcttcagtcttttgagtaaccaccataccattacccaaagaggctgtactaatttgcattcccaccaacagtgtacaagcattcccctttctccacatcctctccagcattcgttattccgtcttttggatagaagccattttaactagggtgagatgatatctcactgtagttttgatttgcatttttttctgatgattaattttgckgaacattttttcatatacctgttggccatttgtcttcttttgaaaaatgtctattcagatattttcttcatgttttcattagattatttgatttttttcctattga

SEQ ID NO: 584637 - DNA, 468 bp, Homo sapiens
tcattatcacactactataaataactgcccaagagtgggcaatttatagagaaaggagggtttaattgactcagttccacatggctggtgaggcctcaggaaacttacaatcattgcagaagcagaagcaggcatgtcttacatggcagcaggtgagagaaaatgtgtgaaggagaaactgtcaaacagttataaaactatcaggtctcatgagaactcactcactatcatgagaacagaatggggaaactgcccccatgatccaatcgcctcacacatggtccctcctccaacaagtggggattacggggattactatttgagatgggatttgggtgaagacccagagccataccatataattccaccccarcctctcccagatctcatgcccttttcacgtttcaaaaccaatcatgccttcccaacagtcacccaaagtcttaactcattccagtattaacccaa

SEQ ID NO: 584638 - DNA, 574 bp, Homo sapiens
aggaatttgcaaaagtgattaagttaaggagcttgaaatttgtggatcatgctgggttaccccagtgagctctaaatgtaatcacatgtgtctttatgaaagggaggcagagggagatttgcagacagatgaggaggaagatgagaaaacaatggacacaagaaagaaaaggtgatgcagttcagggacccaagccaataaatgaggtgacctccagatgctggagaagggaaggaagcagatggactytagagcccccaaaagaagcagggctctgccatcaccttgattttgtcccaatgaaacccattggtcatttagctgccagaactgtgtaagcataaatgtgtgttcgtttaagccatgaaatttgcagtaatttgttaaagctgccatgggaaactaacacaactggagtggtagttccgtgaatgcatgcattcaccaaaccttaacatgtactcttcggatactggcatgataggtccatgaatgcatatgttcacccacacactaatatatacccttcaaatactggtatgatagttctatgaatgcatgtgttcaccacaca

SEQ ID NO: 584639 - DNA, 527 bp, Homo sapiens
caagtgttttcacccattccgtagattgccttttcatrttcttgataatgttctttgatgttcaaaagttttcaatttttatgaagtcaaatgtatctgtttttttcttttcttgcctgttcttttcatgccaaatctaagacttcattgccaaatctaacatcagaaggtttacctgtgctttcttctaagagttttttggttttagctcatagttaggtcattgattaaccttgagttaactttttgtgtatgttaggtagggattgaagagtcttctttccccattcagtcttggtacccttgtgaaaaatcatttggccatagatgtttgggcttatttctggactgcaattctattccattggtccacgtctatccctatgccaggatgacaccgttttgattactttccacagtgactgcctcatatgacattctcatccgcagtgttcttctatcttgttcttgaccttagggtgaaagttttgaaattgggaagtgtgagtcttcctactttgtttttc

SEQ ID NO: 584640 - DNA, 569 bp, Homo sapiens
ttagctctccctctcattttagtattatcattctcattaatgaataattccctttttgttaaaagtttacattgacttaccgttgttcttcagttatcaacttactttgtattctttctttgaaagaaatcaagcaatagacagtctccttcaatatttcctgtactgtcttcaacccacttagctgagtactttcttttttctctacttactcactttttcccctgagtgttctcaagcattttcatgggtttaaaggccagttacatgatagcatctcagaatattaccaatyttggtatcttctctgagttagagctttgcatagtcatctacttacttaatatcaaatgtggattgttttatagacaactgagattcataatgttttaagtagagttttgttattttctctgcttcccagtttgtgtgtgtatgtttgtttgtttacttcagctggtgttcccattgattttatcttatctaatacaccaaaaccctatctatcagtagctcttttcttcaaacttgcacatatcttaaatctgtatttcattattttgaacaag

SEQ ID NO: 584641 - DNA, 442 bp, Homo sapiens
cttcataatagaatgatttatattcctttgggtatataccaagtaatgtgactactgggtcatgggatttctgattctagatccataaggaatctccacactgtcttccacaatggtcgaactaattttcattcccaccattcaaggtatttttgatggtttgtttgtttgtctattttgcatttcatttgtttttgtaaagggagaaaattttggacttagggaataccataatgctttaaacttcgagttatttcttcttttttttctcaaataatgtcattttgtcatagatctctgaaaatgaccttgaaaacttcccatraaaatcaacagaacttatgatgttcagagcataagaaataaatgtcaccttacaagattcatcaaaatgagcttagatgaaattttaattgccatactcaagccacttaaatagtta

SEQ ID NO: 584642 - DNA, 442 bp, Homo sapiens
cttcataatagaatgatttatattcctttgggtatataccaagtaatgtgactactgggtcatgggatttctgattctagatccataaggaatctccacactgtcttccacaatggtcgaactaattttcattcccaccattcaaggtatttttgatggtttgtttgtttgtctattttgcatttcatttgtttttgtaaagggagaaaattttggacttagggaataccataatgctttaaacttcgagttatttcttcttttttttctcaaataatgtcattttgtcatagatctctgaaaatgaccttgaaaacttcccataaaaatcaacagaacttaygatgttcagagcataagaaataaatgtcaccttacaagattcatcaaaatgagcttagatgaaattttaattgccatactcaagccacttaaatagtta

SEQ ID NO: 584643 - DNA, 442 bp, Homo sapiens
cttcataatagaatgatttatattcctttgggtatataccaagtaatgtgactactgggtcatgggatttctgattctagatccataaggaatctccacactgtcttccacaatggtcgaactaattttcattcccaccattcaaggtatttttgatggtttgtttgtttgtctattttgcatttcatttgtttttgtaaagggagaaaattttggacttagggaataccataatgctttaaacttcgagttatttcttcttttttttctcaaataatgtcattttgtcatagatctctgaaaatgaccttgaaaacttcccataaaaatcaacagaacttatratgttcagagcataagaaataaatgtcaccttacaagattcatcaaaatgagcttagatgaaattttaattgccatactcaagccacttaaatagtta

SEQ ID NO: 584644 - DNA, 442 bp, Homo sapiens
cttcataatagaatgatttatattcctttgggtatataccaagtaatgtgactactgggtcatgggatttctgattctagatccataaggaatctccacactgtcttccacaatggtcgaactaattttcattcccaccattcaaggtatttttgatggtttgtttgtttgtctattttgcatttcatttgtttttgtaaagggagaaaattttggacttagggaataccataatgctttaaacttcgagttatttcttcttttttttctcaaataatgtcattttgtcatagatctctgaaaatgaccttgaaaacttcccataaaaatcaacagaacttatgatgttcagagcmtaagaaataaatgtcaccttacaagattcatcaaaatgagcttagatgaaattttaattgccatactcaagccacttaaatagtta

SEQ ID NO: 584645 - DNA, 588 bp, Homo sapiens
gaattccacacatgggagataaacttctttttcatccatattaccagggctgtcagggagcaacattaaaggtcacagtgttcagtgaaaccttgccataacttaggctaaacacgtttttcccataattttacttcttcagcttctttctttcctttctttctttctttctttctttctttctttctttctttctttctttctttctttctttcttcyttctttctttctttctcctttctttctttctttctccttttctttttctctctttctttttctctctctctttctctatctttctttctttttctttctttctttttttttttttggcagggtttcactcttgtcacctagctggactgcagtggcacaatctcggctcactgcaactttcacctcccaggttcaagcaattctcctgccttagcctcccgagtagctgggattacaagcacccaccaccatgcctggctaatttttgtatttttagtagagatggggttttgccatgttggccagtcttgtcttgaactcctgacctcaggtgatccacactcctcagcctccctaagtgctggtatt

SEQ ID NO: 584646 - DNA, 404 bp, Homo sapiens
agctgggattacaagcacccaccaccatgcctggctaatttttgtatttttagtagagatggggttttgccatgttggccagtcttgtcttgaactcctgacctcaggtgatccacactcctcagcctccctaagtgctggtattacaggtgtgagccactgygcccgaccttgagcttgtttttttatgaattcctgcaactcaacattaaagacataatatcccatagtgattaatatatccaatagtccttcctgactaaaggtacaaagttaatcctagtgttgttaataagaatggaagtcattatttattcagtgtcttcagttcaagcattgtcttaaaccaaactgatttcctactacaactgagtcctctaaaaacagcttcctctagtgtccct

SEQ ID NO: 584647 - DNA, 536 bp, Homo sapiens
atgaatcattaaaacataataataaattctattcacaatagaataatcacaagcatataattcttaggaataaaggcaacaaaatatgcataggtcttttatctaaaagctaaaaaatattattgataaatgttaagaaaaaatagaaaacgtagatctatacatrttcttattgatatgttatttatattaagatatccatccaccttacattgatctacaaatgtatttcaactctgatgaaaatcacatcagattttactgcaaaataaaaataaacaatgtgatgtcaagatgtatataaatatgcagaaatacaaaggaacataggtaacttaaccaatcttggaaaataatataatcaaagaagtaacattaaattattttaagatttttaaagctgcatgttaaaaaatggagcatccataaatatgttcgtgtttaatatagatgatgaactgattttctatgaagacaaaggacaatagaaaatacatatttttacaacaaatctgaaacaactagataaatttatg

SEQ ID NO: 584648 - DNA, 418 bp, Homo sapiens
caactttggtcattattatatttccaatacagagatgagtgctcaacacatagaaaacaatcagtatgtatttattaaatgaatgagtaggtgacttaatcaagagataagaattactacttaaagaagagtaattttgcccatgttttactgtgtaaaaacagcacttgataacgagctatatttattttctttcagaacccttcttwgctaaaactttatttttcttctgtctctactgcttagagtcagtgagcccacacactcaggttcaggttgattttcttcctatttgtgggtgtcacctatgtatctgccttttcaggcagtgaaatcattccaaaagttcttgttgactgcaagagcttgaaggctctttatttgtgaggggatgagaatactggcatccattgtgtct

SEQ ID NO: 584649 - DNA, 525 bp, Homo sapiens
cagcatctctgctggagtcaatggcggtgtgttgtagaaagcaggggttgtttttttttttttgaataacatctatctataccttctctggttctgtcatcttccttttctccacctgtttaaaaaaatctcacacattaaatgaccacacacattattagttaactttgcctcaaatagcatctctagccttctcaacccttgtatttttcatttgttttaaattctaactacccttaaactgtatataccctctacttatttcctggktgactcttccctctcagccttcaatcttgtctccaagtcattggcagtcggtaaactgttctcgtgtctttagccagcttcttcccctctaagcacagtttattcttatgagaagtccttctttccaggacagaaagaccagttcaagcctcacaaaatgaaaatgttgcctctcacctgctatcgtttcccatatgtgtgctatttgttttattttccaatattttgcttgccagttctttactgcaaaattca

SEQ ID NO: 584650 - DNA, 602 bp, Homo sapiens
aatggaaaatccaactttcagaccagcaccaattaagacctgattagttcacttagtatgaatagttgattgcagaatagcaacaattttatgttcataatttccatgtcaaaaagaatgtttgtaagtgaaaactggtatgcgtttctaagcagattgttaataagaaagtgaatattagaaaaatccattcacctctctgtgtccagaaaatattagatatggccatttagccctatgtgctagcttcaacaggggtgttttgtgaaagcatgtgattatcttcttgatagctattctgtaaatttagagagttccttgcccccaattttatgtcctttaattagtacatatggtgctataattgatttatttatcacaycccttaaaatcttttctggctgggtgtggtggttcacaactgtaatcccggcactttaggaggctgaggcaggaggatgacttgaagccaggagatggagaccagcctgaggaacaaagcaagacaccatctctacaaaaccttaaaaaatgatctggccatggcagagtgtgcctgtagtcccagctgtttgggaggctgagacaagagaattacttag

SEQ ID NO: 584651 - DNA, 602 bp, Homo sapiens
aatggaaaatccaactttcagaccagcaccaattaagacctgattagttcacttagtatgaatagttgattgcagaatagcaacaattttatgttcataatttccatgtcaaaaagaatgtttgtaagtgaaaactggtatgcgtttctaagcagattgttaataagaaagtgaatattagaaaaatccattcacctctctgtgtccagaaaatattagatatggccatttagccctatgtgctagcttcaacaggggtgttttgtgaaagcatgtgattatcttcttgatagctattctgtaaatttagagagttccttgcccccaattttatgtcctttaattagtacatatggtgctataattgatttatttatcacatcccttaaaatcttttctggctgggtgtggtggttcacaactgtaatcccggcactttaggaggctgaggcaggaggatgacttgaagccaggagatggagaccagcctgaggaacaaagcaagacaccatctctacaaaacyttaaaaaatgatctggccatggcagagtgtgcctgtagtcccagctgtttgggaggctgagacaagagaattacttag

SEQ ID NO: 584652 - DNA, 539 bp, Homo sapiens
tgtgtttaaagtctttaacttctatgatcttctagtaaaatgaatgtatgattttaggaaattacaaaaaccggttggggcagtccattcttgctctttagtggtccacagaacgttggaccaacttggcataaaagctctacatcagggggcaagactcctggttgacactggagtctttatcgaaatttccctggattaaatggtcctaatttactaatgcccagtctgaggagagtcaggagggacaggggtacttttctgaagtagagagctgtctttgacttggcaagtccccaaagggtataacaaggcaagcattaaatgcaatagtttgaggcgaaatcgacttggttatgttaataactaagtggtgagcaatagagcgatgaaagaagaaagagtaatagaatagatgaaagagttaaatttttcttagctttagtttggtaggcttttcccctgggactgtggcccatgactctggaaggggtggtgctttgactcgggtgtgatgmgcccatccctttttcgctgta

SEQ ID NO: 584653 - DNA, 431 bp, Homo sapiens
gtgtgtaaactggcctgtgcctgagaattagcaatgagacttagaatggtatgtgaatagatgcatttcctccaagagttacctgctagaarccaggtaacttgtcactctccctgagtgtagagagaccccgaggtgaccttgcttgggatgtcaactgccttgttccaaagaattttgaaaatctgcctgtgcagaggatctaatcttgtgaagttctctgtgcaagcagagggatggaacctatgataagagctgtgaggaatgaggacaagggggtaatttaaagaatggtttctctcagagaaagaagaaggactagcctttaaatgggcaaggaagattgaaattgagagacaacatgggctctaaaatgaaaggcttaacttttttcccttttactttggaatatgggaatatttattattgaa

SEQ ID NO: 584654 - DNA, 576 bp, Homo sapiens
agcttcagttgagagtcatggccttcagaatatggaaagagagtcccatctgcaaactgtcttctgcctgagaggccaggctgtgcaaaaaccctgaagcgcccaggacatggctctgccacatctgcccctgccagaaccatggagggaagaaaggctaggctgacttctgctcacccaacggaccttcacctctgggaaaccttccctcttctccaggccaggttaggccctcctgctcaacccctatcactgactcaatattgtagtctgttgctcgtttgatcatatgtgttcttaaacaggctttgggggctgtcaggcagatacccgtcaagatactcagcacagtgctgagaatgcyttaaacactcaataaatgaatgaatggagattggagacctcttgaaaacacacttcattctttgtccatcctgccacactaccattatgctggcctcttactcttccaaaaggacttaggttgatcctgcctttgtttacccaggataatgggagatcaccccagttgtcccaagcctacctcctaccctgccccagcctgtggctcaattc

SEQ ID NO: 584655 - DNA, 555 bp, Homo sapiens
gtgaagaagaaataagatctttttcagataagcaaacattgagggaattcattactgccagatctgccttgcaagagatcttgaaaggaacactaaatatagaagggatagaccactatcagctaatacaaaaacacacttaaactcagagaccagtatcactgtaaagcaaccacacaaacaagccaacataataaccagctaacaacacaatgacaggatcaaatccacacatataaatggcaaccttgaatgtaaacaggctaaatgccccacgtaaaagacagakattttaattctcctgagacagtgctcccagaggaaggggtgggccaccaagctgaatttaaaaaagcaagatccaatggtatgctgtctttaagggacccatcccacatttaatgtcactcatgggctcaaaataaagggatggaggaaaacctaccaggcaaatggaaaacagaaaaaaaaaagagttgcaatcctaatttcagactattcaacatagtatcagaagtgcaagccagagcaaagtcaagagaaagaaacaaaggg

SEQ ID NO: 584656 - DNA, 442 bp, Homo sapiens
ctatgactacagctactgtgcatatttatatacagagttttgtgtaaacgtaagtcttcatttctctggaataaatgctaaggagtraaattactatgtcttatggtaattctatgcttagttttttgagaaattaccaaatcatttttcatagttcaaggaactgtaccattttacatttccaccaacaataggagcgatccagttcttctgcatcctcaccagcatttggtattctcccgattttgtattttagccattttgatagctacgaagcgatatcttacccttgttttaatttgctcttccttgatggctaatgatgttgaacatcttttcatgtgctttttcatgttttcgtatgctttttttttttttatggagtcttgctttgtcgcccaggctggagtgcagtggcgcgatctcggctcactgcaagctc

SEQ ID NO: 584657 - DNA, 503 bp, Homo sapiens
attccactaatttccctgctggtcggtttaggactttccacctccactattgctctcggtactggaatagcaggcatttcaacctctgtcacgaccttccgtagcctgtctaatgacttctctgctagcatcacagacatatcacaaactttatcagtcctccaggcccaagttgactctttagctgcagttgtcctccaaaaccgccgaggccttgacttactcactgctgaaaaaggaggactctgtatattcttaaatgaaaagtgttgtttttacctaaatcaatctggcctggtgtatgacaacataaamaaactcaaggatagagcccaaaaacttgccaaccaagcaagtaattatgctgaacccccttgggcactctaattggatgtcctgggtcctcccaattcttattcctttaatactcatttttctccttcttttattcggaccttgtatcttccgtttagtttctcaattcatccaaaaccgtatccagg

SEQ ID NO: 584658 - DNA, 503 bp, Homo sapiens
attccactaatttccctgctggtcggtttaggactttccacctccactattgctctcggtactggaatagcaggcatttcaacctctgtcacgaccttccgtagcctgtctaatgacttctctgctagcatcacagacatatcacaaactttatcagtcctccaggcccaagttgactctttagctgcagttgtcctccaaaaccgccgaggccttgacttactcactgctgaaaaaggaggactctgtatattcttaaatgaaaagtgttgtttttacctaaatcaatctggcctggtgtatgacaacataaacaaactcaaggatagagcccaaaaacttgccaaccaagcaagtaattatgctgaacccccttgggcactctaattggatgtcctgggtcctcccaattcttattcctttaatacycatttttctccttcttttattcggaccttgtatcttccgtttagtttctcaattcatccaaaaccgtatccagg

SEQ ID NO: 584659 - DNA, 547 bp, Homo sapiens
cctgtattttattatagtagtttcatagtttcaggtcttaaacttaaatctttaatttatttagagttgattttatatatcgtgagagataagggtatagttttttcttcttctgcatgtggctatccagtaatcccagcaccatttgttgaagacattttgtttttcctcagtgtgtttttgacgcttttgtcaaaaatcaattgggtgtaaaaacatggatttatttctggcttctgtattttgttccatttgtctatatgtctgtttttatgccagcattatcctattttgcttactagagctttgtagtatattttgaagtcaagaaatgtgataccttcagctttgttcttattgctcaagattactttggctatctgggatattttgcatttcctatacattttaaggatgctttttctatttctgtaaaggatttcatgagtattctgatagagattatattgaatctgtgtatcactttgggtagtacagacwttttgacaatactgattgtttcaagttatgaatatgatatgttttc

SEQ ID NO: 584660 - DNA, 603 bp, Homo sapiens
catccaacactatagtaagacaaattttttaaccaataaatacttcaaaaattatgtaacattaattactttacctttcaaattttcttaaaatattttagcttggattttcaacctgtaaggtataacgttaagtgaattagcatgtgctaaattactattcaagatatattctatatattctaaatatgttctttrtctttacatataaactcatgcacagaaaatattgagcaaaatacacatctaattgttaaagaaaattacatctgcagtggtatcttggactggagatgttagttttattcatttgtgtttaagatttgattgggtaatgcagacaggaggtctaaccttgagattaatatctgagattcctcaatcagcattattaatcacaacggaaggcaagagaatgagaatgcacagaatgtagttatagaaagaaaattttactatagaaaagatagaatacaaatattgggcaaatacttagtcattcggtagagaataaaagttgttttgagaactaagaagaaagagcctgaggtatacaagaaataaattcaaagacaatactaatattcttagatagtaggaggt

SEQ ID NO: 584661 - DNA, 516 bp, Homo sapiens
gaggtcaggagttcgagaccagcctggccaacatggcaaaaccccgtctctactaaaaataaaaaacattagctggacggtagtgacacatgactgtaatcccagatacttaggaggctgaggcaggagaatcgcttgagcctggaaggcagaggttgcggtgagctaagatcgtgccactgcactscagtctgggcgacagagtgagaccctgtgtaaaaaaaaaaaaaaaaaaaaaaatttaaccatcacaaacggaattttgactaatgcgcatgtgcatttattttatttactcaaaaagacttcattttgttcattaaacgatgatcttctatcattcatattgcaaacagcaccgcacaaacacacgtatacatgtgtacctacatttcttttaatttcttttaactattttctttcagttttactattttaggaactgacagaagtattgctgttttatttcattcattgcttcatagcatcattcttgatattttgactaatgataag

SEQ ID NO: 584662 - DNA, 402 bp, Homo sapiens
aaaataaacctgccgcttttaaagccatcagattttgtcagaactcctttaccatcatgagaacagcagggggcaaaccatccactgaatccagtcatctcccatccggtcttttcctagatacatgggggatagaatttatgacgagatttggggtggggacagaaagccagaccatatcattgttgcaatcctagtttctgacaaaacaaactttaatccaacaaagatcaaaaaagacaaagaagggcattacctaatggtaaagggttcaattcaayaagaagatctaaccatcctaaatatacatgcacccaacacaggagcacccaaattcataaagcaagttatggtagaccttaaaggagacttatactccctcacaataatagtgggagactt

SEQ ID NO: 584663 - DNA, 586 bp, Homo sapiens
tatatgtcaaatatattatatagtagttatatcttccttatatattgaatattttatcagtataaaattaccttctctgcctcaataaactattttctgtaaatgatttgtttgtttgtttgtttgagacggagtctcgctctgtcgcccaggctggagtgctgtggcgcgatctcggctcactgcaagctccacctccsaggttcatgccattctcctgcctcagcctcccgagtagcggggactacaggcgcccgccaccacacccggccaattttttgtatttttagtagagacggggtttcaccgtgttagccaggatggtctcgatctcctgacctcgtgatccgcccacctcggcctcccgaagtgctgggattacaggcgtaagccaccacacccggcctgtaaatgatttgtataataattctatttcatcttgtattatcaaagtcacttaaattatttcttggttattgcttgcatggtatggtaggtgaaataatgccctgatacaagatatcaggtccaaatccctggaacttgtaaatgttaccttataagaaaagaaaaaaaaaaaaaacca

SEQ ID NO: 584664 - DNA, 340 bp, Homo sapiens
ggaaaaagaccacaaaagttctccccttgctacctttcctgaactattctgctagattcagacttcaaaaacattgtatcaggaaatacagaaatgttctttcaaaatgagtgtatgggaatgtgggaatgcctaataaaatctgtcctyattgattcgttagcaaaaaatcatataaatcaatagcttgtgattgcaagcagatatatttcagatcctttctgtgtttgttttttgctttcttgatctatcacaattggagaaaacttaaaatttctcaatggtattgtatttttgccaatttcttattctgctttatgtttctcgttgctatattatt

SEQ ID NO: 584665 - DNA, 340 bp, Homo sapiens
ggaaaaagaccacaaaagttctccccttgctacctttcctgaactattctgctagattcagacttcaaaaacattgtatcaggaaatacagaaatgttctttcaaaatgagtgtatgggaatgtgggaatgcctaataaaatctgtccttattgattcgttagcaaaaaatcatataaatcaatascttgtgattgcaagcagatatatttcagatcctttctgtgtttgttttttgctttcttgatctatcacaattggagaaaacttaaaatttctcaatggtattgtatttttgccaatttcttattctgctttatgtttctcgttgctatattatt

SEQ ID NO: 584666 - DNA, 591 bp, Homo sapiens
acttgacagttgtacatatttatgggatacatgcgatattttgaccaagcatgccatgtgtaaggatcaaatcttggtaattaggattttcattacctcaaacatttatgatcatttctttgtgttgagaacattccaaatctacttttatagttatttattttgaaatatacaaaataaattattgttaagtatactcaccctatctactctggrcccaaggagatggggttccttggggtctcagaaaaaactttaagagcgggatctgatcgctaagaaaaggctgtggagcccaaaaagaaatttgaggtctcttggagatgccatgtagttctatggcctactgtccttaaaaatccttctcatctctattcacctttttaatgctttcaggaatcaatttcctccttcaggaaactggcattttctgtagagaaatttttctatgcaaatacttgtctttacagaagtaaatgaagttaaaaatatggaactttaggtatctaagtaattagacttggtcttttgttctttagcatcttttaaatgaatataaaactgattctgtgtcattcaatagcatttatt

SEQ ID NO: 584667 - DNA, 225 bp, Homo sapiens
tttcatgctatgaaatcacttaatagcttcagagaatragataaagaagtgcagttgtttctctaaggtaattcaaggttgactctgcaaaacaagcaatagtaggtataacaaatctgtttctttgaagcaagagatggtgttaatgttaggacagtctaggaaacagacagactcctagttagcatggtaattatgaatttttaatatcacctaagacccata

SEQ ID NO: 584668 - DNA, 225 bp, Homo sapiens
tttcatgctatgaaatcacttaatagcttcagagaatgagataaagaagtgcagttgtttctctaaggtaattcaaggttgactctgyaaaacaagcaatagtaggtataacaaatctgtttctttgaagcaagagatggtgttaatgttaggacagtctaggaaacagacagactcctagttagcatggtaattatgaatttttaatatcacctaagacccata

SEQ ID NO: 584669 - DNA, 225 bp, Homo sapiens
tttcatgctatgaaatcacttaatagcttcagagaatgagataaagaagtgcagttgtttctctaaggtaattcaaggttgactctgcaaaacaagcaatagtaggtataacaaatctgtttctttgaagcaagagatggtgttaatgttargacagtctaggaaacagacagactcctagttagcatggtaattatgaatttttaatatcacctaagacccata

SEQ ID NO: 584670 - DNA, 225 bp, Homo sapiens
tttcatgctatgaaatcacttaatagcttcagagaatgagataaagaagtgcagttgtttctctaaggtaattcaaggttgactctgcaaaacaagcaatagtaggtataacaaatctgtttctttgaagcaagagatggtgttaatgttaggacagtctaggaaacagacagactcctagttagmatggtaattatgaatttttaatatcacctaagacccata

SEQ ID NO: 584671 - DNA, 497 bp, Homo sapiens
aggtgtaaacagaatataaagtcagctcaactgtaagtattagaagcttcaggatattatttttctaattttgaagttcagaaatgtagcaacaaaacctcacttgcaagaacagatgatcaagtttcaacagatcatagatcagatcaagtgagaaaaaacataagatgacaacgatatctctatttcctattctagagaaataaagctgagatttggtccttaaaatcatgaaactaaattacaaaaatacatcttctcctttcttctggtttatttttcacaggagggaaaaaaagccctcgactgggaggaatttctagtgcagaatctggaaccccagcaagttctgatagtttcatgtgacatgatagcatgtcacatcgtcaggcactcagtgtgttctcggcttattcacttagaaaccggagtctgtaccaatcaagatgtatttccagctaacctaggggttaycttgagttgttgactgcctgcag

SEQ ID NO: 584672 - DNA, 502 bp, Homo sapiens
aattttttcaaactatcaattagatcatgtatttctcctacttaaaatctccagtaggtttttcactgcaccagaataaaatcaccacttgttagcaygctctctgaagttctgacctgtccacatgctcaggtcacctggcctgcccctctcaacctgctcccactctctcctgtctttaggttgcaaccactgaacttttccccaaaactccaacatactaagcttgctcctttcttaggaactttgttctaattttttctcctttttttgcttcatatctttgcttgactgcctccatattattcctgtctcacaccttcaaagaaaattctgatgacagtatttttcatctgctttgtttactatgcatcctcagagcccagaataatggctagaacacaggaaaactcagtaagatttcattgaatgaaataggtcttccctgcctacccaacgcaaagcagcttgtagtcttcttccttccttcccattaatttct

SEQ ID NO: 584673 - DNA, 502 bp, Homo sapiens
aattttttcaaactatcaattagatcatgtatttctcctacttaaaatctccagtaggtttttcactgcaccagaataaaatcaccacttgttagcatgctctctgaagttctgacctgtccacatgctcagstcacctggcctgcccctctcaacctgctcccactctctcctgtctttaggttgcaaccactgaacttttccccaaaactccaacatactaagcttgctcctttcttaggaactttgttctaattttttctcctttttttgcttcatatctttgcttgactgcctccatattattcctgtctcacaccttcaaagaaaattctgatgacagtatttttcatctgctttgtttactatgcatcctcagagcccagaataatggctagaacacaggaaaactcagtaagatttcattgaatgaaataggtcttccctgcctacccaacgcaaagcagcttgtagtcttcttccttccttcccattaatttct

SEQ ID NO: 584674 - DNA, 502 bp, Homo sapiens
aattttttcaaactatcaattagatcatgtatttctcctacttaaaatctccagtaggtttttcactgcaccagaataaaatcaccacttgttagcatgctctctgaagttctgacctgtccacatgctcaggtcacctggcctgcccctctcaacctgctcccactctctcctgtctttaggttgcaaccactgaacttttccccaaaactccaacatactaagcttgctcctttcttaggaactttgttctaattttttctcctttttttgcttcatatctttgcttgactgcctccatattattcctgtctcacaccttcaaagaaaattctgatgacagtatttttcatctgctttgtttactatgcatcctcagagcccagaataatggctagaacacaggaaaactcagtaagatttcattgaatgaaataggtcttccctgcctacccaasgcaaagcagcttgtagtcttcttccttccttcccattaatttct

SEQ ID NO: 584675 - DNA, 471 bp, Homo sapiens
tggcataaaaacagacacaaaggccagtggaacagaatagagaacctataaattaattcacatatcaatagccaactgacttttgacaaaggcmtcaagaacatctactgaggaaaggacaatcttttcaataaatggggctgtaaaaactgaatatctatatgcagaagaatggaactagactctcacctcttaccctttataaaaatctaattataatggtttaaagacctaaaactcagatatggaactagaagaaaacataagggaaaaacttccagacattggtcttagaaaacattttatgaataagacttcaaaaggagtcaagaaaagcaaaaataaataaataacatcatatcaaactaaaatgcttctgcacagcaaacaaaacaacagtgaaaagacaacctacagaatggtagaaaatatttgcaaaccattcatctgacaggggatttatatgcacaa

SEQ ID NO: 584676 - DNA, 471 bp, Homo sapiens
tggcataaaaacagacacaaaggccagtggaacagaatagagaacctataaattaattcacatatcaatagccaactgacttttgacaaaggccycaagaacatctactgaggaaaggacaatcttttcaataaatggggctgtaaaaactgaatatctatatgcagaagaatggaactagactctcacctcttaccctttataaaaatctaattataatggtttaaagacctaaaactcagatatggaactagaagaaaacataagggaaaaacttccagacattggtcttagaaaacattttatgaataagacttcaaaaggagtcaagaaaagcaaaaataaataaataacatcatatcaaactaaaatgcttctgcacagcaaacaaaacaacagtgaaaagacaacctacagaatggtagaaaatatttgcaaaccattcatctgacaggggatttatatgcacaa

SEQ ID NO: 584677 - DNA, 471 bp, Homo sapiens
tggcataaaaacagacacaaaggccagtggaacagaatagagaacctataaattaattcacatatcaatagccaactgacttttgacaaaggcctcaagaacatctactgaggaaaggacaatcttttcartaaatggggctgtaaaaactgaatatctatatgcagaagaatggaactagactctcacctcttaccctttataaaaatctaattataatggtttaaagacctaaaactcagatatggaactagaagaaaacataagggaaaaacttccagacattggtcttagaaaacattttatgaataagacttcaaaaggagtcaagaaaagcaaaaataaataaataacatcatatcaaactaaaatgcttctgcacagcaaacaaaacaacagtgaaaagacaacctacagaatggtagaaaatatttgcaaaccattcatctgacaggggatttatatgcacaa

SEQ ID NO: 584678 - DNA, 471 bp, Homo sapiens
tggcataaaaacagacacaaaggccagtggaacagaatagagaacctataaattaattcacatatcaatagccaactgacttttgacaaaggcctcaagaacatctactgaggaaaggacaatcttttcaataaatggggctgtaaaaactgaatatctatatgcagaagaatggaactagactctcacctcttaccctttataaaaatctaattataatggtttaaagacctaaaactcagatatggaactagaagaaaacataagggaaamacttccagacattggtcttagaaaacattttatgaataagacttcaaaaggagtcaagaaaagcaaaaataaataaataacatcatatcaaactaaaatgcttctgcacagcaaacaaaacaacagtgaaaagacaacctacagaatggtagaaaatatttgcaaaccattcatctgacaggggatttatatgcacaa

SEQ ID NO: 584679 - DNA, 568 bp, Homo sapiens
tccaagtcctcctactgaaacagcttttgacttgtttttggcctccaaaatatcctcttttactccatccccataagtccacaaagattatttaaaataaaagtctctcaatggcactactctgcaaaaaacccatcartggttcctcatccacagtccttcttgatcttaggttgtcatcataaaattcaagatctagcatgtaggcactggaggtgccactttgttccacaccaacatctgggcaaacgacaaataaaccagaatcacaaagaaccatataaccctttcatataaatctggagacattctgtgtgaaagttaaaagtctcagatgcatagagcaatctggaattaatggtaggactgtagttagatttgctctgcaaggacccaagaaatggagctagaatacatatatgctagagaatcaacttttgactattataattaaaaaaatttaatactcagaattaaataagactatgcagagatgaatttcccgtcactaaagatattcaaaatagactggatggctgggcatggtggctcatgcctgtagtcccaa

SEQ ID NO: 584680 - DNA, 585 bp, Homo sapiens
tatttaatggaatacacttagygatgccagaaacaaagtaaaatgttaagcgtactacgcattttctatgattagaattaactatcatgattaataagtattaataatataagtaatattaaaataattagtagctatcaataattatagactagggaacaaacctacgtatgtgattggtgatttctgagagtcagagagacaagaaaattacagaaagaaaacagaaaacaaacatagctactctaattttttaagcagaaaagtatgaaaacatttagtttgaagaaaacaaatgaaagggatgtagtgtaatatttgtatatgtattcatatatttgaagtgctattacacagaaaaaaagatgtattctttgtgttgctccatggggcaaaccaaactggatgtagctcaaacaaaattagacactgcgtactctactgggggtgtgcccagcatttgggaaaactctgtgtgacttacaagtgccccaaatttggaaagggttcctggcaaagaaatgattttttttttaaatttctacaactacacaagcagatagtgaattaaagccttaaatggca

SEQ ID NO: 584681 - DNA, 572 bp, Homo sapiens
ctactgctgcagacaacacagaagaccagaatctcaggggcagagaagacaggggccttcttttacttttattcctttttcattatgtcacaggcaattgaaacaactgtagaataatgctataatagtggtgctctccactcctttacattgtcagtaaaaatctaactgtacatttttattataatggtaatagcatgaaactaatttccatcattgtatgttcttcgcccactgatcttttagcctcatatatttgtaacacaattttgtaagttgtctctccttggcctggaatgactttmtcttcattttttcttcttattaatatctgtaagattctcaagtcagatatcacttccttatttaaaaaaattcattatctatataatttggccacatattctagtatgggctctcataccccccacatttctctcttcatagcttttgacacagatacaattttctatttgctgttgcttaaagattgtctccccactaggctgtaggctccatgaaggaggggctctgtctccacatggagtcagctctcaataaatttttgttga

SEQ ID NO: 584682 - DNA, 572 bp, Homo sapiens
ctactgctgcagacaacacagaagaccagaatctcaggggcagagaagacaggggccttcttttacttttattcctttttcattatgtcacaggcaattgaaacaactgtagaataatgctataatagtggtgctctccactcctttacattgtcagtaaaaatctaactgtacatttttattataatggtaatagcatgaaactaatttccatcattgtatgttcttcgcccactgatcttttagcctcatatatttgtaacacaattttgtaagttgtctctccttggcctggaatgactttctcttcattttttcttcttattaatatctgtaagattctcaaktcagatatcacttccttatttaaaaaaattcattatctatataatttggccacatattctagtatgggctctcataccccccacatttctctcttcatagcttttgacacagatacaattttctatttgctgttgcttaaagattgtctccccactaggctgtaggctccatgaaggaggggctctgtctccacatggagtcagctctcaataaatttttgttga

SEQ ID NO: 584683 - DNA, 572 bp, Homo sapiens
ctactgctgcagacaacacagaagaccagaatctcaggggcagagaagacaggggccttcttttacttttattcctttttcattatgtcacaggcaattgaaacaactgtagaataatgctataatagtggtgctctccactcctttacattgtcagtaaaaatctaactgtacatttttattataatggtaatagcatgaaactaatttccatcattgtatgttcttcgcccactgatcttttagcctcatatatttgtaacacaattttgtaagttgtctctccttggcctggaatgactttctcttcattttttcttcttattaatatctgtaagattctcaagtcagatatcacttccttatttaaaaaaattcattatctatataatttggccacatattctagtatgggctctcataccccccacatttctctcttcatagcttttgacacagatacaattttctatttgctgttgcttaaagattgtctccccactargctgtaggctccatgaaggaggggctctgtctccacatggagtcagctctcaataaatttttgttga

SEQ ID NO: 584684 - DNA, 635 bp, Homo sapiens
aatgttaaatgatgagttaatgggtgcagcacacaaacatggcacatgtatacatatgtaacaaacctgcacattgtgcacatgtaccctaaaacttaaagtatawaaaaaaaaaatacgttgaaagtaaaagaaggggaaaagaattccatgaaaacactatccccaaaaaagctgatatggctatattaatattagatgaagtagacttcaaggcaaggagataaacagttcaaattaataaaataaatgaccagaatgatataaaaatcctacatacttgcataaacctaataagaactattcaaaatatatgaagcaaaaactgtcaaaactagaaatagacaattctaccatcattgctggaaattcatcatttctcttttgtaactgacagaacaaatagacaaaaattggtaagattataaaaaactaaagcaactctcttggccagattgatctaataacatacacacctacacaatgcaattgaaaatacaaattattttcatgtaaacacgtaacattcacaaggatagactgggcgataaaacaagttataataaattacaaataattgaaattaaatagaatgtgttctctggccacaaaaggaattaaattaggaatcaaca

SEQ ID NO: 584685 - DNA, 635 bp, Homo sapiens
aatgttaaatgatgagttaatgggtgcagcacacaaacatggcacatgtatacatatgtaacaaacctgcacattgtgcacatgtaccctaaaacttaaagtatataaaaaaaaaatacgttgaaagtwaaagaaggggaaaagaattccatgaaaacactatccccaaaaaagctgatatggctatattaatattagatgaagtagacttcaaggcaaggagataaacagttcaaattaataaaataaatgaccagaatgatataaaaatcctacatacttgcataaacctaataagaactattcaaaatatatgaagcaaaaactgtcaaaactagaaatagacaattctaccatcattgctggaaattcatcatttctcttttgtaactgacagaacaaatagacaaaaattggtaagattataaaaaactaaagcaactctcttggccagattgatctaataacatacacacctacacaatgcaattgaaaatacaaattattttcatgtaaacacgtaacattcacaaggatagactgggcgataaaacaagttataataaattacaaataattgaaattaaatagaatgtgttctctggccacaaaaggaattaaattaggaatcaaca

SEQ ID NO: 584686 - DNA, 481 bp, Homo sapiens
aaacctaataagaactattcaaaatatatgaagcaaaaactgtcaaaactagaaatagacaattctaccatcattgctggaaattcatcatttctcttttgtaactgacagamcaaatagacaaaaattggtaagattataaaaaactaaagcaactctcttggccagattgatctaataacatacacacctacacaatgcaattgaaaatacaaattattttcatgtaaacacgtaacattcacaaggatagactgggcgataaaacaagttataataaattacaaataattgaaattaaatagaatgtgttctctggccacaaaaggaattaaattaggaatcaacagtatgtataaaattccctaatacttgaaaattaagcaactcatctctaaataactcatagcttaaaaaagaaattacaaaggaaattttaaaatatttttgaactgagtgaaagtacaaacacaacatatca

SEQ ID NO: 584687 - DNA, 481 bp, Homo sapiens
aaacctaataagaactattcaaaatatatgaagcaaaaactgtcaaaactagaaatagacaattctaccatcattgctggaaattcatcatttctcttttgtaactgacagaacaaatagmcaaaaattggtaagattataaaaaactaaagcaactctcttggccagattgatctaataacatacacacctacacaatgcaattgaaaatacaaattattttcatgtaaacacgtaacattcacaaggatagactgggcgataaaacaagttataataaattacaaataattgaaattaaatagaatgtgttctctggccacaaaaggaattaaattaggaatcaacagtatgtataaaattccctaatacttgaaaattaagcaactcatctctaaataactcatagcttaaaaaagaaattacaaaggaaattttaaaatatttttgaactgagtgaaagtacaaacacaacatatca

SEQ ID NO: 584688 - DNA, 589 bp, Homo sapiens
catctctaccaacgtgcagaaatttatatacacacagaccacacattctcaatttctattgctcacacatcttcttcctcaaggcttttcataggaggcattttcctaagctcagctgttggtcttctgttctctcttcctacattctttcattattcatttttgtaactccaaaaaacacttatattctgatgattcayaaatattgtaagacagtttctctcttcttctgttccctaaacaactctactctctcataatcagacttacctttctctctttccaaaaactgctattactatgcatgaaaccacgactatttaacttaaaaattaatacattatttatactctgaaccatacaactcagcacttaattaaggtctttcattacttaaacttaacaagtcataataatctcactcatctgaccagattttatgcaatttgacatcagagattagtttaatactttatctgtatgctcaacaagttcttgtagtactggggccatagaatgattcaataattatttgacaattaaaaacataagtaaattgtctgtcctagtaactttggaaataaagtgc

SEQ ID NO: 584689 - DNA, 589 bp, Homo sapiens
attatctgtgttagtctacttctggactcttcgttctagttcagtgaatatctgtctattttttcattaatcctatgctatcttgattagtgtttctttctagtaaggcttcaagttcagtagtctgagtcttccaactttgttcttcttcagtattttgttggctatttttaaatttttgcctttttgtgtaaactttagagtcagctttgtttatatctacactagagcttgctgagatttttattgagtttgtgttgaatgtataaagttgagaagatttatcttctcaacaatgttgagatttccaatatatgaatatagattatctctttatttctttgtatctttgatttattttacttgttatttatacttagattttatacaaaatttgttagaattattattaaatatttcaatttttggtattattattattattattattattattatyattattattatgttttgttttgttctggggggatgaagtcttgctctgtcacccaggctggagtgcagtggtgtgatctcagctcagatcacttgatctggcctcaagtggtctgcccacctcagcctc

SEQ ID NO: 584690 - DNA, 621 bp, Homo sapiens
tctgactataatgatagatttatctatttcacttaattctgtcagtttttgcttcatgtattttcagttattgggtatatatatttttggaattgttatgtgttcttggataattgactttttatcattatgtaatactcttatttatccattttaattttgcttattctgaagtctgcttcttctgcaatcaatatagctattccagatttttttttggttagtaaatatgatgtatattttcctagttctttactttttacctgtgtctttatattgatactgtggttcttgtaaactatatatatatatattttttaaattcactgtgataatctcttattttcattgatatagttagactgttcawatttaaagtcattattgttatagttgtatgaatatatgccatgtttgtaacttttttattcatcgaatttcttcatttttcctctttttctctcttctctggttataattgaacatttatgtaattcaattatatctttacacattttctgcatatgaaaataaatttttatgcttttcttcctattaatctgtcttctgtaagttcattttcagtgaactttcagtgattcaagaggaatcgttatctcc

SEQ ID NO: 584691 - DNA, 495 bp, Homo sapiens
ttttttttttttcctgagatggagtctcactctgttgccaggccagagtgcagtggcgggatatcagctcactgcaatctccacctcccaggttcaagcaattctcctgcctcagcatcccgagtagctgggactacaggcatgcaccaccaygcctggctaatttttgtatttttagtagagacagggtttcaccatgttggccaggagggtctcgatctcctgacctcatgatctgcttgcctcggcctcccaaagtgctggaattacaggtgtgagccaccgtgcctggcgtaaaatggcttttatccaaaagacagacaatagcaaatgctggagaggatgtgtagaacaggaaatgcttgtacactgttggtgggaatgtaaattagtaccaaaaaacaaaaaaacaaaaaaaaacaaaaaaccctaaaaatagagctaccatacaatccagtaatcccactgctggctatatacccaaaataaaggaaa

SEQ ID NO: 584692 - DNA, 622 bp, Homo sapiens
gaccctcctgcctcagcttcccaagtacctgggattacaggcatgtaccaccacgcctggctaatttttgtacttttagtagagacggggtttcaccatgttggccaggctggtctcaaactgctgccctcaagtgatctgcccaccttagcctcccaaagtgctgggattacaggcatgagccactgcacctggccctaattattaatttcttactgttcctaatttataaattaaactttattatatttatatgtggacagcacaaaacatagtakatataggatttggtattctatagcttcaagcaaccactggtggtcttgaatgtaccgcctgcagataagcgagagctgctatgtaataaagctgaggataaaaagtcaatatacaaaaatgagctgtgtttctatatactaacaataaactatctgaaaagaaaaatatgaaaataatcccatttacatacaataccacctaaaagaataatatatgtaggaaaaaactaaagagtttcgtgaaagacttgtatattgaaaactgtgatgcattcctgaaagaaattaaaacaaggcacaaagaaatgaaaagacattcatcctgtgttcatggattggaagac

SEQ ID NO: 584693 - DNA, 556 bp, Homo sapiens
ttaagtacctcacactgtgagttattgattttatcagtcatcatctgtcctagaactttccattaaatcaaggttagggtaagtattaagacatcagtgatatttctacctataacttttgaaactctccacttcagtatttaactagaagtatgaaaaagaatctatgggaaactttttcaaaatgcattatggccaggtcctacctaagatatattattttggatgtgacaggctagaagaaggacctgagcatatgcattttgaaaaggcagcacaaatgattctagtgggcattcctcaaaaggaagtaccgtcctaatctgatccctcaaaggataatgttttctaaggtttcayttgtccactgtattagtgaattttcacactgctataaagaaatacctgagactgagtcatttaaaagaaaagaggtttaattgcctcataggtttgcgtggctggggaggcatcaggaaacttcttatcatggcagaaggcaaaggggaaacaagcacctcatatctggtggcaggaaagagagagagcaagagcc

SEQ ID NO: 584694 - DNA, 493 bp, Homo sapiens
tggttttttaaggggctttccccctttgctcagcacttcyccttgctgcctcaatgtgaagaaggatgtgtttgcttcctcttctaccacaattgtaagtttcctgaggcctctcagccatgctgaactgagtcaattaaacctctttcctttataaattactccatcttgggtatgtattgattagcagcatgagaatagactaatacagtaaattggtactgggagtggggctctgttttaaagatacccaaaaatgtgaaagcaacttcagaactgggtaacaggcagttaccagttggaacaatttggagggctcagaagacaggaaaatgtaggaatgtttggaacttcctaaagacttgttaaatggctttgaccaaaatgctgatagggatataaacaataaagtccaggctgagttggtcttagatggagatgaggaacttgttgggaactggagcaaaggtgactcttgctatgctttagcaaa

SEQ ID NO: 584695 - DNA, 530 bp, Homo sapiens
atgctttagcaaagagactggtagcattttgcccctgccctagagatctgtggaactttgaacttgaaagagatgaattagtgtatctgrtgaaagtaatttctaagtggcaaagcattcaattagaagcagaacataaaagtttagaaaatttgcagcctgacgatgccacaggaaagaaaaatccatttcctgaggagaaatttaagcctgctacagacacttgcataagtaacaaggagccaaatgttaatcaccaagacagtggggaaagtgtctctatggcatgtcatagaccttcatgacagcccctcccatcacaggcttggaggtccaggagggaaaaatggttttgggagctgggtccagcgccttcctgctgcatgcagcctaaggacttggtaccctgtatcccagctgctccagccattgctaaaaggtgccaaagtacagctcaggccacggcttcagagaatggaagccccaagccatggcagcttccaggcagtgttgggcctgcaggtatgcag

SEQ ID NO: 584696 - DNA, 530 bp, Homo sapiens
atgctttagcaaagagactggtagcattttgcccctgccctagagatctgtggaactttgaacttgaaagagatgaattagtgtatctggtgaaagtaatttctaagtggcaaagcattcaattagaagcagaacataaaagtttagaaaatttgcagcctgacgatgccacaggaaagaaaaatccatttcctgaggagaaatttaagcctgctacagacayttgcataagtaacaaggagccaaatgttaatcaccaagacagtggggaaagtgtctctatggcatgtcatagaccttcatgacagcccctcccatcacaggcttggaggtccaggagggaaaaatggttttgggagctgggtccagcgccttcctgctgcatgcagcctaaggacttggtaccctgtatcccagctgctccagccattgctaaaaggtgccaaagtacagctcaggccacggcttcagagaatggaagccccaagccatggcagcttccaggcagtgttgggcctgcaggtatgcag

SEQ ID NO: 584697 - DNA, 581 bp, Homo sapiens
gatgaaagaaaaatggagaaatccaataggcataggtaccaataactagtaggaatatgcagttgattatttgaatgatagtaagactaaagcattttrtaagaagctttgctctaaaagttatttactagtgatttgtaagcagaatatattaaaattcaccaaataaaggcttgttttccattatccacttattttaaaacttgcttcacttggtcctggctatgaaggtgaaattgactatagtcaagaaatgcattctaagaagacaaaagtggaattactccttatattgccatatttaatttgtattttacaccttaacattcaataagatagaatgttattgtactatgaagctggcattgatgaggttgccctgttcctataccaggcttttgtgtagcatttattgatttgagtggctttaaagattatgccctgaataatattttaagtaaaagggagaagtaggtagaaatgtccttattatttatcttgaatgtgaagtttcaagggtttaaaatagtcctttttcttatttccattttaaactagttttaaaaaaaaattccactccc

SEQ ID NO: 584698 - DNA, 615 bp, Homo sapiens
tttggtttgcatttctctaatgatcagtgatgttcagctttttctcagatgtttgttggccacatgaatgtcttcttttgagaagtgtctgttcatatcctttgaccactttttaatgttttttttttttcctgttaatttgcttaagttccttgtagactctggatattaracctttgtcagatggatagattgcaaaaattctctcccattctggaggttgtctattcactctgatgatagtttattttgctgtgcagaagctctttagtttaattcgatcccatttgtaaattttctttttgttgcaattactttagctgttaattattcaagaccaaaaggcataaaaagagacatatgtccacccaagtgataaggcaatttgggaaactacatttcctagcatgccctgccccttgaaagttaaaaatcttgactggcacagagcaccctggggcacctgtggctagcaccatttagaagtaaatggtgtagggctgtgttctgatgtgaaggcttcctgtttccatgggacacttaaccagacacaggacacaacaccagaggtgaaatttcagtggatattaagcctggggtagagcttctctcccc

SEQ ID NO: 584699 - DNA, 294 bp, Homo sapiens
ttcacacttctgttcatttcttctatgtgaaaagaacacagatttttttttttttttttttttttttactcacttagagtacactgtactgagaattgtgtcatggtatcttgtatcattcctaccctcctaagctcacccacatatcactggggctggaagcctaraaactacatcttactttctggcagggttccagctcagtcttcaccaatgacagaggcaaagactgggccctcaccagacactgagcctgctggcaccttgatcttaaacttggaattcccagcatcc

SEQ ID NO: 584700 - DNA, 512 bp, Homo sapiens
cactggtaatcctgtcccttctcacctagctgcctttgttaactacgaccatgggcagaagtctgtggaaacagcatggaatccctggcrtcccctcgtagtgccaatagctccaaaccccaacctgagaggcagaactgggatccctggtgttctggggtggtaaccaagatggtggacggagtcactacagaggaggcaccacagccttccacctagacattataaaaatctactctgtaattgggtacgtgttttacatgcctataccttagctttagacagtctccatgcccttaaatattaatatgtctgcaatctctgttttgcaccccaaagtgcaagtggctttctagcaggcaaggaaacagagtttggcttgtatttgaattgctcatgctgtctctgatcatctacagagaaaattagaaaaggcacaggttatattttagtattttagatgaaggtccaaattttgaggcacgtgttaactcatgaaaattgtctgcttc

SEQ ID NO: 584701 - DNA, 548 bp, Homo sapiens
aaaatacaaaaattagctggacgtggtggcgtgcgcctcccagctacttggaaagctgaggcaggagaatcgcttgaacccgggaggtggaggttgcagtaagccgagatcacaccactgcactccagcctgagtgacagagcaacactccctctctcaaaaaaaaaaagaaaagaaagaaagagtaaaaaaaaaaaaagggtgcactgaccactctatataatagcccattaaagatgtggaaaagatgaagaggcagcttccttctctttgcatcagagcaagcaagcttcctggaggagatgggatttaaactggatcttaaacaatagatagaatattgccatgcagagatggaggagatcaaaacaatggggcagcatgaacaaagcaatgaggcaggcccactggaggacaatcaagtgtcgtctttcttgwccacagcagtgcagtattacctgtatcctcagagagtgttcaggcatgatccgagagggcttggatggattactatgggtttgggcttaatttggtaggcaatggaaacc

SEQ ID NO: 584702 - DNA, 649 bp, Homo sapiens
aagcaagaaaaatgtcattttataatctctgtaagggattttcctttttaggagatgtcacctgaaggtgttaacagccagagcattttgtcttgttatgttgttagattatttcaataatttttcattgtaaaagataatttcattgttaagcaagtaatcactaaagattttttwaacagaggaactgcataaaagtttatggaatttgtcccttcacaaactccaataagcctcattgtcccgtttgctgctcccatgttctctgcaaagctaccatactttccctaataataataataattaccctctttacatacaatgtgtttttgccattttaaaagaacattcatgtgcattatcctgattgctgtgcctaactcttcaaaacagggatctaaaactccatgttccacatacttttacgaagcaaagttctgaaatattcatcgcttctctgtgagtcagtcaaaatagaatctttactcctcacatgatagtgagtaaaactgttatgcgacacgcagagtgggctgtatttattatgaaaggtcttactataacagggctccctttatatgacaagtcaggtcatagcaaaacactgttaaatgttgtggtaatgatagattttaaaaatatttattga

SEQ ID NO: 584703 - DNA, 512 bp, Homo sapiens
ttatgttttaagtagaaaattaataagtcagcattctgattttttacttcagtgtcataagtttgttaatgccaatgttttcctgaaaattttatttgctcactcaagttagtttattgatcttctatacttgaggggtaagcattgagcactgaaagagttcacaaaggtattaaattaattactacataataaaggtgccacaaacaaggagaaaacttcctaaaatcrtgtgccttttcttagcctcttgtaaataatgatatgtgagcaactaatatatttctggcattgtgccagattcatctaagattcatatgaatgctagttgaaatatgttacattgtacattttagaaataaggaaattgaacatcagatatacagagaaggtttaatttcttgtggttgaatgtatatcggactgggtgcctcagtggcatacctcaaatcaattatatttcaatcataactctttagtgtccttgaattctgctctttcaaaccactgca

SEQ ID NO: 584704 - DNA, 506 bp, Homo sapiens
taaattatatatttttaaaaattatttgtgtataagcagccctagatagaatatttctcacccatcttcaatgcatagccaagatgttaaattcacaatcagtattcaactaatttaggttttccacatttggatagcttaaatatgtaaatatagttaacgccctcactatactcttactccacagagaacccttgttcttgagatgtctgtcatgagactckagagacattttgaattgtttatgcagtaactctatattttatgaagaaaaaacatataaatggtgagagtgaggaaggaaaatatgtactcaaaatctaagctaaagcaagtacaggctattccttgttctgttttgttttgtttttttgagatggagtctcgctctgtcgcccaggctggagtgcagtggcgccatctccgttcactgcaagctccacctcctgggttcacaccattctcctgcctcagcctcccaagtagctgggactacagatgcccac

SEQ ID NO: 584705 - DNA, 548 bp, Homo sapiens
tttgttgtggattcttctataattacagaatgataaagtaaggagagaaagttagagtcttaacttcttatcagaaataagaaaaccaagtatcaaaaattaggatgctatgcctcagatcacatagcatccaggatatttctccctattaactaatttccctggattatagtgaacagttttattttattttattttatttttattttttcatttgctttgtttgtgagtacttcacaaacaaagtttatactctggggctgtatctttacaggttcccattcattgtatggtcctgttcatatattggagcatttgctccagagaattaaaaaaaaaaattcaaggcagataatgccagcttgcttatgaactagtttgataactagtgtattagtccrttttcacgctgctgataaagacatacccaagactagacaatttataaaagaaagaggctgaattggacttacagttccacttggctggggaagcctcacaatcatggtagagagcaagccccatcttacatggatggcagcaggcaa

SEQ ID NO: 584706 - DNA, 441 bp, Homo sapiens
ttcatgaccacagaagactttttaccttttcacagatcacatggtatgtgaaagggttagtcttttagctttgtggcataattttagcacagcttgtctttggtatgagtagttagtattgtaatatagaacacatgttaacattatgcactgaaagagtaataatattgtattagtctgttctcacattgagagaaagaactacctcagactggagtaatttataaagaaaagagatttaattgactcacaattccacaggctgtacaggaaacatggctgaggaggcttaaggaaacttacagtcacrgcagaacacaaatgggaagtaggcatgtcttacatggccagagaagaaggaagagagagaaggacaaagtgctacacacttttaaacaaccagctctcatgagaacttactcactaccacgagaacagcaa

SEQ ID NO: 584707 - DNA, 512 bp, Homo sapiens
aaatgagtggactgaagaaatgtagttttactgtcaagcaataaaggttgggcttgaaatttgtggtaatgattttaacctgagtggtcatacacatttatccagccacatctagctatactgatgcagttctgagtaggtaaggaattgcatttacccaggactgtgattttaacaacagaatagaatgaacctagagatagaatcaaggaggttgaaacaaatgcaaagcagtgtttcarttggctgactatgaaattcaatctgtggtaaagataaaatgaagacactaggagagtgagaaaaagatgggagcatcaatggaacttacaaaggaggctttgtgaatattttgcctcccttgatttaactgaaaacaagggaactttaaattaataggagggtctgatttaagagctctaaattgacacagtatctcaacattaaagatatttttaatctattagaaactaagagagttttattgtttatatagtcagacaaaatgaaaa

SEQ ID NO: 584708 - DNA, 547 bp, Homo sapiens
aatgacttttttctgttccagaagtaaatattgcatgtagtgttattcattttggggataaagaattataaattagaaagaagtgcttaaaaaaacctccatcagtacatatgattactttttaattttatttttaaagagacaggcagggtcgcaatctgttgcctaggctggagtgcagtggtgcaatcacagctcactgcagcctcaaactcttgggctcaacgaatcctcctgcctcagtctcttgagtagctgggactacaggtgtgtaccaccatgcctggctaatttttaaatttctgttgagatgggatctcaccatcttgctcgggctggtctcaaacttctgggctcaagayatcctcctgctttggcctcccaaagtgctggggattacaggcgcaaagcactgtgctggccacgatcaccttttgaaattactttgtttccgtataaacatgtgtgaaagataactaaagtataccaactagtttaaaatttgcttaccaagatatgcatttgaaacacaagaaatgccctatgg

SEQ ID NO: 584709 - DNA, 631 bp, Homo sapiens
aatttatggtaataaaacaggttcccatgacatgtacttttaaataagaaaagagcacaatgtcacagagattaaaatcaaggaagctgcaagtacagaagattggamtgaccaacatgattagttgatagtagtctatctaccagttactaaagctcatttgttgacttggccctagaaccccattgtctagtatttaagtcactttagtacttccttgacatgactttttaaaatagcagtagtgatagtcataataattgtgatatattgagttcttatcatctatccagcagtgttctaggcatttgactgacaccgatccacatttcagggggcataccattataatggttttacagataagcaaaataaagcctaaggaagttaaagaatttgaccagtggtcaatgcttcagccaaacctatgccatctggcttcccaagtgtgtgttctttcctctaccaattagcacccaccaagtcagttatttctgaaaggatagtcaatggactactgcctccaagtacctgggagcttgttaaaagtacagagagccttgcttaagacttagagaatcagattctccatgactggggtctaggatactgtgcatgtgtgtgtacatgt

SEQ ID NO: 584710 - DNA, 429 bp, Homo sapiens
aaatcttcccccctcctctggtcctttctggaggcatttgagttctctggtctttattttatcttagtaaatgatgggatagaatttagcatatggcatagcatgttttccatgctagtgagctrtgcaattcaagcaaagacacagtgaaaaagttaactaatcccatacaacaaaacctaaagcagatcattttcccacatatgatatgaaacaagataggcaaaacaaggccctgaatgctcggatgcacactttgcatctgcctccatgcatagaaggtcatttgttataatacatgtgacattccacagcacagcctagggctctgaagatcatgagctgcatggaagagtgaatccaaagggatgacacaaaacagacagtgagatgagagccatctctgacctaaggaccatttacaacatt

SEQ ID NO: 584711 - DNA, 429 bp, Homo sapiens
aaatcttcccccctcctctggtcctttctggaggcatttgagttctctggtctttattttatcttagtaaatgatgggatagaatttagcatatggcatagcatgttttccatgctagtgagctatgcaattcaagcaaagacacagtgaaaaagttaactaatcccatacaacaaaacctaaagcagatcattttcccacatatgatatgaaacaagataggcaaaacaaggccctgaatgctcrgatgcacactttgcatctgcctccatgcatagaaggtcatttgttataatacatgtgacattccacagcacagcctagggctctgaagatcatgagctgcatggaagagtgaatccaaagggatgacacaaaacagacagtgagatgagagccatctctgacctaaggaccatttacaacatt

SEQ ID NO: 584712 - DNA, 429 bp, Homo sapiens
aaatcttcccccctcctctggtcctttctggaggcatttgagttctctggtctttattttatcttagtaaatgatgggatagaatttagcatatggcatagcatgttttccatgctagtgagctatgcaattcaagcaaagacacagtgaaaaagttaactaatcccatacaacaaaacctaaagcagatcattttcccacatatgatatgaaacaagataggcaaaacaaggccctgaatgctcggatgcacactttgcatctgcctccatgcatagaaggtcatttgttataatacatgtgacattccacagcacagcctagggctctgaagatcatgagctgcatggaagagtgaayccaaagggatgacacaaaacagacagtgagatgagagccatctctgacctaaggaccatttacaacatt

SEQ ID NO: 584713 - DNA, 637 bp, Homo sapiens
  misc_feature 581, 611: n = A,T,C or G
tttcaaaggcatttttgtgtttgtttacttttgagtagtgaatcatgaacattcatactcactgagtaatttagcaagacaattcaatttattattatcaccagttctactgattctgcagggtaatggtgttttctgacttaagtgattaaaatgtttttcacttcaaaagcttttagaaacatttgtttactgttacttaaaagactaattgtaatgttgggctataaatatgcttattcttcagacattttttcttcagggtagttgatttcgttatctctcagtactcttgtgattgcaattaaattgaaagcagtgttataaaatatacattatttttgtaagctgagatgatagctctcaatcttaccaaatacaaattttgaaagctgtaacattttttaatctacttacatttataggactataatttttggacaagcrtatgtctacattattcacataactattatctttgtcaatacacaaatgaataacaaaagataaaagatctgatatacgtatctagttatcagaattcagttaggcttaatagcctttatcaggaatagcataanagcccgtaagatggtaatttatttaggttngcatagatgtgatagaaacacagaat

SEQ ID NO: 584714 - DNA, 611 bp, Homo sapiens
ggattaaataatttgtccagattacaactagctagtaacagccaaaactaaaasccacgtttctaaatttcagagctgtattctttccatagctatgactccttcctctgacgtttctgacattgctccatggatttaatcagacaatttaaatatagagttagaattgtcaattaactcactgacaacctcatgtagctggtgaagtggggggtcattctgaagaagaaaatgtttatgtattgaaataaggagacatggataatctgttttgatgattggaagaacagactcggttccagaaaatcaagatgcttttaaatcaagatgtttttactggatcctattctttttttgttgttgccgtttgtaagggagggtcaggaaatcagaaatggttgctgttggcaactatgaggattgggtgtgtagctgctactgacattataggaaacagaataaggagttttgttaggaagaataaatccagctagctagcactgtagctagcaataattatgtacatgtagtgatagtacacacataactgaaatggatgtttaatgatgtgctagcaagtcaactaaaccttttaatggattttgttgtgg

SEQ ID NO: 584715 - DNA, 611 bp, Homo sapiens
ggattaaataatttgtccagattacaactagctagtaacagccaaaactaaaacccaygtttctaaatttcagagctgtattctttccatagctatgactccttcctctgacgtttctgacattgctccatggatttaatcagacaatttaaatatagagttagaattgtcaattaactcactgacaacctcatgtagctggtgaagtggggggtcattctgaagaagaaaatgtttatgtattgaaataaggagacatggataatctgttttgatgattggaagaacagactcggttccagaaaatcaagatgcttttaaatcaagatgtttttactggatcctattctttttttgttgttgccgtttgtaagggagggtcaggaaatcagaaatggttgctgttggcaactatgaggattgggtgtgtagctgctactgacattataggaaacagaataaggagttttgttaggaagaataaatccagctagctagcactgtagctagcaataattatgtacatgtagtgatagtacacacataactgaaatggatgtttaatgatgtgctagcaagtcaactaaaccttttaatggattttgttgtgg

SEQ ID NO: 584716 - DNA, 611 bp, Homo sapiens
ggattaaataatttgtccagattacaactagctagtaacagccaaaactaaaacccacgtttctaaatttcagagctgtattctttccatagctatgactccttcctctgacgtttctgacattgctccatggatttaatcagacaatttaaatatagagttagaattgtcaattaactcactgacaacctcatgtagctggtgaagtggggggtcattctgaagaagaaaatgtttatgtattgaaataaggagacatggataatctgttttgatgattggaagaacagactcggttccagaaaatcaagatgcttttaaatcaagatgyttttactggatcctattctttttttgttgttgccgtttgtaagggagggtcaggaaatcagaaatggttgctgttggcaactatgaggattgggtgtgtagctgctactgacattataggaaacagaataaggagttttgttaggaagaataaatccagctagctagcactgtagctagcaataattatgtacatgtagtgatagtacacacataactgaaatggatgtttaatgatgtgctagcaagtcaactaaaccttttaatggattttgttgtgg

SEQ ID NO: 584717 - DNA, 575 bp, Homo sapiens
tgacgtttctgacattgctccatggatttaatcagacaatttaaatatagagttagaattgtcaattaactcactgacaacctcatgtagctggtgaagtggggggtcattctgaagaagaaaatgtttatgtattgaaataaggagacatggataatctgttttgatgattggaagaacagactcggttccagaaaatcaagatgcttttaaatcaagatgtttttactggatcctattctttttttgttgttgccgtttgtaagggagggtcaggaaatcagaaatggttgctgttggcaactatgaggattgggtgtgtagctgctactgacattataggaaacagaataaggagttttgttaggaagaataaatccagctagctagcactgtagctagcaataattatgtacatgtagtgatagtacacacataactgaaatggatgtttaatgatgtgctagcaagtcaactaaaccttttaatggattttgttgtgggtgagttgatataaatggggawatcttgaagtaaaagaaagtagaagcagctgatagaaagggatattattt

SEQ ID NO: 584718 - DNA, 334 bp, Homo sapiens
tggtgctgcggtcaagattaaaggctaacataattctctaagaagatcttctttcatcaagtgcaccaggtcaatttgaacactgtcctaaacaaccatatgcataactgcaaaggtcaccagcaccacatagagccagaaagaactagagaagaccagagccatcctctagcagcaatatagggccagctcacatcagaaaatgtcactctgtcactcctggtctcatcctggctccatccactaaagsaggtatgccttcaaaagagagtactctccatcttcaccatgcaagcagccagcatcacagtttgaactagagattagttgagaa

SEQ ID NO: 584719 - DNA, 598 bp, Homo sapiens
ttcaattgctctgatactttatacaaataaaattatccattatattcattttgtctgtcctctttcactcattatcatccttgtgaatgtttatgcacatttttgtttgttggtagtctcactgctgtaaagtattatactatgtaggcaaacaataattaattaacccattcaactgtttgtgggcattagagtactttycagtttgcagtaataacatataatgctgctatgagcttttgtgttcatgcattttggtgaatatatctaaaatttctattggatatatacctcaggatggaatcaatggatcatgtacatatgcaggtttagtagataatgacagttttctttttttaaattttattattattatactttaagttttagggtacatgtgcacaatgtgcaggtttgttacatatgtatacatgtgccatgttggtgtgctgcacccattaactcgtcatttagcattaggtgtatctcctaatgctatccctccccctccccccaccccacaacagtccccagagtgtgatgttccccttgctgtgtccgggtgttctcattgttcaatttccacctatgagtgaga

SEQ ID NO: 584720 - DNA, 598 bp, Homo sapiens
ttcaattgctctgatactttatacaaataaaattatccattatattcattttgtctgtcctctttcactcattatcatccttgtgaatgtttatgcacatttttgtttgttggtagtctcactgctgtaaagtattatactatgtaggcaaacaataattaattaacccattcaactgtttgtgggcattagagtactttccagtttgcagtaataacatataatgctgctatgagcttttgtgttcatgcattttggtgaatatatctaaaatttctattggatatatacctcaggatggaatcaatggatcatgtacatatgcaggtttagtagataatgacagttttytttttttaaattttattattattatactttaagttttagggtacatgtgcacaatgtgcaggtttgttacatatgtatacatgtgccatgttggtgtgctgcacccattaactcgtcatttagcattaggtgtatctcctaatgctatccctccccctccccccaccccacaacagtccccagagtgtgatgttccccttgctgtgtccgggtgttctcattgttcaatttccacctatgagtgaga

SEQ ID NO: 584721 - DNA, 617 bp, Homo sapiens
acggagtcatgctctgttgcccaggctggagtgcaggggcacgatctcggctcactgcaacctctgcctcccgggttcaagggattcttctgcatcagcctcctgagtagctgggactacaggcacgcaccaccatgcctggctaatttttgcatttttagtacagatggggtctcatcatattggctaggctggtttcaaactcccgaccctcgtgatctgcmcacctcggcctcccaaagtgctgcgaatacaggcgtgagccactgcacccgtttcatttcaatccccaaagggcaagctacattaaaacatcaacctttcctttctgtttattttcttatggttaaacaagttcaatgtgcctcattttaaataatagtccaaatttcacacatacagaacatttgtgaaaaatatcgtcagtattaccaaaaataccaacttaatatgataagacaaaaaaaaatacccagtgacataatctaactagctaatagtggtctaaaattcatagcaatatgaaaaatggcaggtttagttatgctattttaaaattacctttacttcaatgtttttatatgatttgaaaaataaaaaggaaaacatacaattgt

SEQ ID NO: 584722 - DNA, 447 bp, Homo sapiens
attatattacctaagcacacattttgtagagtatataccyaggattgtaatgagtgtctcataaatctgtgcattttctaggttaaatattaacaatgggtcttctaaagtggttgtaccaatttatacttcaagcagtatatgagcgtttttcttctttcatatctttatcaacacctagtattgttagttttttgttacccattctggtgcatatgttatggcatctcattgtagttttaatttgtatttacctaatgacgaatgaaaataagcttttttcatatgtttattggtcatttgaatattctcatttataaaactttaattcaagtcaattgtccagtttttcatcaagaagtccctgtcacaaccaatccccatgacatgtgatttcctatgtaaaaaaccttcacatgtactctcaaacctaaaataaaagttaaa

SEQ ID NO: 584723 - DNA, 447 bp, Homo sapiens
attatattacctaagcacacattttgtagagtatatacccaggattgtaatgagtgtctcataaatckgtgcattttctaggttaaatattaacaatgggtcttctaaagtggttgtaccaatttatacttcaagcagtatatgagcgtttttcttctttcatatctttatcaacacctagtattgttagttttttgttacccattctggtgcatatgttatggcatctcattgtagttttaatttgtatttacctaatgacgaatgaaaataagcttttttcatatgtttattggtcatttgaatattctcatttataaaactttaattcaagtcaattgtccagtttttcatcaagaagtccctgtcacaaccaatccccatgacatgtgatttcctatgtaaaaaaccttcacatgtactctcaaacctaaaataaaagttaaa

SEQ ID NO: 584724 - DNA, 447 bp, Homo sapiens
attatattacctaagcacacattttgtagagtatatacccaggattgtaatgagtgtctcataaatctgtgcattttctaggttaaatattaacaatgggtcttctaaagtggttgtaccaatttatacttcaagcagtatatgagcgtttttcttctttcatatctttatcaacacctagtattgttagttttttgttacccattctggtgcatatgttatggcatctcattgtagttttaatttgtatttacctaatgacgaatgaaaataagcttttttcatatgtttattggtcatttgaatattctcatttataaaastttaattcaagtcaattgtccagtttttcatcaagaagtccctgtcacaaccaatccccatgacatgtgatttcctatgtaaaaaaccttcacatgtactctcaaacctaaaataaaagttaaa

SEQ ID NO: 584725 - DNA, 595 bp, Homo sapiens
ccggggggaatataaatgcaaaaatcttaataaaatactagcaaattgaatccagcagcacatcaaaaagttaattcaccatgatcaagtaggcttccttcctgcaatgcaaggtagattcaagataggcaaatcaataaaggtgattcaccacataaacaggattaaaagcaaaagccatatgatcatcccaatagatgcagaaaaagctttcagtaaaatttaacatcatttcatgataaaaaccctcaacagaccaggcgtcaaagaaatataccccaacataataagagcaatctatgacaaacccacaactaataccatactgaatgggtaaaggctggaaccattccccttgagaactggaacaaggcaaagatgctcactctcttttaaagaaatcattcacttgtaactatcacttaggaagggcaacttttatggaaaagcaatgatacatgccctctccaaagaatcttttttttttacttgatttgcargaatctgtcatggagtaagacagttagtaactcccttcaaacttagtagcagggaatagcatgatggaaagaatgtttattagattgccactctc

SEQ ID NO: 584726 - DNA, 612 bp, Homo sapiens
tttgtgggaggtactaaaagcagtgcccagaatatatttttagcattagaaaaatactaaatcaataatcttagctttcattttaggagaaaaagaggagcaaattaaagtaagcaaaacaaaataaatatacaaataagagcagaaatcaatgaaattgaaaacagaaaatagaggaaaaaaaatcaacaaaaccaaaagctggttatttggtttttatttgatcaataaaaatcagtaagtctctagccaggctaaccaaggaaaagagagacggcacaaattgctaatgttggaagtaaaagagaggatatcattgcatatcccagggaaattaaaaggaaaataaaatagtactatgaacaaatytatgtctacaagttttttaactgaaacaaaatggaccaatttttaaaaatgcacaaatctgccaaaattcacaaagaagaaatagataacatggacaggcctatacttattaaagaaatttaatcaaaacattaacaaccttcaaaaacataaagcaccaacttcagatgggtttggtgaattctatcaaatattaaggaaaaattatactaatccaatataattttgtccagaagatagaag

SEQ ID NO: 584727 - DNA, 594 bp, Homo sapiens
tgtgtgcaatgtagtggaaaaaacactaaatgaaacaaccagagatgttactgcttaccatctgtgtaatcctggattagaagccattamattctctgaataacagggtctccatttttaaggaggttccctatcaatatcgtcactgtctacttctccagtttgtcacagcataatagtatcttggagcaggaagaggctttagaaatcacccagtatgcaattatacccagagaagtggtgtgactttgcctacaagcccatggtcagttaatagaagacctgggcttgaaagcaaggtgtcttgactccgtgtcccaagttctctgaagagaaaagaaggaaggtgatgggggaagagtgccagatgtgtctctcaacataggctattccagatgtggtccaccagcacgtggccttccagttgtgcctgaataacaccagatgtgatccaaggattaaatgtgaagggatgtgaaagtgctctggagcctgtaaactgttagcctgtctcccaaacgtaaggatggtgttagtattaatttgtctctgctgtatggccacaggcagctcttggccaacagcagtgtgagt

SEQ ID NO: 584728 - DNA, 577 bp, Homo sapiens
  misc_feature 558: n = A,T,C or G
ttgaataaatttagggagaactgacattttcacaatattgagtctttgtacctatgaaccaggtacattgctccatttatttaggtcttccttaatttccctcagcagtgttctaagttttcaatattcaggtttactacatcttttgctagatttatctctgactagttcatatttttcaatgttagtttaacttttatagtttttagttttcaatttcaattatctcatgcttgctgctaggacataaggacacaattggtcttaaccatatacatagatatatatatatwtttttttttttttttttttttattttactttaagttctgggatacatgtgcagaacgtgcaggtttgttgcataggtatacatgtgccatggtggtttgctgtacctatcaacccgtcatctaagttttaagcctcacatgcattaggtatttgtcctaatgctctccttccccttgtcccccaacccccagtaggccctggtgtgtgacgtttccctcccagtgtccatgtgttctcattgttcaactcccatttatgggtgangacatgtggtgtttggttt

SEQ ID NO: 584729 - DNA, 539 bp, Homo sapiens
acagtactaacctatagtagagaaaatactgcgtgtcctcaggggcatctgtgccaacaagccaggtgcagtgaagggaaacttggtatgaccttaaacgtgaataattgtcttctgtagtgtttgtggtgcaagttaaattcacaaytgaggttccaggagaccctaggtagtcaaaagtaaaaaggacaaaacattgccatggcaaactctgaatttcatgcttcttttggaactatagtgatgtgaacgtcgtattcatcaccaaaaaataatcatcttcacatttttttttcccttgagacagagcctcactctgtcacccaggctgcagtgcagtgttgcgatcttggctcactgcaacctctgcctcctggcttggagcgattctcgtgcctcagcctcccaagtagctgagatgacaggtgtgtaccaccacacctggctaatttttgtattttcagtagagctggcgtttcaccatgatggccaggctggtcttgaactcctgacctcaagtgatccacccacagcctcct

SEQ ID NO: 584730 - DNA, 586 bp, Homo sapiens
aaaataaaagaaaaacagcaaaaaaaaaaactagtgttggtgaggatatgtagaaattggaacacttgcgcactgttggtagaagtgaaaatggtgcagtcgctatgaaaaaaagcatggggccgttcttttaagaagttaaaatcaccatatgatccagtaattccacttgtgtatgagtgtacccgaaagaattgaaagcaggtcctcaaataaatatcttcgtgcccatgttcatagcagaattattcataatatttaaaagctggaagcaatccaagtgtccatraaaaggtaaatggataaacaaaatgtggcatatgcttacaatagaatattattcatccacaaaaaggaaggaaattctgacacatactacaacatggataaactttgaggatattatgctaagtgaaataagccattcaaaaaaagacaagatattattccacatatatgaggtaacctaggagaggcaacatcacagagacacaaagtacaatagtaggtgccatgggctaacagaagggggaaatggggagttattttttaatgagtacagagtttcagttttgcaagatgaaaa

SEQ ID NO: 584731 - DNA, 663 bp, Homo sapiens
ggaattaattgtctgtcagaagaattaatatggatatcaatctaaaacacataattaaaagtggtaggtacataaacaatgctgtgggtgttcagagcaataaaaataagcagaatatagttttttaattcataatgttagccactgtgatagatactttacaaatgttatttcattcaactcttgccttgagaagataattttttgcagtaaatgattagtgagataagtaataaagggctggttggatttgaatttaaggagaagtgagaaaattattccattcagagaggagcaattacactaaagcgcatagtctgggatggggaaaaactaaacagctctgtttggtgagaacacaggactcraggaaggaaacagctgatgcatcatcacctaaggaaagtccagaataatataaagaaggtgtattagtcaattttcatgctgctgataaagatataccagagactgggaaatttacaaaacaaagaggtttaattggacttacagttccacgtggcaggggaaggtcttacaatcatggcagagggtgaaaggcacttcttacatcgtggaagcaagagagaatgagcaagaagcaaaagcagaaacccctgatgaacccatcagatctcatgagacttattcactatcatgaga

SEQ ID NO: 584732 - DNA, 663 bp, Homo sapiens
ggaattaattgtctgtcagaagaattaatatggatatcaatctaaaacacataattaaaagtggtaggtacataaacaatgctgtgggtgttcagagcaataaaaataagcagaatatagttttttaattcataatgttagccactgtgatagatactttacaaatgttatttcattcaactcttgccttgagaagataattttttgcagtaaatgattagtgagataagtaataaagggctggttggatttgaatttaaggagaagtgagaaaattattccattcagagaggagcaattacactaaagcgcatagtctgggatggggaaaaactaaacagctctgtttggtgagaacacaggactcaaggaargaaacagctgatgcatcatcacctaaggaaagtccagaataatataaagaaggtgtattagtcaattttcatgctgctgataaagatataccagagactgggaaatttacaaaacaaagaggtttaattggacttacagttccacgtggcaggggaaggtcttacaatcatggcagagggtgaaaggcacttcttacatcgtggaagcaagagagaatgagcaagaagcaaaagcagaaacccctgatgaacccatcagatctcatgagacttattcactatcatgaga

SEQ ID NO: 584733 - DNA, 663 bp, Homo sapiens
ggaattaattgtctgtcagaagaattaatatggatatcaatctaaaacacataattaaaagtggtaggtacataaacaatgctgtgggtgttcagagcaataaaaataagcagaatatagttttttaattcataatgttagccactgtgatagatactttacaaatgttatttcattcaactcttgccttgagaagataattttttgcagtaaatgattagtgagataagtaataaagggctggttggatttgaatttaaggagaagtgagaaaattattccattcagagaggagcaattacactaaagcgcatagtctgggatggggaaaaactaaacagctctgtttggtgagaacacaggactcaaggaaggaaacagctgatgcatcatcacctaaggaaagtccagaataatataaagaaggtgtattagtcaattttcatgctgctgataaagatataccagagactgggaaatttacaaaacaaagaggtttaattggacytacagttccacgtggcaggggaaggtcttacaatcatggcagagggtgaaaggcacttcttacatcgtggaagcaagagagaatgagcaagaagcaaaagcagaaacccctgatgaacccatcagatctcatgagacttattcactatcatgaga

SEQ ID NO: 584734 - DNA, 543 bp, Homo sapiens
aacctttttggcactagggactggttccrtggaagacaatttttccacagaccaaaggatggggatggtcttggaaaaattcaagcacattacatttatcattagattctcataaggagcatgcaacctagatccctcacatgcgcatacaatagggttggccctcctatgagaatctaatgcctctgctgatctgacagggggcggagctaaggcagtaaagctagcttgccaccactcgcctcctgctctgtggcctccttcccaacgggcggcagaccagtgctgggggttggagaccccccagagtatagtatcacaggggttccctgtatttattgaatttgcacatctgcctctctagcttgatgagggaaattttaatggcctgtattctcacatgtatttcccaccttgcttactctctcctctatcaggaatgccaatgagctgtaggtttgatctctttacataatcccatatttcttgaaggttttgtttattttttaattctttttctttatttttatctaactgaactga

SEQ ID NO: 584735 - DNA, 543 bp, Homo sapiens
aacctttttggcactagggactggttccgtggaagacaatttttccacagaccaaaggayggggatggtcttggaaaaattcaagcacattacatttatcattagattctcataaggagcatgcaacctagatccctcacatgcgcatacaatagggttggccctcctatgagaatctaatgcctctgctgatctgacagggggcggagctaaggcagtaaagctagcttgccaccactcgcctcctgctctgtggcctccttcccaacgggcggcagaccagtgctgggggttggagaccccccagagtatagtatcacaggggttccctgtatttattgaatttgcacatctgcctctctagcttgatgagggaaattttaatggcctgtattctcacatgtatttcccaccttgcttactctctcctctatcaggaatgccaatgagctgtaggtttgatctctttacataatcccatatttcttgaaggttttgtttattttttaattctttttctttatttttatctaactgaactga

SEQ ID NO: 584736 - DNA, 543 bp, Homo sapiens
aacctttttggcactagggactggttccgtggaagacaatttttccacagaccaaaggatggggatggtcttggaaaaattcaagcacattacatttatcattagattctcataaggagcatgcaacctagatccctcacatgcgcatacaatagggttggccctcctatgagaatctaatgcctctgctgatctgacagggggcggagctaaggcagtaawgctagcttgccaccactcgcctcctgctctgtggcctccttcccaacgggcggcagaccagtgctgggggttggagaccccccagagtatagtatcacaggggttccctgtatttattgaatttgcacatctgcctctctagcttgatgagggaaattttaatggcctgtattctcacatgtatttcccaccttgcttactctctcctctatcaggaatgccaatgagctgtaggtttgatctctttacataatcccatatttcttgaaggttttgtttattttttaattctttttctttatttttatctaactgaactga

SEQ ID NO: 584737 - DNA, 630 bp, Homo sapiens
atatacatatattctattaattctgtcgttctagagaaccctgactaatacacaattaaacctctttcctttatatattatccagtcttgggcagttctttataacagtgtgagaatggactaatatagatatcgagtaaaacttttgaataaaagagttctggaactcaggagagtggtctggactatagatttaattaaagagactcattagctttatctcaagtttaattggagaatggtcaaagaaaggatgaaggaagtaatgggtgtgttagggtgcaaaagaaaatgcagataaaggaaaaaatgttattagaagatgctgaatggctgacaacctcagaatatgctatttatctttacaattttattgtwtcaagataggaactttggctctataacctaagaaacaggatttttttttcagtttcttactcacaaggcatttaattgctactacactgccagagagaaatacaggagaaggacaactcccactgaatggcagccttatgtaaacataagcagctgattcttcctctgcagaatgacatacaggggaaggttagttataagtgatgtttaatgatattagggtctttgttatgtgatgttaaagtacaatgg

SEQ ID NO: 584738 - DNA, 403 bp, Homo sapiens
ttttttgtagctattgtaagtgggattgctttctttgcttttttttcccagctagttcattattggcatatagaaatgctgttgatttttataggtttaccttgtatactgcaattttactgacttygttggtcagttctaagagttttttggtggagtccttaggtttttctatatataagttcatgtcatctgcaaagagcgaaagtttgacatcctctttaatctgaatgccttttatttgtttctcttgcctgattgctctggctaggacgtacagtattattttgaataagagtgggccggatgtagtggcttacacatgtaatcctggcattttgggaagcctaggcaggaggatcacttgagcccaggagtttgagaccagcctgggcaacatagt

SEQ ID NO: 584739 - DNA, 598 bp, Homo sapiens
gtagacatcatggtactctaccttaacactgcagcatgcatctcctaagagtaagaactgctcatgcctataatcccagcacattgggaggccaaggtgggtggattgcttgagctcaggagttcaaaaccagcctgggtaacatggtgaaatcctgtctctacaaaaaatacaaaagttagctggccacgagtgtgcctgtagtgtcagctactcaggaggctgaggtgggaggatcacttgcatccaggagtttgaggcaagatcttatcaacttggacgacagagtgagaccccctgtctcaaaaaaaaaaagagaaagaattgtcttytacataaccacattaccatcatcacacatgaaaattaaccatggtgtaagtcttttcatttttttatatttgagatttgttctccctttgtcacccagtgcagtggcacgatcacagctctctgctgcctcgacctcccttgctcaagtgaccctcctgcctcagccttctgagtagctgagactacaagtgtgcaacaccacggctggctagtttttgaattttttttttttttgagatggagtcttgctctgttgcccaggttg

SEQ ID NO: 584740 - DNA, 598 bp, Homo sapiens
gtagacatcatggtactctaccttaacactgcagcatgcatctcctaagagtaagaactgctcatgcctataatcccagcacattgggaggccaaggtgggtggattgcttgagctcaggagttcaaaaccagcctgggtaacatggtgaaatcctgtctctacaaaaaatacaaaagttagctggccacgagtgtgcctgtagtgtcagctactcaggaggctgaggtgggaggatcacttgcatccaggagtttgaggcaagatcttatcaacttggacgacagagtgagaccccctgtctcaaaaaaaaaaagagaaagaattgtcttctacataaccacattaccatcatcacacatgaaaattaaccatggtgtaagtcttttcatttttttatatttgagatttgttctccctttgtcacccagtgcagtggcacgatcacagctctctgctgcctcgacctcccttgctcaagtgaccytcctgcctcagccttctgagtagctgagactacaagtgtgcaacaccacggctggctagtttttgaattttttttttttttgagatggagtcttgctctgttgcccaggttg

SEQ ID NO: 584741 - DNA, 578 bp, Homo sapiens
caggagatcgaggccatcctggctaacacggtgaaaccccgtctctactaaaaacacaaaaatattaggcgggtgtggtggcgggcacctgcagtcccagctactcgggaggctgaggcaggagaatggcgtgaacccgggggtggaacttgcagtgagcgagactgcgccactgyactccagcctgggcgacagagcgagactccgtttcaaaaaaaaaaaagaagttaagtcatgcccccaatagcacagttctaatgacacaaccacctaggctacagatgtgcaaatgactgagggtcctttcaactcaatacctagctgactttttcaattctacttcctagctgactttttcagtcccacttcctagctaactttttcagtcccacttccaggctaactttttcagtcccacttgtgaatcagtcaacagagccacctgctgaaggaaatctcgataaggtttgctggtggaaaaacaatggagaaaaccagaaacagtgtcctggaatgacatatatttgaagaaatcatcttattggtagttaatgaaaatttctccaaaaatgaaagta

SEQ ID NO: 584742 - DNA, 610 bp, Homo sapiens
ttgcatccaaaagcatgctaattgatatagctaataataataggaagaaataaagtcagcacattagctttgaattgggaaaacaacaactaggaagatccaatgttgcagctgatggggctaatgaatactttatccttcctttagtcctgagtataataccagtttcttgaagaataaataagaatccccactagaaagccattttaaaatatatcttgaccacaagatagttgctatgctagatgggttatatcatttgcttgattacttgttggcatcgggggaaaggaaataygatctaaggtaagtagaattttaaatatggcattatggtagagtctgcatatttattttgcttttttttcctggcagaggaaagggagaggaggtagggagaagaccatggatatcaatgaactatacacattctacggtttgttggtcactgttgagcgttgtgacgagcagatgacacaccatgcagaaggctatctggtgcctcactcctctatcatactggagtcacggggaagtgctgggaatttcctgagctttgtggaaaagattaacctcttggctttaattcccttagtcatagttccctatt

SEQ ID NO: 584743 - DNA, 609 bp, Homo sapiens
cacaatatttttagaatggagaagggtcattattcttgacatggaggggaaatcattaaaaatttatatgtagaaatattaatagtatgaatgaaaaagctaacatttgaacatggattaaaatagatgaatatataaaatatcataaataaccttaattattcagcagatttggttttgaaccattttagtttttctgcatgtctggaaataattcaacaattaaactacatggtgctggtctttcccttgtcaacagactatttgccagtatttgtcatttgtccttaatttaacctctaaacctagaagtacatgggtttatggtctcattcagttttattattcagactacatgctaaactagaaagtaagatcagcattaggcaaaggttctaaaaaactgaacttttaagactgattccatttcaactgtttgtctaaattccaactattacatcattctgaggcactgaacwgagcttttagaacaacaaataaattatggtgaaaattaacatctgtttattgttacaatttcttctgtaagaggtacgtatgtcttatgaggataacagagatctgtaatatgctatttgcaacatgtat

SEQ ID NO: 584744 - DNA, 519 bp, Homo sapiens
taaggacatgaatacacaattctcatggaaggtatacaaagggccaacaaacatatgaaaaaagtctcaacatcactaatgatcagtgaactgcaaattgaaacgacagtgcaataccagcttactcctgcaagaatggccataatcaaagaatcaaaaaacagtagatgttggcatgaatgtggtagacagggagcacttctacactgctggtgggaatgtaaactagtacagccactatggaaaacagtgtggagattctttaaagaattaaaagtagaactaccatttgatctagcaatctcactactgggtgtatacccagaggaaaagaagtcattatttgaaaaagatacttggacatacatgtttatcatgtttatagcagtacaattgccaaattgtggagccaacccaaatgcccatcaatcaagtggatagggaaactctatgtatatgcctacatatatatacatatatacrtatatgtacatgcatgtgtgcatatgcatgtgtgtg

SEQ ID NO: 584745 - DNA, 632 bp, Homo sapiens
ttacatactgttctctaagatatttaattattacctctctttctttggggatgggggcaagcatttgaatgactcaactttgatttcagcctctcatagattttgctgtggtatttatgcactgatcatgttaattcccttgttaactcaagtagagtgagaaaaaaggaaaaacratgacgtgagagaatcaacttgcagaaaaaaattaactattaatgatccagaaggtttggatgaacaatattcccctgtcttgccaaaaaagaaaacaaaacaaaaccaaaaacccagagcatttcttatttaagagtgccttcacttagctattttaataagacctagtcaactgaaaaacatctttgcacaaatgacaaagaacagtgtctcatatataaaaactgtagtgtcctgagagtcaagctggatgggcttagagccaggacagatctggatattaatcccagattctctcattagctcagtggccttgctagaacaactttctgatctacttcattatctgtaaaatgtggctaaaagttattcttctttgtaagtttataaatatttgcaaatttcctagcccttgatagatacttagtaaagcccaagatagcaactgattaatc

SEQ ID NO: 584746 - DNA, 632 bp, Homo sapiens
ttacatactgttctctaagatatttaattattacctctctttctttggggatgggggcaagcatttgaatgactcaactttgatttcagcctctcatagattttgctgtggtatttatgcactgatcatgttaattcccttgttaactcaagtagagtgagaaaaaaggaaaaacaatgacgtgagagaatcaacttgcagaaaaaaattaactattaatgatccagaagrtttggatgaacaatattcccctgtcttgccaaaaaagaaaacaaaacaaaaccaaaaacccagagcatttcttatttaagagtgccttcacttagctattttaataagacctagtcaactgaaaaacatctttgcacaaatgacaaagaacagtgtctcatatataaaaactgtagtgtcctgagagtcaagctggatgggcttagagccaggacagatctggatattaatcccagattctctcattagctcagtggccttgctagaacaactttctgatctacttcattatctgtaaaatgtggctaaaagttattcttctttgtaagtttataaatatttgcaaatttcctagcccttgatagatacttagtaaagcccaagatagcaactgattaatc

SEQ ID NO: 584747 - DNA, 648 bp, Homo sapiens
gtcatatgtccttttcttctttaaatgtaaatttgtcccaactgaagtgaagcccccaatatacaacaattattgttttccttattatatcaatcatacattaaacatatacatacacatttattattttcaaytggccaaaaattttaagactggaagtaactgctttcagttttatttcagaataatgaaaaaaaatgttgcaacattctattttgagaaggtagatttcagttggataagttttcatgcaaaaatgttaacctttttggattttgtttacgcatttttaaaaaagacctgtagagattaaactccttaatgctggtgcactgagccctaccatttatctatgtttgtaattgacatagctgctacttgacatttatggccaataatatgatcagcagctatccttcctaacacactaaactagaatgtctgtgagcaaaggactgtgcatccctggtgcctcgcatagattttgttatagcctaagctctcaataaatgtatgtaaaataaattaatcaaatatacattgtcaaataattatctattctttttagtttggcaattgggtcttatgaaaaaacatttggtattctaggaaagttatatagaagtataattattttgaatttttatt

SEQ ID NO: 584748 - DNA, 561 bp, Homo sapiens
cccaggggtgctcgccccagctcctgcacctgttcatcttcatgttcccccacccataaggggtttgagcagcagcagcaastgaacagatgagccacacccctgtcacatccagtgagggggataatcacattggtgattaagtttcaacatatgaatttggggagactttcagaccatagcacttgcttagaacattgctgccacataggaaggaattaataagaagtagctactattaacaaggttattcccactgaaaaaacccagagctcctgattgaactttgctcatagtacgttacaaatatttggggagaaaaacaatcaatcctttctcaggttacgcaattcacaattttaaatagatataataaagcaattgctcagaatatgaacaattgatcttggtggtcagatcagatgacaatttcttttaagtctcctgatattgtatgaccattgtatgatgaaataaacagtattctccacaatagccaaatagtaaatataatgacaacttcaatcctcaatataggatgatggcatcataccagaaccc

SEQ ID NO: 584749 - DNA, 615 bp, Homo sapiens
aactaccaatggtttagctttgctcacacaaaagcttactcacagaatcagcagcagttgaagccattggtcagtgacacaattagaagatataagaccagatcagaggaaatggatggtctttttcagagcacagtagggtcattactccaggaaacttctacaaataaaatagcaatatcattaaaagggtgctactttcccagaacgagatcaaggatgaatcattccctaaccatttggtgtaaaatagaaacataatctcattttataataccaggctggtgaaacagaagcagatggttaaacaaggaaaggtgagcacaaaccatccctgtttgtgcatttgctttgaattgacacattgctcccacaacaggactgagtacttctacaacgaatggtcacattttactcttatctgacaactctccatacctcccccttccctaccctatgcggaatcctcctggatcaggcatccatccccaagtggccctttgaactcaagacatgagtttacttctagctttctcggttttccawttatgctactccttcctgggtattcttccagagtgacttccctttgcttcaaactccagggatccttgg

SEQ ID NO: 584750 - DNA, 609 bp, Homo sapiens
gttaaatggcaatattttattgaatggtactgctccttatggagcagggctaactcacaggcagtgtgcccagagtcgataacatatgagttgttggcaattgtatttatatcctcttatacccacttttaattaaggtacaggttgatgcaaattaaggggtgggttatttagaaccttctaggaaagggctgataacttctttgttattgccctggctcttgtaaactgtcatggtgctggtagaagggtcttacastaatgaacaatgagggcagctagggattgcttttgttgtcatctgttggtttctgctgttttctttacttcattccattgtgaccaggagataagtcttctagtctcctacctcaatctgacctacattcttatcttcctggatgatagactctgattccacttccctgtagtttgaaaactttttatatgcacttctttggcctattgatctttgcttgactatagcattactaagatttcaggagggacatactccttgtatgattgaagcctgaggaactcttaaccttgattcagccaaaaagattataaacttctatgcttatatttgtacattatgagtttagc

SEQ ID NO: 584751 - DNA, 609 bp, Homo sapiens
gttaaatggcaatattttattgaatggtactgctccttatggagcagggctaactcacaggcagtgtgcccagagtcgataacatatgagttgttggcaattgtatttatatcctcttatacccacttttaattaaggtacaggttgatgcaaattaaggggtgggttatttagaaccttctaggaaagggctgataacttctttgttattgccctggctcttgtaaactgtcatggtgctggtagaagggtcttacagtaatgaacaatgagggcagctagggattgcttttgttgtcatctgttggtttctgctgttttctttacttcattccattgtgaccaggagataagtcttctagtctcctacctcaatctgayctacattcttatcttcctggatgatagactctgattccacttccctgtagtttgaaaactttttatatgcacttctttggcctattgatctttgcttgactatagcattactaagatttcaggagggacatactccttgtatgattgaagcctgaggaactcttaaccttgattcagccaaaaagattataaacttctatgcttatatttgtacattatgagtttagc

SEQ ID NO: 584752 - DNA, 540 bp, Homo sapiens
tacattttaagttgtggaaaaaaggttattatgaaatgtttcagaaaagtatacgtctatgaatttttcatagtgaatagaaatcctaaccagaaacttcacacttttcctataatcatggctaattttcaaaaatgtatacaaacatagctcataactgcttttctcttcccaatatcatggacctttgctggtgaaactgtattggttaaatatcagacaataagtgtaagctcactgatttattcagggatctattgtacaaattagattatgatattatattactatgctaaacatcctagctatgtcctgaaatttaactgtgaaatcactttatcagagggaccacaactgatttatagtacataaaataaattaaaatagctgtgcctccttctttcccttttgatattctcactttcatagttcttataaaatttatagataatctctatgaaaatcagcctcttgatctgacattaggtggyatttaacttagttctgtcctatcctaacctaagctttgtttactgctga

SEQ ID NO: 584753 - DNA, 553 bp, Homo sapiens
tgctttaattcctgcaaatttgatttattggaagctaatggcattgaaaagctgttgtatgtgatcttattatttaatatccraaattttaatatcttgtaggctccaagagcaaagcttgcctgattgcaataaaagtatcctgacgtgagaggctttagaggtcatctgttctcttttcctgctttggtaggatgataatgatgccatactggacaaacaaaagctaccttatcccttcagctctccaaaggacatccaaattgtaactgggtggtttaaaatctctgtgtgtgctagtgaattatttagaatttgacacaataatccctaaaactctttcacactaaaatatctagttaattcagatggcaccttgtatatcaatattgacactgtaaatagaaaatagccaagtcatgcacttttgcatttatatccgcttgaattttcttgtgtctgttcaatccatataagttgtatttttgtgtctatattatacataatacgtgtctttctcacttctatttggtacatcttgaaatccttctga

SEQ ID NO: 584754 - DNA, 586 bp, Homo sapiens
tgttttaagaaataacttctttcttggacaactgatttcagtcttccttctttgttcacattacattttcctctaagactgaggaaacttagctgcatccataaattttgatatgctctattttcttatcattcagttcaaatattttctaatttccactgctttttgtctctttcctgactccccctgccctccagtcatttaaaagtgtcttgtttaatttaaaacacctagaggtgtactgggtgtcttttgttcttgatttttagatttctgccatagcagtaaaagaaaatactttaatttcaattcttaggaattaagaatcattttatgaccttgaatataatctattttggtaaacattttatatgtttaccaaataaacatataaagaatgttgttgtttttgttttctctgccatttgtgggcaccgttctatgtgtgtcaattaatacaagcwtgctagtagtattgttaatgcttactcttttttattatttgttgaacaaataggttaatttttttttgagatgaggttcttgatatgttgcctagctggcctcaaactcctggttctcagct

SEQ ID NO: 584755 - DNA, 508 bp, Homo sapiens
attaagtaaaaatcaatgtacaaaattcaattgaatttccatgtaccagcaaagatttaaaaaaaaaatyctaaaaaacatttaaaatagtttcaacatttttttaaatccataaaaaatacagaaaaaatgccagatctaccttcagaacattatgaaacatcaatgaaaatcaatataatagggataaattaatggatatattacatgggcatgggtaggaggactttataatgttaagatggcaatgctacccaaatagatgcaaggatttactgaaatgtcagtcggaaccatttagcagggttttaattatattcaatatgttctaaagtttatatggaagagtaaataaaccatttacaaagatgattataaaactatattaaatacaatgcatggcagagcatagataaattaataaatggaacagaataggctagttaatgaaaacatatgcatacagatttctggtatctgaccaagatagaatggcagatcagagaga

SEQ ID NO: 584756 - DNA, 588 bp, Homo sapiens
gaaggaaaactaacaaacagaaaggaatagcatcaacatcaacaaaaaggacatccacaccaaaaccccatccgtaagtcacyaacatcaaagaccaaaggtagataaaacacaaagatggggagaaaccagagcagaaaggctgaaaattccaaaaaccagaacacctcttctcctccaaaggaatacaactcctcaccagcaagagaacaaaactggatggagaatgagttgcacgagttgacagaagtaggcttcagaaggtcggtaataacaaacttctccgagctaaaggagcatgttctaacccatcataaggaagctaaaaaccttgaaaaaaggttagatgaatggctaactagaataaccagtgtagacaagaccttaaatgacctgatggagctgaaaaccacagtacaagaactttatgaagcattcacaagcttcaatagccaatttgatcaagcagaagaaaggatatctgtgattgaagatcaaattaatgaaataaagtgaaaggcaagattagagaaaaaagagtgaaaagaaacaaacaaatcctccaagaaatatggggctatgtgaaaa

SEQ ID NO: 584757 - DNA, 611 bp, Homo sapiens
aacaggctatagttacatttaaaattcataaagaaaggaggttggtggggctagagtgttcttcaattcctaaaggtggtggtccagctagacacamcgttgaagcatgatttacacaaaagcatggattggctggaagcagaagagttcattctagaggcctctcagttggcagttctggctaataataaactagcctgtgatgagctccactaataacaaaaaaattacttttatactcaatacttcttcaaatttcaaaaatatgtaatgtattagataatttctcatcctcatatcgaatgtcaaagtgcaattaaacatgaaagcagaaagagaatttaggcttaaaagtggagaaatataaatgatttaatatcttttgctgttataaatcttagtctatgatgacgaacatgtaaggcaatagcaacaatattatacttataacattaactctactattaaaatataattaaaatgtttttaatagtactcattacttaacttttttttttgagacagagtcttattatgttactcaagctggacagtgcagtggtgcgatctttgctcactgcaacttctgcctcatgggttcaagcaattcc

SEQ ID NO: 584758 - DNA, 644 bp, Homo sapiens
ttgtgatcatgtaagttaatacttaataaaatcctttatatatctatcctattagttctgtccatctagagaaccctgactaatacagattttggtccaggagggctctagaggaacagaatatgaagtatggaattttttcattgattttggtgtttctgaagttggctgcttaatagtgatgtgactcaaaaatgctagaggactctacttctaatagtatggagaacactgatagtccttggcataaactgtttagaaagttatgcaaaataaatgagttgacactcctgattcaccacttatcagaggcaagkaggttagtaactctatacataatatatttgaccatatgggaagaaccaaggagcatattgaaactggttggttgctcctaaattcagtggacaaagtgatgaaagaaaatgatgaactcaaggattctgtctcccagcatcaggagcagatagtgagcctcaaatctgctaggattgccctgagtgattcttatctcctgaagagaaagagctgaaattgtggaaaaacagacacaagctcttatcatgtgagtggctgacctgcaatgaaaggtgcatgcacagcctcgacaggtgtctactgttaaagtgagggcattgattgga

SEQ ID NO: 584759 - DNA, 644 bp, Homo sapiens
ttgtgatcatgtaagttaatacttaataaaatcctttatatatctatcctattagttctgtccatctagagaaccctgactaatacagattttggtccaggagggctctagaggaacagaatatgaagtatggaattttttcattgattttggtgtttctgaagttggctgcttaatagtgatgtgactcaaaaatgctagaggactctacttctaatagtatggagaacactgatagtccttggcataaactgtttagaaagttatgcaaaataaatgagttgacactcctgattcaccacttatcagaggcaaggaggttagtaactctatacataatatatttgaccatatgggaagaaccaaggagcatattgaaactggttggttgctcctaaattcagtggacaaagtgatgaaagaaaatgatgaactcaaggattctgtctcccagcatcaggagcagatagtgagcctcaaatctgctaggattgccctgagtgattcttatctcctgaagagaaagagctgaaattgtggaaaaacagacacaagctcttatcatgtgagtggctgacctgcaatgaaaggtgcatgcacagcctcgmcaggtgtctactgttaaagtgagggcattgattgga

SEQ ID NO: 584760 - DNA, 644 bp, Homo sapiens
ttgtgatcatgtaagttaatacttaataaaatcctttatatatctatcctattagttctgtccatctagagaaccctgactaatacagattttggtccaggagggctctagaggaacagaatatgaagtatggaattttttcattgattttggtgtttctgaagttggctgcttaatagtgatgtgactcaaaaatgctagaggactctacttctaatagtatggagaacactgatagtccttggcataaactgtttagaaagttatgcaaaataaatgagttgacactcctgattcaccacttatcagaggcaaggaggttagtaactctatacataatatatttgaccatatgggaagaaccaaggagcatattgaaactggttggttgctcctaaattcagtggacaaagtgatgaaagaaaatgatgaactcaaggattctgtctcccagcatcaggagcagatagtgagcctcaaatctgctaggattgccctgagtgattcttatctcctgaagagaaagagctgaaattgtggaaaaacagacacaagctcttatcatgtgagtggctgacctgcaatgaaaggtgcatgcacagcctcgacaggtgtctaytgttaaagtgagggcattgattgga

SEQ ID NO: 584761 - DNA, 490 bp, Homo sapiens
catttgatgttccttgcattttgtctaaaacgagttgactgtaaatggatgcatttatttctgtgtcctctattctgttctattgaactatgtgtctgttttcatgccagtaccatgtttatttggttactatggtattgtaatatattcagaaatctggaagtgtgatrcctccaatgttgctccttttgcacagggttgctttagctctttggggtcttttgtggttccatacaaattttagatttttcttatttctgtgaatagtgtaatagaaatgccatcttattcatatttcagtagaaattgcattgaatttgtaaattttggggggtaatattgccattttaatatagtaattctaatctatgagcatgaaatatccttccattttctccatcctattcaatttctttcattagtgttttatggtttcccttgtatagatctttcacatatttgggtgaattgattcctaggtttttatatt

SEQ ID NO: 584762 - DNA, 490 bp, Homo sapiens
catttgatgttccttgcattttgtctaaaacgagttgactgtaaatggatgcatttatttctgtgtcctctattctgttctattgaactatgtgtctgttttcatgccagtaccatgtttatttggttactatggtattgtaatatattcagaaatctggaagtgtgatgcctccaatgttgctccttttgcayagggttgctttagctctttggggtcttttgtggttccatacaaattttagatttttcttatttctgtgaatagtgtaatagaaatgccatcttattcatatttcagtagaaattgcattgaatttgtaaattttggggggtaatattgccattttaatatagtaattctaatctatgagcatgaaatatccttccattttctccatcctattcaatttctttcattagtgttttatggtttcccttgtatagatctttcacatatttgggtgaattgattcctaggtttttatatt

SEQ ID NO: 584763 - DNA, 572 bp, Homo sapiens
tatttcactaaataggacatatgtgtcttctgccaagatgtggaattttggcaaggctagcatgataacaaataaacattcaagcagtcacttaatgatattgaattgaacacmatttctcagaagttcctgtattaaattacaaccataagaacatacacaagcatgcagattgtaagtgtgatgagaatggaaacattccataggacgcagagttattcctcaagcccctggactcgcagagaatcaggtgtatgaagcaagaggaagaagacaagaatcaggaggcaaagagaaggaggaagaagcctcagtggggttgcttctttttatttcttagagccagagctggaagacaaggcctggcatattttggcaggcctggatcagagcctaggtgtgtaaattaggaattgcatttcgctgctgctaacaaggacccaaacatggtggtaaattcttccacataaaacaacagaaaataagttgttttctggccctgggctggggtggccactccaccgtcatcgatgatccgggctccttttctctttctgctttgtgacattgct

SEQ ID NO: 584764 - DNA, 572 bp, Homo sapiens
tatttcactaaataggacatatgtgtcttctgccaagatgtggaattttggcaaggctagcatgataacaaataaacattcaagcagtcacttaatgatattgaattgaacaccatttctcagaagttcctgtattaaattacaaccataagaacatacacaagcatgcagattgtaagtgtgatgagaatggaaacattccataggacgcagagttattcctcaagcccctggactcgcagagaatcaggtgtatgaagcaagaggaagaagacaagaatcaggaggcaaagagaaggaggaagaagcctcagtggggttgcttctttttatttcttagagccagagctggaagacaaggcctggcatattttggcaggcctggatcagagcctaggtgtgtaaattaggaattgcatttsgctgctgctaacaaggacccaaacatggtggtaaattcttccacataaaacaacagaaaataagttgttttctggccctgggctggggtggccactccaccgtcatcgatgatccgggctccttttctctttctgctttgtgacattgct

SEQ ID NO: 584765 - DNA, 618 bp, Homo sapiens
cttcagccggtccctccgtttggggtccctaacttcccacaacacacgttaataatttttttgagaaagatctttccctatggaaatttacatgtaaagcaactatgaaatgatgcccctatgaacttagaatcttttgcctaactgacaaggcattgaaaaacgaaaaaaaaaaaggaagcatatcaaagcaggaataatgcactctggtaatgctgcttctaagttaaataacataaagactgggaactgatgactggatttggttcatgaggcttgttggtaactttggtaagtggattcagtgtagagtggaagggattcctgattagagtgtgtttggagttaacaggaggaaaaaggtaaaggtagaatgtatggactactttctgaagagcagaaaacatcaaatccattagggttttttaaaggtaaaatatattacagcacgtttatgttgatagaaatattttagaggaagtatacatttatgatgtaagaataaagcccttgagaagataataacaagtagatttctttcttttcttttttctttctttctttttttttgagacagagtctcactctgttgcccrggctggagtgcagtagtgcgat

SEQ ID NO: 584766 - DNA, 502 bp, Homo sapiens
tcggcctcccaagtagttgggattacaggcgcctgctactacagccgactaatttttgtatttttagtagagacggagtttcaccatgtttgtcaggctgatctccaaactcctgaccccaggtgatccaccgacctcggcctcccaaagtgctgggattacaggcatgagccaccgcacccagccaagttttcatatcacttgcctatcacttgccaatagggaaactatacatcctgtaaccatacctgctaacattcttctgtcagttatattactcctctatttgagacaatcacacacctcacaatacatcctttccagggatgttgaaccattggctaacctagtcattcactttcatttgtgtttacaacccaacccaaatgcccttttatcctgtaaagcttttctggatgccccaaatagaacggtttatttatttattttattttattttwttttttttttgagagtcacccaggctggagggccgtggcat

SEQ ID NO: 584767 - DNA, 598 bp, Homo sapiens
ttcatagttcactgagatcttgtcgttatggtcgaaagaaccatgtgcygcttaccttatgaacagtcctcattgtctttacagtgccacgtagcaagttatttgactcaggtggttaggacattcgtactgagtcgggggtaatgttaactctaccatgtgttacgaagctctagacataagagaaatctggggtcaggcaaaattatggaaacagtgaggtttgcctttggtgcattttcctcctccttctcctgtccctgtccacatcacttcagcacctgttgtcactccagtggtgtcatgccagctgcctgtactagtgaaggtccaccgtatgctgcctgcaaatagctgtgtacagagcaaccacagggctagcacaataatgtataaagtgtcagtgcaatgactgctcagtaaatggcttgtacaccagtcggggcactgatggggaggagactcacatgcagcttaaggagaatgtgaacgggagaaggccaagccctgccccttctctttggcaatgggggagccttgatggatcaacccctgactccctcccagggtcttgctctgtcacccaggcaggagtgca

SEQ ID NO: 584768 - DNA, 484 bp, Homo sapiens
ccagtctcaggtatttctttataaaaatacaagaatggcctaagacaaaggcagagtaaataaatcaaatgaaatgaaacagaaaagaaagagcrttgagaattttgattgggagtaaggacttattagatttacctggaaaattaaacaaatgagaattgcaaatcatgttcaaaagtgaattatgttatcagataatcaacatttattttaacattataaaattaacacaatgtggtggtggcttaagaatctagggaaagataagggatagctctggaaccaatgttagaatcttaatataagatttaaaatatcataaatccataggaaaggatgtattatttctaacgttgtgtttggaaaattatttattttgaaaaaagcccaattatcagtttgtgttacattcaaaatatatagaaacttgatggaaagtttaaagtaacaactgaaactatgaaatgcatatgaatatgtactg

SEQ ID NO: 584769 - DNA, 533 bp, Homo sapiens
gtggtttgtagttggctcagaagcttagtcaaaataatttaggacccttaagaagcaggagaaaagagatggggaaggcaaatgggggcactgtccatggtgctagaccttgaacccttgtgttcctccagccctggtgggatgaggaacccacaaatagtccctagtcctgcttccaggaaagggcaaaagccttgggaagatccagagggagttaagaacygggatctgggttttgcagtgatttggaaaatatacagctgttcagcaagtcttgacataggaacacagaaatagcttcaggccaggtgcagtggctcacgcctgtaatcccagcactttggcaggctgaggcaggaggatctcttgaggccaagagttcaagaccatcgtgggtaacgataccagacccgctctctaccaaaaacaatttttaaaaattagccaggtgtggtggtgctcacctgtggttccagctacttgggaaactgaggcaggagaattgcttgagcccaggaggttgaggctgcagt

SEQ ID NO: 584770 - DNA, 509 bp, Homo sapiens
ttctgaaacccagaggaatttatgtataggatgactctttttttcaagtagttaagttaaggtgcaaaagtataaggtaaagtatattatcttaccattgaaaattttggcagtggcagaagagcgaacccttacaaataccttcattgggcaatacactaagcacttgctgtaatgctttttaaaacatctatactctggctgtggtattttaagtgaaaatctctcagtgagatactctttcgtattttagtactgatatccttaatattgctctgagagctaccttatactgacttcagtttcctagtgatttaaactactaatttccaacttatttttttttatagtgaaaactaaatattccttttgtagatgtaaccatttctggaagccctaagtatttttgaatgagtataattcatgcacactttaagagatttcaagcatgacaagyacagtgaataacatatatccatgtgattaccactgaggtttaagaaatgtta

SEQ ID NO: 584771 - DNA, 546 bp, Homo sapiens
agcatttctgatgcctcaaaaaggcccctactgtccctttgtaggcaatcccatcctcccaccatcagcccctgttagctactaatctgatttctgttcctatacttttgccttttccagaatgtcttataaatgaaatcatatagcacrtagcctcttgtgtttggctcctttcacaaagcctaatttttttttttgtttttgaaatggaatctcactctgtcgcccaggctgcagtgcagcggcatgacctaggctcactgcaacctccacctcccaggttcaagtggttctcctgcctcagccttccgagtagctgggattacaggcgcatgccaccacacctggctaatttttgtatttttagtagagacaaggtttcgccatgttggccagggtggtttcgaactcctgacctcaagtgatccgcctgcctcagcctcccaaagtgctaggattacagataagatccaccttgcctggcctcactcagcagaattttttttgagattatgctaccatccatgttgttgcacctatcactac

SEQ ID NO: 584772 - DNA, 546 bp, Homo sapiens
agcatttctgatgcctcaaaaaggcccctactgtccctttgtaggcaatcccatcctcccaccatcagcccctgttagctactaatctgatttctgttcctatacttttgccttttccagaatgtcttataaatgaaatcatatagcacatagcctcttgtgtttggctcctttcacaaagcctaatttttttttttgtttttgaaatggaatctcactctgtcgcccaggctgcagtgcagcggcatgacctaggctcactgcaacctccacctcccaggttcaagtggttctcctgcctcagccttccgagtagctgggattacaggcrcatgccaccacacctggctaatttttgtatttttagtagagacaaggtttcgccatgttggccagggtggtttcgaactcctgacctcaagtgatccgcctgcctcagcctcccaaagtgctaggattacagataagatccaccttgcctggcctcactcagcagaattttttttgagattatgctaccatccatgttgttgcacctatcactac

SEQ ID NO: 584773 - DNA, 546 bp, Homo sapiens
agcatttctgatgcctcaaaaaggcccctactgtccctttgtaggcaatcccatcctcccaccatcagcccctgttagctactaatctgatttctgttcctatacttttgccttttccagaatgtcttataaatgaaatcatatagcacatagcctcttgtgtttggctcctttcacaaagcctaatttttttttttgtttttgaaatggaatctcactctgtcgcccaggctgcagtgcagcggcatgacctaggctcactgcaacctccacctcccaggttcaagtggttctcctgcctcagccttccgagtagctgggattacaggcgcatgccaccayacctggctaatttttgtatttttagtagagacaaggtttcgccatgttggccagggtggtttcgaactcctgacctcaagtgatccgcctgcctcagcctcccaaagtgctaggattacagataagatccaccttgcctggcctcactcagcagaattttttttgagattatgctaccatccatgttgttgcacctatcactac

SEQ ID NO: 584774 - DNA, 546 bp, Homo sapiens
agcatttctgatgcctcaaaaaggcccctactgtccctttgtaggcaatcccatcctcccaccatcagcccctgttagctactaatctgatttctgttcctatacttttgccttttccagaatgtcttataaatgaaatcatatagcacatagcctcttgtgtttggctcctttcacaaagcctaatttttttttttgtttttgaaatggaatctcactctgtcgcccaggctgcagtgcagcggcatgacctaggctcactgcaacctccacctcccaggttcaagtggttctcctgcctcagccttccgagtagctgggattacaggcgcatgccaccacrcctggctaatttttgtatttttagtagagacaaggtttcgccatgttggccagggtggtttcgaactcctgacctcaagtgatccgcctgcctcagcctcccaaagtgctaggattacagataagatccaccttgcctggcctcactcagcagaattttttttgagattatgctaccatccatgttgttgcacctatcactac

SEQ ID NO: 584775 - DNA, 460 bp, Homo sapiens
gtctttgcttttatgaaaagtgctgtgatgaacatacacatgcacgtgtctttgtgtagaaaactctatattcctttgggcatatacccagtaattagattgttgggaccggacacagtggctcacacctgtaatcctagcacttagggaggccagcgcgggcggatcacaaggtcaggaattcgagaccagcctggccaacatgatgaaaccccatctctactaaagatacacatcccattcatacagtgtgaaatacgtacttttatggtaattagtcatttttgatactgttaatatttaatgaattcaacctaaggcatctttagttaatctaaatataaaatcattaccccttcattaactaygatacataaatctccttataaaatatttatctaaaagctacatgtaggtttttccttctgtggtcaattaaccaccagttatctattaattt

SEQ ID NO: 584776 - DNA, 537 bp, Homo sapiens
acctcagcctcccgagtagctgggactacaggcacacgccaccatgtccagctaatttttaaatttttagtagaratgaggtcttgctatgttgcccaggatcgtcttgaactcctggcctcaagcgatcctcctgccttggcttcccaaagtgctgggcttataggtgtgagccaccatgctcagccataaatgccttgtcttttttttttttttttttttttttcctgacagtcttgctctgtcgcccaggtggagtgcagtggcacaatttcagctcactgccacctttgcctctcaggttcaagagattctcatgcctcagctttctgagtagctgggattacctgtgtgcaccaccacacccagctaatttttttgtatttttagtggagacagggtttcaccatgttggccaggctggtcttgaactcctggcctcaagtaatctgcccacctcagcctcccaaagtgctgggattacaggcgtgagccactgtgcccagcctgccttgtcttcttttaatggccctctat

SEQ ID NO: 584777 - DNA, 606 bp, Homo sapiens
gatgatatttttaattgtaaaatttcaaatttgtcaaaaaactgcaagaaaatgaaaggaaatacyaatatatatccttcacctagactcaccaattaacatttttccatatttgctttatttttctctcgttagtgtgcatgcatgcatgcatacacacacatacacatacatacataaatgtctttaggtaatattgcctaaacagacacacacacacacctttaggtaatattacatatacattacataaaaggaaaaataaagcaacctgcctatcaatcaattttctgaaacattgtgataaaatgtacacattttttacaatcaaggtcacttcctcctctccttttcaatcctctcacccgtgttgagaatctcttctttagaatcaagaagtttgttcttgtatttggctttctcacacttaaagataagctatataattttaccctctcagtataaaaaagaagacagctgtcactaccataaacatactgtctgcctcttgattttcaccaaagaagaaaggcaggtgctgagcatgtaaaatggcttctctggagtcctggccaaacaggacaatggccaggattcaaatacttt

SEQ ID NO: 584778 - DNA, 284 bp, Homo sapiens
cgaaagcaaataaactattagaaccttttttttttttttttttgtaactccctgagctgcaacgttaaaagcagagttcctactttgtgggcccaaatcaataaattcagcctgattcaactctatgttccttccaccttcacccacacccttaatatctrttcccatgcctgttctacagatttctgtttatataatttcgaaaatccaagcagttcttttcaagtgtagcatacctcctcatgggtcacactctcaacctcacctctaggggcccacgggga

SEQ ID NO: 584779 - DNA, 524 bp, Homo sapiens
ctagatataaaatattcaacaaattttttcttaaactgaaaatcttaatctgaaagttttagcactgttcttatgtgctgaatactgatgtgaaaaaacctgaggccactttaatttgtttctataagaaattaattaaatattttgcctgattagccaaatgatttttcctttaatttgaagatyagtatgtttattaatatatatctcaaagatttagggccagatcaaatattttttacatggggtatgatgtcttttgtcatgtagtttactttttccagaatatcatcaaaatgaaaatcatataataataatcccacttttttcacatagcatgcttttttgaaattgatcttattgttacaagtactaatttatgatgaaaaatagtattacattgtatggacatatgacaatttttttttcaacttactggttgatggacacttgggttatttctagttttgggatattaagaataaagctactataaatattatctcagaagcctccataggaca

SEQ ID NO: 584780 - DNA, 432 bp, Homo sapiens
aggtctgtatttggacaagatctgtttatggaagtacgycaagtatatggtgataggtacataaaagccaaagcaatgaaaaaattagccaactgatatacttaaggacaaaattacatgaatatgataattgttcattatttgatccttaaatttaaaattttacatattcacatttgatactgatgtaagtaaaaaatgtgtgataaaattatattgacagatgaaattaagagagaggatgaaataatattgtcaaaaatgatctaaatttggtggattaaaatggagaaacatatgccaatgggattgtatatttgactattggcatatgagagcagttctgattttattttatctcttttatggcaaataaaagatattttatctcttttatggcaaataacttttatctctttcatggcaaatgtc

SEQ ID NO: 584781 - DNA, 599 bp, Homo sapiens
ttgataacaataccaatgactaccatttagccatgtgcttcacttgtggctagtttggaatccactgtaacctaaaacactcacaacaaactgctgaggtttaaacatgaggactctgaggctagcaaggccagcaccttgccagcagcagcccacagttaggaagggacagacctgggatttcagcccccacatgaaattaattcgacaccctgtgctctaccgccctgccctgccttacttttgaccattcagagtgatttctgggcactcatttgggtgccagggatctcctgagcaagtcgcccacccacaaccctagcaaagtctttgatcggcattctggtttgtgaacaatccagagagaacagagcacaataaactcctctaggatagaaacctcccacttatttatgttggtattcccccaaaccacccactatcatgacatacagcactcgataaatatacwtgggctgggtgtggtggctcacgcctgtaatcccagcacagcactttgggaggctgaggcaggtggatcccttgagcttaggagtttgacaccaggctggccaacatggccaaaccccatctctaca

SEQ ID NO: 584782 - DNA, 494 bp, Homo sapiens
aacaatcaccttgctccacactcagagttttggtcatggtgcacccccacakgctcccttgtccctgtgctcagtaaaccgctttttaaaaacgaaaatgaaaaacacagaaacagcacaggtagaaaataccatcatatgttttcactgaaggcaaaaaaagaaactaaaaaatgtgcattggccatgctatttgaatcaaagagcacaagaagcatcagcacatctcagcttaagtcaagagtatggaaacctcactgacatcgtctctttacgtgattagtctcatttttggtaatagggatgctttttatttcagatttccagtagcttcacacatcaactttctgagacagagttagacatcagcactgggtgaaagagacagtttaaattagttctttggtgtcggcaggtggtttagaaagttggggttttcttgtctttgttcacccctgggcctgacattataatgaagagaatcacatggccta

SEQ ID NO: 584783 - DNA, 630 bp, Homo sapiens
ttcaggtttggccttaaagaatggacaggtcagtggcagccaaaaaggagacatcaaggagaagtttcaggaatggagtacagtcagggcggaggagggcagggaaatatggggtcatcaaaggacagagccccccagacttgtagaatgagggctggagcctgcctctgaaacgccaggaaggcacattgtaatggatcgctgggcgccccaccagggtttctgctctggggtgtagatctggaatggaagtgaggaatggcagctgacattgctagtcagggaccccctttcagacccastggatgtccaggtgctgagcggcgggaaacctggtaaggcagcgtgaggccacgccttggagagaaggtactgtcccaggtgagcgtgagcttctcataccgtgctggtggcagcactccacggtggaggacggcctctccaaggagcgcagcacagaggtgacgcaccatggcccagagccacactgctggtgtcccagcccagctctgcatatcgtgctcagctgcaaagtggggatgatgagagtccttacctcatagggctgttgtgaggaataaatgcaaggatatttcattttaagccaggcatatagtgaagccaatgttt

SEQ ID NO: 584784 - DNA, 201 bp, Homo sapiens
ggaattcaatgatttgacaagaaatactttataaaaatttgctccatgtattggctaagaaaaatataataaaattttggtagtgaaaattrtatcactaatgtttaccaatattactagtatgaataatacacataaggtagtgacttggaagctgctcaatactttgttgctataacaaaatgcaatattttgttgtaa

SEQ ID NO: 584785 - DNA, 201 bp, Homo sapiens
ggaattcaatgatttgacaagaaatactttataaaaatttgctccatgtattggctaagaaaaatataataaaattttggtagtgaaaattgtatcrctaatgtttaccaatattactagtatgaataatacacataaggtagtgacttggaagctgctcaatactttgttgctataacaaaatgcaatattttgttgtaa

SEQ ID NO: 584786 - DNA, 547 bp, Homo sapiens
tcttccacctcaagaatacactgactattaatgaaccaagactcacaaaataattttagaatgcaaaaaattgggagaaaggcagtgtaatctacaaaatttttcatgatgtcaagcaattggatggattctgggtaaaggcctgcaactatgggtcataaagtttggaatttcacatcttgttaaagaactcagctttttcactatttgcaaaagcccttagagttatgtactttgaaacctactgggctttgggaaaaaggagagtgatttcttttaaaaagaagtaaatatcaccaggactcattgtgtgaagaattccaccttgagtttgaattcaaaggcattagaaatcttctttattttcaacaaaggaaaaaaatttctgctttgttaaagaaaaagaatcgcatagaaaaacatccttctgtttaatgaaagcccatttgtgctcctttgagcactccccacaatacacacagatgggtttacttttagttaatcagaggaaaagaatcawtgaatgaaggtgttactttatatacac

SEQ ID NO: 584787 - DNA, 525 bp, Homo sapiens
gaattctgatctatcataaggttaaacttctcaattaaggtcctctgtatagacatcttcactgcaaacaagaggtagaatttcaaaattgcagaaaccaaatagaaagtcaagactggagaaagaaacatcctttaaagtcatttcagtcagacccagtccactgctggactctctcttaaacattgtttatttttcacctgacattctcttttatagaagtcatttaagtaaccaaagatagtcttttcttattctgactgaacagttatattttctaccattcacgttgctagtggtagcaatgtactttaaaatgacgccattaagaactggacttaattatttagatatggttggagtagcacagacccaagcaaaactgcacctcctttgttttagattataagtctaattcaatgattagttacttggrtgatagaataggaaggggagaataagaatagggagttgaaatgacaatgataatttagatcatctgagcttaaaatttagatattctga

SEQ ID NO: 584788 - DNA, 588 bp, Homo sapiens
agaggcctttttagtttttgtttttaatttaagggacccttgagtcaaacagagagcctttgaagatttggaaaattgagaggctcagttctttattcaattcccacagagaaggtaggaaggtataggacctaaagtggaaagattggccatggaagggaaaataggtatgacttttttttgcaatacaagtaaaagagaaaaatgataaatgtggatatgtgcaggtctayagattttaaaagtttccatttgatggccttctaaggtcatctgttcagagtaagggagttggttgcaagatcaaacgtccagtgaagtttcaaataaacaacaaagaatttttcactgggatgtcctcatgctaaagaattactcattgtttatatgaaattcaaatttaactaggctggacatcctgtatgtttttgctaagtccagcaatgctaaacatagtaagatagataagcattggtgaaagccctgtcgaggttggtaactaagggtttatggaagccacagactgcaggaagtataatttacctctgcagtacatcactcaaatgcggatacaaccaagcaaggcag

SEQ ID NO: 584789 - DNA, 588 bp, Homo sapiens
agaggcctttttagtttttgtttttaatttaagggacccttgagtcaaacagagagcctttgaagatttggaaaattgagaggctcagttctttattcaattcccacagagaaggtaggaaggtataggacctaaagtggaaagattggccatggaagggaaaataggtatgacttttttttgcaatacaagtaaaagagaaaaatgataaatgtggatatgtgcaggtctacagattttaaaagtttccatttgatggccttctaaggtcatctgttcagagtaagggagttggttgcaagatcaaacgtccagtgaagtttcaaataaacaacaaagaatttttcactgggatgtcctcatgctaaagaattactcattgtttatatgaaattcaaatttaactaggctggacatcctgtatgtttttgctaagtccagcaatgctaaacatagtaagatagataagcattggtgaaagccctgtcraggttggtaactaagggtttatggaagccacagactgcaggaagtataatttacctctgcagtacatcactcaaatgcggatacaaccaagcaaggcag

SEQ ID NO: 584790 - DNA, 483 bp, Homo sapiens
gaaatgttggtaactaaaattataattttaagccccatggctcaaataaaacacatctgtgggtgctggggaagcaacctctggatcagattccaacacccctatacatatataagtgctattaaaaataaagaatgtagaaatgctgtccttcatcaatgcttaatatattgatatattaataatcaataaaagtattcaatttattcaaattaatcaaagaagatatttttagaagaaactaggatattcatcaacagatagtaggtacataggtgcccactaggttgctgtgacacattcattatcatgaatttttgttttttgtgtgttttttttttttttggagacaaagtatggctctgtcactcaggcttgaytgcagtggtgcaatcaaagctcactggaaccttgaaatcctaggctcaagggatcctccttcctcagcctcttgagtagctggaactacaggtttgtgctacc

SEQ ID NO: 584791 - DNA, 537 bp, Homo sapiens
ctcattgactttcaggtggaaaattctaagagatactttggatatttctcaggtgtccctttggaatcagctaacttcattagttacaatggaagtaactaattactaaactccttactaatttcattactgtcttcaaaatgtatccttaaattaactttttttctgcattcttgtctcattttccctacccattcatttataatcccggggtgacttcctaaatcccctacctgcaccaacatccttgtcacaagcagtgctttgaggagaacccaaactggagagagaggcagttgatactagaaatagtgccagaaagcagatccacawgacagaatttaggagctagatcactcacgatcaggcataccaggcatacctttgctgttggtgaatgggatggtgataatacctcgtgaaccgtaacatcacaattactgggttggatgaggtgcaagtgggtggggaagcatgcagtatcccaagaatatgtataggaagggccaatggtaattgtaaggctatgcagttgtt

SEQ ID NO: 584792 - DNA, 600 bp, Homo sapiens
aatgattcatagaactaaacacaaaagctaaaactaaaaaactcctagaagaaaacacaggaaaaatctttgtgatcttggagtagaaaagattttctagatgaggcactaatagcacaaatgataaaataaactgttgataaattagacaatataaaaattaaaaaaattgttgtttgaaagatactatgaaagagaaaatgcaaagtgcacattaaataaaaacattgtactcaaaatatagaaataactcttacacacttgtaattcaataataaacagacaacctaataaaaatgctctaaagatttgagtagccatttaaaaatatatgtaatccagcacataaacagaaccaacgacaaaaaccacatgattatctcaatagatgcagaaaaggccttccgtaaaattcaacatgctaaaatctctcaataaactaggcattgatggaacgtatctcaaaataataagggctatttatgacaaacccacagccagtatcatattgaatgggcaaaagctggaagcattctctttgaaaactggyacaagacaaggatgccctttctcaccactcctattcaacatagtattaga

SEQ ID NO: 584793 - DNA, 629 bp, Homo sapiens
tttattcaagcaagcaacttatttcatttccttgtttgctacagtttcctgtggtaagtgaattatctataaaacatggaattcaggctaagacaggagtagccaagcaagtggcaccacccctggagaaagctattgaacatacagcttcgggggtggagattgtccctgatgattcaggacacrtgtctatttaatgttccacaacaaggaccacttgtcaggtatattgctgtagacatatgttgcagaccagaggaaggagctcagaagtaggaatgtcttgggacttgtgttaacaaaaacttctgttcgcagatgacactctgcaaagcaaaacttgaaacaaaaaaaaattagtcctctatttttattatcaacagtaaaaaattaaactttatctgaaaattcaaaagagtgctaggcattttatagtgtctgggtccaatccaagtatctgttaggaacaccatacatagttttactctggaccgctagggaaccatttcaaaaatgaaagtaactggtttaaatttaacttagcaaaccatgcatttggatagttctaggtgaatagctttcaacaccagatttagatctcatttctctattaatttcattaatttttg

SEQ ID NO: 584794 - DNA, 494 bp, Homo sapiens
ccaggctggagtgaagtggtgccatcttggctcactgcaacccccacctcctgggtcaagagattctcctgcctcagcttcccaagtagctaggattacaggctaccacctgtgtgattaygggccaccatgcctggctaatttttgtatttttagttcgagatggggtttcaccatgttggccaggctgatcttgaactcctgacatcatgatccacccgccttggcctccaaagtgctgggattacaggcatgaggcactgcgcctggcttataacattttttttttttttttgagacagagtctcactctgtcgcctagactggagtgcagtggtgcgatctcagctcactgcaacctctgcatcccgggtgcaagtgattctcctgcctcagcctcccaagtagctgggactacaggcacctgccaccacatctggctaatttttgtatttttagtaaaggcgaggtttcatcattttgcccaggctgtt

SEQ ID NO: 584795 - DNA, 367 bp, Homo sapiens
atatggtttggctgtgacctcacccaaatctcatcttgaattgtagctcccacaattcccatgtgttgtgggagatacmtggtgggagttaattgaatcatgggggtaggcctttcccatgctattctcgtgatagtgaataggtctcatgagatctagcggtttcacaaaggggagtttccctgcacaagttctcttttcttgtctgccgccatgtgagatgtgccttttacttccagccatgattgtgaggcctccccagccatgtggaactgtaagtccattaaaactctttcttttgtatatgcccagtctcaggtgtgtctttatcagcagcatgaaaacagactaatacaaggtccattat

SEQ ID NO: 584796 - DNA, 367 bp, Homo sapiens
atatggtttggctgtgacctcacccaaatctcatcttgaattgtagctcccacaattcccatgtgttgtgggagatacctggtgggagktaattgaatcatgggggtaggcctttcccatgctattctcgtgatagtgaataggtctcatgagatctagcggtttcacaaaggggagtttccctgcacaagttctcttttcttgtctgccgccatgtgagatgtgccttttacttccagccatgattgtgaggcctccccagccatgtggaactgtaagtccattaaaactctttcttttgtatatgcccagtctcaggtgtgtctttatcagcagcatgaaaacagactaatacaaggtccattat

SEQ ID NO: 584797 - DNA, 372 bp, Homo sapiens
cttcagagttacaacgcctaactctatccaatctaagttaaatttaagaatgaatgttgagtacatctggtttgtatatggtgttttggcagagctcaatttaattcatctcaaaaagcatccagtgagcacataccaaataatggcctcatttcaggctttgggctgtataaataacatacatcccaatgtggggaaaccagacaataaacacaataatttacagagaatttaaaggaggatgagtgtcatgagaagaaaatagtaaaaggtaaggaggagaggaactacatcgtttgggattgcaattttaaacagagtcaaaacttgaaataattttagwatgttgcaaatatatctaaaatacgtagg

SEQ ID NO: 584798 - DNA, 608 bp, Homo sapiens
aacttaccaatttttaaatgattaatcctattttatgtttgtccctctctgagaaattattgtctacctccatggtatgaaagatattcttttgtaagttttcaaaagtttttggttaccttttatattcatatatataagccatattgaattaatttttataaatgatccaaactagtaattgaratacattgtttcactttttaatataactgtcaaattattataacaagatttttgaaaacttttctcattaaatttactcagaaccattaccagaattcaatgatggcatacatgtgcatctatttctagactttatttgatttcatggtctatgtgtctcttcttacaccaaatgtccttataaatctagctttatagtaagccttgaaatcagatagtgcatcagctaaaggctgtagcattggtcaatttgaatgcttcctttctatctttagcttttaaaatggcttccttcctttagcatcatatcatattgaatggagcatctgggatctccattttgaagcatatgtctgtaggcagccatagcccctccaacaaatcttaaagaaaaaagcaagcatcaaagccaagccaatcac

SEQ ID NO: 584799 - DNA, 634 bp, Homo sapiens
accaaaaaagagcagatgtagctatacttatatcagacaaaatagatttraagacaaaaaccataagaagagacaaagaagtcacaatataatgataaatgggtcaattcagtaagaggatgtaacaatttaaaatacctatggagccatgactgcagcacccagatatataaagcaaatattatcagaaataaaagagagataagcctcaatacaacaatagctagagacatcaacaccccactttcaagactggatagatcattcagacagaaaatcaacaaagaaacataaaacctaatctgtactatagaccaaatggagccaatagatatttacagaacatttcatccaaaggctgaagaatacacagccttgtatacacacaggaatagacacaggaatgttctgggcagaatacattcctcagcacatggatgattctcaaggagagactatacattaggtcataaaacaagtcttaaaacattcaagaaaacctgaaataatatcaaccatcttctctgacaacaatggaataaaactacaaatcaataacaaggggaattttggaaaccatacaaatacacagaaattaaacaatatgctcctaaatgaccagtgagtcaatgaa

SEQ ID NO: 584800 - DNA, 602 bp, Homo sapiens
  misc_feature 440: n = A,T,C or G
atatcaaaatgtgacctcagaagtattagctggagcaaaagtgaaacgaatgagggctaagaaataaggcagaatagataggtagagccgggtaatgtggagcccacaaaagatattaagtaggagattttttgtcagattttagatggactgtgtcagtaagtaaattagagaaaagaaaagcagaccaagcagttaaggaggatttttgcagtcgtcccagataaatagaatgaggacttgaattaaggcagtggcagtgagaatggaaggaaagaattaaggatatttttggaggttaaatcaacagcacttagtggttggagggattaagtgtaggtttcaggattttagtttgtggtattggaaaagcaatgtaagcaactgggagagggaaccagaaggaaaggcaggcttgagggctggaggatgagatgtangcactgtgaggcarttggtttcaggtggcacgaggacatctacatggagatgtctggacaaatggagctggagctttgatccttttctatataaatctaatcatataaatagatacatataaataaatatgtgtgtgtgtgtgtgtgtgcacacatgtgtgt

SEQ ID NO: 584801 - DNA, 571 bp, Homo sapiens
aatgctcaacatcactaatgatcagggaaatgcaaatcaaaacaacagtatgatactacctactcctgcaagaatggccataatttaaaaatatgacataagttaaaaatatgaccaacagatgttggtgtggatgtggtaaaaagggaacacttttacactgtaaactagtacaacaactatggaaagcagtacagagatttcttaaacaactaaaagtagaactaccatttgatgcagtaatcccactactggaggaaaagaagtcattatatgtaaaggacacttgcacacgcatgtttatagcaacaaaattcacaattgcaaaaatatggaaccagcctaaatgctcaccaaccaactagtggataaagaaaattatatcgatctatctatatatakagagagactattacatggtgtgtatatatatataatataatatattatatatatatgcacacacctcagccacctcccattcttcccccatatatataccatgtatatttttatatatatatatatttacatggtgtgtgtatatatatatatgatatatttacatggt

SEQ ID NO: 584802 - DNA, 571 bp, Homo sapiens
aatgctcaacatcactaatgatcagggaaatgcaaatcaaaacaacagtatgatactacctactcctgcaagaatggccataatttaaaaatatgacataagttaaaaatatgaccaacagatgttggtgtggatgtggtaaaaagggaacacttttacactgtaaactagtacaacaactatggaaagcagtacagagatttcttaaacaactaaaagtagaactaccatttgatgcagtaatcccactactggaggaaaagaagtcattatatgtaaaggacacttgcacacgcatgtttatagcaacaaaattcacaattgcaaaaatatggaaccagcctaaatgctcaccaaccaactagtggataaagaaaattatatcgatctatctatatatatagagagactattacatggtgtgtatatatatataatataatatattatatatatatgcacacacctcagccacctcccattcttcccccatatatataccatgtatatttwtatatatatatatatttacatggtgtgtgtatatatatatatgatatatttacatggt

SEQ ID NO: 584803 - DNA, 614 bp, Homo sapiens
tgagtttcttgcaggcagcatactaatggttcttattttattacccattcagccagtctacatcttctaattaaagccatttacattcaaggttgttgttgataggtaagaacttactcctgtcagtcactttaattgtttttttgattgttttgtatatcctttgttcctttcttcctcttttattgtttacctttagatgtggtgggcttcttgtagtgataatatttgactttctctttctgatttatgtctgctcaaccagtgaattttacatgtctgtgtgttttcatgatggtagatatcctcctttcatttccagatgtaggacttgcttaagtattccttgtagggctgacctagtggtgattaattccctcagttcttgcctgtctagaaaagacttattttgccttttttttttttttgacacagagtctcactctgtcactcaagatggagtgcagtgacacaatctccactcactgcaacctctgcctcctgggttcaagagattytcatgcctcagccacctgagtagctgggactacaggagtgcaccaccacgcccagttaatttttgtatttttagtagagacagggttttgtcatgt

SEQ ID NO: 584804 - DNA, 618 bp, Homo sapiens
gcgcaatcccctgcaatactacaagaggatgaagccacctgaagagggaacagagacgtcaggtgagccgttagttggcactggagctgtttgatgcccagtataagggggttgacacacctgcctattcagggagcctgggtgctcatttcagaaatgtagaaattgaggctcctttcgtacatgtagaaattccttgagaggaagacagagagtgacagaatccaggacgttcatggcattgggctgaaaaggcacgttagagactgcactgcaaagcgggtgatagctgtggagtcttaagcccagtgaagaatcgtccatttccagaatcaatgagaagtaaagctgaaaatcattcagttcagtctgtggcacttgattccacggctgtcaaccccaccggcagtcatcccrccaaccccatgagattgggctccctgaatgtgcgtcctggtcatccttgccccaaaccacaaaggactgtttagattgatggatttccttaagctgttgccccatcagacttgtgtgtgcttttagggtccagtgcatcttgttagctgactcccctcacagacaatactgggaatggggcagggattgcgcagaacagtt

SEQ ID NO: 584805 - DNA, 520 bp, Homo sapiens
gagaaatgaataaagcagagatgaagaaaagagaaggctgatgatggctgtccagtttctagagaagaaacctctccttaagaggaaacccttatctttagctaactggatgccaaaacgaaaggtttcttctctcatattgaccccaaarcatgaaggcaccacatattagataccaagtaaaacggtgagcagtctacccttgaggattaataaagtgtgatttagcctcaaactagttagtaaaattataaataataggttgaggcattagggatgggaagaaaatttttaaggagttttactttgcaagccattttctctccctctcctcctcaacagccagcgtgtttggtcctcctcatctcaagccaactgagagaggttttaatagatcactgaaaagcctaaaatgtgtgccctatagttggagggatggggtgaaccactctgtgacccttgcctggtaaatataaaagaaaagagcaggctggctggctatattgatgaaggtgcacag

SEQ ID NO: 584806 - DNA, 520 bp, Homo sapiens
gagaaatgaataaagcagagatgaagaaaagagaaggctgatgatggctgtccagtttctagagaagaaacctctccttaagaggaaacccttatctttagctaactggatgccaaaacgaaaggtttcttctctcatattgaccccaaagcatgaaggcaccacatattagataccaagtaaaacggtgagcagtctacccttgaggattaataaagtgtgatttagcctcaaactagttagtaaaattataaataataggttgaggcattagggatgggaagaaaatttttaaggagttttactttgcaagccattttctctccctctcctcctcaacagccagcgtgtttggtcctcctcatctcaagccaactgagagaggttttaatagatcactgaaaagcctaaaatgtgtgccctatagttgragggatggggtgaaccactctgtgacccttgcctggtaaatataaaagaaaagagcaggctggctggctatattgatgaaggtgcacag

SEQ ID NO: 584807 - DNA, 567 bp, Homo sapiens
tactagcattcctgaagtgtcatgtaccttataagtgatttgtgtcacttacctaatttaatcttcccctcaacactttgtgataagaactattatttactccagttcaagaatggaggagggctattaagacaacaaggtaccactacactcctgttagatttgcccaagtccccaaaacagtaacaatacccaatcttggaaaggatgtggagcaacagaactctcatatgaaaaatgatacagttgctttgaaagacagtttgacagtttcttacaaaactaaacatactcttacyatataatccaataattgtacttgtattagttcattctcacactgcaaataaagacatacccaagactgggcaatttgcaaaggaaagaggtttaattggctcacagctccacagggctggggaggcttcaggaaacttacattcatggcagaaggggaagcaaacatgtctttcttcacatggcagcagcacggagaagtgaagagtgaaggcgggggaagccccttataaaagcatcagatctcatgagaactcactatcacgagaa

SEQ ID NO: 584808 - DNA, 443 bp, Homo sapiens
aatttcagtactgaaagaattgagtttmtacactttcagcaatctgagttggcaacttcatgtggcattaggagaccctgtctccatagttgtcactgtgcagtgctggctatggcttttattctcagacctggcacctctttcctgcttgtcccccagtgggtagcttggcctctctgatcagcattgtttctctctcctatgggatgacaaatgggggtgttttgattcataaggatttggggcaggaagagagtagataacaagttgggttcaactgaaaaagactcctcattgtgcaaatggtatcgaccccttgacactttctctgttgcattatccaatttcctcttggtctgcagcagcatgaatttttcttatttaactctctctcagaggctgcaaagacacaggagcatagtaggtccttgacactagaattc

SEQ ID NO: 584809 - DNA, 601 bp, Homo sapiens
ttggtagttgatgacttactgatagctacttcctgccatactgactggaaaacagtggcagttgatatgctgatctgagagaggactccctggtagagtggaccggttctctattgtagtctgtgctcaagggtcagctgtagccctacccttggaagctgtgattccattttcaacaatggaatcaattcttatttttcttaaacaaagtgaaataggtttttaaggcctgtgtccaacaaatattaacttaaaacctcaccaaatacaacttaaagcatttttttttcttttttctatttcttggttaccacaaaccttaatttaaaattctgttgatcagactgggtccaaataaacaaatggttttttgaatcatttttatccattatcgagtgtgatttattgacttaaatcctcaaattatcctctgcaacaccatcttgagaaacagttgtgaaatttctgattrtaaagctttttcccaggggctagcatttggtcaaaaaaaaaggtttgaaaacacaacttaaacctaaaattattttaggtctataagttaaaaaaattttaggtctataagtttaaaaaaataaagggt

SEQ ID NO: 584810 - DNA, 373 bp, Homo sapiens
cctgactaacatgatgaaaccccatctctactaaaaatacaaaaaaaaaaaaaaaaaaatagcsaagcgtggtggtgcatgcttggagtcccagctatgccagatggatgctgacgcaggagaatcgcttgaacccaggaggcggaggttgcagtgagccaagattttgccactgtactccagcctggaaaaaaaaaaaaaaaagccacaatccactgtcccgcagtcgagtctttgacttgagtttgaataggagttggaaagaggtcagagggaacagcacgttcaaaatcctgagatatcaagtagcatagaatgactgaagcactggaaacacttgtttgtctagaaaaaataaatatagataaagagg

SEQ ID NO: 584811 - DNA, 538 bp, Homo sapiens
ttacattgtgaggtgttcttaaaaatgggccaatttattctggaattctaaaatattattcagcagtatctaagattaagaactcaaaaagggtactaactctccctaaattcaaaggccctaacttagctatgagttatatatacatatattaatatgactttcatggaaccattgtacaaattatggttgaaaattatgtcattttattaaagatcatgtttcatgtgctaaacaattcacatatattttatattatcttgcataatatcaaatatagtaattcaattcaattatctatctacttttctggaccccctaattttacccatgtatacatattttagacagctttacatatatatatgtatatatatgtgtatatatgtgtgtatatatatgtatatatgtgtatatatgtgtgtatatatatgtatatatgtgtatatatgtgtgtatatatatgtatgtgtgtgtgtgtgtgtgtgtgtgtgtgtgtrtatatatatatatatatatatatatatatatgagtaaa

SEQ ID NO: 584812 - DNA, 569 bp, Homo sapiens
aaactatggaccaagaaagctctgcagggtacgtggacagaggaacaaagtgactcctctctattcttcactccccagtatatgtgccctatatagtcacagagggacctattagtaaaaagacacattgtctctgcttgaagtacatactggtgaccaataactgggataccaaaaacttgtgaagttatttatctattttagacaaattctctgtttctattatagctagtgttccagttttcaggacaattctataatattatttctcagttagtcatttgtgacattattctctacagaggtatgcagactgttcatcacacctgaagatacctctcacatgtggcatttgtgtgtggggtgtaccccaaggtacaatttaagatcatattcccatgtgcctcagmaacagaatcataggattcaaactctagatcaatttcctacaatttctgtaggatatacagctacatatgagacaataccatccaaatcaatcaatcagaacaaaaagacatggctgctgaagactaatcttctattttgaaagatattcagggattcta

SEQ ID NO: 584813 - DNA, 532 bp, Homo sapiens
ggataaagaaaatgtggaatattattcaggcatgaaaaataatgaaatcctatcatttatggaaacatggatgaccctggaggacattatgttaagtgaaataagccaaacagagaaagataaaatgaatatggtatttttgatagctttgtttagaaaagcaatttttggggaatatgttatcacatttttaaattaaactggagtaaaaatgtttgtagttattcaatatttccaattttattaattttatttttaaaaacaaaaaataaatagtactttcctattayagttgaatactggagatgttggaaagaactaaatcacaagctttaaaaatcataacatttttagctttttcacaatgtcaaatatacttttgaaactgtgtttattttcatgtaagttcattttgatattttttggtaaaggtctatcttgtgatgaacaatggcaaataacattcttaaaacttacgagattagagcaaaggatggttaacaaaaataaatcaggaaaataatattaccaa

SEQ ID NO: 584814 - DNA, 554 bp, Homo sapiens
atggataaatggataaagaaaatgtggaatattattcaggcatgaaaaataatgaaatcctatcatttatggaaacatggatgaccctggaggacattatgttaagtgaaataagccaaacagagaaagataaaatgaatatggtatttttgatagctttgtttagaaaagcaatttttggggaatatgttatcacatttttaaattaaactggagtaaaaatgtttgtagttattcaatatttccaattttattaattttatttttaaaaacaaaaaataaatagtactttcctattacagttgaatactggagatgttggaaagaactaaatcacaagctttaaaaatcataacatttttagctttttcacaatgtcaaatatacttttgaaactgtgtttattttcatgtaagttcattttgatattttttggtaaaggtctatcttgtgatgaacaatggcaaayaacattcttaaaacttacgagattagagcaaaggatggttaacaaaaataaatcaggaaaataatattaccaatagagatctgcg

SEQ ID NO: 584815 - DNA, 527 bp, Homo sapiens
gccctgtgattgagggctctctgcctaatcctgcttcctcccttttttatcttccccaggtatgcccctcaacaaaacttttgcactcctatttctcagctcctgcttcctggaagatccaaccagcaaactctggctactgttacccacttctgaaaagcttcctttgtttacaaatactccccacgtcttcctaaatcaccaggcaaccggcaaggtagcaaatattaagaagacagagacaaataacacacatatcagtaggtttgccaagacatcaaatgaaatggaaaacttgcagtttgtttctcagattcttctaaatttgacaaaaaaatctttcattaatctcattactttcatgctgtttgtacaaagggttctaagtaaagtatcctaggattcttcctgatccacttcaccccttctactgtggcagtattttttaactactggcctcccattatattgyagcttcttatttcaggctatttggaatttgtatttccaagactaccaaatagcat

SEQ ID NO: 584816 - DNA, 484 bp, Homo sapiens
agactacctggctgacctctctaagtcagcctctgtgcttttgtgtgattttcctckccatttttcatcctggttagtgggactctatctaattcccttccccagtgattctacaatgttgggcaccaaatttgctgctgttcttgccttgctcatagtgtacattcaacaatggattgctgagctaattcttgattgtgagaaatccattctggaaatagtaactaacaatcagtttttacttacagctgcttccataggctcatgtgacattcaaatgacaattaatgttttttctcctgtagttttttttcttttttgcccaaaatatttattttgaaaaactcggccgggtgtggtggctcacgcctgtaatcccagcactttgagaggccaaggcgggcagatcatttgaggtcaggagttcaagaccagcctggccaatatggtgaaactaaaaatataaaaattacccaaatgtggt

SEQ ID NO: 584817 - DNA, 519 bp, Homo sapiens
tacagaaaaagaataacagagattcccttcactgaaatggtgtgttgtacccaacaaagggtaaccgcctgacataccccctctgcacacacatgaaatttcaaattctagtaacgaagagaaaagtcctaagaacaggagactgtggagggataagtcacatacaaagaaatagaaataaaaaggaattgtatatttccatgacagtaatggaaggaagccacaagayagttgaatgtagaagtctgagggatggagaatggctatttacttgctagaagtctgtttgtactaacttatctttcaattatgtgtgtgtagtgctttgctgaaagatgggaaagaggctttgggaaaaagttttagaatataaactaagagatactgtttctagtaccagtactaacctagtggatgaatttttttgaccatctaatttctctggccccatatttacttatatttagaatgagtgttttggactagactggttatataaacaagttttttggtttgggt

SEQ ID NO: 584818 - DNA, 519 bp, Homo sapiens
tacagaaaaagaataacagagattcccttcactgaaatggtgtgttgtacccaacaaagggtaaccgcctgacataccccctctgcacacacatgaaatttcaaattctagtaacgaagagaaaagtcctaagaacaggagactgtggagggataagtcacatacaaagaaatagaaataaaaaggaattgtatatttccatgacagtaatggaaggaagccacaagacagttgaatgtagaagtctgagggatggagaatggctatttacttgctagaagtctgtttgtactaacttatctttcaattatgtgtgtgtagtgctttgctgaaagatgggaaagaggctttgggaaaaagttttagaatataaactaagagatactgtttctagtaccartactaacctagtggatgaatttttttgaccatctaatttctctggccccatatttacttatatttagaatgagtgttttggactagactggttatataaacaagttttttggtttgggt

SEQ ID NO: 584819 - DNA, 631 bp, Homo sapiens
ttaatgtggacaaagtatttgataaacacataaacactaactgaatttcagttaatagcatcattatatatttctaactagatcatatytggaaacattgtaaaaatattttgctaccaattttatctacatggcaaaagtttgatagtaacttaattttaaaagattgttctagatctttatagaaaaaatataataatctttaaaggatcaaaaacttattcactaaacaaaatttatttcatactctatatatgacttttaatacagctttatcaaataattctggttttggagatataatgattacagtatcgacttttcacaatacaaatatgttcaagaaatagtatttaaaatcttttgctttattgcgtatcttatgcttggcattcagagaagctattaaaccataaacacaagcgctatcattgcaagggtgttaatgaaagacgctcttatgagagtcaagtgtgtaacgtatcttagttttgacttaatcagaatattggagaatacgcttaagatagacaaatggtacacagctatttaaaacatttatctgtatctggttttcaaatccatgggtaaactataaacattcataatttctcaggtatgttctattttt

SEQ ID NO: 584820 - DNA, 631 bp, Homo sapiens
ttaatgtggacaaagtatttgataaacacataaacactaactgaatttcagttaatagcatcattatatatttctaactagatcatatttggaaacattgtaaaaatattttgctaccaattttatctacatggcaaaagtttgatagtaacttaattttaaaagattgttctagatctttatagaaaaaatataataatctttaaaggatcaaaaacttattcactaaacaaaatttatttcatactctatatatgacttttaatacagctttawcaaataattctggttttggagatataatgattacagtatcgacttttcacaatacaaatatgttcaagaaatagtatttaaaatcttttgctttattgcgtatcttatgcttggcattcagagaagctattaaaccataaacacaagcgctatcattgcaagggtgttaatgaaagacgctcttatgagagtcaagtgtgtaacgtatcttagttttgacttaatcagaatattggagaatacgcttaagatagacaaatggtacacagctatttaaaacatttatctgtatctggttttcaaatccatgggtaaactataaacattcataatttctcaggtatgttctattttt

SEQ ID NO: 584821 - DNA, 547 bp, Homo sapiens
taatgattacagtatcgacttttcacaatacaaatatgttcaagaaatagtatttaaaatcttttgctttattgcgtatcttatgcttggcattcagagaagctattaaaccataaacacaagcgctatcattgcaagggtgttaatgaaagacgctcttatgagagtcaagtgtgtaacgtatcttagttttgacttaatcagaatattggagaataygcttaagatagacaaatggtacacagctatttaaaacatttatctgtatctggttttcaaatccatgggtaaactataaacattcataatttctcaggtatgttctatttttctgacaaagtacatgtaccatactggattacaaattatttcaagacatcttctcgtttaatatacaaaaatattatgatgcaaataggtggaaaataaaaacttaccagaaatacaagtctacattctaaccagatggatctatccttttcccatatattcacatggaccatgtaaattagattaggtcaattaatctctgcatttttccttattt

SEQ ID NO: 584822 - DNA, 586 bp, Homo sapiens
ggcacatttgcatttgagtctctttaatgtatactctggaaaatcaatacaatagatatctgacctttctcctgtacttttgaataagcaagaacagacagaaatcaaaacgtgtaaaatctttaggaatgtaatgagctggtttatatcagaggacacatttctaacttacatttacctggtagccaaacaagaaaattaacttgcctatgtcttcctgttacatttttttgcagaacccaataaacctgtcaccttcttgcatttttatttttgttttattcattttacctttactatgcaaaagagacagtgggaagaaattgaattgggagtcaaaattccccagtgtacatctgccctctgttgttaattaactatgtcactcatttgactcactcaacttttttgagtctcagtttatcctaaaaagtgtgtaaattctaagttttagatgcaatataacctatttagcaatattgtgtggactgttggctacataggcagccgacacttacagctcaggcttttgccccaaaacatgcaactgggaaaygtgatactgtacccagtcaaccatgcacag

SEQ ID NO: 584823 - DNA, 466 bp, Homo sapiens
gaattctagacgctagttttaatcaactgtttttgccctgatctgacaacctggtaatcatgttatataatttaaaaagcataataatatatttcattttttccatataaataaataatattttaatataaccttttaaattttttgtctcagtagtagggatctctttccctatcctgtctcatcatggttctccattagtctatgttttctatttgcttttgagcagataatttcatctttagtttagttttagggcccagtggtggctctatggtaaaataagctaactggctatccaagggctggccagcaggtttaattcaagttctaatccagccattgctagtggctgcctaaggcatggtgtttaaggttctgaagctgtgtctagatttcacgagcaagagwactgtgattgattatcaatgtctgccctggtgagaaggacagaacggcagcagga

SEQ ID NO: 584824 - DNA, 564 bp, Homo sapiens
ttataaaatacttacttaactctactttccagaaatggaaatgaaaactatttggaaattatgtttgtttaccaaatatttaatcaatatataccatgaatatctaaacactgtgctaaatgcgggaaccacaagagtgatgacagtggacaggtaagttgcagagagttggaaggatagacaaaactgtggtcagtggataatttacaaactgcaggttataattaggctattawttgaccatagccaaaaggagaagaaatagaaattagtaatgggggaatgaatctcttttagcaaggacagtatccaggagaaagtgatattgaagccatgtcccataagaaagaggaggagcaactagccaacagaagtgtagtttggacacagcgtagagacgtgtagtgtggacatgcataagaaaagcaggtgccgaggccctctggcaggaaaatcttgatctcctccaggaaagaaaatcaaagtaagctagaagaaaaataatccaaactatttgggaggttagaaacccaatcattcaagctgggccttagtacatggaaa

SEQ ID NO: 584825 - DNA, 564 bp, Homo sapiens
ttataaaatacttacttaactctactttccagaaatggaaatgaaaactatttggaaattatgtttgtttaccaaatatttaatcaatatataccatgaatatctaaacactgtgctaaatgcgggaaccacaagagtgatgacagtggacaggtaagttgcagagagttggaaggatagacaaaactgtggtcagtggataatttacaaactgcaggttataattaggctattaattgaccatagccaaaaggagaagaaatagaaattagtaatgggggaatgaatctcttttagcaaggacagtatccaggagaaagtgatattgaagccatgtcccataagaaagaggaggagcaactagccaacagaagtgtagtttggacacagcgtagagacgtgtagtgtggacatgcatargaaaagcaggtgccgaggccctctggcaggaaaatcttgatctcctccaggaaagaaaatcaaagtaagctagaagaaaaataatccaaactatttgggaggttagaaacccaatcattcaagctgggccttagtacatggaaa

SEQ ID NO: 584826 - DNA, 564 bp, Homo sapiens
ttataaaatacttacttaactctactttccagaaatggaaatgaaaactatttggaaattatgtttgtttaccaaatatttaatcaatatataccatgaatatctaaacactgtgctaaatgcgggaaccacaagagtgatgacagtggacaggtaagttgcagagagttggaaggatagacaaaactgtggtcagtggataatttacaaactgcaggttataattaggctattaattgaccatagccaaaaggagaagaaatagaaattagtaatgggggaatgaatctcttttagcaaggacagtatccaggagaaagtgatattgaagccatgtcccataagaaagaggaggagcaactagccaacagaagtgtagtttggacacagcgtagagacgtgtagtgtggacatgcataagaaaagcaggtgccraggccctctggcaggaaaatcttgatctcctccaggaaagaaaatcaaagtaagctagaagaaaaataatccaaactatttgggaggttagaaacccaatcattcaagctgggccttagtacatggaaa

SEQ ID NO: 584827 - DNA, 521 bp, Homo sapiens
gaacttgctctggatcaaaagtgatcatttctattattctcatggtatctttgatttgtcacagcaattgcatttgtataaggcctagttaattaagactgtggactgtgatcaaatttaagcagcacagttcctaaaatatacccagccttatctgctcccacttgctgataaacacacacacacacacacactcacacacactcgcacacttttgctccagaaatgctgaactaatagttgccagaatacaacattctaactcatacctctgggtcatgcacaagcattacttccactgagattcccyttctctactttactgcctttgcaaattcctactgatcctttagcactcattgcagacatccctttttcaacctcctctcaactctggattagatcctgcatcttaatagctgtgtgagcgtgggcatgttatgtagcctccttttgattggtttcctcctctctaaaatgagataatagtagtgcccacatccaagattattatgaggctt

SEQ ID NO: 584828 - DNA, 510 bp, Homo sapiens
attctgactagtgtgagatggtatctcattgtggctttgattgggatttctgtgatgattagtgatgatgagcatttttttcatgtttgttggctgcttgtatgtcttcttttgagaagtgtctattcatgtcctttgttcattttttaatggggttatgtcttctgttttttgatttgtttaagttccttatggattctacatattagacgtttgtcagatgcatagtttgcaaatattttctcccattctgtagattgccggtttactcttttgatggtttctttaaaactaaagatrgaagctctttagtttaattaggtcccacttgccattttttattgtcgttgcaacgttttttggggacttagccaaaaattctttgtcaatgctgatgttgagaagggtgtttcgtaggttttcttctaggatttttatagtttgaggtcttacatttaaagggaaaagaacaaaccaaccccaagttagcagtatagaacaaataactaa

SEQ ID NO: 584829 - DNA, 613 bp, Homo sapiens
atcaaaatcaacaaaggaagaaaacttcaggccaatatccmtgatggacacagatgcaaaaatcctaaacaaaatactagcaaaccaaatccagcagcacatcaaaaagttgatccaccatcagcaagtaactttattcctggcaatatggtgtgtctctgtgtccccacccaaatctcatctcaaattataatccccataatccccatgtgtagaaggagggacctgataggaggtgattggatcatggggatggtttcccccatggtgttctcatgatattgagtgagttctcaagagacctgatggttttataagtgtttgacagttcctccttcacacacactcgtactagaggggtgataaggtttggctctgtgtccccacccaaatctcatctcaaattgtaatccccacttgtggagggaagggcctgtaatccccatgtgttgagggaggcaggttggatcatggggcaggtttccctatagtgagtgagttctcacaagatctgatggttttataagtggtggtttccccagctctttgccctcctgccatcttgtgaagaaggtgcctgttccccttccaccatgattgtaagttttctgag

SEQ ID NO: 584830 - DNA, 613 bp, Homo sapiens
atcaaaatcaacaaaggaagaaaacttcaggccaatatccctgatggacacagatgcaaaaatcctaaacaaaatactagcaaaccaaatccagcagcacatcaaaaagttgatccaccatcagcaagtaactttattcctggcaatatggtgtgtctctgtgtccccacccaaatctcatctcaaattataatccccataatccccatgtgtagaaggagggacctgataggaggtgattggatcatggggatggtttcccccatggtgttctcatgatattgagtgagttctcaagagayctgatggttttataagtgtttgacagttcctccttcacacacactcgtactagaggggtgataaggtttggctctgtgtccccacccaaatctcatctcaaattgtaatccccacttgtggagggaagggcctgtaatccccatgtgttgagggaggcaggttggatcatggggcaggtttccctatagtgagtgagttctcacaagatctgatggttttataagtggtggtttccccagctctttgccctcctgccatcttgtgaagaaggtgcctgttccccttccaccatgattgtaagttttctgag

SEQ ID NO: 584831 - DNA, 587 bp, Homo sapiens
atatagtggatgaactcaagaaaatatataagttctttgagttctaggccaagagtgacaatactctaaccagctttgttagcctcctgttgcactggtccctgaagctaccaacaaggtatgcatgaggttcactcwaagtcagaaggttaacttgactagctcaatgaatctcagtattcacctcacaacagaattatctgggaagttgtcttagtccatttgcgttgctacaaaggaatatgtgaggctgggtaatttataaagaatgtatgtttatttggttcacagttctacaggctgtacaagaagcatgatttcaacatctgcttctgctgagggcctcagacttcttccacttatgatgaaagtttaaggggaactggtatgtgcagacatcacatggcaagaaaggaagcataagagagaggagaaggctgtcatgccctttttaacaaccagtgcccacaggaactaacaaagtaagaactcactcaataactcaagtgtgacatcaagccgttcatgacccacatacctctcactaagccccatctccaacattggggatcaaatttcaacatgaa

SEQ ID NO: 584832 - DNA, 587 bp, Homo sapiens
atatagtggatgaactcaagaaaatatataagttctttgagttctaggccaagagtgacaatactctaaccagctttgttagcctcctgttgcactggtccctgaagctaccaacaaggtatgcatgaggttcactctaagtcagaaggttaacttgacwagctcaatgaatctcagtattcacctcacaacagaattatctgggaagttgtcttagtccatttgcgttgctacaaaggaatatgtgaggctgggtaatttataaagaatgtatgtttatttggttcacagttctacaggctgtacaagaagcatgatttcaacatctgcttctgctgagggcctcagacttcttccacttatgatgaaagtttaaggggaactggtatgtgcagacatcacatggcaagaaaggaagcataagagagaggagaaggctgtcatgccctttttaacaaccagtgcccacaggaactaacaaagtaagaactcactcaataactcaagtgtgacatcaagccgttcatgacccacatacctctcactaagccccatctccaacattggggatcaaatttcaacatgaa

SEQ ID NO: 584833 - DNA, 587 bp, Homo sapiens
atatagtggatgaactcaagaaaatatataagttctttgagttctaggccaagagtgacaatactctaaccagctttgttagcctcctgttgcactggtccctgaagctaccaacaaggtatgcatgaggttcactctaagtcagaaggttaacttgactagctcaatgaatctcagtattcacctcacaacagaattatctgggaagttgtcttagtccatttgcgttgctacaaaggaatatgtgaggctgggtaatttataaagaatrtatgtttatttggttcacagttctacaggctgtacaagaagcatgatttcaacatctgcttctgctgagggcctcagacttcttccacttatgatgaaagtttaaggggaactggtatgtgcagacatcacatggcaagaaaggaagcataagagagaggagaaggctgtcatgccctttttaacaaccagtgcccacaggaactaacaaagtaagaactcactcaataactcaagtgtgacatcaagccgttcatgacccacatacctctcactaagccccatctccaacattggggatcaaatttcaacatgaa

SEQ ID NO: 584834 - DNA, 606 bp, Homo sapiens
tggcttgccatctgtagggatcttattggtaaagctgttagaacttggtgtagtttttgtttttcagtattttaattgtgttgttactgttttatcacatcttaattgtagcaagygaaataatatataattatgtgtatagaaggtaactaatgttccactcttcctcctcgttcctcctaccccttgtaatttatgtttctagttttgtttttgtttttgttttttgagacagggtctgctctggcatccaagctggagtgcagtagcacaatctcggctcactggagcctcagcctcccagggctaaagtgatcttcccacctcatcctcccgagttgctagggctacagatgtgtgccaccactcccagttaatttttgtattttttgtagagacgcggttttgccatgttgcccagactggtctcatcctgggctcaagccatctgcatgccttggcttcccagagtgctggggttacagacatgagccactgtgcctggctgtttctagtaatttgatggatatctttctgtatcattatctttgttcacagacacacacgcagaaaaattgttccttttattttactttataaaactga

SEQ ID NO: 584835 - DNA, 606 bp, Homo sapiens
tggcttgccatctgtagggatcttattggtaaagctgttagaacttggtgtagtttttgtttttcagtattttaattgtgttgttactgttttatcacatcttaattgtagcaagcgaaataatatataattatgtgtatagaaggtaactaatgttccactcttcctcctcgttcctcctaccccttgtaatttatgtttctagttttgtttttgtttttgttttttgagacagggtctgctctggcatccaagctggagtgcagtagcacaatctcggctcactggagcctcagcctcccagggctaaagtgatcttcccacctcatcctcccgagttgctagggctacagaygtgtgccaccactcccagttaatttttgtattttttgtagagacgcggttttgccatgttgcccagactggtctcatcctgggctcaagccatctgcatgccttggcttcccagagtgctggggttacagacatgagccactgtgcctggctgtttctagtaatttgatggatatctttctgtatcattatctttgttcacagacacacacgcagaaaaattgttccttttattttactttataaaactga

SEQ ID NO: 584836 - DNA, 576 bp, Homo sapiens
ggattacaggcatgtgccaccctgcctggctaattttttttttttttagtagagacagggtttcgccatgttggccaggctggtctcgaactcccgacctctggtgatccacccgccttggcctcccaaagtgctgggattacaggcgtgagccactgcactcagccttcacttttccacataacatttcttcagcctggaagctcttcagtgcaagggatccaggacatgttacagccccaacaaggaaggggttaatgttgttttaccccaggatttcatgaacaagctgtgagccagttttgggtcccctttgccatctctttatgtcgttgtccccactctctccccgaagcatgcattatctggaccattaaggaacccatcagcagaggtgccatgacctctggctgaccttgacctgctgctgtcctgccttgcactccaattactgcgatatgtggaggcaaccacaggctcggagcccctctaacgctcatagctttgtcrggtcctcacctcctctcactggcatcgggtgacttctagatcctgccagggtttctcttctgacat

SEQ ID NO: 584837 - DNA, 575 bp, Homo sapiens
attagtatgaaccgcgtagtcaagcaaagtgctttttattgcaaggagcatattttcgttggagatatgttggcttgcatcaaggtaccaggcacagatgctgacattgaagcctggaaatgatgatgtttgccaaggagatgcttccttttcattgtctcacgtgaccaacacaggtggctttcagaaataagaatccaagccatccttaggtatcactctctttctttgaatctcaaagattggtcaacagtcaatgtacagagaaatttttttcctacaaaattcagcttggttgaaagctttcttgctgaagcaaagccacatcttattccccctgaaggaaagaatgccttttttgtttgtttgtttttccattgtacagagggwcagaaggaagaaataggaaggcacaggagggctgagaaccaaggcaaagaacaagagggaaatttggcttaattttcatataagctgaagtccccctgtctgctgtctgcatccctcccttctctccccgtctcccaaacaaaggcagcatctttctcagataatgccgcttgtgtcagaagcga

SEQ ID NO: 584838 - DNA, 520 bp, Homo sapiens
tttgaaactcagggccctggtggtataggcacatgagggaatctcctgatctgcggattgcaaaaaccatgggaaaagtgtagtatccaggtggggtagtgcagtccctcrtggcttcccttgtccgggggagggaggccctcaggactccttgcgcttcctgggtaaggcgatgccccacccagcttctgctcaccctctgttggctgctcccactgcatacccagtcctaatgagatgaactgggtacttcagttggaaatgcagaaatcacctgccttctgcatttgtctcgctgggtactgcagaccagagctgtttgtatttggccatcttgccagatcccttttttatccttttaacagggtatttgtagcacaaaatatcttaattagatcaaatttatgacattttcctgataggtgcttttggtatcaagttaaataagtctttagcttaccttaaattctgaaaattttctcctatatatttcctaaatatttttgttttatgctttaca

SEQ ID NO: 584839 - DNA, 489 bp, Homo sapiens
catctttactaaaaatataaaacatgagccggccatggtggcggtcacctataatcccagctacttgggaggctgaggcagggagaatcacttgaaccctgggggtggaggttgcagtgagccaagattgcaccactgcactccagcctgggcaacagagtgagactccatctcaaaaaagaaaatgtggagtcactgggactcaactcatctgatccacatggcctggccctgagagcatgggcaccaagtggctctcccccaagaagcccccacttccccctggaagtctacccgccycgtttccctgtggatgggtcccacttcccttgcccacttctcttaactgattagcacatatatcaccacttaatttacggtgtccatatgttatcaatttaacttttactttttaatttgtattactttaataaattcagtggttcgtattttatattcttcatggttacctgaaaaaaatacagaatt

SEQ ID NO: 584840 - DNA, 599 bp, Homo sapiens
cactcagccccacagaattgcccccaataagcgccatagcaggtagaggagagcatcaacataactgttacttcttttctggttaggtaaggaaatagtttgcattttttcctctgttgattccattaacccatagtttaggttttgcatcaatcctrttacttccaagtctctcaactgctatgactagtcccttgtgactcatacctagctatgcatttcccccttagggccaactaactgatctggagaactcagggaagttactgacctctcttggagttactgatgtattccctttgttactaaattctttagtgagtaaaggtagaatttgcaaacgtggagacatttcttgatgcacacgagtcttttagagaccctcaaattgatcttggtgggtaaataccctatagttctgatccattcaataagcacttattgagtacctctgatgttctaggcattgtgctaaatattgcataaggaacagagcaaaaggtataagtgttgacctttaggagcttagaatgtgttaaaattaaggataataagggcaatgaacaagataagcatagggtgctctgggagagtagaag

SEQ ID NO: 584841 - DNA, 560 bp, Homo sapiens
gcaaatacttatatattaatattttatagatgttcatgtcaacttcaaatgcatccagaatttaaaataagtaaaaccagctttattttccacacttaagttctttttttaaagcaacaatttcaagtgatttgtttcatcttaggaacagcaggaaataattatgcaatggattatagaagatatattctgaacagctaaaataggaagcacatatcactgtgtgggtgaaagaaagacatttttacaaataaaggtgcacactgctttttaaatagcttaattttttaattaaattttttattttcaataattgtagattcatatgccattgtgagaaatcatagagtgcactcatgtttctttttcctagattccctcagtgggcacatctcacaaaattatagtgcaacatcgtaaaaaggacaagaaacagagcarttccatcaccacgaggatccctcccattgcccttttttttgagagggagtctcgctctgccgcccaggctggagtgtagtggtgagatctcggctcacggcaagctccgcctcccaggt

SEQ ID NO: 584842 - DNA, 642 bp, Homo sapiens
atagtgaataagtctcacgcgatctgttggttttataaagggcagttcccctgctcatgttctgttgcctgctgccacataagatgtgactttgctcctcattcaccttctgccatgattgtgagacctccacacccctgtggaactgtgagtcaattagacctctttcctttataaatgggtatatcttaattagcagcgtgagaacagatatatatatatatttctctctcaaaacaggatcttgctgtgtcacccaggctggagtacagtgatgcagtcacagctcgctgcagcctcggtctcctgggctcaaacaatcctytaactcagcctcccagtagttgggactacaggcatgcagcatcacacccactaatttttgtatttttcattgagacggagtttcaccatgttgaccaggctcatctcaaactcctgggctcaagcagtcctccctcctcggcttcacaaagtcctggaattacagatgtgagccatggtgcctggcctatagtatgttttaatatagaagaatttcacataaaagccatgtgaagttggaaatgcattattgtatttccctgggctttgttttgctaaatcaattttcataagcttttgcccatgactttataaaat

SEQ ID NO: 584843 - DNA, 602 bp, Homo sapiens
cagcacttcacaatttctgcattgtagcttttgactccccccaagaaataagatgtaaattttggcatttacaaagctattctgaagtaataaaatacagttacaaaaaaaaaaaaaaacagaaagatatctgggaatattgcaaagatgataaagggaaaaaagactgaagacaaacactgaggtagagaaaaaagtctgagaagacagcaccagatgaccctggttttgaaggtgagaccccgctgtggagggtgccactggatgctcttctttaactctcatctcagaaatgactacatggctccaaaatgtgatcttatgataatcaaatttattttataagaagtttatttttacttgaacatattatatgcaaattaggaaacttttcaaattacagaaatgaagaaatcatataaartagtacaattttctacctcagaaacataatagcataacaattttattttcttaattaacatatttaatattcagccactttattaaatgagactgtaccattttttcccttgaagcccaactctggatacttttgtatccactgtctctgtagtacatgtacacacacacacacacac

SEQ ID NO: 584844 - DNA, 647 bp, Homo sapiens
cctgggcatgaaaggatgacatttaccattatgaaaacacatgaaagtataaaacctactgataaaacaaacacacaaatgtggaaaagtatcaaataatactaccacagaaaatcagcaaaccacaaggactaacaataaaggaaaaagaaaggaacaagaacatgtaaatagcaactggaaaacaaataagaatatgatagaaacaaacctcccatattaataataaccttgaatgtacaaagaatagattatctatttaaaacatatagtctggctgaatggattaaaaaatgtgacccaactatatgctgcctaaaaaaaaacacactttacctgtaaatatacatatatactgaacataaaaagatgaaaaatgatattctgtacaaacaaaagccagaaggaaacaggagtaggtattatgatatcagataaaacagactttgagtcaaaaatggtattaaaaaaaaatgaaggtcattctataatgataaatagattaatccaaaaagaagatataacaactttaaatatatatgcacccaatactggaggacccagattcataaagcaaacatgactgtaatagatctaaagaaacagatagactgttaatasaataatggtggggaaaccaataccac

SEQ ID NO: 584845 - DNA, 594 bp, Homo sapiens
gactagttaacagaaattgtttaatctgaagtaccacgtgatggttaatttaagtatcaacttggctggacttggggatacctaagtagctggtaaagcattatttctgggtgtgtctatgaccatgttaccagaggaatctagcgtttgtgttggtggaccaagcggagaagttccgcccctaatgaaggtaggcacaacccaattgactgagagcctggatggaacgcaaagtcagaaggaaggtgaattttctctctctgtcttctggaactaggccacccttctcctgcccttgtacatcagaactccaggatttctggcctttgaactctgagacttgcatcagcaacacccaggattctcaggccttgggctttggaatgagagttataccatcagttccactggttctgaggccttcgaactaagaccgagccacactactggccycattttttttccagcttgcagacagcttatcataggacttcccagcctttgtaattatgtgatctaattttcctaataagccctctctttatctgtctgtctatctatctatctatctatctatctatctatctatctatc

SEQ ID NO: 584846 - DNA, 594 bp, Homo sapiens
gactagttaacagaaattgtttaatctgaagtaccacgtgatggttaatttaagtatcaacttggctggacttggggatacctaagtagctggtaaagcattatttctgggtgtgtctatgaccatgttaccagaggaatctagcgtttgtgttggtggaccaagcggagaagttccgcccctaatgaaggtaggcacaacccaattgactgagagcctggatggaacgcaaagtcagaaggaaggtgaattttctctctctgtcttctggaactaggccacccttctcctgcccttgtacatcagaactccaggatttctggcctttgaactctgagacttgcatcagcaacacccaggattctcaggccttgggctttggaatgagagttataccatcagttccactggttctgaggccttcgaactaagaccgagccacactactggcctcattttttttccagcttgcagacagcttatcataggacttcccagccttygtaattatgtgatctaattttcctaataagccctctctttatctgtctgtctatctatctatctatctatctatctatctatctatctatc

SEQ ID NO: 584847 - DNA, 338 bp, Homo sapiens
tttctgtgtgtttttatctatccctatgattcaactattttacaagcccagaaaaggatgctaataattgtaatcagaaaataaaatttactaaaatttaacaaggcacagcccagtgccctggagcaatggactgacgtttacagactgtcctggttttcttttatcattcagtagatgcatttctatacaatttgtgacaaacccgggttattgcaaggcaactcataatttgtccaattttatgtacaaaaatgttattaagggcatactttttctgaatgataagaaagtttttgtmacccattatagtatcgtcattattagcatggtcccct

SEQ ID NO: 584848 - DNA, 590 bp, Homo sapiens
tttccttttgtttggttaagtgatatcacaataccttctttggtagcttgggcttcctaagctttcaaaataataccagcttatccaggacaaacgaccmttctgggatagaataagtgtcatttgttatacctttgttatttctgatatgaatgaagaacccaaaattgataattatatgaaaactatcattaattatttcttgcatcttaatgaaattttttattgttttactttcactctttgagaaaaggactctgaaacttttgtttatttacaccaaaaaaaaatcagaatagcaattctgttcaagagaaacttcattggtcttggaaacaaaagatgtagtgtctatctctatttctgagacatactcattgtgtgataaagtcacttcaactctctatgtctcagtccttttcatgcgtaaaatgctgttttgaactcaatgaacaacatttaaaggtgagttggcacttgtaatgctattatccacttcctgacagacatcagcaaccaattatagcaccatcgacaatggaaccaagacacaatctcagcatcgctgtcaacatcatcctccaagaagc

SEQ ID NO: 584849 - DNA, 590 bp, Homo sapiens
tttccttttgtttggttaagtgatatcacaataccttctttggtagcttgggcttcctaagctttcaaaataataccagcttatccaggacaaacgaccattctgggatagaataagtgtcatttgttatwcctttgttatttctgatatgaatgaagaacccaaaattgataattatatgaaaactatcattaattatttcttgcatcttaatgaaattttttattgttttactttcactctttgagaaaaggactctgaaacttttgtttatttacaccaaaaaaaaatcagaatagcaattctgttcaagagaaacttcattggtcttggaaacaaaagatgtagtgtctatctctatttctgagacatactcattgtgtgataaagtcacttcaactctctatgtctcagtccttttcatgcgtaaaatgctgttttgaactcaatgaacaacatttaaaggtgagttggcacttgtaatgctattatccacttcctgacagacatcagcaaccaattatagcaccatcgacaatggaaccaagacacaatctcagcatcgctgtcaacatcatcctccaagaagc

SEQ ID NO: 584850 - DNA, 607 bp, Homo sapiens
tatcctcctgtttacaagtccaattaatccccaatatccaaaaatcctccctctgtagcatttctattattggactttcctgtttattcctttggcactgctttgggtcaggcacgaactgtttcttagatacactagcctcctaattggcggggtttgggtttgtaccacttcctttctatgaaagctagttatttctgcataccttataattttaagatgataacttsgtggaatatgtctgtgattggacagttaaaattccatctagctttggatgtttcatttaatgtagagtttcctacacaagatgaatgagcactgtaacattgacacataatgcctttagggttatttcagcctaaacaaattagaattcttaatgtgatatttagcaattaaggatcattaagatgagtcagcttcctagaataagagacttttttgtctttatgtaaatcatgatctttgtctaaatatttacttgtgtagctgagactaaaatttaaatacagtctttttgaaattcttagtgcacccccattttccttgatcaataatctataacagctggtcagcctgagctgaacgaatacattcattccct

SEQ ID NO: 584851 - DNA, 540 bp, Homo sapiens
agaaaagtaataatgaatgggacaggaacataaccagagacagcaataattcagaaatcaaagaggaaaaattctacaaaataatttagcagttgtcttagtctggtagggctgtgtattagtccattctcatgatgaactacctgagactagttaaagaactctcataaacaattacctgagactaggtaatttataaaggaaagagttttaattggctcacagttcctcatggctggggaggtctcaggatacttacagtcatggtggaaggggaagcaaacaagtccttcttcacatgatggcaggaargagaagtgctgagcaaagagggaaaagccccttataaaagcaacagatctcgtgagaagtcactcactatcacgagaacagcagcatgggggtaactgcccccatgattcaataacctcccaccaggtcccttccatgacatgtggggattatgggaactaaaattcaaaatgagatttgggtggggacacaaacaaaccatatcaggctgccataaaaaaataccac

SEQ ID NO: 584852 - DNA, 542 bp, Homo sapiens
  misc_feature 470: n = A,T,C or G
gagggaaaagccccttataaaagcaacagatctcgtgagaagtcactcactatcacgagaacagcagcatgggggtaactgcccccatgattcaataacctcccaccaggtcccttccatgacatgtggggattatgggaactaaaattcaaaatgagatttgggtggggacacaaacaaaccatatcaggctgccataaraaaataccacagtctaggtggctcaaacaacagaacttcaatttctcgtattctgaggctggaatccaaggtcatgtgtcagcaggtttggtttctcctgaggcctttctccttggcttttggatggccgctgtctcactgtatcctcacatggccttttctctgtgtgcacacatttcttttatttcttccactttgtataaggacaccagttatgttgcataaagccccactcttatgatttcatttaacctttattacctcttaangggcctatctccaaaaactgtcacattgcaggcttagtactccaacatacaaatttggggggtgcaggcaca

SEQ ID NO: 584853 - DNA, 619 bp, Homo sapiens
gggaaatgcaaattaaaaccacaacgagataccatctcacaccagttagaatggcaatcattaaaaagtcaggaaaccacaggtactggagaggatgtggwgaaaagggaacacttttacactgttggtaggactgtaaactagtataacctctgtagataacagtatagagatttcttaaagaattaaaagtagaaatatcatttgacccaacaatcccactaccagtatctacccaaaagaaaagaagtcattacctaaagaaaagtaagtcaccgtatcaaaaagacatctacaagcatatgtttgtcacggcacacaattcacaatcacaaagatatgaaataaacttaagtgtccctcaaccaatgaatggataaagaacatgtggtatatatatatatataccatggaatactactcagccattaaacagaatgaaattatttgcagcaacttagatggagctggaggtcattattctaagtgaagtaactcaagaacagaaaaccaaataccatatgttctcacttataagtgagacctaagctgtggttatgtaagggcatacagagtggtgtaacgaactttggaggttcaaaaaggaggaggttgggag

SEQ ID NO: 584854 - DNA, 619 bp, Homo sapiens
gggaaatgcaaattaaaaccacaacgagataccatctcacaccagttagaatggcaatcattaaaaagtcaggaaaccacaggtactggagaggatgtggagaaaagggaacacttwtacactgttggtaggactgtaaactagtataacctctgtagataacagtatagagatttcttaaagaattaaaagtagaaatatcatttgacccaacaatcccactaccagtatctacccaaaagaaaagaagtcattacctaaagaaaagtaagtcaccgtatcaaaaagacatctacaagcatatgtttgtcacggcacacaattcacaatcacaaagatatgaaataaacttaagtgtccctcaaccaatgaatggataaagaacatgtggtatatatatatatataccatggaatactactcagccattaaacagaatgaaattatttgcagcaacttagatggagctggaggtcattattctaagtgaagtaactcaagaacagaaaaccaaataccatatgttctcacttataagtgagacctaagctgtggttatgtaagggcatacagagtggtgtaacgaactttggaggttcaaaaaggaggaggttgggag

SEQ ID NO: 584855 - DNA, 619 bp, Homo sapiens
gggaaatgcaaattaaaaccacaacgagataccatctcacaccagttagaatggcaatcattaaaaagtcaggaaaccacaggtactggagaggatgtggagaaaagggaacactttkacactgttggtaggactgtaaactagtataacctctgtagataacagtatagagatttcttaaagaattaaaagtagaaatatcatttgacccaacaatcccactaccagtatctacccaaaagaaaagaagtcattacctaaagaaaagtaagtcaccgtatcaaaaagacatctacaagcatatgtttgtcacggcacacaattcacaatcacaaagatatgaaataaacttaagtgtccctcaaccaatgaatggataaagaacatgtggtatatatatatatataccatggaatactactcagccattaaacagaatgaaattatttgcagcaacttagatggagctggaggtcattattctaagtgaagtaactcaagaacagaaaaccaaataccatatgttctcacttataagtgagacctaagctgtggttatgtaagggcatacagagtggtgtaacgaactttggaggttcaaaaaggaggaggttgggag

SEQ ID NO: 584856 - DNA, 619 bp, Homo sapiens
gggaaatgcaaattaaaaccacaacgagataccatctcacaccagttagaatggcaatcattaaaaagtcaggaaaccacaggtactggagaggatgtggagaaaagggaacacttttacactgttggtaggamtgtaaactagtataacctctgtagataacagtatagagatttcttaaagaattaaaagtagaaatatcatttgacccaacaatcccactaccagtatctacccaaaagaaaagaagtcattacctaaagaaaagtaagtcaccgtatcaaaaagacatctacaagcatatgtttgtcacggcacacaattcacaatcacaaagatatgaaataaacttaagtgtccctcaaccaatgaatggataaagaacatgtggtatatatatatatataccatggaatactactcagccattaaacagaatgaaattatttgcagcaacttagatggagctggaggtcattattctaagtgaagtaactcaagaacagaaaaccaaataccatatgttctcacttataagtgagacctaagctgtggttatgtaagggcatacagagtggtgtaacgaactttggaggttcaaaaaggaggaggttgggag

SEQ ID NO: 584857 - DNA, 622 bp, Homo sapiens
tgcctctgggaagcattgtcactgatggatgatgtcagcccaggacaaaaggcagagaaccacgaagggaggacagcccttcagtggctcaaggccctggagaagctggaagatgatgatgcaacttgatgggtcaggggcactgaatgtcccttattccagaaaattattctattgtcaaagatctctccacagcctggaataccagaaatgccactatttaactcattctttagaattaagcccacattttctctggaagaccatgcactatcaacagttaccttggagggctctgggctcaatgcctgttagtaccagagagtgtaaaagatctaagcagtagtcactgaagaacttggacatctgataattctttggtaggtgaagcaggagatgtgtgtctcaggctccctggggatgatgaatatagctccgggagagatgcggaggctcatgtaagtgtaccatctaaatccagtctggcatccacatcatactccgttttatgagaggcaagtcagtaaaattttgtttcctctgtgtatgtctgtctcataagagttcattaaacttcaaaggcagaagccatgcaattcayccattgcctcacccactggtg

SEQ ID NO: 584858 - DNA, 454 bp, Homo sapiens
tcttgtatgttcagaataatttcttataattaagggaagaaaattatgatgcccttagagcttcatgtgtgttggcttctgttcgtcctctgtttgatcatgtcccagtgggctggtggaaaggatctggtgaaagtgatttctttataaatttctcttttattattacattatctgggccctggtcaccaaatctccccagcatccttggcttaggtggaatattgttacactgagcagcttggatatycttgtagtgtggaaatgaaaaatgaataagaaaaatcagttgtgctttcattagaaaaatccttagatactacaatgtgcaagtcagaggattatgggaataagtgataccagaaaaaaacccaccttgctctctgttgagccaactcttgaagctttaaggactgaaatatttttctggtgtgcatagataaagacttaaagt

SEQ ID NO: 584859 - DNA, 579 bp, Homo sapiens
atattttcttagactttaaaagaggatgaagagttgtctagttgaagataaagtggggtgatgcctaatatattgctcaataaatatttttttaatgratttgtaaacaaaacttccagaaagaattatgggtattgattatatgctaatcatagtagtcagcatgtataagaaggtaaaaactacatatattttaggaccaggcagctcttattcattctggcagtgacatggaagtgagaaaggccagctgacctaaagagatcaaacttttgaccttgccctctttaatccaggaccctaaaccactgtggtaactagacaattgtgatatatgaatactttgaaaaccttaaaaatgaagaacattgagtctttcatgaaaatactcctgatcacagtgtttgcattacaaactgaaatccagtggaataaaccctggtgggcctatgtggtaaaactatcatatttttcctaatgactgtgcaaactcattataaaatcataattttgaggtttcatacccatcatgagtcaagataggttagttttggcaaaatacatcttcttggctttaga

SEQ ID NO: 584860 - DNA, 484 bp, Homo sapiens
gcagttctcctgggaacgttgcaagatttactgtgattagttaagcctcatagtcagaagcccaaaatatgacccacccagtttatttcataattattgcatctctagggctttattttttaaaaagctttttttcttatatgcactttctactgttttgttgttgttcatggtttaactacaaaaaaaaaaaaccttagagtaatcctttatattccatcgtttgcatattctgcatagtttccgtaaaatatatttcatctaaaagcacttgaaagaatataaaatatatttagtaatatataactaattatttgttagtcaacatttaacttcaatacacataacattatcacacagatttttctgacatacratcttggtgtaattgaagacatactagttatattatgtcacgataatgtcaacttgatttgaatatggtctagccttctaaatcatattttttttattgtggtaagta

SEQ ID NO: 584861 - DNA, 538 bp, Homo sapiens
ccttttaggagaaaatgcatggcagaaatatttgctctcttactttacctgggcaaaggacatgaagataatttttgttggaaggaggcgtacaagttggcattcaaggaaattaaagttaattctggcccttatcagttggtaagccttcaaatttattatttcagaggaaaaattgagtactggtcatcaaattttagttatgtctgggattaagacatttggcctgtggggcccaaatgcttttcaagagcttaggaagctacattttaaaaggaactgtataaactccaaaatatataaagataactataaaatcaaaaatcatatttaattatacgtcttttaaatttaacctatatcagctagttaattacaactcaattcaactttcagctgggtgcagtggctcatgcctgtaatcccagcactttgggagrccgaggtgggtgaatcacttgagcccaggagtttgcaccctgggcaacatggcaaaaccccatgtctactataaatacaaaaattcgcctggcatggt

SEQ ID NO: 584862 - DNA, 461 bp, Homo sapiens
tttgttttgttttgttttgagacaaggtctttctctgtcacccaggctggagtgcagtggcacaatctcatctcactgcagcctccagcctctgggctcaagtggtcctcccacctcagcctccgaagtagctgggtctacaggcatgtgccaccacaccacacctggctaatttttgtagagaccaggtttcaccatgttacccaggctggttttgaagtcttgaactcaggcgatccatccacctcggcctcccaaagtgctgggattacaggcatgaaccacagcacctggccatgtattttcatttaaccagtactaaataactacatgtctttggcagcctataatgtagcatcccatttttaaaaatagaagtgtgtattcagggtgcactcaataggattacatctggctggcagtcccttccyacttcagtccattatcctgctaccagaatg

SEQ ID NO: 584863 - DNA, 620 bp, Homo sapiens
aaattttaagattttaaataaaaaatttctttaaaattttggtattttgatagagattgcattgaatctgtagattgttttgggtagtatagatattttaacaatattacttttttcaatccatgaacatgaaatattttttgtttttttatgtcttcttcaattactttcatcaatgttgtatagttttcattgtagagattgtttagttctccagtcacatttattgctaaatattttttatatttgtaactattgtaaatgggattcctttcttgatttctttttcagattgttcactgtgggcatatagaaatgctactgatttgttgtatgttgattttatattctaattctttactgagttggtttatcagtactaacagtttttttggtggagtctttagattttttaaamtataagattgtatcatctgcaaacatagacagtttgacttcttccttcccaaattggatgccctttatttctttctcttgtttagttgctctggttaagactcctaggactatgttgaaaacaagtggtgaaagtgggcatccttgtcatgttccatatcttagtgaaagagctgtcagtttttccctgtttattatgatac

SEQ ID NO: 584864 - DNA, 481 bp, Homo sapiens
gtgcagtggtttatgcctataatccaagcaccacgcgaagctgaggcaggtggataacttgaggcttggagtgacaagcctggccaacatgtcaaaaccccatctctactaaaaatacaaaaattagccaggcatagtggcatgtgcctgtaatcccagctactcaggaggcagagacaggagaattgcttgaactcaggaggcagaggttgcagtgagccaagatcatgtcactgcactccagcctaggagaccgagtggaagtctgtatcaaaaaaaaaaaaaaaattactactaataaaaaaaaaggtaacccagctacctatatgttaaagaaacctgatgagggctgcttagcagatactctgactttacacaaaagtggttaggcgatgtcaaaccactttgctttcagaaagtattttattcaaagcctcacttcacrgaacctacccaaaaatcatctgaaagaaggaggccc

SEQ ID NO: 584865 - DNA, 469 bp, Homo sapiens
gactcacataatatggctgtttttcttgtctggtgcacaaccattgcttcctgacctttgtgttgagatgttatacattaaccagactcctatgctttattcaaacctagattaaatcttgttggagatagagactctttatctacctctttatatgaaatgttaagcaaccacttagagcgtaatcgatcataaccaatcagrtcttgtaactgtttgttagtcttgtgtggaaaatgtaattctgttcagcattcttgttttttcctatataaatgacccctacctttctctacactggggagcactcatcgccattctttggtatccctgttttcccatacagccaccctcacactttgcacttgaataagctatttttaaaattatttttatagattcagggagtacaagtgcagttttgttacatggatatattttcacagcagcttttagtgtagccatcacc

SEQ ID NO: 584866 - DNA, 603 bp, Homo sapiens
agttaagtaataccaaatattacgtggtaagtaaatgttagagccagaatttgaaaccaagtctgtctaccattaaaacccacatgattttcctgttacaggaaattgacctttatgagcagagtatattgcagctttccctaaagacattattattattattattatattatactttaarttctgaggtacatgtgcagaacgtgcaggtttgttacgtaagtatacatgtgccatggtggtttgttgcacccatcaacctgttatctacattaggtatttctcctaatgctatccctcccctagctccccacctcctgacaggtcctggtatgtgatgtttcccttcctgtgtccatgtgtactcatggttcaactcccacttataagtgaggacatgcagtgtttggttttctgttcctgtgttagtttgctgagaatgatggtttccagctgcaaccatgtctctgctaaggacatgaactcatccttttttatggctgcatagtatcccatggtatatatatgccacattttctttattcagtctatcattgatgggtatttgtgttggtttgaagtctttgctattgtgaacagtgc

SEQ ID NO: 584867 - DNA, 603 bp, Homo sapiens
agttaagtaataccaaatattacgtggtaagtaaatgttagagccagaatttgaaaccaagtctgtctaccattaaaacccacatgattttcctgttacaggaaattgacctttatgagcagagtatattgcagctttccctaaagacattattattattattattatattatactttaaattctgaggtacatgtgcagaacgtgcaggtttgttacgtaagtatacatgtgccatggtggtttgttgcacccatcaacctgttatctacattaggtatttctcctaatgctatccctcccctagctccccacctcctgacaggtcctggtatgtgatgtttccctycctgtgtccatgtgtactcatggttcaactcccacttataagtgaggacatgcagtgtttggttttctgttcctgtgttagtttgctgagaatgatggtttccagctgcaaccatgtctctgctaaggacatgaactcatccttttttatggctgcatagtatcccatggtatatatatgccacattttctttattcagtctatcattgatgggtatttgtgttggtttgaagtctttgctattgtgaacagtgc

SEQ ID NO: 584868 - DNA, 528 bp, Homo sapiens
ttaaatataccttaagtttcttctttaaaaaatacttactgaaagttgttcatatacagcctttaactagttaataaggttctcatttatgcctgattttgtgaaaagttgtattataaacagaaattacattttatttaataatttttctacttatattgagctaaacatatgatttgtttccttagtaaattactactgttacattgatagagcttctgatatgawatcctccttatgttactgaggtaaatcatacatgttcatcatgtttttttcttttctcaaataatattttagtgtgtgatctaatgattttcgtagaatttttacacacaaatttataaataaatttgttctataattttttatagacaatatttttatcaagtaaaaataattactgtttcatgagtatcaaagaatgattaaggcactttggccttttctattattctattatctaggacaacttgtatgaggaaaggagggtgattttttttttaaatatttgtttcgttttttttt

SEQ ID NO: 584869 - DNA, 412 bp, Homo sapiens
  misc_feature 405: n = A,T,C or G
ttataatcttcattacatctataattatccatctgtacattacatctaaatttacatcaccttttttattctatattttgctaattttcaactttttgttaccagtgttaccagatacctgtatatgttactcatctttccaaagaattcaaacttatttgtctgttgtcacgtatatggtgttattatttcttatttcttgaattttatattatctttattatttyattattcctcctttgtctgggatagcattatgttgttgctctttttatatttttacatatgcaaacaattatagcttccttatctcctataacttatctcaacttcatgggtgtccattcccttaactttttcccacacattagtggggttttgtaatttttattttaggttcatggngtacatg

SEQ ID NO: 584870 - DNA, 633 bp, Homo sapiens
tttatgtcagaggtgagtaaaatattgataacattttctatctataagatgtttaataatttataggttacttaggtatctgttatgtttcaaaaatctcatgccaatcctggttaattatggattttcaagaaatactttttgaatgaagaggaaggaggaagacgttgtatcttcagatgaacaaatagagtcctggagaggttgtgtggatcyctgggctagcaggggtcagagttggctcaccaacccaggtcttctcactgcttctttatattgtatctcagctgcttgaggcatacttgatgatccctcatgaaaatgaactcaatcatgcttgaagaaaagtatgctacacaatggaaagctaaatagtttctttaggcattgagataaatcatcatataacaacatgtaatctgctaaggctgggaggaaccttattttatggatgaggaaactgaggtccataggaaggaagagctacaagcaggaggttgcgtggtggctcaccagaagagctgtcaaggaaaccctggtctcaacccaaagacctccataaaggagacagctgaaacaagctagagtaagcccggtgcctgtcaccgtttgtaaccagagacaatgaccaca

SEQ ID NO: 584871 - DNA, 532 bp, Homo sapiens
ctgcttgtaactgtgtacagttatatgcattcacaaagagatggtctgaaattgaaacttatgtttaaaaggtaarcagagcatcaaagtttggaaaatttgcagcccaactatatggtagagaagaaaaaaacattttctggaagaaattaaagctgcttgcagaaatttgcataagtaaagaggagccaaatgttaatagccaagacaatggggaaaatgcccccagtgcatgtcacagaccttcgtgacagcccctcccatcccagtcctggaggcttaagaggaaaaaatggtttcataagccaggcccagggccctgctgctctttgcagccttgagacatggtgccctgtgtcccagctactcctgcttaagctgtggctaaaaggggccaggatacagcttgggccattgcttcagagggtgcaagccccccagaccttggtggtttctatgtggtgttgggcctgcaggcacacagaaggtaagagttgaggtttgggaacctccacttagatttcagaggatt

SEQ ID NO: 584872 - DNA, 569 bp, Homo sapiens
tttttctctctctgggaaaaggggcccttcttattccttttaccagacaaatttaggatttcccaattaggcttagggctggtgatgcaaacctggcttcaccctttctaaggcaaaaagtcaagttttgattttttcctgtttcttcatgagacactaaggtatgcaggagatggatgcaggagaactgggaaattacttcctcttctgagccttagattttctacctctgtaaaaatagtaggtaagaactaggtactcttccactttctaacataacattctatccttctatgaccagaggcctcagagcccagtgttktgacacagttgaactaatctcgtattgacagggagaagaattaaatgacccagtgaacctacctgcttatgccagcatggaagacttagcaagtacacaccagagaattttccttacaaacactgtttctcatacaggatagagatttgccctactcatggccaggacacagtgaagtctagtggaaaagcacagggcttgggattacaagacctggagtagagtattgccttggccaggtccaagc

SEQ ID NO: 584873 - DNA, 570 bp, Homo sapiens
tctgaatttgccacatctccaagcttttttggaattcccggcttgtgggctgggtattgasagagaggcagcacagtcagggtaggcaagggtagagcaaaaccatttaaaacacgctgggaagctcagaggcttggcaaggctgggaggtgtttagagtaaaaacatacagcaattatgaaccatatctactgtttcaggtatggatgttatctctgggtctcactcgccaggctatggcaaaaggccccacaaagctttcatctcccaagcatgtagaaaatccctgcctgtgttgttcttgggagggaaggtttggctaggagcaatttttcctgaaaaatcaaaacaactcctcctcagagtgggcccagcttccaggtgtagcctgggagctgggcatgcttccctgagcctgggtgtgagtgtgaaggcttctggagtcaagaggggcatctgaaggtcaaactccagggaatccaaacctctgagcctgatttacagcttgggccttaggtctcctcccactcagcccacaagaaccccccaatttccttctctgcgagccag

SEQ ID NO: 584874 - DNA, 229 bp, Homo sapiens
actcaggaaaaaagtattccaagtaacttttgagcctagtactcttastatacaccctcaatagtttctattcagtggataaaaagaactacaaggaaatctttatttagtagatttgttgttgataatggtattgggtattggtgtttgtcttagtctattcagttttgctataacaaagtaccatagactggctagctaataaacaatagagatgtatttctcacag

SEQ ID NO: 584875 - DNA, 555 bp, Homo sapiens
gaacgtgcaggtttgttacataggtatacacgtgtcatggtggtttgctgcaccyatcaacccatcatctacattaggtatttctcctaatgctatccctccccttacctccccaccccccaacaggccccagtgtgtgatgttcccctccctgggtccatgtgttctcattgttcaactcccacttatgagtattttttcttttgttcaaatttattgaggtttatcttggaaggtaatatatgctctatttttgtaaacattctataattgtttaaagataaattcttttctctgttttcagggactaaagtttgatatatacttaagagatcaaatgtattagccatattattcaaattatctagggccttatcagcaacttaatgatttattgaaagtcaattctacaaaactgaattaaaaccacaactggggagaggaaatttaaaagtaaaaaggccatagcagttagtgctaaattaaaaaaacttaaatatgctttcaaattatgtgtcttctgaattatgagctgtctaaagacctgtagtgtat

SEQ ID NO: 584876 - DNA, 555 bp, Homo sapiens
gaacgtgcaggtttgttacataggtatacacgtgtcatggtggtttgctgcacctatcaacccatcatctacattaggtatttctcctaatgctatccctccccttacctccccaccccccaacaggccccagtgtgtgatgttcccctccctgggtccatgtgttctcattgttcaactyccacttatgagtattttttcttttgttcaaatttattgaggtttatcttggaaggtaatatatgctctatttttgtaaacattctataattgtttaaagataaattcttttctctgttttcagggactaaagtttgatatatacttaagagatcaaatgtattagccatattattcaaattatctagggccttatcagcaacttaatgatttattgaaagtcaattctacaaaactgaattaaaaccacaactggggagaggaaatttaaaagtaaaaaggccatagcagttagtgctaaattaaaaaaacttaaatatgctttcaaattatgtgtcttctgaattatgagctgtctaaagacctgtagtgtat

SEQ ID NO: 584877 - DNA, 593 bp, Homo sapiens
tgataaacagaaatgtgaaagcatatataagcataaatgtcactggtaaaggtaaatatatagacacatacagattcatgtaayaccgtaatggtggtgtgtaaattaattacaaacatagaattttaaagataaaaagtgttaatggacacacagtatatattgaaaaaaacagtacaaaaatacaaattgtgttggtgggattaaaagtatagttagtgtttttgtatatgagcttaaattgtcatcagattaaaataaaagattgtaaccacaaaatattttatgtgagccttaagacaaccacaagaaaaataatcaggaggggccttgaaaatggctgactagaaggacctgtcagtcaccttttgtacaaagaaagctaaaaacaatgagtagataagcatatgtcaactaaagcatctaagagagaacaacagaattgatcaaggaagtgacaggcaaccactcagtaagggaaggagaagaaagcaaagcaggtggcctcatcaggattggctaaaagccaggagaaactccccactgtggggaaaacaccaatgagaaaactacagctgttcacatccccatcc

SEQ ID NO: 584878 - DNA, 593 bp, Homo sapiens
tgataaacagaaatgtgaaagcatatataagcataaatgtcactggtaaaggtaaatatatagacacatacagattcatgtaataccgtaatggtggtgtgtaaattaattacaaacatagaattttaaagataaaaagtgttaatggacacacagtatayattgaaaaaaacagtacaaaaatacaaattgtgttggtgggattaaaagtatagttagtgtttttgtatatgagcttaaattgtcatcagattaaaataaaagattgtaaccacaaaatattttatgtgagccttaagacaaccacaagaaaaataatcaggaggggccttgaaaatggctgactagaaggacctgtcagtcaccttttgtacaaagaaagctaaaaacaatgagtagataagcatatgtcaactaaagcatctaagagagaacaacagaattgatcaaggaagtgacaggcaaccactcagtaagggaaggagaagaaagcaaagcaggtggcctcatcaggattggctaaaagccaggagaaactccccactgtggggaaaacaccaatgagaaaactacagctgttcacatccccatcc

SEQ ID NO: 584879 - DNA, 585 bp, Homo sapiens
tcaggtgtgttgaggaccactcttcatgggtgctgatctagggcctgagaaattccagtactacccaccactgtcgctgctaccatccaagtatgtcatccagggccctaaggacaaacctactttgtccagtggtgtcataacctgcacatgccatccacgtgcctgaggatgggcccaactagcctaacagcacctgttcrcattttctaagggcctggggattgacctccccagccaccactgccagtgcaaacacttgccttcaggggcctgaagacaggcttacccagattgccaccaccaccacaactgcctgtttccacatgcaccatccaggggactaggaatcaactccctagcctgctgctgtggtacccatacacactaccaggaggcctgacaccaggttcaccccacccaccactggtgcccatacatgttattcagggatgtggggatttatctgccctacatgtcataacctgcctgtgcttgcacataccattgagaggcctcagaacaggccggattgcctgctgccacaagcacccatgcacaccattcaggggaaggggaattgac

SEQ ID NO: 584880 - DNA, 526 bp, Homo sapiens
ctttggcaagtgggaaagaaggcattgtaagagtacatgttcccttttctatatctgatttggctgtatgtaaagagaaatctggtcatttctctgaagatccaggaaaattcatggatgagtttgagaaattaactctgacctatagtttaacttggcaggtttgttgtctctgtgttgtacagtagaagagaaacaatgcattttgaggacagcaagaacccatgcagatgaggcattggcttgtaacccgaaccataatatatatcaggcaggaggtatagcagtttcagatcaagatccacagtggaactatcaaaggagcagtgagaactttgggaggaaagatcatatggtcacttgtttgttggaaggtacaaagaaatgtttgaaaaagacagctaactaygaaaaggttaaggaagttgctcagggcaaagatgagatctagctttgtttcaagggcgtttagtcgaggcaatcacaaaatgtactaacactgatcctgccttgagggaaaaacaat

SEQ ID NO: 584881 - DNA, 480 bp, Homo sapiens
aagcaggttatttgggcctgtaatatatgctcggaataacccaaataaccaatctttacctcctcctctagtaaggccagttcagcatgggggaacatagcctggtgaagattggcaaatagattatacttaggtgctcccatgtaaagggtttaaatatttactaatattcgttgacacctttatcgattggattgaggcttttcctaccctgtcggaaaaggcaattgaggtttctaaactactactaaaggaaataatccctagatttggcctgcctaagagtttacagagagataatggccatctttcacagtgacaattacccaaaacacatcttcagccctaggaattccacctggaggctacagtcttcaggcaaagtagaaagagctaatgaaacwctaaaaaggattcttgctaaactatgccaagagacctggagacctggctgtctttattacctgtagccttattatg

SEQ ID NO: 584882 - DNA, 590 bp, Homo sapiens
tgtttgagccacccagccctagcaaactgatacagatttcaatrcagaaagaactatgctgacaactgataaccaaaaattgagtaggggctatatttctttcttatttttcaagtctatttctgtctcttgaatcctctgtaattaaccttcaatatcttctggtacattacttagcaaatagtgtatttgtcactgtaaaaagaaaagagaaagaaataaaactaacttccacaatggcacaatctttctatttccaaatatatacctatgcagattgatttattttggatgtcccttccaaatctcatgttgagaggtaatcttcagtgctggaggaggggcctcatgggaggtgtttgggtcgtggggtggatccctcatggcttggctctcctcaaataaggagttctcccaagatctgtttttttaagtggtgtggcacctttccttgctgtctcttgctcctgctctggccatatgacctgctgctcccacttacccttctgccatgagtaaaagctctgtgaggccttccaagaagctgagcagatgctagcaccatgcttcctctatagcctgcagaacca

SEQ ID NO: 584883 - DNA, 518 bp, Homo sapiens
acagggataagagatttaacaaaagatgatggaagtgagatacaagattgtttctctaaaaataacacattataaactcattaaaaatgagaagttaaactgtataatcatagaggtattgatatatttagtgaatatctctcacttgtatgcaatgtagcctaggctatttttggggaagatttttgtccttccaaatacttgttaaaagagaaacatgaaaaaygatgcagcactaagacataaaggtaacaactttacaaagaaggatgaatcattgcacattcaacaatggatctcatcaaaattgttcttagcatcacatactttacattcaatggtcaatctatgtacaaactagtgactgagctatgggttccccatctcatttatcacagcagaactatatctttcgcatttcaagaaaattacagaaaataaaactgcaataaaaccaaaaagctggaaacagagatgacacccatgacaacatttaaaaaaggatactaaagatgtgc

SEQ ID NO: 584884 - DNA, 626 bp, Homo sapiens
gacagctacacagcaggagcaagtacaagcaaaccaaagcataccagaatcagaagagaaaactgttcttggtgtttctctatactctactaacaaaagaaaacacagtttcagcaacgaaggagaaatatttaaaaggtgcagctcgattttgcaaaaacagtgaatgaagagaggatttgaacctgagaggcaataaattgacaacttgcacatttcttttagtttggttcattactatcagtgtctccctcccttcttctactacccacaatctacggtgaagattatcttcccctccctcacctacagcaactagcacattttttttctataaagtgagatattatttgttattaaaataagattccatactcaacatagcactattagtgtaaaggctaaaagtatggagtctggagaccaactatgaacatgcaaatcttatccctgcctcattctacttataggactgtgggatagtaatctaaactatcattgtctcggtttcctcatttgcattttgaaaacaataattctacccttattgttttgtggtttatataaatggaaaacattagactagtgcctacarcataatatgtacaataattaccatcagttca

SEQ ID NO: 584885 - DNA, 590 bp, Homo sapiens
gcgatcatttagggtgggaccaaaattcaatgacagatgtcctcaaagtgaaaaagcagagtgagtattggagagagagagacagagggaaagacaatgagaagacagaggcaaagtttcaaattatatgtctatagccaagacatataattgcctgcacccaccagaagctaggagaagggtgtgaacagatttcattcatagtctccagaatgaactgccaacaccttgattttggaattttggcttttagaactgkgatggaataaatttgttttcctaagacaccaaatttgcatattttgttacagcagcccagggaatttaacacctcattcttcaagaataattttatatttgtaaaaagtaatagcatagaatctggagctgtactgcttggattccatttctaacttcaccgcttcctagatgtttggcttttttgtacctcagtttcacagtctgtaaaatgaggtctacaagtattagctacacattagactattgggaaaatcaaataagttactatttatagttggcatataataaaactatgctttatttaataaataaataaataaatggatagc

SEQ ID NO: 584886 - DNA, 590 bp, Homo sapiens
gcgatcatttagggtgggaccaaaattcaatgacagatgtcctcaaagtgaaaaagcagagtgagtattggagagagagagacagagggaaagacaatgagaagacagaggcaaagtttcaaattatatgtctatagccaagacatataattgcctgcacccaccagaagctaggagaagggtgtgaacagatttcattcatagtctccagaatgaactgccaacaccttgattttggaattttggcttttagaactgggatggaataaatttgttttcctaagacaccaaatttgcatattttgttacagcagcccagggaatttaacacctcattcttcaagaataattttatatttgtaaaaagtaatagcatagaatctggagctgtactgcttggattccatttctaacttcaccrcttcctagatgtttggcttttttgtacctcagtttcacagtctgtaaaatgaggtctacaagtattagctacacattagactattgggaaaatcaaataagttactatttatagttggcatataataaaactatgctttatttaataaataaataaataaatggatagc

SEQ ID NO: 584887 - DNA, 563 bp, Homo sapiens
ccttttgtgctttactccagaaaacttaatgttttataattcacatttgactgtaacatttatctgcagtactttttgtacatgatttgaggcaagagtcgagtctcatttcttatgaatagacatgcagcaaatatttgaaagattattcttttaaatctgtaattcagtgtcaatttagaaaacctcaaaacatcttgtttctacaaatagatggtaagcttgagaagagaatggaaatgttttattactttctactgagtatattattaacacttaatgattratgattgaaactgatcagagaagggtgatttagtacacactgtttattacattagtatccgttttttttttttttttctatttttgacacagggtgtcactctgttgcccaggctggagtacagtggcatattcacagctcactgaagcctcgacctcctaggctcaagggtcctcctatgtcagcctctcaagtagctgggactacagatatgcaccaccatgcctgtctaatttttaattttttgtggagatatagtctcactatgttgcccagg

SEQ ID NO: 584888 - DNA, 444 bp, Homo sapiens
ttttgctccacttagctctcacatttagtaagttttataggaaatcacacatagctttatgtacttttgctgtcttctttatgtaccttggctgtctcctacaatggtattttcatactctgtaaccagtctctgtaamcctcaatagactaagcatcacaagagcagtacctagaatacagtggctgcaaatacctatgagtgggaagaattaacaacaaacgtattaatttttccatctctgctcaatatttttatttgtttaagtagttaaaactcagctacataaagaataattttcaatatcacttaccaaccttttataatgaattgaagagaagagattttgttatttttcactcaatgtccaacttccctagatcataagctcacttgcatagtgttgcagacagaacaagggcctcacaaagatgcccatgtcct

SEQ ID NO: 584889 - DNA, 444 bp, Homo sapiens
ttttgctccacttagctctcacatttagtaagttttataggaaatcacacatagctttatgtacttttgctgtcttctttatgtaccttggctgtctcctacaatggtattttcatactctgtaaccagtctctgtaaccctcaatagactaagcatcacaagagcagtacctagaatacagtggctgcaaatacctatgagtgggaagaatkaacaacaaacgtattaatttttccatctctgctcaatatttttatttgtttaagtagttaaaactcagctacataaagaataattttcaatatcacttaccaaccttttataatgaattgaagagaagagattttgttatttttcactcaatgtccaacttccctagatcataagctcacttgcatagtgttgcagacagaacaagggcctcacaaagatgcccatgtcct

SEQ ID NO: 584890 - DNA, 585 bp, Homo sapiens
ggaatgatgattagaaataattttaggaaaaattgcagatgtaaacagaagtacctgatgagttgaaaagtgtagaatagaagctgtgtttctcgcagtttagtatggaccagaaacagctggtgggctgagccccacacccacattttggatgcaggagatctgtgatggagcctaaaagtgcatttccgmcaacttccaaaggcagctactgctgttgatctgtgctgatggtccacgcattgagtcatttggatcaataaatatcctgtacttttgattatccttgttttcctcatcaaataattttaatagcctgtctttttcatgttttcaaacatctcttatatggcttttacgtcctactcattttccaagtctttcaaaatattttcattttcgtataaattagttttatttcatattatatgtgaaatttttattgactttttaaattgaaaaattattcaaaattgcattacatttttaaaaagatctgcaagtcttcagtctgacttcataagtatagatgaatggagacatttggagggatgatgggcaaactaactttaaaataaaataatg

SEQ ID NO: 584891 - DNA, 585 bp, Homo sapiens
ggaatgatgattagaaataattttaggaaaaattgcagatgtaaacagaagtacctgatgagttgaaaagtgtagaatagaagctgtgtttctcgcagtttagtatggaccagaaacagctggtgggctgagccccacacccacattttggatgcaggagatctgtgatggagcctaaaagtgcatttccgccaacttccaaaggcagctactgctgttgatctgtgctgatggtccacgcattgagtcatttggatcaataaatatcytgtacttttgattatccttgttttcctcatcaaataattttaatagcctgtctttttcatgttttcaaacatctcttatatggcttttacgtcctactcattttccaagtctttcaaaatattttcattttcgtataaattagttttatttcatattatatgtgaaatttttattgactttttaaattgaaaaattattcaaaattgcattacatttttaaaaagatctgcaagtcttcagtctgacttcataagtatagatgaatggagacatttggagggatgatgggcaaactaactttaaaataaaataatg

SEQ ID NO: 584892 - DNA, 585 bp, Homo sapiens
ggaatgatgattagaaataattttaggaaaaattgcagatgtaaacagaagtacctgatgagttgaaaagtgtagaatagaagctgtgtttctcgcagtttagtatggaccagaaacagctggtgggctgagccccacacccacattttggatgcaggagatctgtgatggagcctaaaagtgcatttccgccaacttccaaaggcagctactgctgttgatctgtgctgatggtccacgcattgagtcatttggatcaataaatatcctgtacttttgattatccttgttttcctcatcaaataattttaatagcctgtctttttcatgttttcaaacatctcttatatggcttttacgtyctactcattttccaagtctttcaaaatattttcattttcgtataaattagttttatttcatattatatgtgaaatttttattgactttttaaattgaaaaattattcaaaattgcattacatttttaaaaagatctgcaagtcttcagtctgacttcataagtatagatgaatggagacatttggagggatgatgggcaaactaactttaaaataaaataatg

SEQ ID NO: 584893 - DNA, 643 bp, Homo sapiens
gctgtcatgttctgtcgactgatttatttgcatgtgtattcaacaagctatacacttaagacttgtgyagttatcggcatgtattttataacttaatttttaaaaagactttaaaaagtttaaagaactgtttcacatgtgttggctgaagggtgttttgcttatgattggatctttttgtgtatatttccttgaaacaatttctctattggcaaagtgatttgaaatagatactctgacagaaccatatcctgagattttttttttggaaacaagtagtttttaaaaagtgaaaatgtctattgcctttggacatgttcaacaataaatttctgttgagtgtttaacattttcatatacatgaatcttaaaaatccatcacatatatgtacctgagaagataatttatttgagcccctttatgttaaggaattaaataactctgttaatacatgcaatataagacagaacagtaagtaaaaaaaaaattaaagtttctgttaattaaacaatattttaccgttttatgaatagaaaaatcattgtgtttatattattttttatttcatttctttgcttttcttgcctataatccattccagaagcattgttttatagttagctgaattataaagaggtgaag

SEQ ID NO: 584894 - DNA, 618 bp, Homo sapiens
tatttgtaagatgcactaattattttcagtcctcagtttactattagaaaatcatctctttagtattctaaatgcagatgrtgtttggaaaatagtcatttacaatttcctgtctctctaaaacaaaacagatatgatgttttagtttgcttcagtgctgttcttaagtgtttccatagttgtgccttcttgtatattatggccttacacaagacagtaaatttataaaaatgcatttctgatatctatctttatgttgaattgacttttaaacgtctgaataattttttttctactatcagccatttcttgctgcataatagtttttatactataaaggtataacaaccagcttccctgtacttgtactttcaactggtgcattatgaccataggttacactcaacaaatgaccttagaattatttaatggttactcatgttattattaataaaaaacattgtataatgtcagcatctgtttcaatagtatccttggattatgtaatctgacctattgtctttagacacagatcctcactgaaagtgtaggcaccaagctttggaataacagggaaaggaagagactattcagagagaaatacaatgtaagagaatt

SEQ ID NO: 584895 - DNA, 618 bp, Homo sapiens
tatttgtaagatgcactaattattttcagtcctcagtttactattagaaaatcatctctttagtattctaaatgcagatggtgtttggaaaatagtcatttacaatttcctgtctctctaaaacaaaacagatatgatgttttagtttgcttcagtgctgttcttaagtgtttccatagttgtgccttcttgtatattatggccttacacaagacagtaaatttataaaaatgcatttctgatatctatctttatgttgaattgacttttaaacktctgaataattttttttctactatcagccatttcttgctgcataatagtttttatactataaaggtataacaaccagcttccctgtacttgtactttcaactggtgcattatgaccataggttacactcaacaaatgaccttagaattatttaatggttactcatgttattattaataaaaaacattgtataatgtcagcatctgtttcaatagtatccttggattatgtaatctgacctattgtctttagacacagatcctcactgaaagtgtaggcaccaagctttggaataacagggaaaggaagagactattcagagagaaatacaatgtaagagaatt

SEQ ID NO: 584896 - DNA, 616 bp, Homo sapiens
tgcttctacgtaagcaaaatttactgaaggtaaggagaaatgtggcatcagaggacaaactagacagtttacaaaagtgttaagagagtgagagggagaatgtcccagcaatactcatgaggtgatataaatataaatattaagcaggagagactttcaaagaagaagcctcatgttgttgcactcacagaccaagcctgctgatatgaagagttactgctaaggttttcaggttatatatttatttgttattgtaattagcattcttgttactacttcagtaaacttaaaaatatttcttaaatgtttatcactaccacttatatctggaggtagatttacaattcaaaaattaaacatttttttctatttttttctcagttttggaaaatatcttacataacatattttgcaaaggctatttaagggcttacataagagcaagcccttaaaattacagacacattacaagaaaagtcttatgctccgttttcattataatgaaattaatatagctcccttatacttcttgtacttcttaatagtgtatatatcaatgccatgataycatacttctgtagcaacatactgtattcatcatttctgagtgagcaga

SEQ ID NO: 584897 - DNA, 582 bp, Homo sapiens
cttaaatgtttatcactaccacttatatctggaggtagatttacaattcaaaaattaaacatttttttctatttttttctcagttttggaaaatatcttacataacatattttgcaaaggctatttaagggcttacataagagcaagcccttaaaattacagacacattacaagaaaagtcttatgctccgttttcattataatgaaattaatatagctcccttatacttcttgtacttcttaatagtgtatatatcaatgccatgataccatacttctgtagcaacatactgtattcatcatttctgagtgagcagaggctctattttcatgttcttttcattttgttyaatgtcagcgtttgggtatacagtggccctttctcaatctcattgtgtataaattcaatgaagtaaatcttattcacatgtgtggttaatacatatgccatcaagcaaactattctttactgaacatctagtataacttaaaaattatgtgagatatttaaaactgtattgttttgccaaatatctattgaattcctctttgttccaagcattttgcaggaaattgaggtaa

SEQ ID NO: 584898 - DNA, 612 bp, Homo sapiens
tctactcatctattcttattctgtctctttattttcctcttatgtatgtatgtatgtatgtatgtatgtatgtatctatctatctrtctgtctgtctgtctgtctgtctatcatctatctattcaatcttctcctttgctaccagatagcccagttttagcccaacattacaactttcagagctcttagaaattcccaggaaccctctctccagaatcttacctaacatctttgtaaacaatgtcaggaatgaggtgatagcttagtgtggttttgattttaatttcttcgatgattggtgatgttgagcacttttcatatacctgtttgccatttgcatgtcttttataggaaaaatgtctattctggttctttgccagttttaaatcagcttatttgatttttatattgagttgtgttagtttcttataaatattgcatattaacttcttatcagatggtttgcaaatgtcttctccaattccattgtttgcctttttgttttgtggtttcttttgttgtatacagcatttttagtttgatgtagccccattgtctattttggcttttgttgcatgtgcttttggtattatagccaagaaatcattgccc

SEQ ID NO: 584899 - DNA, 612 bp, Homo sapiens
tctactcatctattcttattctgtctctttattttcctcttatgtatgtatgtatgtatgtatgtatgtatgtatctatctatctatctgtctgtctgtctgtctgtctatcatctatctattcaatcttctcctttgctaccagatagcccagttttagcccaacattacaactttcagagctcttagaaattcccaggaaccctctctccagaatcttacytaacatctttgtaaacaatgtcaggaatgaggtgatagcttagtgtggttttgattttaatttcttcgatgattggtgatgttgagcacttttcatatacctgtttgccatttgcatgtcttttataggaaaaatgtctattctggttctttgccagttttaaatcagcttatttgatttttatattgagttgtgttagtttcttataaatattgcatattaacttcttatcagatggtttgcaaatgtcttctccaattccattgtttgcctttttgttttgtggtttcttttgttgtatacagcatttttagtttgatgtagccccattgtctattttggcttttgttgcatgtgcttttggtattatagccaagaaatcattgccc

SEQ ID NO: 584900 - DNA, 180 bp, Homo sapiens
ttttggcttttgttgcatgtgcttttggtatyatagccaagaaatcattgcccagttcaaagccaagaagatttttctttatattttcttctagtagttgtatggtttcaattcatagacttaagtatttaatccatctggggttaattttttatgttttgtgatatttccagtttttcc

SEQ ID NO: 584901 - DNA, 542 bp, Homo sapiens
gtctagttctgtcacccacgctgagtgcagtggcaccatctcggttcactgcaacctctgcctcctgggttcaagtgattctcctgcctcagcctcctgagtagctggattacaggtgcctaccaccatgcccagctaatttttgtatttttggtagagacggggtttcactgtgttggccaggctggtctcgaactcctgaccttgtgatctgcctgccttggcatcccaaagtgctgggattacaggcatgagccactgtgcccggcagcttttaaggctttctatgtactggcatacctttctttattgtatctcactttattgtgctttgctaatacygtgtagcttataacttgcaagtttgtagcagtcacttcatgtctctgtgtcacattttagtaattctcacaatgtttcaaaatgattagttgttactatacctgttttggtgatctgtaatcagtgatctttgacatcctgattgtaattgttttggggagccacagactatgcccatagatggcaaactaatttgataa

SEQ ID NO: 584902 - DNA, 613 bp, Homo sapiens
gggcttctaagtatccaagtgaaggaaagaatctgatgtttctcactttaaatcaaaagctagaaattattttaagtttagcaaaggaggcatatgttaaaggttgagatagactgaaagctaggacacttgatcaaatagttagccaagttgcgagagcaaagaaaagttcttgaaggaaatttaacatcaccatttcagtgaacaaatgaataaaaaagcaaaacagctttattgctatgatggaggaagtttgagtggtctggaaagatcaaaacgccccaagtttcccttaagccaaagtctgatccagagctagtccccgctctcttcaattctataaaagctgagagaggaaaggatgttgcagaagaaaaattggaagctagcagaggttagtttatgaggttcaagtaaagaagccacccccataacacaaaagtgcaaagtaaagcagccaagtgctgatataggagctgcaacaagttatccagaaaatctagctaagatcattaatgaaggtggctacaggaaacaacagattttcaatgtagcaagacagttttatattggaagaaggtggcacttwagacttttatagctaaagaggaga

SEQ ID NO: 584903 - DNA, 565 bp, Homo sapiens
ggtaaatggaatggatgatgtgagatatcgtctctttgctcttcagatctgctttctacacatttcttcatgctttatcccatggtaggctgatctacaggtactgatttaataggttcccttcttctgactttcagtttggatgccattggaaaaatgcagtaggagattacaggatagaaaagagtaaactcagattatttaacactctaatggtgaacactttatgatgatttttttttcaacagaaagccacttttaaattggggaaaattatctcttttgctgagtctagatttaggaatggaagagctttcctgcttcaaatttatgtttcctgcactatactgtaacaatatcctatatctttcttgtttctttataattagttgtaatttaaataaacccacctggtctttcccccaattttratatcctaaaataaatgatgcatttcttcttatgaccgtaaaaactaaattatccattcctcaatgccagaagtaaacaccaacctgaagatggtatgaatcctttccaaacatgttttatattttctctacct

SEQ ID NO: 584904 - DNA, 607 bp, Homo sapiens
ttacaggctcttaggcagaagggacttgccttgcctcagatgggggtttggctgtggactttagagttaatgctaaaatgagttaagactttgtgggactgttgggaaggcatgatttgtttcgaaatgtgaggacatgagatttgaaagggtccaggatggaatgatatgttttggctgtgtccccactcaaatcttaccttgaattgtaactcccacaattctcatgtgtaatgggaagaacccagtgggaggtaattgaatcatgggctgggtctttatcrtgctgttctcttgatagtgaataagtctcatgagatctgatggttttaaaaatgggagtttccctgcacaagttctctttcttgctgccaccatggaagaagtgcctttagccttcctctatgatggtgaggcctccccatccaggttaaacggtaagtccattaaaactctttcttttgtaaattgcccagtcttagatatgtctttatcagcaatgtgaaaatggactaatacaatgaccaacttggctttattccaggatgcaagactagttcaatattcaaaaatcaatcaatgaaattcaccatataatcagtttgaa

SEQ ID NO: 584905 - DNA, 571 bp, Homo sapiens
tattttcagaatagattatttctgaaaaagaagaaagtccttaagcattttcagcctacatgtcagtttcaaaaaaaaaagaattagaagaaaacacaaaagaaatcacccatagattaccttgaggcaatttataccagtcattcctcaagattcacaggggattggttccaagacaccgcctacctacatcacaaaattagaaaatgttcaggtcccatagttggcctaaggagggccaactgtacatggcaatcttcttttttcctgactctttttttgtgaatttatgtacttactaaatttaatttttaaccctcaaattaatatttgcagcacagtcatccaagggcatgtgcagactggtgagaaatatgagttacctgacttgtacatcaccagctgagatctaacaagacaacactttgcttcttgtttcagctatctatcatactataaataggtgtcctkttttgcaatatatttaatgtcaatatttttgcacttttatggcttttattagtgatttagacgtttataacagacccccaagcacagtgatgaagtgttg

SEQ ID NO: 584906 - DNA, 570 bp, Homo sapiens
aaaagaagcttgaggagtctttcctgaggatgtgaactgggctgaaacgtggagaaaggagtaaaaatggaagttcactaaaggaagagaagagaactccagacagaagcagagatgtggagaagcactgggtcaggggaaggggtgcatggtgaacatcaaaggctgaaaaaagaatgctgtggctggagttaaggtggcttggaggagcatggtacataaagggcctggagawgaacagagaaataaatttaagcttgtagggtcttcaggcaatttaaggaatgtatttatttcagaagccatggaaaggcttggaaggtttgaatgagaaagatggaattattagacttatgttttagatagatagcttatatcacagggtgaggaatggatgggataagtggcagtatagatacaggtcaatcagtttaaacgctattaacaatggttcagagaagaaacgatctattctgggatagagtgagtgctggagggagacgaaaagtggacaaatttgaaggatattcaaacacatgattacagtagctgctctgtaacacaattgtc

SEQ ID NO: 584907 - DNA, 649 bp, Homo sapiens
acttgaaaagaacacagatagagggtgaaatcaaataggtcataaaagagaaatattaggatatcttagaattcaaatgtcacacacttaagttttatactttcttttccaattgctgctttttctctttttctcactttgtagtttctgaatatgatgtttcctgtcctcaaccaaatttcaaaattggtgcaacaaattctatgaggcayatccccataaatgtaactaaaggaaagcaattgtgaattttagatactgttgcatagtattatggagaaaactgactagtttctcctcccaatttatactatcctcttactcactaacttctgttagttcaccttccataacgtgtatcacattttttttctgccattgttttatttgaaactctcaactgaattactaaaatggctcttttactagatttactacctcaaatctgtactttttcataagtatttttcttttttgaactagactttgcctccaaaaaggcaaatctcctcatgtaatccacagattatgttgtccaatgtctactcattgctccaagggaagataattttaggtcactgtatataagtttaacatttctgtatagatgcacaaaatctgtttgcttattaaactgatggatatttat

SEQ ID NO: 584908 - DNA, 649 bp, Homo sapiens
acttgaaaagaacacagatagagggtgaaatcaaataggtcataaaagagaaatattaggatatcttagaattcaaatgtcacacacttaagttttatactttcttttccaattgctgctttttctctttttctcactttgtagtttctgaatatgatgtttcctgtcctcaaccaaatttcaaaattggtgcaacaaattctatgaggcatatccccataaatgtaactaaaggaaagcaattgtgaattttagatactgttgcatagtattatggagaaaactgactagtttctcctcccaatttatactatcctcttactcactaacttctgttagttcaccttccataacgtgtatcacattttttttctgccattgttttatttgaaactctcaactgaattactaaaatggctcttttactagatttactacctcaaatctgtactttttcataagtatttttcttttttgaactagactttgcctccaaaaaggcaaatctcctcatgtaatccacagattatgttgyccaatgtctactcattgctccaagggaagataattttaggtcactgtatataagtttaacatttctgtatagatgcacaaaatctgtttgcttattaaactgatggatatttat

SEQ ID NO: 584909 - DNA, 615 bp, Homo sapiens
agatcttcagacctgagtctcagcttccttcttcatccaggctgtgactgagatggtcacatgtggccttttcagcaggatcattttgactcatgctacartggtccccgttaaggatgctagctttcaactcagttactttttgtttccctctatgacactaatacattgcaaagattcctaggtctggcagggagattttatttataatccagctgccagagccagaggaatactcacatagtaagtaaggcaaaccgaatttgttactcacagaggggcaggaagaatcggcaaaagcctaagttctatggcaagcctgacccttgaaaatatggaaagaaaatttcctgaggtcaggaaagttgcccagggtgaatggagtctcctctgcacatgtccgactttgcactgcagctgaagaacccctagatgttgcatcctaggtcttataccccacatgcaatttggctctctgagtttaagagttgcaggaacgtcctgttctgggagcaacgaagacaaagcccagactgttccagacaggtcctccttatctcaagatattgcattcttggaacattctaaaattgttctgagaactgtgattaggag

SEQ ID NO: 584910 - DNA, 597 bp, Homo sapiens
atggatgttaaatggataacgaaagaatactatcaataactatgcacacaaatttgataacctagataaaatggatcaatttcttgacatttgggaaaaggcaaaattatggagactgaaaaaagatcagtggaggaggaatagatgaataaataggaggaggacaatattttgtaggcsatgtacatactcaatatgacaatataatggggatatatatcattatacatttttcaaacccatagaaatacaacaacaaaatggatcctaatataaactgtgaactttgggtgataatgctgtgtcagtgcatgtttattaattgtaagaaaaataccactttggtggaagatgtttataattggtgaggctatacatgtgtaagggcagtgggtatatggaaaatctctgtatcttcctctcaattttaaagagaagtataacttctctttaaaaagtctttaaaagccaattgaggcatttaaattaagttttaaaaaaattcaggcaagaataaacaagtggaaaaataagaaggaacatacaggaagcaaataaaatgtcagacaaattctaccatatacaatttacattaaa

SEQ ID NO: 584911 - DNA, 570 bp, Homo sapiens
gtgtggtgggacttgaatgctatcaggaatcaaacattaaacaacaatgacattcttctggttttgttttgtttttaatattctattttttttgaagtaagaccgcttaacataaaatgtatcgttttaatagattttttttttaaagacagagtcttgctctgttgcccaggctggaatgcagtggtgcaatcttggcccactgcagcctccacctcccagattcaagtgagtctccttcctcagcctcctaagtaactgggactacaggcatgcaccaccatacccrgatacgttttttttttttttttttggtagagttgaggcttcaccacgttggccaggctggtctcaaacccctgacctcaagtgatccacccacctcagcctccaaagtgctgggattacatgcataagctaccatgccaggccttttaatatatttttaagtgtacaatataatattgataactttaggtacaatgttgtgcagcagatttctaaaacttaattatcttgaatgatataaaactttatacctattgattagcaactctccattaccttctt

SEQ ID NO: 584912 - DNA, 570 bp, Homo sapiens
gtgtggtgggacttgaatgctatcaggaatcaaacattaaacaacaatgacattcttctggttttgttttgtttttaatattctattttttttgaagtaagaccgcttaacataaaatgtatcgttttaatagattttttttttaaagacagagtcttgctctgttgcccaggctggaatgcagtggtgcaatcttggcccactgcagcctccacctcccagattcaagtgagtctccttcctcagcctcctaagtaactgggactacaggcatgcaccaccatacccggatacgttttttttttttttttttggtagagttgaggcttcaccaygttggccaggctggtctcaaacccctgacctcaagtgatccacccacctcagcctccaaagtgctgggattacatgcataagctaccatgccaggccttttaatatatttttaagtgtacaatataatattgataactttaggtacaatgttgtgcagcagatttctaaaacttaattatcttgaatgatataaaactttatacctattgattagcaactctccattaccttctt

SEQ ID NO: 584913 - DNA, 570 bp, Homo sapiens
gtgtggtgggacttgaatgctatcaggaatcaaacattaaacaacaatgacattcttctggttttgttttgtttttaatattctattttttttgaagtaagaccgcttaacataaaatgtatcgttttaatagattttttttttaaagacagagtcttgctctgttgcccaggctggaatgcagtggtgcaatcttggcccactgcagcctccacctcccagattcaagtgagtctccttcctcagcctcctaagtaactgggactacaggcatgcaccaccatacccggatacgttttttttttttttttttggtagagttgaggcttcaccacgttggccaggctggtctcaaacycctgacctcaagtgatccacccacctcagcctccaaagtgctgggattacatgcataagctaccatgccaggccttttaatatatttttaagtgtacaatataatattgataactttaggtacaatgttgtgcagcagatttctaaaacttaattatcttgaatgatataaaactttatacctattgattagcaactctccattaccttctt

SEQ ID NO: 584914 - DNA, 573 bp, Homo sapiens
tttttcttcttcttactagttgaatggataaaaaatttatatatayatagagagagagagagttaaaatcatgtaatatatattacatatgaaagtatataaatgtattatatattatatatgttatatgtactaataatataaataaaatgtatgtaatataatatatacttccttttataaaaagtattatataatacatattacatataatagtatattatatatatactgtatgtactcctatattatatatactaatactatattacatgtaataatatattacatataattatttatattatacataacatatattatatattatatataaaatgttatttatatgtgtatgttacataatacataatttatgtgtattatgacatatataatacatataattatttataattttaaatatataattattataaatatgtaattataattaaagacatataattatttataattttatttatcccttcatccattcatggaaaattaggttgcttttacatcaggcccattgcaaatgctacaatgaatgtgggtgtgttaatacct

SEQ ID NO: 584915 - DNA, 573 bp, Homo sapiens
tttttcttcttcttactagttgaatggataaaaaatttatatatacatagagagagagagagttaaaatcatgtaatatatattacatatgaaagtatataaatgtattatatattatatatgttatatrtactaataatataaataaaatgtatgtaatataatatatacttccttttataaaaagtattatataatacatattacatataatagtatattatatatatactgtatgtactcctatattatatatactaatactatattacatgtaataatatattacatataattatttatattatacataacatatattatatattatatataaaatgttatttatatgtgtatgttacataatacataatttatgtgtattatgacatatataatacatataattatttataattttaaatatataattattataaatatgtaattataattaaagacatataattatttataattttatttatcccttcatccattcatggaaaattaggttgcttttacatcaggcccattgcaaatgctacaatgaatgtgggtgtgttaatacct

SEQ ID NO: 584916 - DNA, 677 bp, Homo sapiens
aagtgaaatgatggccaaaggatataaagcctcaattaaacagaaataatattttaaaaattactttgagatacattgcatggtgtgtttttggtttttgtttgtttgtttgttgagacagagtctcactctgtcacccaagctggagtgcagtggcacaatctcagctcactgtaacctccacctcccgggttcaagtgattctcctgcctcagcctcccaagaggctgggactacaggcacccactaccatgctgaactaatttttgtatttttagtagagacagggttttgccatgctggccaggctggtctcaaaatgctagcttcaagtaatccacctgtctcagcctcccgaaatgctgggattacaggtatgagacactgttcctggcagtgtgttgaacatagcaaatagtaacttaatatttaccatattcataaagtgaattttatttcaaaatcactaattcacatagtgaattttaaatgttctcaccacaaaaaaataagcaattgaggtgatgggtatgttaactagcttgatttaattattctacattgtattcataaatcctaacaacaataattctttactagatagcgtgacttattctaaaactaygataattaaactatgataattcttatattgatgcagatagacaaataaatta

SEQ ID NO: 584917 - DNA, 610 bp, Homo sapiens
actgaaaagtgacacagccattgtagaaattgatttggcattttcttataaagttaaatgtacacatatcatattacccagcaatctcactactagggctctatcttagagaaatgaaaagtgattttaaataaaaacctgcacaagagtgtttatcaaatttctatttataatttccctaagctgaaacaaccaaaatgccctttagcaaatgaattaatgaaaaaattctggtacatctaggaaataggatactactcagagaatgaaaatgaacgaatttatggttcacacaataacttggatgaatttcaggtgcattawgttaagtgaataaaaccagtcttcaaaggttccatgctatgtgactcaatatgcgtgacattttctaagagactgaactataaagatggagatcagatcatttactgccatggactggggctaggcagatggtgtgcctatagaagagtagcatgaggactttcttcggctgaaaaaattgttctgtgtcctgattatgttgatgggtacacaaatctattcatgtaacaaagttcatatgaccgcatgtcaaaataagacagtaaattctactattagttaatca

SEQ ID NO: 584918 - DNA, 522 bp, Homo sapiens
attaatgtgcaagtattagtgtgaatgtatattttcatttttcttgtgtatataactaggagtgaattgctgggtcatagggcaactatatttaactttctttggaatttccaggctgtttttcaaagtgaatgcaccatttaacattccagtaagcaaaacatgagggtttcaatttcttcatattcttgtcagcacttgttattatctgtgttttcctatatagccaatctagtgggtaagaagtagtacctcacagtaaatttttcttytccctaatgacttgttgagcatcttttcatgtgcttattaggcatttgtatattttctttggttaagtatttattgaaattattttttcatttaaaaaagatcagtttgtgttctaagtgtttattacatcttttagatagaagtcctttaacagatatgttatttgcaaatatattctctcagattgtaacttttcatatcgtcttttgaagcatgcaagttttatatttcagaatttaattaattaat

SEQ ID NO: 584919 - DNA, 436 bp, Homo sapiens
gttaactcatcataatactactagtttgactcttcaggcttcattaaattggggacataaatatgccagatcaaccaaatgaaattggaatgctcctatttcggggtttagagtaggctgaatgagtttgctaccttttttacatytctagttaggtactgtacttgcctaccttgtgattgcatggccatttcagcaaggattaagattaatggatatcgttaattctcaactttatgccatgactctcctgaggctcctataaaatagacatgctccaaagaatcttcttcacctattcctcatatttttttttacttgtacacctaatgcaagcccaaaatgtgtcttgtggctgttccaacttacagcacttcagagctaaactgtggtaacactgtgggtgtattagaacactacctgagactgggtaatt

SEQ ID NO: 584920 - DNA, 436 bp, Homo sapiens
gttaactcatcataatactactagtttgactcttcaggcttcattaaattggggacataaatatgccagatcaaccaaatgaaattggaatgctcctatttcggggtttagagtaggctgaatgagtttgctaccttttttacatctctagttaggtactgtacttgcctaccttgtgattgcatggccatttcagcaaggattaagattaatggatatcgttaattctcaactttatgccatgactctcctgaggctcctataaaatagacatgctccaaagaatcttcttcacctattcctcatayttttttttacttgtacacctaatgcaagcccaaaatgtgtcttgtggctgttccaacttacagcacttcagagctaaactgtggtaacactgtgggtgtattagaacactacctgagactgggtaatt

SEQ ID NO: 584921 - DNA, 601 bp, Homo sapiens
gcaaaattaccaaagttacttagataagaaatactgagagaaggcctgttttggaaagaaagatgatgaattcagtctagatatatgaagttgagatacatttgaaatgccaacaatgagatrgaatacatactgaatgtaaggcctgaagctcagccgagagttctagagagatggaccaacaacaggtcaataaacgaaacttagggccaagagaagaatccagtatttccacctcatggcaggaattacatagtccttaccaaattgatatgtaacacagagaaaatttaattggtttctagactgtgcttatactatagtgattcttaataattatacccaaacttctgttaaagccttgaaaaaacctttagaaaatgaaggagaaataacaaattccataagtaaagagacaaaaaaaaaaaaaaaaaaggaaagtggctaggatccataggattcaacacaaaaatatatactgaaaattcagaggtaaaaggaatgtagtgagatgtaaccatggaaatttaagattctagttacccttaaaaatcttttgagagaaggtggacaatgaatttcatgtaagttacaggattaa

SEQ ID NO: 584922 - DNA, 470 bp, Homo sapiens
tcatccagctttttattttcagattacatagggatatgcaaactaaagctcagaaaaatttaaaaacgtgctcatgattaaaagytggtaagtgacacagttgtatcactcaaagtgaaaaatggtacactagctaaagcagtgtctgtagtaagagttggcaaactttttctctaaaaggccaaatggtaaaattctaatctatgtgggtaatgtggtctgtctcaactactcaactctgccattacagtacaaaagaagctacagacaatacataaataggtgtggctttgttaccataaaacaatatttatgaatactggtagcagttccaatctgatccatgaaccaaattttgtcaaattctggtctagagcatttgagagataaaagggataaagcatctataagaaccatggaactggtaactttgataagcaccatggattcacttcagagagaaaatgact

SEQ ID NO: 584923 - DNA, 572 bp, Homo sapiens
ctaaataaaattcactcaaaagaagacatagatggcaaacagatatatgaaaaggtctttgaaatcactaatcatcagggaaatgcatatatcacctcacacctgtaagaatggctattttaaaaaagtgactatgaatgtggacagaattgtggaaaactgagaactcttgtacatttttgggtgaaaatgtaaaatgatgcaagctctaggaccaacaatatagaggttccacaaaagttaaggatagaattatcatttgatctggcaatcccatttcttaatatatatccaaagggaataaacttargatctgcattctcttattgcagcattaattacaatattcaggctatggaaacaacagaggaatcatatcaagttggaggactagaaggtttcaatgctcatcccattcctcctttatacacacagataaaactaagaaaaactaaataccatgaaaaataactcttggaaagctcaagagtttggtaaagaacctgcagctatccagatgagcaaaagctgaggatgactgcatagaaaagcatagaagtgtcttgcctcat

SEQ ID NO: 584924 - DNA, 637 bp, Homo sapiens
tattttaaaaaagtgactatgaatgtggacagaattgtggaaaactgagaactcttgtacatttttgggtgaaaatgtaaaatgatgcaagctctaggaccaacaatatagaggttccacaaaagttaaggatagaattatcatttgatctggcaatcccatttcttaatatatatccaaagggaataaacttaggatctgcattctcttattgcagcattaattacaatattcaggctatggaaacaacagaggaatcatatcaagttggaggactagaaggtttcaatgctcatcccattcctcctttatacacacagataaaactaagaaaaactaaataccatgaaaaataactcttggaaagctcaagagtttggtaaagaacctgcagctatccagatgagcaaaagctgaggatgactgcatagaaaagcatagaagtgtcttgcctcatcccctactctggcataactttgcctcaagagggatctccttggcaaaattttcccccgccaagaaaaaaaaggacaatcaaaggacctcagtagccctcaccrataccacagaaatcctcaactttttcaagcaaggatacttgtagtctctgctgatgctgatcccagttgatagaatt

SEQ ID NO: 584925 - DNA, 611 bp, Homo sapiens
tgtagtaggcgtattgatattgccaaggacttttccaaaatggtactatgaaatacactctcgacagcagcgtttaggaattcttgttgtttcatatcattgtcagcacttgatattatcagtcgttttacattttagtattctaatgaacgtgttttgttatcatattggggtttttgttttctttgtactgatgtgctctcattcttcataatgactacatggttgtccaaataagaatctctcatgtttcatttaaccaatcatctgttgatgggtcatgaggctgtttttaacttttttctcttacagactatctttttttttgtacatgtattgttatgaaagcccagaactcgaaacactggttcaaaagttatgcttatgttaaaatttgacagctrtagttttcccaaagaaattgtagccattgatacatctatcaccagtttatgaaaattcccttccccacaccctagacaaaacaatattatgaagtttttaaaatttacatcaatctaatcaatgaaaagtgatagcttatagaggttttattttgcccttttttttttaactgaatgaggtggaatgacttttcatgtttaaaagcc

SEQ ID NO: 584926 - DNA, 479 bp, Homo sapiens
ttaaccgtgccttccaaaatattttgcagaagaaaactgtgatggtagattggaattttaagattagaaaagtctctaatatcctataacataattagttaggatggataaatcaaaaccaaaaccaaaagcaaaaagaacatgaagaaaaatcaaagcaatctgacaggtttaagcrtctatttacttatctccaccttgaagaataaataccagggttttgtgtctaaagttccacttaaaggaaattatgaaggatggcccttcaggagggtttgggacagataaatctggggggaaaaggtgggtcgaagaactttgaaatcaaggtgtcttgggcctgggcatggtggctcacacctgtaatcccagcactctgggagaccggggtagatggatcatctgagcccaggagttcatgatcagcctgaccaacatagtgaaatcccatctctactaaaaatatacaaaaaattagt

SEQ ID NO: 584927 - DNA, 525 bp, Homo sapiens
gtgtgtaaaaactataaaggaaagttttctatggtggaatatgctggcccttgtgtgcaaatgagtacacacacacacacacacacacacacacactctcgggtcatactggttttccaggtcatgaaaatcttagcattagcattcctatcttgcacattctaggtactcaatgagcagaaatcatatcccattggtgcttaaaatcctccagtggctcctcaccaaatcccgagcactacttgccatatcattcattatcaggatcattctgactgctccaatcaccccaagcaccgtgtttctgcctgcactttgctctgtgtcaagaagctcctttcaatcctccaggcaggccaccctctctacctcctctgccattacctttctcaataccaaagcctgtctaggatacttttagctttcaaaatgccactctgctattacctcctctataaaatctcaccaaagtgaacatgtcttacttttgtttgccaagyactccttttccttcttatttttggg

SEQ ID NO: 584928 - DNA, 464 bp, Homo sapiens
cacgtggaagagaaagagaccaccgtctctcctgtcttttcttacaaaggcacttatctcatagatgagggctctaccctcaacctaactacctcccaaagatcccacctcctataccatcatattggggatttgagcttcaacatgtaaatttggaggggggacatgaaaatttagtccacaggacacattttttccagtaaagccttcaaaataatttaaaccttgtaggaacccctgagctgaatgatccagctaagccacacctgaattcttgacccacagaagcttcacagtaagaaaggtatatatatagccacatgatttgttttgttatkttgtgtttttaattttttaaaacaatttgtgggtacatagtaggtatacgtatttatggggtacatgagatgttttgatacagacatgcaatgtcaaataatcgcatcatgaaaaatggggccaca

SEQ ID NO: 584929 - DNA, 502 bp, Homo sapiens
tactatttccttagccaaattatgctactactaatctataaattttaatgaatagtaccaaaatattttagagttagaaggaatattgaggactacctgcattacattctaatctacaaatgagaaaacaggccaaggtcatgtgtccaacgttatactgagcacaaatagttgaaacaggactrcaaattacagattccttttatcccccagtattcttgcaatcacacaaaaaatttaacagactttttttttttttttttttttgagatggatctcgctctgttgcccaggcttgtgtgcgggggcacgatcttggctcactgcaacttccgcctcccaggttcaagcaattctcctgcctcagcctcccgagtagctgggactacaggtgcatgctgccacagccagctaattttttgtactttagtagagacgggatttcaccttgttgccaaggctggtttcaaactcctgagctcaggcaatccgcctgccttgg

SEQ ID NO: 584930 - DNA, 502 bp, Homo sapiens
tactatttccttagccaaattatgctactactaatctataaattttaatgaatagtaccaaaatattttagagttagaaggaatattgaggactacctgcattacattctaatctacaaatgagaaaacaggccaaggtcatgtgtccaacgttatactgagcacaaatagttgaaacaggactgcaaattacagattccttttatcccccagtattcttgcaatcacacaaaaaatttaacagactttttttttttttttttttttgagatggatctcgctctgttgcccargcttgtgtgcgggggcacgatcttggctcactgcaacttccgcctcccaggttcaagcaattctcctgcctcagcctcccgagtagctgggactacaggtgcatgctgccacagccagctaattttttgtactttagtagagacgggatttcaccttgttgccaaggctggtttcaaactcctgagctcaggcaatccgcctgccttgg

SEQ ID NO: 584931 - DNA, 502 bp, Homo sapiens
tactatttccttagccaaattatgctactactaatctataaattttaatgaatagtaccaaaatattttagagttagaaggaatattgaggactacctgcattacattctaatctacaaatgagaaaacaggccaaggtcatgtgtccaacgttatactgagcacaaatagttgaaacaggactgcaaattacagattccttttatcccccagtattcttgcaatcacacaaaaaatttaacagactttttttttttttttttttttgagatggatctcgctctgttgcccaggcttgtgtgcgggggcacgatcttggctcactgcaacttccgcctcccargttcaagcaattctcctgcctcagcctcccgagtagctgggactacaggtgcatgctgccacagccagctaattttttgtactttagtagagacgggatttcaccttgttgccaaggctggtttcaaactcctgagctcaggcaatccgcctgccttgg

SEQ ID NO: 584932 - DNA, 555 bp, Homo sapiens
cccagtgaccagggctgacaacttgccccagaccaccagcctccccactgagaaagcaagaggactcacagttcttcagcatctcagggagcctacagtggcaatccagtttcttcaaagcatctgtggattctctcagctttcctggtatgttcctgcagtagttcttagatgttgatgatgtraatctccacacgctgctctctctgtccaagcaggagctgcaagctagttctgtctcctatccaccgtcttctctgggacttcaatttttaatgaacaagacatgagttgcttctctgtcagtccaatcaatttggttatcgtatctttaatcaaattgctaaccctatctatttttttttttttccaaacagctaactactactagcactaaaatagttgggggaaactcatgacataaaattaaattaataaaaagtatgacatttaagttttaaaaactaatgactgccttatgcataatcacaaagggcctcctggcaagtatactatacagaggattccagatatgcatagtccctgcccagccct

SEQ ID NO: 584933 - DNA, 538 bp, Homo sapiens
atttttatagaggtaatcaagttaaaatgaggttgttagcttaggccttactccaatatggccgtagtccttataaacagagaaaatttggacacgaatatgcacagagggaagatgtgaagatacggggagaatgccatgtgaacatgaaggcaaccatctacaaaccaagaagagaggcccagaacagaactttccttcacatctctcggaaggaacccaccttgccaacaccttgatttctgacttctagcctccagaactcagagaaaagtttctgctgtttaagccacctagtttgtggtactttgttacagcaatcttagcaaactggtatgatcattataagagatagtgtctctttctgcaggttacaaaaattcatccccccaaaaagaaacaatttgaagagtcaagtcacttaaactgctgtgttatttcaggaaagccacataaatgatcagagtcccattttctttgcctcatgccttccatgatgcctcaamtacctccagtttggttatgagatttttgagga

SEQ ID NO: 584934 - DNA, 545 bp, Homo sapiens
agatacataaataagatagataagaaatagataaaacagatagatacaaaagatatatatagtatagattagatagaagatagaaagatgatagatagatagatagatagatagatagatagattagataatagatagatatgaaagatgatagattagatagatggatagatggatggatagatgatagataggtaggcagataaatggatagatagataagwaagatgattgatcgatggatagattagatagacagattagatagacagatggatgaatggacagattgataagaaagaaagatgatataaaaacagataagaaagatgatagattagatatatggatagatgatagataggtagaagaatgggtagatagataggtggatggctgaatgcatagatagatatgcagacatgatagataagaaagatgatagatacatagctaagaaaatagatagatagataatagatagatgatagatagatagataatagaaagatagataaacaaattttaaggaattggcttatgtg

SEQ ID NO: 584935 - DNA, 578 bp, Homo sapiens
ttacattaggtatatctcctaatactgtccctccccccaagaaaatcttaaaggcaatcagagagaagaattagattatctaacaatgaagcacagttagactgatggtaattttctcatgagccacaatgaagtcagagatagtaataacaacagctaacacttaaatggtactatgtcccaagcrtaatgcaaagtacttcatgcatattaactaatttaatcttcacaacaattctgtgagatgggattcttattatcccctttttacagttgaggaaactgagccaaaaggaagtttaatggttcttgtccaaggtcttgcatctagtaagtagagaagctgggactcaaactgagctgatctggctccaaatgctcatacttactgctctgtaatgcttctcactgtagagaaatatgttcaaagtaatgagggaaaataaatgacaacctaagattttatttccagctaaattaagaaatgttttggtgcacgaaaattaaaagacatatattacccatagacattcattttaaaaattattaatgtatgtatttccacaagaagaaaaatt

SEQ ID NO: 584936 - DNA, 471 bp, Homo sapiens
tatgaggtgttttatatatgtraggttatatacataaactatatataaagcatatatagatataaaacctatatataaaaccctatatataaatatatataaaacctcatatatgtaggttatatatatatttgtatgtgtttgtgtgtgtatatatacacacgtgtatattatataaaatataatatgtatgtatattatgtattatatataatatgttatgtattatatattatatacacacgtgtatatatatacacactcaaacacacatggaaggctatttaaccacaaaaaaaagaataatgttggatcatttgcagcaacatggatggaactagaggacattatgtcaagtgaaataagccaggcacagaaaggcaaatgctgcatattcttactagtatgtgggagctaaaaatttaatctcattgccatagagagtgccaactcatggagttagttaccaaa

SEQ ID NO: 584937 - DNA, 471 bp, Homo sapiens
tatgaggtgttttatatatgtgaggttatatacataaactatatataaagcatatatagatataaaacctatatrtaaaaccctatatataaatatatataaaacctcatatatgtaggttatatatatatttgtatgtgtttgtgtgtgtatatatacacacgtgtatattatataaaatataatatgtatgtatattatgtattatatataatatgttatgtattatatattatatacacacgtgtatatatatacacactcaaacacacatggaaggctatttaaccacaaaaaaaagaataatgttggatcatttgcagcaacatggatggaactagaggacattatgtcaagtgaaataagccaggcacagaaaggcaaatgctgcatattcttactagtatgtgggagctaaaaatttaatctcattgccatagagagtgccaactcatggagttagttaccaaa

SEQ ID NO: 584938 - DNA, 471 bp, Homo sapiens
tatgaggtgttttatatatgtgaggttatatacataaactatatataaagcatatatagatataaaacctatatataaaaccctatatataaatatatataaaacctcatatatgtaggttatatatatatttgtatgtgtttgtgtgtgtatatatacacacgtgtatattatataaaatataatatgtatgtatattatgtattatatataatatgttatgtattatatattatatacacacgtgtatatatatacacactcaaacacacatggaaggctatttaaccacaaaaaaaakaataatgttggatcatttgcagcaacatggatggaactagaggacattatgtcaagtgaaataagccaggcacagaaaggcaaatgctgcatattcttactagtatgtgggagctaaaaatttaatctcattgccatagagagtgccaactcatggagttagttaccaaa

SEQ ID NO: 584939 - DNA, 604 bp, Homo sapiens
aaatgctcgatgtgttgggtttcctaattaccctgacctgatcattacacattctacgcatgtaaaaaaatgttatataatcccaataaatatgtacaaatcttttgtatcaatgaaacgttcaagaataaaaaaagtagcagtagtgtaggatgaagtatagagttctaatatacagcatgatgactatagttaataatcctgtatttgaaactggaaaattactataggaataatgagacatatctggacaacatagtgaggamctatttctacaagaagaaacaacaacaacaacaacaacaaacaacaaaatgtatctagtcatggtgttgtgtgcctgtagtcctagctacctgagaggctgagctgtgaggatcacttgagctcatgagtttgaggtaagctatgattgtgacactgcactccaacctgatgacagagtgagagcctgtttttaactaaaaaagaaaaaaaaagaaagaaagaaagataaagaaaagttattcaatatttttacccatcagggaaatgaaaatcaaaaccacagagagataacagtttacacctactaggatggctataattttaaaattacagctga

SEQ ID NO: 584940 - DNA, 597 bp, Homo sapiens
tatcagttgatactcttggttaatcaatagttttatcaatgaagtatatacttttggctttctatcgatgtcaccccggttatttgttaattacacattgaagtcagctgcacatctaccttggaagacatttacgtaraaagcttgtaatagtttcattaacaatgtctgcttttcttatccccacaccaacatcatactggctgacatagtataaagaacaggtgtttcttatttatcttcaccaaagatggctttgtcctgtggataaaagtagaataaacatatttgagaagccttactgaggaaaaggccatgtgaaaccctgacacagactaaactttcctccacattagaggagaaattctgagaggaaattcttgggactaccactttcagaacaaagctgaaattatccgactattttgggaaacttttggtgatttccttggacatttaattttatttattttttttttgcattaccaaaatcttaatgtttcctatagatctcctggttttcctttatatttcatatggaaagaactgttagcacttgcatagccatcctattcccaacatttaaacatctgtctg

SEQ ID NO: 584941 - DNA, 634 bp, Homo sapiens
attttctggatatctttctattttttattgatagtataattccattgtattcagaaaatacagtttggttattttcaattctttcaaatttgttgacatttgtttgatggcccagaaaatgttctatattagcaaatatttgaaaagcatttttttctatgtgcattttgtttttgtttgttagatttatagatgtcatttaggttaacttatgtttatcaggtattctaaatttttactgtttgtctacttggtctgtagatttcagagagaataatagaaatamgtccaactatagctataattgcggttttggaaaatttctctttcagttctatcacgttttgcttcatgtctttgaaagctttgttagaattattttatctttttcataaactgactaatttctggtaatatttcttattctgaattctactttttatatatttgtatagccactccaattctcttggcttcatatttgcatattatattttccacattattacttttaacatttccatacatttatgtttaaattgggtttcaatattaacaacaaatagatgtggtttattatatcaaattctacataaatagcattaattgagtctttaccttgtttatatgtaac

SEQ ID NO: 584942 - DNA, 634 bp, Homo sapiens
attttctggatatctttctattttttattgatagtataattccattgtattcagaaaatacagtttggttattttcaattctttcaaatttgttgacatttgtttgatggcccagaaaatgttctatattagcaaatatttgaaaagcatttttttctatgtgcattttgtttttgtttgttagatttatagatgtcatttaggttaacttatgtttatcaggtattctaaatttttactgtttgtctacttggtctgtagatttcagagagaataatagaaataagtccaactatagctataattgcggttttggaaaatttctctttcagttctatcacgttttgcttcatgtctttgaaagctttgttagaattattttatctttttcataaactgactaatttctggtaatatttcttattctgaattctactttttatatatttgtatagccactccaattctcttggcttcatatttgcatattatattttccacattattacttttaacatttccatacatttatgtttawattgggtttcaatattaacaacaaatagatgtggtttattatatcaaattctacataaatagcattaattgagtctttaccttgtttatatgtaac

SEQ ID NO: 584943 - DNA, 562 bp, Homo sapiens
tgttttctgcatgtaatattttgatgccttcaaggttttctctttaccattgtatttatcasttggcataggccgtattatggttgtgttgttcttatatgtttttgtgtttttcttcttcggggttctctaaagttattgcattttattttaaagtcctttactattttcgaaaattcttaaccattatcttttccttttttttcgcttttgcacttctctctcatcattcagagatttcacttaaacttgtgtctttctgtttgatttttttatatccttagaacgctataatttttataaatcttgttttttgtgttttgctttttatatattttcctcacctttaatgaattatttctaccaaattgcctgtacttaagttcactgattatttcctcagctgtgtttgcaattatataaaaaattacctgagcggttcagttgaaagtataattcttttctacaacccaaccttcctcatttgtgataaagttctaccagtttgaaatttaattttgttaacagagagataatacaagtaaacaagtaacaataatag

SEQ ID NO: 584944 - DNA, 562 bp, Homo sapiens
tgttttctgcatgtaatattttgatgccttcaaggttttctctttaccattgtatttatcagttggcataggccgtattatggttgtgttgttcttatatgtttttgtgtttttcttcttcggggttctctaaagttattgcattttattttaaagtcctttactattttcgaaaattcttaaccattatcttttccttttttttcgcttttgcacttctctctcatcattcagagatttcacttaaacttgtgtctttctgtttgrtttttttatatccttagaacgctataatttttataaatcttgttttttgtgttttgctttttatatattttcctcacctttaatgaattatttctaccaaattgcctgtacttaagttcactgattatttcctcagctgtgtttgcaattatataaaaaattacctgagcggttcagttgaaagtataattcttttctacaacccaaccttcctcatttgtgataaagttctaccagtttgaaatttaattttgttaacagagagataatacaagtaaacaagtaacaataatag

SEQ ID NO: 584945 - DNA, 562 bp, Homo sapiens
tgttttctgcatgtaatattttgatgccttcaaggttttctctttaccattgtatttatcagttggcataggccgtattatggttgtgttgttcttatatgtttttgtgtttttcttcttcggggttctctaaagttattgcattttattttaaagtcctttactattttcgaaaattcttaaccattatcttttccttttttttcgcttttgcacttctctctcatcattcagagatttcacttaaacttgtgtctttctgtttgatttttttatatccttagaaygctataatttttataaatcttgttttttgtgttttgctttttatatattttcctcacctttaatgaattatttctaccaaattgcctgtacttaagttcactgattatttcctcagctgtgtttgcaattatataaaaaattacctgagcggttcagttgaaagtataattcttttctacaacccaaccttcctcatttgtgataaagttctaccagtttgaaatttaattttgttaacagagagataatacaagtaaacaagtaacaataatag

SEQ ID NO: 584946 - DNA, 562 bp, Homo sapiens
tgttttctgcatgtaatattttgatgccttcaaggttttctctttaccattgtatttatcagttggcataggccgtattatggttgtgttgttcttatatgtttttgtgtttttcttcttcggggttctctaaagttattgcattttattttaaagtcctttactattttcgaaaattcttaaccattatcttttccttttttttcgcttttgcacttctctctcatcattcagagatttcacttaaacttgtgtctttctgtttgatttttttatatccttagaacgctrtaatttttataaatcttgttttttgtgttttgctttttatatattttcctcacctttaatgaattatttctaccaaattgcctgtacttaagttcactgattatttcctcagctgtgtttgcaattatataaaaaattacctgagcggttcagttgaaagtataattcttttctacaacccaaccttcctcatttgtgataaagttctaccagtttgaaatttaattttgttaacagagagataatacaagtaaacaagtaacaataatag

SEQ ID NO: 584947 - DNA, 574 bp, Homo sapiens
tattatgttatctgacacgtttatttagagccaatttttaaacatttattcaacttctacagatgtaaaagttcagtttaaaaatcagaaattgctctgaaatccttattgtcaagcacattgaaaaatatgtcattactcatttaaaatgctgtagaattcttttcaaaaaagttttccagattttaattgactaattgtaattatatatatttactgggtacagtgtgattttattttacatatctatattgcataatgctccattcagggttgtttgtgtatccatcacctcaattatttattattttttgtggtgagaatatctaaaagtctcccttttagctattttgtactacacactattcaactgttaactatagtygtagcacagtgaaatagaacaccagaatttatttcccctgtgtaattgtaactttctagcctctgaccagactcttcctatcctcccttctccccttccttcccatcctcctttctccccttccttccctagtttctggtactcactgttctaatatctactgttatcgatatcaacttttttttttct

SEQ ID NO: 584948 - DNA, 636 bp, Homo sapiens
agtgagttttgtgagtctttctactgaattactgaaactaagggttttcttgaagacccatacacttcttattggattcasaagtgatggtagcctttgggaccaacaaactgcacttgtcagaagtgaaggtggtcttgtggggactgtttcctaattttgcacactcacacagagctcatcctactggaggggccttagcaaaatgttcatatgcttacaggtttttgtacaatctataaaaataatatatttttactaaaattgattaaaacttctttattttctaaatcaccttcacctctatggtgctctttatagaaatgtccttaggaaagtttggagtcagttcaggtaaatttgaatgtcaggatgtctatctctctacacacacacacactctcacacacacacacactttatacatatacctctgtatatttatccataaatgtacatatgtatttactatgttttaatatattttgtagtatttctatgaaaacctttctatgctaaacctcctgggcttaaatctctctcataatacctcataacacctagtgtgttgtttcatttggtgttattttatttgtgtgtagcatcaaaggttgtagcacagtatacatgtgctgt

SEQ ID NO: 584949 - DNA, 636 bp, Homo sapiens
agtgagttttgtgagtctttctactgaattactgaaactaagggttttcttgaagacccatacacttcttattggattcacaagtgatggtagcctttgggaccaacaaactkcacttgtcagaagtgaaggtggtcttgtggggactgtttcctaattttgcacactcacacagagctcatcctactggaggggccttagcaaaatgttcatatgcttacaggtttttgtacaatctataaaaataatatatttttactaaaattgattaaaacttctttattttctaaatcaccttcacctctatggtgctctttatagaaatgtccttaggaaagtttggagtcagttcaggtaaatttgaatgtcaggatgtctatctctctacacacacacacactctcacacacacacacactttatacatatacctctgtatatttatccataaatgtacatatgtatttactatgttttaatatattttgtagtatttctatgaaaacctttctatgctaaacctcctgggcttaaatctctctcataatacctcataacacctagtgtgttgtttcatttggtgttattttatttgtgtgtagcatcaaaggttgtagcacagtatacatgtgctgt

SEQ ID NO: 584950 - DNA, 606 bp, Homo sapiens
catatggtacacacatatatatatgccgtatggtacttagcactggaaatacggaaatgatagagaaaaaacttgatacaaagtgtttkgttatgagaaagcggtatgtggaaaattctcccaatcttcagtctttttttgtttgtttgtttgagacggagtctggctctgttccccaggctggagcgcagtggtgcaatctcggctaaccacagcctccgcctcctgggttcaaacgattctcctgtctcagcctcctgaatagctgggactacaggtgcataccaccatgtccagctaatttttgtatttttagtagagacgaggtttcaccatgttggccaggctggtctcgaattcctgaccttgtgatcaacctgcctcggcctcccaaagtgttggtattacaggtgtgagccacagcacctggccatattcacttctaatcaatgtttagccagaattgaaaccaaaacagaaaaatctaaattatgcagtgtatataattataaatataaatagtatatattttgttcttttttgctaggaaattaaaaaaaaaactttatcagaattcctgtgtgtttaaggcacagaacttttaga

SEQ ID NO: 584951 - DNA, 623 bp, Homo sapiens
atctctactgatggaagatctagtcttgacaaaatttgggcccattctagacattcactctattctctcctacttatactgaccgtgacatgaagctcttaaggtgctaatgatctaatattaggtataactcttaacatayactactagaatgtagtaattttgttgatagcaattacctattactctaactatgaagatacatctctcatacagggatgaggatttgctgtactggcatataacagctgcctaataaatatatggtgaattagccaaggttagcagttcttttgctgatttctttcacacagttctctgtgaatgtaattataagaatgcaatagcttccagtaaaaaatgttgaggcaaataatggtaaaaattcttcaaaatctaactatatgcgggactaacttcgaatttatgttctctggattttaatactagaccctgtgcatacttcccgtgaaattctgggtaagttatttaatcattgtacttaatatgtaaaactgggataataaaagcacctagtctgtggggtgattttcagctttaaatgaagcaatgaatgtgacaatttacattcacatagctaaataacttgctgacattttatg

SEQ ID NO: 584952 - DNA, 623 bp, Homo sapiens
atctctactgatggaagatctagtcttgacaaaatttgggcccattctagacattcactctattctctcctacttatactgaccgtgacatgaagctcttaaggtgctaatgatctaatattaggtataactcttaacatacactactagaatgtagtaattttgttgatagcaattacctattactctaactatgaagatacatctctcatacagggatgaggatttgctgtactggcatataacagctgcctaataaatatatggtraattagccaaggttagcagttcttttgctgatttctttcacacagttctctgtgaatgtaattataagaatgcaatagcttccagtaaaaaatgttgaggcaaataatggtaaaaattcttcaaaatctaactatatgcgggactaacttcgaatttatgttctctggattttaatactagaccctgtgcatacttcccgtgaaattctgggtaagttatttaatcattgtacttaatatgtaaaactgggataataaaagcacctagtctgtggggtgattttcagctttaaatgaagcaatgaatgtgacaatttacattcacatagctaaataacttgctgacattttatg

SEQ ID NO: 584953 - DNA, 623 bp, Homo sapiens
atctctactgatggaagatctagtcttgacaaaatttgggcccattctagacattcactctattctctcctacttatactgaccgtgacatgaagctcttaaggtgctaatgatctaatattaggtataactcttaacatacactactagaatgtagtaattttgttgatagcaattacctattactctaactatgaagatacatctctcatacagggatgaggatttgctgtactggcatataacagctgcctaataaatatatggtgaattagccaaggttagcagttcttttgctgatttctttcacacagttctctgtgaatgtaattataagaatgcaatagcttccagtaaaaaatgttgaggcaaataatggtaaaaattcttcaaaatctaactatatgcgggactaacttcgaatttatgttctctggattttaatactagaccctrtgcatacttcccgtgaaattctgggtaagttatttaatcattgtacttaatatgtaaaactgggataataaaagcacctagtctgtggggtgattttcagctttaaatgaagcaatgaatgtgacaatttacattcacatagctaaataacttgctgacattttatg

SEQ ID NO: 584954 - DNA, 552 bp, Homo sapiens
tgtaaactgaggataatagtgatatacattgcctaggaatgtgtgagtataaaacttacaatgtttgtgacatttggatcgaactgtatgatacttggtacattaatgataattattcactttctcaaaacttcagggattttaaatacatatacatacaaacacatatgctatttgtaatacaaaataatcttgtgaaaatgagttaatctatttaatgtggagatcagattttggcaacctatagtttatggaccaaatccagcctgttatctgttttgtaaataaaaatttattggagcacaatcctactctttgatttattaattgtccagggaagttttcacactacagcagcagaactgaggagttgtgccaaagatcatgtggccacaaattgtgacacttactctatggaacctaaggtctttgctacacacacacacacaggcacacagactcacacacgtttgtcaccaactcctggtmtagaatatagcttatattcagtatcaaattgccagtctcccttatcagcctaataagtatttt

SEQ ID NO: 584955 - DNA, 552 bp, Homo sapiens
tgtaaactgaggataatagtgatatacattgcctaggaatgtgtgagtataaaacttacaatgtttgtgacatttggatcgaactgtatgatacttggtacattaatgataattattcactttctcaaaacttcagggattttaaatacatatacatacaaacacatatgctatttgtaatacaaaataatcttgtgaaaatgagttaatctatttaatgtggagatcagattttggcaacctatagtttatggaccaaatccagcctgttatctgttttgtaaataaaaatttattggagcacaatcctactctttgatttattaattgtccagggaagttttcacactacagcagcagaactgaggagttgtgccaaagatcatgtggccacaaattgtgacacttactctatggaacctaaggtctttgctacacacacacacacaggcacacagactcacacacgtttgtcaccaactcctggtatagaatatagcttatattcagtaycaaattgccagtctcccttatcagcctaataagtatttt

SEQ ID NO: 584956 - DNA, 361 bp, Homo sapiens
agcacaatcctactctttgatttattaattgtccagggaagttttcacactacagcagcagaactgaggagttgtgccaaagatcatgtggccacaaattgtgacacttactctatggaacctaaggtctttgctacacacacacacacaggcacacagactcacacacgtttgtcaccaactcctggtatagaatatagcttatattcagtatcaaattgccagtctcccttatcagcctaataagtattttaatttgtagttataaaatgaattgtatttttgttatttatatrtatgtatagatttacagtgttcttatactggaaaataaaattatctcacttaaaagttagaaata

SEQ ID NO: 584957 - DNA, 574 bp, Homo sapiens
acacaagcaaacattgagagggttcttcaccactagatagtttctaccagaaattctcaaaggagatctaaacataaaaatgaaagatcaatagttgtcatcataaaaacatgatagtacaaagttcacaggtcttaaaacaatttcataaaagatgaagataattataatgtcaacatgacagaactccgccaaactatgcagataaacagaaaaatttwaaaaaatacatgaaataattaatgtaatgacaggaacaagacttcccatatcaagattgcatagcatcttaaagggaaaacaactaactcgttgactaagttaccttgaataattgggatgtgaatctaaagtactttctgtactttcaaagttatgttgcatagtcattctttcctgtccacaatgacatttcaaggagagcttatcacctttgagttgatttccatttctaaaaatttagttgggcaaagattgaattttaaactcagttcaaaatatttttctctccattaaatggctcaaaaccttagaatcgggaggaatcagttccagttctttcacagcccctcct

SEQ ID NO: 584958 - DNA, 574 bp, Homo sapiens
acacaagcaaacattgagagggttcttcaccactagatagtttctaccagaaattctcaaaggagatctaaacataaaaatgaaagatcaatagttgtcatcataaaaacatgatagtacaaagttcacaggtcttaaaacaatttcataaaagatgaagataattataatgtcaacatgacagaactccgccaaactatgcagataaacagaaaaattttaaaaaatacatgaaataattaatgtaatgacaggaacaagacttcccatatcaagattgcatagcatcttaaagggaaaacaactaactcgttgactaagttaccttgaataattgggatgtgaatctaaagtactttctgtactttcaaagttatgttgcatagtcmttctttcctgtccacaatgacatttcaaggagagcttatcacctttgagttgatttccatttctaaaaatttagttgggcaaagattgaattttaaactcagttcaaaatatttttctctccattaaatggctcaaaaccttagaatcgggaggaatcagttccagttctttcacagcccctcct

SEQ ID NO: 584959 - DNA, 551 bp, Homo sapiens
gtggggggtgatagagaaaacgtaatgtgagatacaggttatgtattggcttatttgttcaggattctgttagttttatctcggtagttaagtaccaacttcatctaattgagccaacttataaggaaagctgttcttcatatacagatgtataaatgccacacttctgagcaagctgtattgaggagagtggttgaacatattctggattgtaaagcatgtttacttaaaagaaatccttacaattacctgtgttatttatacttatttatataagttgcttaactgttatacaccattgtacctttcaatttaatgcacatctttggagaaaatagacatgatatatagaatacatccattcaaatttaaattaatattaatgaaattaataatatttttcaaaatgaaggtgttcatgtatatgtcagagcatttttttgctagagtacataattttatagtcacattttatcattctgaayataaacatgattaaatctataacttaataaagattggtttaatagagtgcacttctagagcttcaa

SEQ ID NO: 584960 - DNA, 515 bp, Homo sapiens
gttgagttaatttttgtacatggygaaaggtaggtatttagtttcattattctgcacgtggctactcagttatccacacatcatttattgaatagcaagtttctccccctttaattggttttgttggctttgtcaaagattctatggttgtaggtgtacagcgttatttctgggtttcccattgtgttccattggtccatgtatctgtttttgtaccagtatgatggtgtttttgtttactatatcctttcagtacactttgaggtcagataatgtgatgcctctggctttgttcttattgcttagtatgaatttgactatcctgactctttttcaacttcatattttaaaatagtttgttgtaattctgtgaaaaataatcttggtagtttgacagaaatagcgttggttgctttgggcaatatggccattttagcaatattgattcttctattccatgagcatggactgtttttcagttgattgacatcgtctctgatttctttcagcaatgc

SEQ ID NO: 584961 - DNA, 632 bp, Homo sapiens
agaattttcatgctttatagctccttctatctctatattattggcaagttttgagttgatcctcttacaaagtcaatattctgtctaaartctgtaatctgaataaaacttagttgataatgttactgaatgccatagtaaactccacctgcaataattaataaaaacatactgtttgaagtaacatgcaaaagtttctgaacatgtagtatgttttactttttctaccttgaataaaatacattaattgaacatcaaatcagcataatttatagaaaaaaatcaaccaacatgaatagtgaatcaaataaatagattaccccaataggaaatatgatttgttttatttttaaaaataaatttgttttttcttgtatcagtcacattcatgcttcatagatattcctggttcatgaaataattactcaattcacctttaatggatgagataatctgaatgtatacttgttgttattgctcatgcatattgtagcttgactgaacctcgttcatataaaataatgtataattaaaagataaaatgacacctttgtccaataaaataatatagaaagtagaaatgtgatttttaaaaaacattatttcagaaagaaaaaaaattgcgacaagta

SEQ ID NO: 584962 - DNA, 632 bp, Homo sapiens
agaattttcatgctttatagctccttctatctctatattattggcaagttttgagttgatcctcttacaaagtcaatattctgtctaaagtctgtaatctgaataaaacttagttgataatgttactgaatgccatagtaaactccacctgcaataattaataaaaacatactgtttgaagtaacatgcaaaagtttctgaacatgtagtatgttttactttttctaccttgaataaaatacattaattgaacatcaaatcagcataatttatagaaaaaaatcaaccaacatgaatagtgaatcaaataaatagattaccccaataggaaatatgatttgttttatttttaaaaataaatttgttttttcttgtatcagtcacattcatgcttcatagatattcctggttcatgaaataattactcaattcacctttaatggatgagataatctgaatgtatacttgttgttattgctcatgcatattgtagcttgactgaacctcgttcatataaaataatgtatrattaaaagataaaatgacacctttgtccaataaaataatatagaaagtagaaatgtgatttttaaaaaacattatttcagaaagaaaaaaaattgcgacaagta

SEQ ID NO: 584963 - DNA, 584 bp, Homo sapiens
aaaacaagcatatttggatctcacacttgaacatgtaccttggagttgccttttaaaaattcaagtagatttgcctagtacatagttagataaatgagactggattcaggcaaagtctcaaggctgaatatagattttcagaatcatgaaaataagatggaattatatttctagtcatgtaactgaatgaaatcacctaaggtatcagtgtagattaacaagttgttcaaggaataaactctgaaacacttcaacatgagaacatgaaagataaaatgagactatgaagaaaagaccaaaaagtttaaggaaaaacaagtgaatttgttgtcctaaaacctttaacataattaaatattatgtataactacatttcaaattgttaaacatattttttgctataaatttattgtaattaaaaaattattacagtaaaatgtacataatataaatttaccatcttaaccattttaactatacagttcagtagtattaaatatagatatactggrtgcaatcatcattaccatttatgtccataacaattttcatcttgtaaaaatgaaataataactactcactcc

SEQ ID NO: 584964 - DNA, 570 bp, Homo sapiens
atggctttataagcctatggcatttctccagcttgcacttgtctctcctgccaccatgtgaagaaggtccttgctttcctgtggccttccatcatgactgtaattttcttgaggcctccccagctatgtggaattgtgagcccattatacctctttcctttgtaaactacccagtcggccaggcgcggtggctcacgcctgtaatcctagcactttgggaggcccaggcgggtggatcacgaggtcaggggttygagaccagccttgccaacatggtgaaaccccatctctactaaaaatacaaaaaattagatggatgcggtggtgcccacctgtaatcccagctactcaggaggctaaggcaggagaattgcttgaacccaggaagcggaggttgcagtgagccgagatcacatcattgcactccagcctgggcgacagagcaagaacccatctcgagaaaaataaatacataaataataaataaataaattacccagtcaaaggtagtattttcataacagtgtcagagcagaatgatacaaccacttctcttcaacatagtactag

SEQ ID NO: 584965 - DNA, 558 bp, Homo sapiens
accgaagggaagagtgggaaggggatgagggataaaaaactaaatattggatatagtataccctgcttggctgacasgtgcaccaaaatctcagaaatcactaataaagaacttatccacgtaactgaaaaccacattttcctcaaaaactattgagataaaatatttaaaagggaaaatttttgaccgaaaacaaaacaaacagaacaaaacaaaacctcttggactgtaaggtttctgctgagaaaaattatcttagtctaatagaaatttcctgtgtgtgatgtttttcttttgctgtttttagaattatttctttgcctttaacttttgatagtttgagaattattactatattattctgagttaaatttatgaattttcctttactggtgaattttatgctttcacatgtttctatgttagttattatcatccttttgtttcagttgtagcactctcaagcattcttcctaaggctggtctagtgagtgatgaattccctcagctactgcttgtctggaaagatcttcatttatctcccatttctgaagtata

SEQ ID NO: 584966 - DNA, 631 bp, Homo sapiens
tggccaagagggttccattcagtcaaatgggagccttagaattttatttttggtttacaacactaatacccatttaagtttgcaaatatcaattaaaggcaaatttagcactttatttggatcattgtccccaaatgtactattttattgcattgctattgttaagagttggtagtttaaattatttgcgttttaattatctgtwatattgcctgcaaatgtaaaatcagtcattgttaaaacaattgacaaaacatctgaaataaaatagcactccagtaaatcaaatcacaaatgaatcactagtaataattaattagtggttatttaagtgaattgactaatttagaagtcaatgaaaagagaaattttacttaataacattgaaaaattgtagctgatttctatttattatgtagctcccattctgtttcatatatgtcagattttaagctcattagtaaaagaccacattcttctctttctcctctttatcacattcctcctcttcccctccctcctgtactgattttcctcttcatccttctttcatcattcacagagcctgaccaagtctattttgttaaataagggaattgctggctaaaactctgcagaaatgaaggctacc

SEQ ID NO: 584967 - DNA, 631 bp, Homo sapiens
tggccaagagggttccattcagtcaaatgggagccttagaattttatttttggtttacaacactaatacccatttaagtttgcaaatatcaattaaaggcaaatttagcactttatttggatcattgtccccaaatgtactattttattgcattgctattgttaagagttggtagtttaaattatttgcgttttaattatctgtaatattgcctgcaaatgtaaaatcagtcattgttaaaacaattgacaaaacatctgaaataaaatagcactccagtaaatcaaatcacaaatgaatcacyagtaataattaattagtggttatttaagtgaattgactaatttagaagtcaatgaaaagagaaattttacttaataacattgaaaaattgtagctgatttctatttattatgtagctcccattctgtttcatatatgtcagattttaagctcattagtaaaagaccacattcttctctttctcctctttatcacattcctcctcttcccctccctcctgtactgattttcctcttcatccttctttcatcattcacagagcctgaccaagtctattttgttaaataagggaattgctggctaaaactctgcagaaatgaaggctacc

SEQ ID NO: 584968 - DNA, 551 bp, Homo sapiens
tcaaccaccgtgcctggatagaattttatgcctttttattggttggatagtattccattgtgtatacatatcacttataaaatttagtgtcagctcacacctgtaatctcattactttgggaggcagagatgtgctgatcatgtgaggccaggagttcaagaaaaaacatyccccccacctgcaaaacaaaattagccaagcatggtggcacatgcctgtaatcccagctacttgggaggctgaggcagagatcgcttgaacccaggagacagaggttgcagtgatctggcatcatatcactgcactcagtatgggtgacagagtgagacactgcctcaaaaaaataaaaataaaaataaataaataaataagaataaaataaaattctttcatccactgatggatgttgatttcacatcttgggtaattgggaatagtgctgcattcaacatggggatgcagatatctctttgacatattgataaattttctgtgtatacatacctagttgtgggactgctgaatcatatagtggttataattttatttt

SEQ ID NO: 584969 - DNA, 547 bp, Homo sapiens
tctacttcagataaacagtcaaaaatatctacctgtaaaacatatattaacttctgcttcttttttacatgtatggaaatgtacatttatacaataagctttaggaaatatgatacaggaattattttttaagtaaagtttattttagcccctttaacaatttatttgcccatttcctcttgtgaagcatactttacaaatataaagaaaagtttcccgatgtattaaaaatggatacccaagattggaatctgctatattccaacatcaacctttgcagctctgtcagcaaaatcattgctggtagaaattttgccattctgtcctgtgtgagttctacatgaattgttagtatttgaatagacagttgtaaagcctctaatgaatcagctatcaattttcaatgaaatgttttagtwcccaacaaagtaaaaaaactcccacatttttccaaatttgcctttttgtgtgagacaccaaacacatatgtattttctgtctatctagctagctagctagctatctattatctatctatccagctagc

SEQ ID NO: 584970 - DNA, 547 bp, Homo sapiens
tctacttcagataaacagtcaaaaatatctacctgtaaaacatatattaacttctgcttcttttttacatgtatggaaatgtacatttatacaataagctttaggaaatatgatacaggaattattttttaagtaaagtttattttagcccctttaacaatttatttgcccatttcctcttgtgaagcatactttacaaatataaagaaaagtttcccgatgtattaaaaatggatacccaagattggaatctgctatattccaacatcaacctttgcagctctgtcagcaaaatcattgctggtagaaattttgccattctgtcctgtgtgagttctacatgaattgttagtatttgaatagacagttgtaaagcctctaatgaatcagctatcaattttcaatgaaatgttttagtacccaacaaagtaaaaaaactcccacatttttccaaatttgcctttttgtgtgagacaccaaacacatatgtattttctgtctayctagctagctagctagctatctattatctatctatccagctagc

SEQ ID NO: 584971 - DNA, 637 bp, Homo sapiens
tattaagaaatagctgaatggaatagataataaaacaagaaaaacaataaccttttaaaatgattaatcctgctgaacttaaacaatatataaaatggtcactgaggacaatatatgcttgccatgtaagtcatatcatcactttccaccactttcatcaaattaaaaatcacttcaatactgtatctgtcagtgttcagtaatgtcatattgctacttatatctggaagtcatgagaaataaaaaaagataactcttgccaatgttaatagcaactgatgaatgagcatttttctcaatttctcagtcttcctgctgttaagatatctaatttgaactgatatgaaatatcaggctcacagtttagaggaaaacattctgccagttatggtcagggaactgcatatttctagcttatcttcttcattgtaaaytctctaacacctagaactctacctacccatagtggacactcaaaaataatttgctgaatgaatagtaaatgtggacaaactaaacaaacatgatcaggtaaaaaattattatttgataatatgaaaaaagcagaaaaaaagaaaatttctttttttagagttttcaaaaataggtaaatgtttattgcaaaaattgtggactg

SEQ ID NO: 584972 - DNA, 654 bp, Homo sapiens
gtcatatcatcactttccaccactttcatcaaattaaaaatcacttcaatactgtatctgtcagtgttcagtaatgtcatattgctacttatatctggaagtcatgagaaataaaaaaagataactcttgccaatgttaatagcaactgatgaatgagcatttttctcaatttctcagtcttcctgctgttaagatatctaatttgaactgatatgaaatatcaggctcacagtttagaggaaaacattctgccagttatggtcagggaactgcatatttctagcttatcttcttcattgtaaactctctaacacctagaactctacctacccatagtggacactsaaaaataatttgctgaatgaatagtaaatgtggacaaactaaacaaacatgatcaggtaaaaaattattatttgataatatgaaaaaagcagaaaaaaagaaaatttctttttttagagttttcaaaaataggtaaatgtttattgcaaaaattgtggactgtatttttcaatgttatttttgcctagtagaaaacaaggttatctttaagttattaatgtaaattacacaaacatttatatctgaaatatagatttgctatgattttaatatacactcaattgtctccagagttgtgatattgtctt

SEQ ID NO: 584973 - DNA, 560 bp, Homo sapiens
tttgcttttaccttcatactctgtattgtttacattcatcattagctgtattgataataaattgaagtaaaagcaattgaagatgagtcaaagttgttgtttttattaaattttgaacatagttgaygttatatgttttgccattgtccaggtgagtttggaagaactatggtctttgatgacatcaatatgctatgggatcaatgtactctgaaggaagaacaaatttagtagttctaattgggctaatactaaacattatatattaatcgtaatggtacagttatttaccaattaaaataaacatgtaaacaatcaaaccaaccactagtaagtcattcttatcaaaatatactggctttcccgtcttcacttggaataatgcaattatattgttttcttttccagatttgaaataatatttttcaatgtttttctcttaaaatttataaattaaatttaaaaaaattccttagtgtatacttacatacaagtatctatatagtcactgttttacttatttgattgtgctagcaacagttatttctatctgtaatgtt

SEQ ID NO: 584974 - DNA, 641 bp, Homo sapiens
tggtacagttatttaccaattaaaataaacatgtaaacaatcaaaccaaccactagtaagtcattcttatcaaaatatactggctttcccgtcttcacttggaataatgcaattatattgttttcttttccagatttgaaataatatttttcaatgtttttctcttaaaatttataaattaaatttaaaaaaattccttagtgtatacttacatacaagtatctatatagtcactgttttacttatttgattgtgctagcaacagttatttctatctgtaatgttgatggaacttgaaacaatttttccarggatattgaaataactatctctagtccagcaaagaagtaatgtggaaaatagggaaaatctcctacaactccaaagacagtttgatttgtggaagaggtaataactgacaagagctgtaccatatattattgccacttttagaatggtagtaaaccaggaacaaaataaagaagtaaatagctagatctccttcttctgtttttagacttctcattagtgcttctcattgtgaaaatagtgagtcattcgatatagttactcaagtgatgcatttctttcagatatgtcatatttgacatcgagtatatccgaaagaaaagaatggcaca

SEQ ID NO: 584975 - DNA, 610 bp, Homo sapiens
tttcaatgtttttctcttaaaatttataaattaaatttaaaaaaattccttagtgtatacttacatacaagtatctatatagtcactgttttacttatttgattgtgctagcaacagttatttctatctgtaatgttgatggaacttgaaacaatttttccagggatattgaaataactatctctagtccagcaaagaagtaatgtggaaaatagggaamatctcctacaactccaaagacagtttgatttgtggaagaggtaataactgacaagagctgtaccatatattattgccacttttagaatggtagtaaaccaggaacaaaataaagaagtaaatagctagatctccttcttctgtttttagacttctcattagtgcttctcattgtgaaaatagtgagtcattcgatatagttactcaagtgatgcatttctttcagatatgtcatatttgacatcgagtatatccgaaagaaaagaatggcacaaaaaaacaggatgatatattgaaaaacataagaaatacattcaggcaaagcatgagattcatgaaataatcaattataaaatgtctcttaggtcttcctttttccaaaaaaatagac

SEQ ID NO: 584976 - DNA, 635 bp, Homo sapiens
catgtaaatattaaatgcaatatatgtgtataaggtttttaagagtaaaacttcataaactataagtattataattactttttattagtataggctatacatataccctttcaaaaatttttgattttagagcacaatgtttttcattcctaaccagctcatagtatgacatagttttgatgttgataccctccaaatctgcaatgttggaggcaatgcttaatgggaggtgtctggatcatgaggccagatcttgcatgaatatcttggtgatatccttgaagtaatgagtgagttcttgctctactattaggttctgtgagaaatgatttttaaaaagagcttggcatctccctaccctctctcttgccacccctcttgtcatgtgatctctgcacacattaactcccctttgccttttgtgatgagtggaagcrtcctgaggccctcaccggagttatgcttcttgtacggcatggaaaactgtaaaccaggacaggtgctgtggcttacacctgtaaccagcactttgggcagatcacttgagatcaggagtttgagaccagcctgcccaacatggtgaaaccctctctactaaaaccagctggatgtggtggcacacacctgtaatcaca

SEQ ID NO: 584977 - DNA, 635 bp, Homo sapiens
catgtaaatattaaatgcaatatatgtgtataaggtttttaagagtaaaacttcataaactataagtattataattactttttattagtataggctatacatataccctttcaaaaatttttgattttagagcacaatgtttttcattcctaaccagctcatagtatgacatagttttgatgttgataccctccaaatctgcaatgttggaggcaatgcttaatgggaggtgtctggatcatgaggccagatcttgcatgaatatcttggtgatatccttgaagtaatgagtgagttcttgctctactattaggttctgtgagaaatgatttttaaaaagagcttggcatctccctaccctctctcttgccacccctcttgtcatgtgatctctgcacacattaactcccctttgccttttgtgatgagtggaagcgtcctgaggccctcaccggagttatgcttcttgtacggcatggaaaactgtaaaccaggacaggtgcwgtggcttacacctgtaaccagcactttgggcagatcacttgagatcaggagtttgagaccagcctgcccaacatggtgaaaccctctctactaaaaccagctggatgtggtggcacacacctgtaatcaca

SEQ ID NO: 584978 - DNA, 623 bp, Homo sapiens
tgggcccatcatttcattactgtagaattttgaccaatcayattgtcaactcttgagtcatctcatttgggaagtaatttggaccaacagcagaggttcataccttagggtactgagcctgactgctgctgtacaggtaatttatgaactcatgtataacttcaccaatgtgtgtgtgtgtgttcctccttaccttgtgtaatttatggggacttgtctaacacacttagtagagtttatcttccatacaacacaatcacataatgcccagttttaggtatttttgttttaaattccttcaaatgttcttgtgatctcagctggcattcttcttcctagaattaaacaaacaaacaaaaatcatgtgaccaaataaatacacaattaagtaaccaaaaattacacagatttgtttaaatagaaataaaaagtctagagaaaatgtttttcaaatgtatttattttaaaaccacatctaaaattgcatttattgtgtgcaacatgatgttttgaagtataaatatattgtggaattgttaaatatagctaactgaaaagtgtacccacacagttaaaatttttgtggttaggttactaggtattttattctctttgaagcagtt

SEQ ID NO: 584979 - DNA, 623 bp, Homo sapiens
tgggcccatcatttcattactgtagaattttgaccaatcacattgtcaactcttgagtcatctcatttgggaagtaatttggaccaacagcagaggttcataccttagggtactgagcctgactgctgctgtacaggtaatttatgaactcatgtataacttcaccaatgtgtgtgtgtgtgttcctccttaccttgtgtaatttatggggacttgtctaacacacttagtagagtttatcttccatacaacacaatcacataatgcccagttttaggtatttttgttttaaattccttcaaatgttcttgtgatctcagctggcattcttcttcctagaattaaacaaacaaacaaaaatcatgtgaccaaataaatacacaattaagtaaccaaaaattacacagatttgtttaaatagaaataaaaagtctagagaaaatgtttttcaaatgtatttattttaaaaccacatctaaaattgyatttattgtgtgcaacatgatgttttgaagtataaatatattgtggaattgttaaatatagctaactgaaaagtgtacccacacagttaaaatttttgtggttaggttactaggtattttattctctttgaagcagtt

SEQ ID NO: 584980 - DNA, 541 bp, Homo sapiens
gaccaaaatctactcaatccccactcctccctacctattgcagcctctagtaaacaaagttataacctctgtttgtataaagtcaactttttaagattcttcacataagtgggatcatgcagcatttttctttttgttcccggcttatttcatttaacaaaagttttccaggttcatccatgttgtcacaaatgacagaatttccataattttttattttttatgtctaatctgtattttttattttttatgtctaatcattatgctgaggagagggttcaagtctcatgtttattgcagtagataagaaatataatcaacataagtttccctcaaaggataaatggacaaaaaaatgaggcatatacrtatctatgcacatacaattgaacactaataagctgtaaaaaagaaaaaattctttagaaacttaaatagtaatattgtataaaggcatcttttgttggagaacattcaaatgctttcctttttaaggaggattttcagactggaggtctttcacattgccatatgcattaaa

SEQ ID NO: 584981 - DNA, 402 bp, Homo sapiens
atatgtggaccattttttaatgacaccaccagtttaggaagcaggggatagtgaaaccaacccaatagtcccacacacttacatagaaattgaccctcttgtcttaaagcttgaaacttacattggttttatctgagttatttactcaggaaagaccctcaaatctctcaaaaagtaccraagaactaaaactcaccagatcactgcatccagacaatgagaggccagacccctcattcatcatgattgcttctttacccctgcctatttcctgttttcctaaccgaccacctgcttcttattgaggaactcctatttgttaccactccctagttcctgttttcccacacatagttacattttttacatactgtataaacccctaattttaatcatttggcg

SEQ ID NO: 584982 - DNA, 402 bp, Homo sapiens
atatgtggaccattttttaatgacaccaccagtttaggaagcaggggatagtgaaaccaacccaatagtcccacacacttacatagaaattgaccctcttgtcttaaagcttgaaacttacattggttttatctgagttatttactcaggaaagaccctcaaatctctcaaaaagtaccgaagaactaaaactcaccagatcactgcatccagacaatgagaggccagacccctcattcatcatgattgcttctttacccctgcctatttcctgttttcctaaccgaccacctgcttcttattgaggaactcctatttgttaccactccctagttcctgttttcccacacatagttacattttttacatactrtataaacccctaattttaatcatttggcg

SEQ ID NO: 584983 - DNA, 641 bp, Homo sapiens
ctggctctcctccgtctcccctgccaaactccacctcctctcacaggtggatggcctgagggcgtacaggtgcctgtcagtgtgctcttctgctgatgtgcctctctggacatccagcagcttctgtctttgccttgctaggatctcgggtttttataggcccagatggggccctggcaggccaaggtggtcttgaaaaatgcaacagttggctttgaaagcaggagtgcctgtcctcacctaggtccctggggatggaaccctagccaaggaccacacccttctctatccagagcttcccttttctctttcgtgttatttaaagggaccrctcgcttcccttcccagctttcctgcatcagtagtactgggtactctgttaggcattggaatgaaaaagcccctcagatatattttagtgaacactaaattataagtattaatatgtttgtgtttacttcaatgtgttttgagggacactgcaaagaaaatcatctatgtggggaattagtaactgttgagggaatggtacattaaacacagtcattgttcttttcctgtaggactattccatcatgtttatttaaatggtgagcctcttgaagaggatacagtctacggagtatttccaaccatatatg

SEQ ID NO: 584984 - DNA, 566 bp, Homo sapiens
gaggatacagtctacggagtatttccaaccatatatgactatgaaatattttcattacaagacatttaaaaggatgtgtatgttttcaacattccttacgaagtgcttcaatattctctttaggaaagttcaggaacttttgtcagagtccttatttgtttgttcaaaagccttacagtgctaaatgtggtatgctcctcaaaattatccatacatcttttgaagctggaacactgacaatacaactattcttaaatgtggggctaagatatgtaactgctaagtacaaatattctattacaaagtttaatatttttactaccttgtaaaaatataaaatatttgctctttatattttgtgtgcttcaaaattatttattttttattttaaatttttattttttaagttctagggtacatgtgcagaatgkgcaggtttgttacataagtaaacatatgtcatggtggtttgctgcacctatcaactcatcacctaggtattattccaccatgcattagccattttccctaatgctctccctcctcccaccccaccccacaccagg

SEQ ID NO: 584985 - DNA, 488 bp, Homo sapiens
gcattgttcgcctccctgtgtccatgggttctcattgttcagctcctaactataaccttttttagtatactattattgcaagggcatttttttatagtttcctttacaggcaaacttttaataaactatgttaacttcttaaatgtgtagtttaaatctgagaagactgaaaagatttaacatgatgttgataaatgtaaaaaatagtaatatgttcatggaggataggaggaataaatatcatgaaaatggccatgctgcccaaggcaatttataggtttaatgccatccccatcaagctaccaatgactttyttcacagaattggaaaaaaactactttaaagttcatatggaaccaaaaaaaaaaaaaaaaaaaaaaaagagcctgcattgccaagtcaatcctaagccaaaagaacaaagctggaggcatcacgctacctgacttcaaactatactacaaggccacagtaaccaaaacagcatg

SEQ ID NO: 584986 - DNA, 581 bp, Homo sapiens
aatgtaaatgatgagttaatgggtgcagcacaccaacatggcacgggtatatatatgtaacaaacctgcaagttgtgcacatgtaccctagaacttaaagtataataaaaaaatagtaatatgttggtaaacttgagcttgaatctttgaatctaaacatgtctgtatttcctaattggtaaagtgggatcttgcttttaatccaatttacaattttagtcttttcatatcacgattgaagcaatttgacttttcactggcattttgctgttttttttctatgtctyttgcctctgttgctattttcttctattaacttcttttacataaaacaaatgtttcttagcatgccatttatgtcttctgttgattcactacctatttgccctatgatttacagtatgtcttttcgtgtattaacatgtacttcacattaataccgacaattccgaaacaactagcaagtttgttctattatatctccctattaattttcttttattctattattgccatatgtattacatcaatttatgttataaaactaaaaagagtattgtaattattgctctatataatca

SEQ ID NO: 584987 - DNA, 476 bp, Homo sapiens
gaatgaaatgaattcaggatttatggttaatcatctttaaccaatagtgtatgtagccagaggagtcatttttattttgaaccctaagtaaaaacaggttattacataaaatggcctttcatatctttcaaaaataagattacaaaattatatctgcatgatagacacagccttgaatctggcttaaggagactcattcawttatgtgagtcatttaaaggacttagagaaaactgtttttcaaataattccacgtatttgccttttgtgatgccattttctccaccttgaatgacttccagaagttacctttttttaagattcaaatcattctttaaagtattgtaagtatatatttttcataaatttttctatttacaaaaaacagaaacagcaaagcaatcttgacaatctttagtccatacattcttgaagtttttatgaggacgtactgtactaagttctgaactataaat

SEQ ID NO: 584988 - DNA, 556 bp, Homo sapiens
tatagtttttattttcagtattttgggtacatacaatgatgaatatttatatttttataatttataattatatattgatttttattaatgaaaaatcaataattataattatgtacttgaatattataataatatattattaattttattaaaccayatcctgacaaagcttttgtcttcatgtaaatataatctataatgtttatattatagatttatagtgtattgatacaattatttttaaaatgaaatagaatctcctccaaattattttttaataacatacaacctaagaagtcaatacataaattgtacttatatgatgacaaccttgtaaattaggctcaaagaagaaatttcaacacagatcattaattttgaataaaagtgtgttgtattaagattttttgaactgtttaaatgtgaatagcagaaactacaccagtatttataaaatattttattacaaatgatttttaaaggcatagtttatattttaagagtatatttctccaaatggtgattttatgcaagattcttagatatggtaaaatga

SEQ ID NO: 584989 - DNA, 556 bp, Homo sapiens
tatagtttttattttcagtattttgggtacatacaatgatgaatatttatatttttataatttataattatatattgatttttattaatgaaaaatcaataattataattatgtacttgaatattataataatatattattaattttattaaaccatatcctgacaaagcttttgtcttcatgtaaatataatctataatgtttatattatagatttatagtgtattgatacaattatttttaaaatgaaatagaatctcctccaaattattttttaataacatacaacctaagaagtcaatacataaattgtacttatatgatgacaaccttgtaaattaggctcaaagaagaaatttcaacacagatcattaattttgaataaaartgtgttgtattaagattttttgaactgtttaaatgtgaatagcagaaactacaccagtatttataaaatattttattacaaatgatttttaaaggcatagtttatattttaagagtatatttctccaaatggtgattttatgcaagattcttagatatggtaaaatga

SEQ ID NO: 584990 - DNA, 556 bp, Homo sapiens
tatagtttttattttcagtattttgggtacatacaatgatgaatatttatatttttataatttataattatatattgatttttattaatgaaaaatcaataattataattatgtacttgaatattataataatatattattaattttattaaaccatatcctgacaaagcttttgtcttcatgtaaatataatctataatgtttatattatagatttatagtgtattgatacaattatttttaaaatgaaatagaatctcctccaaattattttttaataacatacaacctaagaagtcaatacataaattgtacttatatgatgacaaccttgtaaattaggctcaaagaagaaatttcaacacagatcattaattttgaataaaagtgtgttgtattaagattttttgaactgtttaaatgtgaatagcagaaacyacaccagtatttataaaatattttattacaaatgatttttaaaggcatagtttatattttaagagtatatttctccaaatggtgattttatgcaagattcttagatatggtaaaatga

SEQ ID NO: 584991 - DNA, 481 bp, Homo sapiens
gatgttggtgtatttactttttgatgttttgctcaattcagtttgttagtttttttgttgaggatttttgtatctatcttcatcagggatattggactgaaatttgcttttttaattgcatttctgccaaatattggtattaggcagatgctggcttcatagaatgatgtaggaggagcttctgctccttgatatttttgaaatagtttgagtaggattggttccagttcttatttctatatctggtagaattcagttgtgaatccrtctggtacagggcttttttggttgttaggatttttattactgagtcagtttcagagctccatattggtctattcagggtttcaacttcttttgggctcaatcttgggagatagtttttctccagaaatttacccatttccttaaattttctaatttgtatgcatagagttgttaagagtagtctctgaggatcttttgtatttctgtctgactg

SEQ ID NO: 584992 - DNA, 580 bp, Homo sapiens
gtatacccctaaaagtttataactatgtttatgtacrtgataagtcatcctaaagaattccaagtattgcccttggaaatgttacttttaaatcagttgtaattctaagtaatagaaaatattaaaatttttataactttcctggaaatattaattatttggattgtttcttatcaataaatatgagctttctataaatatttattttttgtaaagagtatatgttttgagggaaagcatatcaaatgaaaatttgtatactgaatttgaaaaaaaactgtttgcaaaaaacattttattgaagtctccttaatccagttgaaattcatgtcatgacataatgttctatgttattccagttatttacttataatttacatcttacaaagcatcagcttttgccttctaacagcagaaatagattatcataaacaacaaaatctgattcagcagggtaggtgaaagtctttgagagatttataacaaagaaatcttctcagaagataaaaagtaataaagatcatgaaagtgttttactttacaataatttggaaacacacactaatattcagaattttat

SEQ ID NO: 584993 - DNA, 587 bp, Homo sapiens
catggtgaaaccccgtctctactgaaaatacaaaaattagttggrcgtggtggcatgcgcctgtagtctcagctactcaggaggctgaggcaggagaatcacttgaacctgggagtctgatgttgcagtgagccgagtcatgccactgtgctccagcctggtgacagagcgagacttcgtctccaaaaaacaaaaaaggatactcagtgagtacttgttaggtgaatgcatgaatgtcaggaaagcctaatcgccattactcattctattgctatatataaggcaatgataatttatttggctcatccagaaagctttagcaagactgataacaacccccagggaagaactcatgaactccatactgcccaacagaatctttttcttggcttctccttcttttttgtcactcctccacttttgcttttctccaccctatgctacctcctaataaaattccttgcttgaattctgtccaatgcaaggctcacaaaaataagttaaacagatctttccagacaactagtggtttctactatcctggaatttcactgcaatacagtacatttctatcacgctacctttta

SEQ ID NO: 584994 - DNA, 587 bp, Homo sapiens
catggtgaaaccccgtctctactgaaaatacaaaaattagttgggcgtggtggcaygcgcctgtagtctcagctactcaggaggctgaggcaggagaatcacttgaacctgggagtctgatgttgcagtgagccgagtcatgccactgtgctccagcctggtgacagagcgagacttcgtctccaaaaaacaaaaaaggatactcagtgagtacttgttaggtgaatgcatgaatgtcaggaaagcctaatcgccattactcattctattgctatatataaggcaatgataatttatttggctcatccagaaagctttagcaagactgataacaacccccagggaagaactcatgaactccatactgcccaacagaatctttttcttggcttctccttcttttttgtcactcctccacttttgcttttctccaccctatgctacctcctaataaaattccttgcttgaattctgtccaatgcaaggctcacaaaaataagttaaacagatctttccagacaactagtggtttctactatcctggaatttcactgcaatacagtacatttctatcacgctacctttta

SEQ ID NO: 584995 - DNA, 587 bp, Homo sapiens
catggtgaaaccccgtctctactgaaaatacaaaaattagttgggcgtggtggcatgcgcctgtagtctcagctactcaggaggctgaggcaggagaatcacttgaacctgggagtctgatgttgcartgagccgagtcatgccactgtgctccagcctggtgacagagcgagacttcgtctccaaaaaacaaaaaaggatactcagtgagtacttgttaggtgaatgcatgaatgtcaggaaagcctaatcgccattactcattctattgctatatataaggcaatgataatttatttggctcatccagaaagctttagcaagactgataacaacccccagggaagaactcatgaactccatactgcccaacagaatctttttcttggcttctccttcttttttgtcactcctccacttttgcttttctccaccctatgctacctcctaataaaattccttgcttgaattctgtccaatgcaaggctcacaaaaataagttaaacagatctttccagacaactagtggtttctactatcctggaatttcactgcaatacagtacatttctatcacgctacctttta

SEQ ID NO: 584996 - DNA, 610 bp, Homo sapiens
tcacttattctctgaaaccaaaactgacagaatctcttactagcaaagtttccatgcaagaaatattaaaagaggtatttcaatatgaaataaaattacacttgacaatatctagagtccatataaacaaatgcagaacaatagaaaaagcaaaaattagaaatatatgaaagasaatgtaaatgtattttttgtaactattttcttttctcctacctgattcaaaaataaactgcataaagcaatggttataagtaatacaatgaataaagatgtaatgaataaagatgaatacaatgaattcatacattgaataaagatgtaatatgtatagtaatacaacaaaggaagaaggagagaacaatgctatttagaatcaaaatttttgtatgctattaaaattaagttgatagtaaatctaactagattttcaaaaattaagatactacttgtagcccatcaggcaaccctaagaaaataacttacaaactataataaaatcagtgataaggggattaatacagtgcattaaaaatatctattgactaaagaaaaggcaatcttagaaaaatagagaaataaaaaagcagaagacatatagaaaacaact

SEQ ID NO: 584997 - DNA, 610 bp, Homo sapiens
tcacttattctctgaaaccaaaactgacagaatctcttactagcaaagtttccatgcaagaaatattaaaagaggtatttcaatatgaaataaaattacacttgacaatatctagagtccatataaacaaatgcagaacaatagaaaaagcaaaaattagaaatatatgaaagacaatgtaaatktattttttgtaactattttcttttctcctacctgattcaaaaataaactgcataaagcaatggttataagtaatacaatgaataaagatgtaatgaataaagatgaatacaatgaattcatacattgaataaagatgtaatatgtatagtaatacaacaaaggaagaaggagagaacaatgctatttagaatcaaaatttttgtatgctattaaaattaagttgatagtaaatctaactagattttcaaaaattaagatactacttgtagcccatcaggcaaccctaagaaaataacttacaaactataataaaatcagtgataaggggattaatacagtgcattaaaaatatctattgactaaagaaaaggcaatcttagaaaaatagagaaataaaaaagcagaagacatatagaaaacaact

SEQ ID NO: 584998 - DNA, 610 bp, Homo sapiens
tcacttattctctgaaaccaaaactgacagaatctcttactagcaaagtttccatgcaagaaatattaaaagaggtatttcaatatgaaataaaattacacttgacaatatctagagtccatataaacaaatgcagaacaatagaaaaagcaaaaattagaaatatatgaaagacaatgtaaatgtattttttgtaactattttcttttctcctacctgattcaaaaataaactgcataaagcaatggttataagtaatacaatgaataaagatgtaatgaataaagatgaatacaatgaattcatacattgaataaakatgtaatatgtatagtaatacaacaaaggaagaaggagagaacaatgctatttagaatcaaaatttttgtatgctattaaaattaagttgatagtaaatctaactagattttcaaaaattaagatactacttgtagcccatcaggcaaccctaagaaaataacttacaaactataataaaatcagtgataaggggattaatacagtgcattaaaaatatctattgactaaagaaaaggcaatcttagaaaaatagagaaataaaaaagcagaagacatatagaaaacaact

SEQ ID NO: 584999 - DNA, 586 bp, Homo sapiens
attattactggttaccattattattaagagtgttaataataattactacagcaatcttttctagacaagggaaagtgaagcaactaattaaccctcaatgaaaaaaaggtttttttcactgctaaagactattaactctgacatgagttttagaatagttttgctttctctctctttacctgtattttctttattttttattctaatgtttttgatttacccaaggattttggtgctaggttgtggttctggtaggctgatcaaagttcataccacaggcagttaattttacccagatgactcctggtttctttcttttttaaataaatcatatccactgccgaggttgatatgaggacttctctccattggcaagtagcattgtagccacaatctgttattaaagcttgaaacaaaatggtgattactagtgtttatggccaaattttgttcatgcctgcccactgaatttgtttgggtaccaggaaattatggactgtgtgattcgaattaggataagagattaaaccctggkagccattcttgagcaaagactgtgctgttaaaaaaaaatggaaaatatctt

SEQ ID NO: 585000 - DNA, 554 bp, Homo sapiens
ttctctcttgcctgcctccatgtaagatgtgactttgatcctcattctctttctgccatgattgtgaggtctccccagccatgtggaactgtgagtccattaaacctcttttctttataatttacccagtctcagatacatctttattaacagcataagaacagactagtacaggtaatgggattactgggttgagtggtattcctttctttaggtctttgaagaatcaccaccctgtcttccacaatggatgaactaatttacactcccaycaactgtgtataagcatccctttttctctacaaccttgccagcgtctttcatttttttatttttgataatagccattctgactggtgttagtatctcattgtggttttgatttgcatttctcagagtctaaaatctagaattaaaacttttaacttggtgagcctatgttgaatgactacagagaacctagataagcaattttcgtttgcattttatccaaaacaggtggcaagaagaaaagtttaagaatttcaagtggcttgattggactcttcttcatg

SEQ ID NO: 585001 - DNA, 554 bp, Homo sapiens
ttctctcttgcctgcctccatgtaagatgtgactttgatcctcattctctttctgccatgattgtgaggtctccccagccatgtggaactgtgagtccattaaacctcttttctttataatttacccagtctcagatacatctttattaacagcataagaacagactagtacaggtaatgggattactgggttgagtggtattcctttctttaggtctttgaagaatcaccaccctgtcttccacaatggatgaactaatttacactcccaccaactgtgtataagcatccctttttctctacaacyttgccagcgtctttcatttttttatttttgataatagccattctgactggtgttagtatctcattgtggttttgatttgcatttctcagagtctaaaatctagaattaaaacttttaacttggtgagcctatgttgaatgactacagagaacctagataagcaattttcgtttgcattttatccaaaacaggtggcaagaagaaaagtttaagaatttcaagtggcttgattggactcttcttcatg

SEQ ID NO: 585002 - DNA, 377 bp, Homo sapiens
aagcatcctctcactgtggtccccaaagcattctctgacatcatccttctaccaggggtgggttaggaagtagaaagcatccagttctttccacctcctgttaggcagacaactatcttcacggaaaacagtacttacaaattcagcaaatctagcagacgatattctagtacttctgtataaaatatatgcataaaatctagtttttgcctgagagtgaaaataatggataatatccattgtaaccacccattagacagaaaaataggtagatatagcaatctacacatataaatagatagatacatagatatgtagatatacagattataggtacmtatgcacagatatattccaaatacttttgccaactgata

SEQ ID NO: 585003 - DNA, 377 bp, Homo sapiens
aagcatcctctcactgtggtccccaaagcattctctgacatcatccttctaccaggggtgggttaggaagtagaaagcatccagttctttccacctcctgttaggcagacaactatcttcacggaaaacagtacttacaaattcagcaaatctagcagacgatattctagtacttctgtataaaatatatgcataaaatctastttttgcctgagagtgaaaataatggataatatccattgtaaccacccattagacagaaaaataggtagatatagcaatctacacatataaatagatagatacatagatatgtagatatacagattataggtacatatgcacagatatattccaaatacttttgccaactgata

SEQ ID NO: 585004 - DNA, 377 bp, Homo sapiens
aagcatcctctcactgtggtccccaaagcattctctgacatcatccttctaccaggggtgggttaggaagtagaaagcatccasttctttccacctcctgttaggcagacaactatcttcacggaaaacagtacttacaaattcagcaaatctagcagacgatattctagtacttctgtataaaatatatgcataaaatctagtttttgcctgagagtgaaaataatggataatatccattgtaaccacccattagacagaaaaataggtagatatagcaatctacacatataaatagatagatacatagatatgtagatatacagattataggtacatatgcacagatatattccaaatacttttgccaactgata

SEQ ID NO: 585005 - DNA, 436 bp, Homo sapiens
aaattgactcctcaaagacataatctaatttaaatgactcaagaataaatacaaaatctaaataaaccaataacaattaaagaaattgtatttgtaataaaattattttcacaaagggtagtccaagcccagatggcttcattggtgaattctaccaaatgtttatgaaatkgtaatatcaatccttcacaaactattcaaaaataaaattaaattaaaaggtagagcaagcacttcccaacttattctgtgaggccaaaattaccttaataccaaaaccaaacaaagccatcataggaaaataaactacacactaaaataccttatgaatataaatgcaagatttctaaacaaaatattagcaaactacatccagcaatatatagaaaagaactgattattttccatgaccaaggatttgtcctgggaatacaag

SEQ ID NO: 585006 - DNA, 436 bp, Homo sapiens
aaattgactcctcaaagacataatctaatttaaatgactcaagaataaatacaaaatctaaataaaccaataacaattaaagaaattgtatttgtaataaaattattttcacaaagggtagtccaagcccagatggcttcattggtgaattctaccaaatgtttatgaaatggtaatatcaatccttcacaaactrttcaaaaataaaattaaattaaaaggtagagcaagcacttcccaacttattctgtgaggccaaaattaccttaataccaaaaccaaacaaagccatcataggaaaataaactacacactaaaataccttatgaatataaatgcaagatttctaaacaaaatattagcaaactacatccagcaatatatagaaaagaactgattattttccatgaccaaggatttgtcctgggaatacaag

SEQ ID NO: 585007 - DNA, 436 bp, Homo sapiens
aaattgactcctcaaagacataatctaatttaaatgactcaagaataaatacaaaatctaaataaaccaataacaattaaagaaattgtatttgtaataaaattattttcacaaagggtagtccaagcccagatggcttcattggtgaattctaccaaatgtttatgaaatggtaatatcaatccttcacaaactattcaaaaataaaattaaattaaaaggtagarcaagcacttcccaacttattctgtgaggccaaaattaccttaataccaaaaccaaacaaagccatcataggaaaataaactacacactaaaataccttatgaatataaatgcaagatttctaaacaaaatattagcaaactacatccagcaatatatagaaaagaactgattattttccatgaccaaggatttgtcctgggaatacaag

SEQ ID NO: 585008 - DNA, 546 bp, Homo sapiens
aagtatataaaaaatccgtcacaaatcatcagggaaatgcagattaaagccacaatgagataayatctcaccccagttagaatggctactatcaaaaagaccccccaaaaaatttgtgcagagaaaagggaattcttatatactgttaatgggatataaattcatacagccataatggaaaacagtagagttttctcaaaacactatgtataaaatttccatattatccagcaatcttactattgaatatttatccaaagaaaagaaaatcagcttatcaaagatatatctgaactcccatgtttattgaagtgctattcacaatgaacaagatacagaatcaacctaaatgtctatcaacagatgaatgaagaaaatgtggtatatatatatatatatacacaatggaatactattcagccataaaaagaatgaaatactttcatttgtggcaacagggataagcctaaaggacattatgttgagtaaagtaactcaggcacagaaagatttatactgaatgttctcatatgtaagaagtgaaag

SEQ ID NO: 585009 - DNA, 542 bp, Homo sapiens
tgtaccagtatgccttggatgttggacacgaaatcaaaagagattattttggagctttaagttttaatgactgccttgctgggattcaaacttgcttggggcctgtatcttctttcttttggtcaatttctccctttttgaacaggaatgcttacccaattcctatacctccattgtatcttggaagtaaataacctgwtttttattttacaggatcatagatggaagggacttgccttgtctcagacaggacttgggacttttgagtcaatgctggaatcagttaagaatttaggggactgttgggaaggcatgataccattttgaaatgtcaaaagggcatgagattttcaaagggccagagcagaatgatatacttttcagaatgatatcccccaaatatcatgttgaattgtaatccccaatgctggggtgaggtcttgtgggaggtgtttggatcatggaggcagatctctcatgacttggtacttacttcatgatagtgagttctcatgggatctagtcctttaaaagtgtgtggc

SEQ ID NO: 585010 - DNA, 526 bp, Homo sapiens
  misc_feature 1, 2, 3, 4, 5, 6, 7, 8, 9, 10, 11, 12, 13, 14, 15, 16, 17,18, 19, 20, 21, 22, 23, 24, 25, 26, 27, 28, 29, 30, 31,32, 33, 34, 35, 36, 37, 38, 39, 40, 41, 42, 43: n = A,T,C or G
nnnnnnnnnnnnnnnnnnnnnnnnnnnnnnnnnnnnnnnnnnncaatgctgtgtggaataccacaacggtggataaggcattctgtgagtccatggatggtagttttggcagaagcaytgggtgcgggataagcaaacctatatctggaataagtgtctattccagtgaggacaaacctctgctctttccatgagggaagagatccaatataatcaacctgctaccaggtagcttgttgatcaccccgagaaatgttgccatattgagggctcagtgttgatctctgctgctggtaaactgggcactcagcagtggccatagccaggtcagcttggggcagtggaagtccgtgttgctgagctcatgcataacctccttcactgccaccatggccactttgttcatgggcccatggggcgatgacaggtgtggctgtggaaagagactgagtagtgtccacagaaaaggtcatcctgtccaattgatcattaaaattctcttctgctgagatcacacgttggtgag

SEQ ID NO: 585011 - DNA, 526 bp, Homo sapiens
  misc_feature 1, 2, 3, 4, 5, 6, 7, 8, 9, 10, 11, 12, 13, 14, 15, 16, 17,18, 19, 20, 21, 22, 23, 24, 25, 26, 27, 28, 29, 30, 31,32, 33, 34, 35, 36, 37, 38, 39, 40, 41, 42, 43: n = A,T,C or G
nnnnnnnnnnnnnnnnnnnnnnnnnnnnnnnnnnnnnnnnnnncaatgctgtgtggaataccacaacggtggataaggcattctgtgagtccatggatggtagttttggcagaagcattgggtgcgggataagcaaacctatatctggaataagtgtctattccagtgaggacaaacctctgctctttccatgagggaagagatccaatataatcaacctgcyaccaggtagcttgttgatcaccccgagaaatgttgccatattgagggctcagtgttgatctctgctgctggtaaactgggcactcagcagtggccatagccaggtcagcttggggcagtggaagtccgtgttgctgagctcatgcataacctccttcactgccaccatggccactttgttcatgggcccatggggcgatgacaggtgtggctgtggaaagagactgagtagtgtccacagaaaaggtcatcctgtccaattgatcattaaaattctcttctgctgagatcacacgttggtgag

SEQ ID NO: 585012 - DNA, 526 bp, Homo sapiens
  misc_feature 1, 2, 3, 4, 5, 6, 7, 8, 9, 10, 11, 12, 13, 14, 15, 16, 17,18, 19, 20, 21, 22, 23, 24, 25, 26, 27, 28, 29, 30, 31,32, 33, 34, 35, 36, 37, 38, 39, 40, 41, 42, 43: n = A,T,C or G
nnnnnnnnnnnnnnnnnnnnnnnnnnnnnnnnnnnnnnnnnnncaatgctgtgtggaataccacaacggtggataaggcattctgtgagtccatggatggtagttttggcagaagcattgggtgcgggataagcaaacctatatctggaataagtgtctattccagtgaggacaaacctctgctctttccatgagggaagagatccaatataatcaacctgctaccaggtagcttgttgatcaccccgagaaatrttgccatattgagggctcagtgttgatctctgctgctggtaaactgggcactcagcagtggccatagccaggtcagcttggggcagtggaagtccgtgttgctgagctcatgcataacctccttcactgccaccatggccactttgttcatgggcccatggggcgatgacaggtgtggctgtggaaagagactgagtagtgtccacagaaaaggtcatcctgtccaattgatcattaaaattctcttctgctgagatcacacgttggtgag

SEQ ID NO: 585013 - DNA, 526 bp, Homo sapiens
  misc_feature 1, 2, 3, 4, 5, 6, 7, 8, 9, 10, 11, 12, 13, 14, 15, 16, 17,18, 19, 20, 21, 22, 23, 24, 25, 26, 27, 28, 29, 30, 31,32, 33, 34, 35, 36, 37, 38, 39, 40, 41, 42, 43: n = A,T,C or G
nnnnnnnnnnnnnnnnnnnnnnnnnnnnnnnnnnnnnnnnnnncaatgctgtgtggaataccacaacggtggataaggcattctgtgagtccatggatggtagttttggcagaagcattgggtgcgggataagcaaacctatatctggaataagtgtctattccagtgaggacaaacctctgctctttccatgagggaagagatccaatataatcaacctgctaccaggtagcttgttgatcaccccgagaaatgttgccatattgagggctcagtgttgatctctgctgctggtaaactgggcactcagcagtggccatagccaggtcagcttggggcagtggaagtccgtgttgctgagctcatgcataacctccttcactgccaccatggccactttgttcatgggcccatggggcratgacaggtgtggctgtggaaagagactgagtagtgtccacagaaaaggtcatcctgtccaattgatcattaaaattctcttctgctgagatcacacgttggtgag

SEQ ID NO: 585014 - DNA, 546 bp, Homo sapiens
aagtatataaaaaatccgtcacaaatcatcagggaaatgcagattaaagccacaatgagataacatctcaccccagttagaatggctactatcaaaaagaccccccaaaaaatttgtgcagagaaaagggaattcttatatactgttaatgggatataaattcatacagccataatggaaaacagtagagttttctcaaaacactatgtataaaatttccatattatccagcaatcttactattgaatatttatccaaagaaaagaaaatcagcttatcaaagatatatctgaactcccatgtttattgaagtgctattcacaatgaacaakatacagaatcaacctaaatgtctatcaacagatgaatgaagaaaatgtggtatatatatatatatatacacaatggaatactattcagccataaaaagaatgaaatactttcatttgtggcaacagggataagcctaaaggacattatgttgagtaaagtaactcaggcacagaaagatttatactgaatgttctcatatgtaagaagtgaaag

SEQ ID NO: 585015 - DNA, 499 bp, Homo sapiens
ttggctgtgtccccacccaaatctcatcttaaattataactcccacaattcccacatgtcctgggaggaaccgggtgggaggtgattgaattatgggggtggatctttcctacgctgttctcaagacagtgaatgagtctcatgatatttgatagttttaaaaatgttaagtttctctgcacaagctctctttttgcctgctgccatccacgtaagatgtgacttgcacctccttgtcttctgccatgattgtgaggcttccccagccatgtggaactgtgagttctccattatacctctttcctttgtatattgcctagtcttcagtatgtctttatcaacagcatgagactagactaacacattctcattttgtgygtttcagagaaaaaataataaggcaagaaattccatttttgaaaattattattgcttaaactttagacaaatgggaattgactgtgtttgtttaccctaacatggactaggtgctggcaaa

SEQ ID NO: 585016 - DNA, 499 bp, Homo sapiens
ttggctgtgtccccacccaaatctcatcttaaattataactcccacaattcccacatgtcctgggaggaaccgggtgggaggtgattgaattatgggggtggatctttcctacgctgttctcaagacagtgaatgagtctcatgatatttgatagttttaaaaatgttaagtttctctgcacaagctctctttttgcctgctgccatccacgtaagatgtgacttgcacctccttgtcttctgccatgattgtgaggcttccccagccatgtggaactgtgagttctccattatacctctttcctttgtatattgcctagtcttcagtatgtctttatcaacagcatgagactagactaacacattctcattttgtgcgtttcagagaaaaaataataaggcaagaaattccatttttgaaaattattattgcttraactttagacaaatgggaattgactgtgtttgtttaccctaacatggactaggtgctggcaaa

SEQ ID NO: 585017 - DNA, 513 bp, Homo sapiens
atatgatttattatgaggtataggcttatggaattataaagtctgagaaatcccatctgtgcaagatggagacactggacagtcagtggtgtagttcaaaagcctgaaagccagagagccaatggtatagatttcagtctgagtttgaaagcttgagaaacagaaggaccaagggcaagaaaagattgatgtctcagttcaagtaggcagaaagagaatgaatcctctctctttcatctttttgctctattcaattatcaagggactaaatcttacccayccacaatggggaagccaactcagtttattcagtctgctgattaaaatgccaatctcttctataaacactctcatggacacacccagaaatagcgtttaatcagctatctgggcatcctgtgatccagtcaagttaacaaaattaactttcacaaatacactaattgtcaatgtggcacttatattcatctccttacatacttaaatactatgatataaagccaatatatctta

SEQ ID NO: 585018 - DNA, 513 bp, Homo sapiens
atatgatttattatgaggtataggcttatggaattataaagtctgagaaatcccatctgtgcaagatggagacactggacagtcagtggtgtagttcaaaagcctgaaagccagagagccaatggtatagatttcagtctgagtttgaaagcttgagaaacagaaggaccaagggcaagaaaagattgatgtctcagttcaagtaggcagaaagagaatgaatcctctctctttcatctttttgctctattcaattatcaagggactaaatcttacccatccacaatggggaagccaactcagtttattcagtctrctgattaaaatgccaatctcttctataaacactctcatggacacacccagaaatagcgtttaatcagctatctgggcatcctgtgatccagtcaagttaacaaaattaactttcacaaatacactaattgtcaatgtggcacttatattcatctccttacatacttaaatactatgatataaagccaatatatctta

SEQ ID NO: 585019 - DNA, 390 bp, Homo sapiens
gttagtgctctctttactaccggaaatagagtcatccaaacctttacatctaatcagattagacaatttattccaaaatctacagcatcaatytgggaaagttatttataaaattctgtttctgtaaaaccactcccagtaccaatatatgtcttagtcagggttatccagagaaataaaatcaataaaatctgtcctctgaaacctggagacccagctggtgtagtctgaaggcctgaaagtcaaagattcaatggtgtaattttagtcccagtttgtaggcctggcatttcaaagaaaggagaggaatagatattccagctcaatcaatcaggcagagaaagagtgaattctcctgtccttcaccattttcttctattcagatgctca

SEQ ID NO: 585020 - DNA, 390 bp, Homo sapiens
gttagtgctctctttactaccggaaatagagtcatccaaacctttacatctaatcagattagacaatttattccaaaatctacagcatcaatttgggaaasttatttataaaattctgtttctgtaaaaccactcccagtaccaatatatgtcttagtcagggttatccagagaaataaaatcaataaaatctgtcctctgaaacctggagacccagctggtgtagtctgaaggcctgaaagtcaaagattcaatggtgtaattttagtcccagtttgtaggcctggcatttcaaagaaaggagaggaatagatattccagctcaatcaatcaggcagagaaagagtgaattctcctgtccttcaccattttcttctattcagatgctca

SEQ ID NO: 585021 - DNA, 390 bp, Homo sapiens
gttagtgctctctttactaccggaaatagagtcatccaaacctttacatctaatcagattagacaatttattccaaaatctacagcatcaatttgggaaagttatttataaaattctrtttctgtaaaaccactcccagtaccaatatatgtcttagtcagggttatccagagaaataaaatcaataaaatctgtcctctgaaacctggagacccagctggtgtagtctgaaggcctgaaagtcaaagattcaatggtgtaattttagtcccagtttgtaggcctggcatttcaaagaaaggagaggaatagatattccagctcaatcaatcaggcagagaaagagtgaattctcctgtccttcaccattttcttctattcagatgctca

SEQ ID NO: 585022 - DNA, 390 bp, Homo sapiens
gttagtgctctctttactaccggaaatagagtcatccaaacctttacatctaatcagattagacaatttattccaaaatctacagcatcaatttgggaaagttatttataaaattctgtttctgtaaaaccactcccagtaccaatatatgtcttagtcagggttatccagagaaataaaatcaataaaatctrtcctctgaaacctggagacccagctggtgtagtctgaaggcctgaaagtcaaagattcaatggtgtaattttagtcccagtttgtaggcctggcatttcaaagaaaggagaggaatagatattccagctcaatcaatcaggcagagaaagagtgaattctcctgtccttcaccattttcttctattcagatgctca

SEQ ID NO: 585023 - DNA, 529 bp, Homo sapiens
tgctctctttactaccggaaatagagtcatccaaacctttacatctaatcagattagacaatttattccaaaatctacagcatcaatttgggaaagttatttataaaattctgtttctgtaaaaccactcccagtaccaatatatgtcttagtcagggttatccagagaaataaaatcaataaaatctgtcctctgaaacctggagacccagctggtgtartctgaaggcctgaaagtcaaagattcaatggtgtaattttagtcccagtttgtaggcctggcatttcaaagaaaggagaggaatagatattccagctcaatcaatcaggcagagaaagagtgaattctcctgtccttcaccattttcttctattcagatgctcactgaattagttgatatcacacatagagaagggcaatcaagtttactatgtctattgataaaaatgttaatttctcccataaataccatgacagagacactgagaaatgttgtctaaacagatgtctggatcccgtgatccaaga

SEQ ID NO: 585024 - DNA, 581 bp, Homo sapiens
atatcaatagatacagaaaaagcatttgaaaatacatgamacctattcataataaaaagtattaacaaattagaagtagagaggatgggaactccctgtatttgatgaagacacctacaaaaatcctacaggtggaatcatatttaatgttgagagactggaagcttttcttctaagactgggaacaaggcaaagataacttctctcatcatttctactcaacatcatactaaaagtcttaactagagcaataagacaagaaaagaaataaaaaagatagaaaaggaagaattagaactatctgtgctgagtttatattattatctatataacaaatctcaaggaatttgcaaaaacaagaagtttttaaaatctaatttaagtataagatctcagaaaacaaggtcaatatacaaaagttagttacttactatgaaattcatcctttgcagtgagcaatgagaaacaatattagtttctaaaaatgccatttacaattgcacagacatggaaaataaatactgatataaatcagacaaaaggttttaataatctacatgtcttttactacatgtgaaaaa

SEQ ID NO: 585025 - DNA, 581 bp, Homo sapiens
atatcaatagatacagaaaaagcatttgaaaatacatgacacctattcataataaaaagtattarcaaattagaagtagagaggatgggaactccctgtatttgatgaagacacctacaaaaatcctacaggtggaatcatatttaatgttgagagactggaagcttttcttctaagactgggaacaaggcaaagataacttctctcatcatttctactcaacatcatactaaaagtcttaactagagcaataagacaagaaaagaaataaaaaagatagaaaaggaagaattagaactatctgtgctgagtttatattattatctatataacaaatctcaaggaatttgcaaaaacaagaagtttttaaaatctaatttaagtataagatctcagaaaacaaggtcaatatacaaaagttagttacttactatgaaattcatcctttgcagtgagcaatgagaaacaatattagtttctaaaaatgccatttacaattgcacagacatggaaaataaatactgatataaatcagacaaaaggttttaataatctacatgtcttttactacatgtgaaaaa

SEQ ID NO: 585026 - DNA, 581 bp, Homo sapiens
atatcaatagatacagaaaaagcatttgaaaatacatgacacctattcataataaaaagtattaacaaattagaagtagagaggatgggaactccctgtatttgatgaagacacctacaaaaatcctacaggtggaatcatatttaatgttgagagactggaagcttttctyctaagactgggaacaaggcaaagataacttctctcatcatttctactcaacatcatactaaaagtcttaactagagcaataagacaagaaaagaaataaaaaagatagaaaaggaagaattagaactatctgtgctgagtttatattattatctatataacaaatctcaaggaatttgcaaaaacaagaagtttttaaaatctaatttaagtataagatctcagaaaacaaggtcaatatacaaaagttagttacttactatgaaattcatcctttgcagtgagcaatgagaaacaatattagtttctaaaaatgccatttacaattgcacagacatggaaaataaatactgatataaatcagacaaaaggttttaataatctacatgtcttttactacatgtgaaaaa

SEQ ID NO: 585027 - DNA, 581 bp, Homo sapiens
atatcaatagatacagaaaaagcatttgaaaatacatgacacctattcataataaaaagtattaacaaattagaagtagagaggatgggaactccctgtatttgatgaagacacctacaaaaatcctacaggtggaatcatatttaatgttgagagactggaagcttttcttctaagactgggaacaaggcaaagataacttctctcatcatttctactcaacatcatactaaaagtcttaactagwgcaataagacaagaaaagaaataaaaaagatagaaaaggaagaattagaactatctgtgctgagtttatattattatctatataacaaatctcaaggaatttgcaaaaacaagaagtttttaaaatctaatttaagtataagatctcagaaaacaaggtcaatatacaaaagttagttacttactatgaaattcatcctttgcagtgagcaatgagaaacaatattagtttctaaaaatgccatttacaattgcacagacatggaaaataaatactgatataaatcagacaaaaggttttaataatctacatgtcttttactacatgtgaaaaa

SEQ ID NO: 585028 - DNA, 577 bp, Homo sapiens
acatgagagcacagatacttctctgatgtgttgatttcctttattttagatacatagtcagcagtgaaattgctggttcttgaccctaacttggatttaaataatgtaaaagaaaacttatttttrtctcataattggcacttattatcaagtgctgatgaaaatattttcatttcaggtgatattaaattctactctaatgcaaaagataaaggaatggtatcaatgaaaatgacggagtgagggcatcagcaaattacttcctccataaaggcaattttaaaaactggcaaaaataatcagggtcaacatttttagaacttgaaaaattagccaaatgctttgaggaatccacaaagtgtttattcaaaaaacaaacaaaaaaggtggaagtttggtaagaactgtaagtggctgtactaatttatagtcccacgaacagtaaacgagcatccttctttatctacatcctcagcagtatctcttattttctctttttgaaaaaaagaaattctctaactagggttagagaatatctcattgttttgatctgcatttttctgaagatcagtcatgt

SEQ ID NO: 585029 - DNA, 576 bp, Homo sapiens
tgaaaatgacggagtgagggcatcagcaaattacttcctccataaaggcaattttaaaaactggcaaaaataatcagggtcaacatttttagaacttgaaaaattagccaaatgctttgaggaatccacaaagtgtttattcaaaaaacaaacaaaaaaggtggaagtttggtaagaactgtaagtggctgtactaatttatagtcccacgaacagtaaacgagcatccttctttatctacatcctcagcagtatctcttattttctctttttgaaaaaaagaaattctctaactagggttagagaatatctcattgttttgatctgcatttttctgawgatcagtcatgttaaacatttttcatacacctatttgccatttgcatgtttcctggtgagaaatgtctatttaatcttttgcccagttcttaatcagatttcttttctattggactgtttaagcatctcatatactctggttactagttccttgtcagattgacagtttgcaaatacattattcaactccatggcctgcatcttcagtttgttgatggtcttgtttgctagacagaa

SEQ ID NO: 585030 - DNA, 576 bp, Homo sapiens
tgaaaatgacggagtgagggcatcagcaaattacttcctccataaaggcaattttaaaaactggcaaaaataatcagggtcaacatttttagaacttgaaaaattagccaaatgctttgaggaatccacaaagtgtttattcaaaaaacaaacaaaaaaggtggaagtttggtaagaactgtaagtggctgtactaatttatagtcccacgaacagtaaacgagcatccttctttatctacatcctcagcagtatctcttattttctctttttgaaaaaaagaaattctctaactagggttagagaatatctcattgttttgatctgcatttttctgaagatcagtcatgttaaacatttttcatacaccwatttgccatttgcatgtttcctggtgagaaatgtctatttaatcttttgcccagttcttaatcagatttcttttctattggactgtttaagcatctcatatactctggttactagttccttgtcagattgacagtttgcaaatacattattcaactccatggcctgcatcttcagtttgttgatggtcttgtttgctagacagaa

SEQ ID NO: 585031 - DNA, 509 bp, Homo sapiens
gtaatagtctgtaatgattatttgtatttctgtggtctcagtttttatgactccttttttggtttctgattttatttaggtcttctctctttcttattctggctaaagrtttgttgaatttgtttgtcttttcaaaaaacaacttttttttaattgatcttctgtattatttttagtctaatttttattcatttctgctaagatttttatcatttgttttcatttactcactttgggttttgtttattcttgcttttctagttccttaaggtgcattgttagattgtttattttgtttctgatttctgtagctaggcatatatacatttataattgttataacttcctgatgagttgaatcactcatcattttataatgtctttgacttcagtaacaaattttgtcttaaaatatatgtgtctgtattagtatatctagctctattttggccactcatggtatatccccttccttcactttaatttcaacgtattgtgtctttgaatat

SEQ ID NO: 585032 - DNA, 515 bp, Homo sapiens
tacaatattaatacttttgtgtctggctcatttcactcagcataatgttttcaaggttaatccaagttttagcatgcatcagaacttcatttctttctattgctgaataatattttattgcagttatatagaatattttgtttatccattcatctgtggatagttacttgggtagctttcaccgtttgacaattatgaataataaatattggtatacaagtacctgcatgagactttgttttccattcttttggtcatatacctaagagagaagttgctgggtcatatgggagttctattattaacatcttggaaaactgccaaacttttctacagcatctgyactattttacattcccatcatcaatgtctgagggttacaatatctccacattctcaccaagatttattatttttcttttttaaaaaaattatataattatcctggtagatatgaagtaacaactcattgtggcttttatttgaatttccctaatggctaaaaatgttggacg

SEQ ID NO: 585033 - DNA, 575 bp, Homo sapiens
tcaaatctaagcttgtgcatgaataagataaaaaaattatcaaattcatgttcagtctggtaggagtgacctagacaaaacatgaggaagaaagagggactatctcagtaattttatgggattattatgacttttaaaaatatttgatcttttgaacatctcacaggataaaatattgaattaattagaatatttagttgactgaaacacccattttcctactcattttaaaaaactgaattttaatgtgtataagtatagattaatgaacgtatacataaacagagaaagagagagagggaaaaaaacattctctgcatattgtttcttcttgcaagaatgttaagaacaaaggtttttctttatgtctctctccaattaagttaaagatggtggagctgcatactagttgctattataatagcttttgcataacattttrttcacagttgggaaaaacaaatgagcaaataaacattgagatgtaaaagcagtataccactacctttaatgtaccagtctttattaggtaagagagtgtattgatgtgtatattatcttctgctttatgaggt

SEQ ID NO: 585034 - DNA, 575 bp, Homo sapiens
tcaaatctaagcttgtgcatgaataagataaaaaaattatcaaattcatgttcagtctggtaggagtgacctagacaaaacatgaggaagaaagagggactatctcagtaattttatgggattattatgacttttaaaaatatttgatcttttgaacatctcacaggataaaatattgaattaattagaatatttagttgactgaaacacccattttcctactcattttaaaaaactgaattttaatgtgtataagtatagattaatgaacgtatacataaacagagaaagagagagagggaaaaaaacattctctgcatattgtttcttcttgcaagaatgttaagaacaaaggtttttctttatgtctctctccaattaagttaaagatggtggagctgcatactagttgctattataatagcttttgcataacattttattcacagttgggaaaaacaaatgagcaaataaacattgagatgtaaaagcagtataccactacctttaatgtaccagtctttattaggtaagagagtgtwttgatgtgtatattatcttctgctttatgaggt

SEQ ID NO: 585035 - DNA, 529 bp, Homo sapiens
ggatttttgggaagagggattgcagtttcaaagccaaaccaaaccaaatgcccatcratgatagactggataaagaaatgtggcacaaaaacaccatggaatactatgcagtcataaaaaagaatgagttcatgtcctttgccagggcaggaatgaagctggaaaccatcattctcagcaaacaacacaagaacagaaaaccaaacaccgcacattctcactcataagtgggaggtgaacaatgagaacacatggacacagggaggggaacatcacacactgaggcctaacaggtgttgtggggcaagagaagggagagcattaggacaaatacctaatacatgcagggcttaaaacttagatgatggggtgatgggtgcagcaaactaccatggcacatgtatacctatgtaacaaacctgcacgttctggacatgtatcccagaacttaaagtatataaaaaaaaaaatcacctgagatcaggagttcaaaaccagcctggccaacatggtgaaaccccatctctac

SEQ ID NO: 585036 - DNA, 529 bp, Homo sapiens
ggatttttgggaagagggattgcagtttcaaagccaaaccaaaccaaatgcccatcgatgatagactggataaagaaatgtggcacaaaaacaccatggaatactatgcagycataaaaaagaatgagttcatgtcctttgccagggcaggaatgaagctggaaaccatcattctcagcaaacaacacaagaacagaaaaccaaacaccgcacattctcactcataagtgggaggtgaacaatgagaacacatggacacagggaggggaacatcacacactgaggcctaacaggtgttgtggggcaagagaagggagagcattaggacaaatacctaatacatgcagggcttaaaacttagatgatggggtgatgggtgcagcaaactaccatggcacatgtatacctatgtaacaaacctgcacgttctggacatgtatcccagaacttaaagtatataaaaaaaaaaatcacctgagatcaggagttcaaaaccagcctggccaacatggtgaaaccccatctctac

SEQ ID NO: 585037 - DNA, 529 bp, Homo sapiens
ggatttttgggaagagggattgcagtttcaaagccaaaccaaaccaaatgcccatcgatgatagactggataaagaaatgtggcacaaaaacaccatggaatactatgcagtcataaaaaagaatgagttcatgtcctttgccagggcaggaatgaagctggaaaccatcattctcagcaaayaacacaagaacagaaaaccaaacaccgcacattctcactcataagtgggaggtgaacaatgagaacacatggacacagggaggggaacatcacacactgaggcctaacaggtgttgtggggcaagagaagggagagcattaggacaaatacctaatacatgcagggcttaaaacttagatgatggggtgatgggtgcagcaaactaccatggcacatgtatacctatgtaacaaacctgcacgttctggacatgtatcccagaacttaaagtatataaaaaaaaaaatcacctgagatcaggagttcaaaaccagcctggccaacatggtgaaaccccatctctac

SEQ ID NO: 585038 - DNA, 529 bp, Homo sapiens
ggatttttgggaagagggattgcagtttcaaagccaaaccaaaccaaatgcccatcgatgatagactggataaagaaatgtggcacaaaaacaccatggaatactatgcagtcataaaaaagaatgagttcatgtcctttgccagggcaggaatgaagctggaaaccatcattctcagcaaacaacacaagaacagaaaaccaaacaccgcacattctcactcataagtgggaggtgaacaatgagaacacatggacacagggaggggaacatcacacactgaggcctaacaggtgttgtggggcaagagaagggagagcattaggacaaatacctaatacatgcagggcttaaaacttagatgatggggtgatgggtgcagcaaactaccatggcacatgtatacctatgtaacaaacctgcacgttctgracatgtatcccagaacttaaagtatataaaaaaaaaaatcacctgagatcaggagttcaaaaccagcctggccaacatggtgaaaccccatctctac

SEQ ID NO: 585039 - DNA, 532 bp, Homo sapiens
acagaattgaataagaagtgaatttcttctttccagaggccaggcgcggtggctcacgcctgtaatcccagcacttcgggaggccgaggygagcggatcttgaggtcaggagattgagaccatcctggccaacacggtaaaatcccatatctactaaaaatacaaaaattagccaggcacggtggcatgagcctgtagtcccagctactcaggaggctgaggcaggagaatggcttgaacccgggaagtagaggttgcagtgagccgagatcacaccacagcactccagcctgggcaatagagcaggactctgtctcaaaaaacaaaacaaaacaaaaaattaagaaatatggtctatattgtaaggcattttctgtggatccaggcctgttatgtaattaggactggggtgggagaaggaccgtcttgtcttatatttagacttctgatctgatcactaaataagttacaggtattttgatgttgtcatgtttaaagtgtcatttaaaataaacaattgaaatattatcaa

SEQ ID NO: 585040 - DNA, 566 bp, Homo sapiens
aaattctaaatttttcacaaaattttacaaatttaattctgagtttgtaaaatgtwttataatagctgaatgagcaactaattaaacataatatatatttctgtctggtttttcgttatgtttctattgtggttaaatacatgtaacctaaaattgaccattttatgatttttaagtataaaattgcttccatttcacatttccatggagctgtcatcaccatctatctccagaaatttgttactttactgaagttctgcttgattgtgatttttaagagtagaaaaagtatttttatacttttttgcatcaaaacgagatttaaatacattactcaaaaaataaactataattttggaactctgtgatcgaggcctagtaaataagttggtttttctttagagtgagtcttaaagattaaaaagttctttcaggtcttaaataaaatgtgaaatactaagaaacaaagctctcgggcgtggtggctcaagcctgtaatcccagcactttgggaggccgaggcgggcggatcacaaggtcaggagatcaagaccatcctggctaac

SEQ ID NO: 585041 - DNA, 566 bp, Homo sapiens
aaattctaaatttttcacaaaattttacaaatttaattctgagtttgtaaaatgttttataatagctsaatgagcaactaattaaacataatatatatttctgtctggtttttcgttatgtttctattgtggttaaatacatgtaacctaaaattgaccattttatgatttttaagtataaaattgcttccatttcacatttccatggagctgtcatcaccatctatctccagaaatttgttactttactgaagttctgcttgattgtgatttttaagagtagaaaaagtatttttatacttttttgcatcaaaacgagatttaaatacattactcaaaaaataaactataattttggaactctgtgatcgaggcctagtaaataagttggtttttctttagagtgagtcttaaagattaaaaagttctttcaggtcttaaataaaatgtgaaatactaagaaacaaagctctcgggcgtggtggctcaagcctgtaatcccagcactttgggaggccgaggcgggcggatcacaaggtcaggagatcaagaccatcctggctaac

SEQ ID NO: 585042 - DNA, 566 bp, Homo sapiens
aaattctaaatttttcacaaaattttacaaatttaattctgagtttgtaaaatgttttataatagctgaatgagcaactaattaaacataatatatatttctgtctggtttttcgttatgtttctattgtggttaaatacatgtaacctaaaattgaccattttatgatttttaagtataaaattgcttccatttcacatttccatggagctgtcatcaccatctatctccagaaatttgttactttactgaagttctgcttgattgtgatttttaagagtagaaaaagtatttttatacttttttgcatcaaaacgagatttaaatacattactcaaaaaataaactataattttggaactctgtgatcgaggcctagtaaataagttggtttttctttagagtgagtcttaaagattaaaaagttctttcaggtcttamataaaatgtgaaatactaagaaacaaagctctcgggcgtggtggctcaagcctgtaatcccagcactttgggaggccgaggcgggcggatcacaaggtcaggagatcaagaccatcctggctaac

SEQ ID NO: 585043 - DNA, 566 bp, Homo sapiens
aaattctaaatttttcacaaaattttacaaatttaattctgagtttgtaaaatgttttataatagctgaatgagcaactaattaaacataatatatatttctgtctggtttttcgttatgtttctattgtggttaaatacatgtaacctaaaattgaccattttatgatttttaagtataaaattgcttccatttcacatttccatggagctgtcatcaccatctatctccagaaatttgttactttactgaagttctgcttgattgtgatttttaagagtagaaaaagtatttttatacttttttgcatcaaaacgagatttaaatacattactcaaaaaataaactataattttggaactctgtgatcgaggcctagtaaataagttggtttttctttagagtgagtcttaaagattaaaaagttctttcaggtcttaaataaaatgtgaaatactaagaaacaaagctstcgggcgtggtggctcaagcctgtaatcccagcactttgggaggccgaggcgggcggatcacaaggtcaggagatcaagaccatcctggctaac

SEQ ID NO: 585044 - DNA, 563 bp, Homo sapiens
ccagggtctcgggtctaatccaagaatgtcatatgagttgagaaaagggaggcatagttccataaaagaaatctcaactagttttaccaacaaacagtagtggagaaaaagaatgtttagcagagaaagatacaaaaaawaaaaaaaaaaaagataaaagctgtgcactaaggtatctgtatttatttgtactgatatatactatttgatttataaattgatattggggtgcgtagtaacctggatagctatcaaaacctttgtttctgacatacatcatttaaataactgtagttctcatttaaaaatactgtttaatgaagatgttacagaaacttgtaaattaagggtgagaagttgatattctgtcttcagttgttaactttggtgatcaaaagataaaattgtatctcagtatactaagaactaaagaaaagttaacagggaaatttgatggtaatcttctgaaccctcatttggtttatcagcatgtctcctcataggcttattctcattacaatagtttaatgaatgtattttgtactgtgtccttaggaatactg

SEQ ID NO: 585045 - DNA, 451 bp, Homo sapiens
aatttgttatatatatatatgtgtgtgtgtgtatatgtatgtgtatatatatgtgtgtatatatatgtgygtacgtgtgtgtgtgtgtgtgtgtacatatatatataattttcaagcggtatcttgatatccacattaaactgactgtacttagaaaaacttttcagggaggcaaaaatagagtgcccacatgactactgcttctgtgaatcccctaagaatggccttctctctcactaggaagcctaaaactgtttgcaattagacaacaaaaagcaattaaaagtatttattttttaaaagcttgttttagccaacccaccctcaaaagagagacagagagtctgagagagaagaaaaatttagtggcctacattgtttgggattggtgagactagagagtataaagaaatctccatactggtcatcgatatgaagatatcagagttat

SEQ ID NO: 585046 - DNA, 451 bp, Homo sapiens
aatttgttatatatatatatgtgtgtgtgtgtatatgtatgtgtatatatatgtgtgtatatatatgtgtgtacgtgtgtgtgtgtgtgtgtgtacatatatatataattttcaagcggtatcttgatatccacattaaactsactgtacttagaaaaacttttcagggaggcaaaaatagagtgcccacatgactactgcttctgtgaatcccctaagaatggccttctctctcactaggaagcctaaaactgtttgcaattagacaacaaaaagcaattaaaagtatttattttttaaaagcttgttttagccaacccaccctcaaaagagagacagagagtctgagagagaagaaaaatttagtggcctacattgtttgggattggtgagactagagagtataaagaaatctccatactggtcatcgatatgaagatatcagagttat

SEQ ID NO: 585047 - DNA, 601 bp, Homo sapiens
agttctaatgtgtggccatgttaagagctgctgctttaaagactccacaagaaaactattagaacggataagcaaattcagtaaagttgcaggatacaaaattaatatacaaaaatcagtagcatttttgtatgtcaatagttaacaatctgaaaaaggaacaaaaaagtaatcctatttacaatagccacatataaaattaaatacctaggaattaactttaccaaagaaatgaaagatatctataatgaaaattagaaaacactgatgaaataaattgaacaggacaccaaaaaatggaaaaagattttatgttcatggattggaagaatcaatattaataaaatttccataccaccaaaagcaatctacaggttcagtgcaatcactatcaaaataccaaagatattcttcacagaaatagcaaaaacaatcctaaaatgtatatggaaccacaraagacccagaatagccaaagatatcctaagcacaaagaatgaaactggaggaatcacattacctcatttcaaattatactacaaatctgtaataatcaaaacaacatggtactggcataaaaacagacacatagatcaatgaa

SEQ ID NO: 585048 - DNA, 589 bp, Homo sapiens
ctggcttcttccaatcacccttttattagctgctcttctttctctttcctctatttctccattttttcactcaccatctacttcatgaaatggtaaggggagaagttatggaaagtaatgatcatctaacattactatagctaagaataagcatagttagggaggacaaattcctgcaaaaatataatagtatattctaaaaactcagacgtgggtatttcagggaacatctgagaaattactgtccttcattagcatggagaatctataattaattatgtatatagttatttattgtggctgtcaatattataagaattttagtggtttactgcacaactttcttcaaatataatcttgttctacaaacaaaataatttgctgaaaagcagtgaaatatttcaatttaatcactctttattggttaatggtttgaattcagatatttatgcaactgttggttgatgctgtttataagtctaatacaacctttttctaattaaattttatttgtattttcatcattaattgaagtgaaaaataaaatatgtcagtattattagatttyataataatgtgtactattatc

SEQ ID NO: 585049 - DNA, 494 bp, Homo sapiens
caccctttaaccagtgtctattttcttcactacagtcagagtcatcctgctataaccagaagcctctcctctgcataacgtatcccatctcacagagtgaaacccaaggaacttaaaagggcctgtgaggctctacatggtcagtccctgatatatttccaaacagcactcaaacctccctgttctaacaccttctttgtgcatgccaaacctgttcatgccacctcaaggtctttgcacttgctgatctttctgccagcgttcttccttcagatgccctcgggctggctccttcaactcctttagtctctgctccaatgtcattgcatcagcyaggccttcctgacaccgtatataaaataacacccacactcctatcactctctgtgtgccttaccctgcaattttttcttcatagcacttctctcctctccattggatgtgtgtgtgtttaggtatacatacatgtggtatatatatttgtatatacatat

SEQ ID NO: 585050 - DNA, 534 bp, Homo sapiens
ctgccctcttgctgggtcccacacggtctctcctctgtgtttgtgcacatgggaagagacagctgtctggtgtctgttcttataaggacaccgcttctatcctaatcagaccccacccttaggaccacacttaccctttatgacctccttaaaggccctgtytccaaacatatttatgctggggattagggattcaatatgtaaattttgggaggacataattcagtctgtaacacttctctattcagtagattccctttctttttcttttcttttcttctcttttcttttgagatggagtttcactcttgttgctcaggctggagtatattccctttctgtgccttaaggaatggcattcataccactggtagaacacacaatgattttcagttagatacttatggactggtacaaaatataagccatgtattcatctatgtgtgcattaaagaatgacaaacacaactagtacatagaatttgtgatgttcacaagtgaagggagtattcagtattgctctgcaggaggctg

SEQ ID NO: 585051 - DNA, 535 bp, Homo sapiens
tatatctgtaattactcaagttcttaggaaaagaataaaaatacaaaattttcaattataaaaataagctgtttttcttcctaagatgagtaatttaaaaaatcataaagtcgtttgcatatatgtttcagaagaagataacttatgaaatgttatattgatattttatagttttcctgatattgctaaaggaaaaaattaatatttatataatatggcccaatccttttttagataatctctgagagttagtaaaactaaactatatcagagaaatagaaattataaactccataattaagattttcaatttataatttgaacttgtgaagtaraaaggattgaggtaattgagtttagtctagtggacagaagtttgaagaatccttccctttcaacttccctccactacacaaatgaccatcacagagaggggactattaatctatattttccacagagtatgtaaatagagtcagaaccaatgttgcaatttttttttcctgaaactcagggttaaaactgcactaaaatg

SEQ ID NO: 585052 - DNA, 535 bp, Homo sapiens
tatatctgtaattactcaagttcttaggaaaagaataaaaatacaaaattttcaattataaaaataagctgtttttcttcctaagatgagtaatttaaaaaatcataaagtcgtttgcatatatgtttcagaagaagataacttatgaaatgttatattgatattttatagttttcctgatattgctaaaggaaaaaattaatatttatataatatggcccaatccttttttagataatctctgagagttagtaaaactaaactatatcagagaaatagaaattataaactccataattaagattttcaatttataatttgaacttgtgaagtaaaaaggattgaggtaattgagtttagtctagtggacagaagtttgaagaatccttccctttcaacttccctccactacacaaatgaccatcacagagaggggactattaatctatattttccacagagtatgwaaatagagtcagaaccaatgttgcaatttttttttcctgaaactcagggttaaaactgcactaaaatg

SEQ ID NO: 585053 - DNA, 552 bp, Homo sapiens
gccttttacaataccttgtcacgtgggcctctccatagggcacctcatcacatggcaactggcttccatcagagggagcaatggaaagagcaggagaagggtgaccaaggcaggcatcgtagtctccttgtagcctcacctcagaagcgatgttacttttgctgtattctctttgttagaagtgagtcactaggtccaggggtggaattttacaagggtgtgaatggcaggaggtgagggtgatcagggccatttaaaggctgcctaccagtgttgaagaaagttgttgacttctatgagctgtagcagcagacagtgctatgcaaggagaatggctgtytcagaagtccagctcctcacatgggtttaaacgtgttgccttttccccctgatacattttgtttaaatccatggtcatcttgccatttagtggtgtggtttaattgcatatttgggttagtctgtatgtaaacatttaacataggtgtctctgggttaaacaggaatcctattcatcttcttcaccgatatggtctgtggactctgatgagc

SEQ ID NO: 585054 - DNA, 552 bp, Homo sapiens
gccttttacaataccttgtcacgtgggcctctccatagggcacctcatcacatggcaactggcttccatcagagggagcaatggaaagagcaggagaagggtgaccaaggcaggcatcgtagtctccttgtagcctcacctcagaagcgatgttacttttgctgtattctctttgttagaagtgagtcactaggtccaggggtggaattttacaagggtgtgaatggcaggaggtgagggtgatcagggccatttaaaggctgcctaccagtgttgaagaaagttgttgacttctatgagctgtagcagcagacagtgctatgcaaggagaatggctgtctcagaagtccagctcctcacatgggtttaaaygtgttgccttttccccctgatacattttgtttaaatccatggtcatcttgccatttagtggtgtggtttaattgcatatttgggttagtctgtatgtaaacatttaacataggtgtctctgggttaaacaggaatcctattcatcttcttcaccgatatggtctgtggactctgatgagc

SEQ ID NO: 585055 - DNA, 569 bp, Homo sapiens
ttattaccgagtatcttcactgcccagctaaggaccctggacttgatcccataagcagcggaawgctgttgagggatccttgcatctaatagaggctaccaacgcccgagggcgtgatttgttccaggccccaggggacgcttggttgcagttttatctgtcaaatcagtcagagggagtcccctccattagggtcaacagtgacccccaaccccttcccttctgcctcttctatttctaggacctgacagtgacacaagatagacctggtctcagacattggttctgtcacatcagtaggtgactgggcaagacccttaaccataggaacctcagtttcctcatcagaaatatgggggaataacattgtcctcacagggttgtgagaatgacatgaactggctcatgtggggtccaggcccagccaccccctggcagatgctggtggtaccagacatgtccttttcctgccgagcgggcagggctgctggcagcaggcagctttcacactaattgcccacagccttctcctctgtggctctgcgagcaacaagacagcgaatgacccg

SEQ ID NO: 585056 - DNA, 567 bp, Homo sapiens
aggctttggagtagagaaaaataaggttttggaggttccttgtatttaaggagaacagggtgatgcttcagtcaaacatccagaggccccgatggctacgagggctgggaaaatgtcttcagagatgagagaaactcgagaaagttctgcttatttgctccaggtcatcttgggtgctacctttggtgacctgaccrtacttggcagatggtcgaggtagtgtgatccaattgtgagactacctatagctgagatttttgttgtccacagccacaagagcaaggaccatgtcttttaaaaaatatattatttatttatttatttatttattttgggggcagggtctggctttgttgcccaggctggagtgcagttgtgcaatcttggctcactccaacctccacctcctgggtttaagccatccttccacctcagcttccccagtagctgggactacgggcatgcgccaccacacccagctaactaaaaacaattttttttttttttttttttttttgtaaagacagagttttgccatgttgcccaggctggtctcgaactcctggg

SEQ ID NO: 585057 - DNA, 538 bp, Homo sapiens
tgcatttgtttaggctccttaagccaaaatgtcagaggtgtttgaaccaaagcaactccatcttgaagaggggctggataaaataaggcgaaggcctactgggtttcattcccagtaggttaaggcattcttagtcacaggatgagataggaggtctgcacaagatacaggtcataaagaccttgctgataaaacagattgcaataaagaatctggccaaatcccaccaaaactaagacggcattaagagtgacctctcatcatcctcactgctacactcccaccagtgccatgacagtttacaactgccaaggcaatgtcaggaagttaccctatatggcctaaaaagaggaggtytgaataatccaccacttgtttagcatgaaataaccatcaagaaatacccataaaaacgggcaaccagcccttggggctgctctgtctatggagtagccattcttttattcctttacttccttaataaacttgctttcactttactcggaagactcaccctcaatttttttttttttttttt

SEQ ID NO: 585058 - DNA, 449 bp, Homo sapiens
aaaagagaaacccattttctgggtagaaattaaagccttctgcagaaatttgcataagtagccagaagccaaatgctaatcaccaggagaatggggaaagtgtcttaaaggcatgacagagaccttcacagcagcctctcccatcacaggcccagaagcctaggagggaaaaatgatttcgtgggtcatgtccagggaccccctgctgtgtgcagcctcaggacttgatgccctgcttcccagccactccagyagttgataaaaggggccaaagcaaagctcaggctattgcttcagagggtgcaagccacaagccttggcagcttttacatggtgttgtgcatgcaggtgcatagaagacaagaattgaggtttcagaacctttgcctagatttcagaggatgtatggaaatgcctggatgtccagacagaattttgctgcaggggtg

SEQ ID NO: 585059 - DNA, 581 bp, Homo sapiens
gtataatatataatatatgtgatataatatatattatatattatatataatatatataaataatatataatatatattatattatattatatgttaaatatatattatatataatataataagtatatttataatatatatttaataatatatatattaaatgcagaytaaatgcagggactctgcatttaatgttacagctcgggggattatgaaagttctaacagtttatttgcttggttagctgcaaaagatggcccactgtgagcaagctggaaatgcctaatctcccttggtctaatgtagagtaaggggtcaaaaggcttaggatgggcctgccacggtggttcatgcctgtactcccagcactttgggaggccatgacaggtggattgcttgaggtcaggagtttgataccagcctggcaaacatggtgaaactccatctctactaaaatacaaaaatcagccaggcatcgcgacgcatgcctctaatcccagctaccagggaggctgaggcaggagaattacttgaacccaggaggtggaggctgagacaggagaactgcttgaacacaggaa

SEQ ID NO: 585060 - DNA, 430 bp, Homo sapiens
cacacaataacatctgtgaatcttgatcataattttgaacaagaggaacaaatacaaacactttctgtattagtctatttatagggggtaaattattctttgccatttgacatcaggacagtggttacattttgggaaaagggagagggaagtaatgtggttggggcatgaggagcctcctatgtcctttgagtgtttcttgacccaggttggtagtttcatgggtgtgttcactctgaactaattccttgagctatacaattatgatttgygtaattcaattatattatatttcagtggaagcttaagaaagagaaacattgctgctaaaattcactaagtgaaggcttatggggaagtagaccttcatagcatcccatacttgcaaaaggggcaatctaactgaaggatgatatcagtatcagatatc

SEQ ID NO: 585061 - DNA, 430 bp, Homo sapiens
cacacaataacatctgtgaatcttgatcataattttgaacaagaggaacaaatacaaacactttctgtattagtctatttatagggggtaaattattctttgccatttgacatcaggacagtggttacattttgggaaaagggagagggaagtaatgtggttggggcatgaggagcctcctatgtcctttgagtgtttcttgacccaggttggtagtttcatgggtgtgttcactctgaactaattccttgagctatacaattatgatttgtrtaattcaattatattatatttcagtggaagcttaagaaagagaaacattgctgctaaaattcactaagtgaaggcttatggggaagtagaccttcatagcatcccatacttgcaaaaggggcaatctaactgaaggatgatatcagtatcagatatc

SEQ ID NO: 585062 - DNA, 565 bp, Homo sapiens
ctgacctcagtcacattatgcattttaaaataacctcatagcctttctcagctgcagtctgaaagcataactgctcacccaggaaactcctggaaaacacacctatctgtgacactaaagacagtcytgaagaccttggtgtcagctgtggatgctgaaatgacctcgtgtttcagctccagtctgtctcagcaacagactggggcagtacagtgccagcccagggacccatccagtgatccaatgggatctctcccagagacctagaggaagccacacccatcagaacacctggtaacaggcctgtcatatgtaagccctgaaaaagatcctcatcccagtgccagcaccacagaccaaggtcctgtagacagtccagtacacctagggaccaaatagtacccacacccactaaagtctctggtaccagccctgcaaaactttctctccagtatggacctagcatcaaccacaagacccttatccagccctaatttatcgtgatcccacaggcaacttcatcagcccagagatctaacaggagaagaatttaacatgccaaaaa

SEQ ID NO: 585063 - DNA, 565 bp, Homo sapiens
ctgacctcagtcacattatgcattttaaaataacctcatagcctttctcagctgcagtctgaaagcataactgctcacccaggaaactcctggaaaacacacctatctgtgacactaaagacagtcctgaagaccttggtgtcagctgtggatgctgaaatgacytcgtgtttcagctccagtctgtctcagcaacagactggggcagtacagtgccagcccagggacccatccagtgatccaatgggatctctcccagagacctagaggaagccacacccatcagaacacctggtaacaggcctgtcatatgtaagccctgaaaaagatcctcatcccagtgccagcaccacagaccaaggtcctgtagacagtccagtacacctagggaccaaatagtacccacacccactaaagtctctggtaccagccctgcaaaactttctctccagtatggacctagcatcaaccacaagacccttatccagccctaatttatcgtgatcccacaggcaacttcatcagcccagagatctaacaggagaagaatttaacatgccaaaaa

SEQ ID NO: 585064 - DNA, 565 bp, Homo sapiens
ctgacctcagtcacattatgcattttaaaataacctcatagcctttctcagctgcagtctgaaagcataactgctcacccaggaaactcctggaaaacacacctatctgtgacactaaagacagtcctgaagaccttggtgtcagctgtggatgctgaaatgacctcgtgtttcagctccagtctgtctcagcaacagactggggcagtacagtgccagcccagggacccatccagtgatccaatgggatctctcccagagacytagaggaagccacacccatcagaacacctggtaacaggcctgtcatatgtaagccctgaaaaagatcctcatcccagtgccagcaccacagaccaaggtcctgtagacagtccagtacacctagggaccaaatagtacccacacccactaaagtctctggtaccagccctgcaaaactttctctccagtatggacctagcatcaaccacaagacccttatccagccctaatttatcgtgatcccacaggcaacttcatcagcccagagatctaacaggagaagaatttaacatgccaaaaa

SEQ ID NO: 585065 - DNA, 565 bp, Homo sapiens
ctgacctcagtcacattatgcattttaaaataacctcatagcctttctcagctgcagtctgaaagcataactgctcacccaggaaactcctggaaaacacacctatctgtgacactaaagacagtcctgaagaccttggtgtcagctgtggatgctgaaatgacctcgtgtttcagctccagtctgtctcagcaacagactggggcagtacagtgccagcccagggacccatccagtgatccaatgggatctctcccagagacctagaggaagccacacccatcagaacacctggtaacaggcctgtcatatgtaagccctgaaaaagatcctcatcccagtgccagcaccacagaccaaggtcctgtagacagtccagtacacctagggaccaaatagtacccacacccactaaagtctctggtaccagccctgcaaaactttctctccagtatggacctagcatcaaccacaagaccyttatccagccctaatttatcgtgatcccacaggcaacttcatcagcccagagatctaacaggagaagaatttaacatgccaaaaa

SEQ ID NO: 585066 - DNA, 467 bp, Homo sapiens
caatttcccaaatttggtgaaagacatgaatataaatatccagaaagctcaacaaaatccaaatatgctaaatcaaagtgacccrttccaagacacataataaccaaactgtctaaaacaaacagcagagacttttgaacacggaaagaaacaactcatcacatataagggagtctcaataaatttagcacataaagtagaaaatctagaggagatgaataaattcctgaaaatatacaatcctcctagagtaaaccaggaagaaatagaaactgtaatcagtccaataacaagcaccaagattgaaaggataaaatcctcctagattaaaccaggaagaaatagaaactgtaatcagaccaataacaagcaccaagattgaaaggataatgaaaaagttagcaacaaaaagaagtccaggaccaaactgattcacagctgaattctatcagacattcaaagaaaaa

SEQ ID NO: 585067 - DNA, 539 bp, Homo sapiens
taacaacacttaaatgttgatatgaagtcaataaatcttatgtcacatgataaaggaaaaataaagggagtaagatgaagatattttcttagtacaagtgtatacatgcacaaacatgttcttaacaaaatgaggaggaaatactcatgacaattacaatcctcagttcttcaactggtcacgtgataatagccacmcattctgtattccctttgccttcagcaagcacctcagcaagtcatgggttttttacctggtagagtgacccaaaccttcattcctgaagggtctaggctgtttgtggattgggctgttgtagtttcccattgaccttagtcacagggcatggtaataataagatacgccctaagggagctcctgtattccaaacatactcttccttacctccattgtggagtagtagactgatttcatcttgatattctgggtcagttatccagtcaacactgtaactcccttcttaccctgttgacttagaggtaagaggagcccaaaatggccagatgacaattttaact

SEQ ID NO: 585068 - DNA, 450 bp, Homo sapiens
ccatgaattcatcttttttggctcccacatatgagtgagaacatgtgatatttgtctttctgtgtttggttttgcttaacataatgatctccatttccatccatgttaacaggatttctttcttttaatggctgaatagtattttgtgtgtgtgtgtgtgtgtgtgtrtatatatatatatatatatatatatatatatatatatgtatatataccacattttctttatttattcattcactgatagacacttgggttgattttatcacttagttgttgtgattagtactgcaattaatatgagggtattaactgcaccctttgatgcaatcaaaatcagtagatttccttccctttgaataaatacacagtagtgggattcctggatcatatggtagttgtatatttagttttcttgagaaacctctatagtgttttctataatggatt

SEQ ID NO: 585069 - DNA, 450 bp, Homo sapiens
ccatgaattcatcttttttggctcccacatatgagtgagaacatgtgatatttgtctttctgtgtttggttttgcttaacataatgatctccatttccatccatgttaacaggatttctttcttttaatggctgaatagtattttgtgtgtgtgtgtgtgtgtgtgtatatatatatatatatatatatatatatatatatatatgtatatataccacattttctttatttattcattcactgatagacacttgggttgattttatcacttagttgttgtgattagtactgcaattaatatgagggtattaactgcaccctttgatgcaatcaaaatcagtagatttccttccctttgaataaatacacagtagtgggattcctggatcatatggtagttrtatatttagttttcttgagaaacctctatagtgttttctataatggatt

SEQ ID NO: 585070 - DNA, 556 bp, Homo sapiens
tgagatccccatctctacaaaaaaaaatataaaatttagttggktatggtggtgcatgcctgtggtcccagctactcaggaggctgaggtgggaaaattgcttgtgcctgagaggtggaggctgcaatgagccaagatcgcaccactgcactccagcctgggtgaacctgtctcaaaaataaataaataaataaaataacgtttaaagtccttgactttattcttttctttaacgagaccttactgtttacatctaatcaaaaaaagagtgttcaacatagggagaaagtaaggttttgaagtcaaatactattaaagaggaatggtcataaactaggaaagcaaatgttctccaccttttccgttttctcatccgcacatccacacaactactcaaaaataatatttactgaaaaagacatgattttaatctttttatggctgaatagtattctgctgtgtatacatactacatttcctttatccaatcatcctttgatgaatgcttaggtcagttccctgactttgctgttgtgaatagtgctgcaataaacct

SEQ ID NO: 585071 - DNA, 556 bp, Homo sapiens
tgagatccccatctctacaaaaaaaaatataaaatttagttggttatggtggtgcatgcctgtggtcccagctactcaggaggctgaggtgggaaaattgcttgtgcctgagaggtggaggctgcaatgagccaagatcgcaccactgcactccagcctgggtgamcctgtctcaaaaataaataaataaataaaataacgtttaaagtccttgactttattcttttctttaacgagaccttactgtttacatctaatcaaaaaaagagtgttcaacatagggagaaagtaaggttttgaagtcaaatactattaaagaggaatggtcataaactaggaaagcaaatgttctccaccttttccgttttctcatccgcacatccacacaactactcaaaaataatatttactgaaaaagacatgattttaatctttttatggctgaatagtattctgctgtgtatacatactacatttcctttatccaatcatcctttgatgaatgcttaggtcagttccctgactttgctgttgtgaatagtgctgcaataaacct

SEQ ID NO: 585072 - DNA, 598 bp, Homo sapiens
gggagcactacaggtgtgtagagagcagggaggtctgtgaggggtggaaggtatcagggggagcttcagagaggaactggggctgaatgaggcttggaaggatggaaagatggagggaaggggttggagagcaatcctggggaagrgccaagaagaacgaggcttaggcgggaggtggtgtagttgaagaatgagacagtgagtctgtgggattgccatcctgactgaagcaaagagtgtgttttgggaactggtcagccagccgaccatcaagagaagagtagaataagagtagaaatggacatccacctgtcacatgactaaattgtttaacccaaataaaagctaatcaattaacaaataaagctaatcaattagctttataaatgaagctaatcagttgctaaactgtgctctattcttctgccttgacataagaatctttgacctggaacaggtttgaatttagaattttccactccatggactatggcactggagggtggtgaattacatttcccgatcagtgccaacagaaagagaatagggcttgtgataatcagatatatttgcccaaatcacttggataagtttttct

SEQ ID NO: 585073 - DNA, 503 bp, Homo sapiens
tggacattaaacaaatttcrgaaaacagtaatggattctaaatgagatgtgacttaatcagaaatctttttcacatgtcattctgataatgatgtgcagaatagattgaagagaaacagtggtagaaaagaagggttaagagacgattgctgtagtcttgaagaacaatgattgtggtacacagaggttggagaataaataaggaatagagctgagaaatgtttatgaggtatgattaactgtattggtatgtgtttgattggaaaagagataagagaatattaggaatgaaagtgatcccccaccccgcaaacacaaaaaaagagctgctctcagatttttgactccagcaactgcatagatgggggtatcttttgcagagagggagaatgctagaccacaagtacactgtagtgaatagtggaaggtttcaagggaattgcaaatctgttttgagtttctggtataaccacatggagacatctactaagcagatggtatgt

SEQ ID NO: 585074 - DNA, 415 bp, Homo sapiens
acattgagaaacattgaacaaaagtatcacttttcagaagaaaatatattaaatgtttgatcaaattgaaactgagagaagcatctcctctgaatgtttaagttgtttcccccaaaatgtacttttaagtcttaaaactactaacggctagcgtaacacattctaatagcaaaggtgactgaaaaattatctatgtttgtttcaattactcaaaagtattaaagtgggaaaattctggcttgagcaaactgacaatatagtcaacttccttgtccaacaaagyttttttttgttctttgtctctttcaatgatccagatttattctgaggaatatccactcttttacatgctttgttcatgcctgtcttattattgtgttaccaatccctacagctttgcctggcacattgttgg

SEQ ID NO: 585075 - DNA, 544 bp, Homo sapiens
gcacttctctttagttttattttccaggtttcaaataattttagattatatgaaatattcaaataatttgactttataatacctaatctcactcaagcataaaaatagtccctatttgaaagcccaacagaaatgcttagaaataagtttcttgctctaaatttaatactctttaagaattatattttaaaagatgatgtgaacagttcaacatctttacatattttactaartcacattgtatatttattatacacctataattttatgaaattagttatttcttggagcattgcccttaagctactgtattatatcccaaattgcttttctcaaataacagtctgcctgttggaaactcagcagagacaagtattaaataaagattatactgttccttatccctcaagttgtcactataaaacaggtaagtgctagggttaaaaaaagtgaaagtagatattgctggcaagaaactaaattaactatgtctaccttgaattctgacaataaaagggtgtcagaataaaaaacaaagctatgc

SEQ ID NO: 585076 - DNA, 453 bp, Homo sapiens
aattccaaatgcacatgttaattcgttgcatgtatggatggcaggggcaggatgggaggtagttttgaatgtgagagcgactagcttgaccttaaaatacaattttcaactgtggtgtataaactgaagtgagagacttggaagaatatgtagacgagtatgacttaatctcagcctaaaagtcagtcacrctgagtaagatggacacaccccgctccccccctgcccacacatacacatgtgtgctatttattaatataaggagcatagaaacatcatattctgtccgaaggacaacaattattttccttgagaacctcagcacaccctctaaacatttgttcctcagtgtccacatttaaaatacataacttataaatgaagccagcaaaatgaataagaaacctgtaaattgctaaataattttaaatacaattaattgttttaatcttg

SEQ ID NO: 585077 - DNA, 623 bp, Homo sapiens
ggaacaaactttaattttcactaaggttaaaaaaaaacttgttcaaaataatatatttttagttggaatgaaaactgacttcttatctcacagattaaaattggatacaataatcaaaatttgtaatgatggacctaaatcaaaagaaaatatattaaattatacatttccacataaggaatgagagaagtgcatactagattctagaaatatgtatgttaagtggcatatataaaggaaaattctcagtctttaatgggataaagcataggattttttaaaacttgtatatgtaacatttgattgacttcctgttgatgccaaacaaattacattatgccatcaatactttaagcgagttgtatctaaaggaacaaaagaatactcctgtaggttctctccaataatattttacatctgagataaaatttcctcggagatttcagatggatatacataggaaggcttgaatttaagctcagcattgacttccagcatcttttctgacttttawagggcacttacaaaatgaggaagtaaggtctctatgatctgtgatggtttcatatggctttgatacttttggtttttctccagggtaaaaggagaacatagttcggcag

SEQ ID NO: 585078 - DNA, 619 bp, Homo sapiens
actgttattctgagaccctcaataggttatgactttcttaatgggctgggtccagagtaatactttccagtgatacattagtgcagcccaaccctctcccacaaaagggagatacttaataagctaaactgcagacactctgcttccttcataaatgatttggcatcctattgcattttctttttgctctttttcatttcagttcttttggagattctgagccttgaatttgcctgaatttggcccaggtctttgcccttggaatgtggtaactatgttccattgccttgagttttctttgggattagacacaaacttatcctctggggtcttttaatttgtgtacacttaggatacccaccacagtcaccctctagaatgtcagccataccccaaccaggaacaccaggctcccacaatttcaagtactaaatattytgtcattttaaaatgtgactgtgtgctcgagttgttttgctgaaggatcttcttgtcgtggttttattcatcaatttgttgcaattgtatcttgaataaataaaaagctgacacatgggaaatatacttgaacatatactcatgtttagatgtaaaacatgatacatgatcattaaacatg

SEQ ID NO: 585079 - DNA, 654 bp, Homo sapiens
acttaaaagggtattagattctctatctctaatctctctcctgaattagaggttgtaaatatgtgagtaaaaggagaaatcccttcacacamgagcagcataagttatttaaaagcaatagataggctggaacaggaaaggaatgaaacccaactctacctttggtagtaccaccatcactgccaacatgccttttttgtgtatttttttctttgatgcctcaacttaatgtgaattataggttagagttcttgaacctctttataaatagcgacaattgtaactatatatttggtctgcaattatcaaggcctcttaaatttattttagtaatgaatgtgagattcaatacgaccagtcaagagtagataaatatttaaagagaaactcttttagaattatatttaatgaatcctgaaataattaatatgcctgaatacatcccaattttaaggagaatgcagtgttacttcacaatgatttaccactgtacattattcccaaattatagtaaaaacactaaccagaaacaaaagtgtaaattaaatgaaacctgactttataaaatttttacagtgtgcaaaaacattgtctacagactttgtggtttcattccatagtgcttctgtatagcagaaaagcaatgtttgataa

SEQ ID NO: 585080 - DNA, 601 bp, Homo sapiens
gttacatgaaactctgaagtgttctcctggggatgaagaaataatgcactctttgattattcatgctctacatataaaatkagaattcataacatgtaaaatagaggcctctggaaaaatttccatcttgataggggtgactgataggtgtgcacagtagctagggtttacataaagtgttagtactgaaataatatacagaacatgtgtaatttgaataagttttgaaaatcaagtatatttcaaggacaggccacttccaaattgagcaggaaaccttcctccttaagctgaagttttctgtattaagaatatttcattcccattctgtaagattctaaataattattcaaagtacaagaatttgtatccattaaatatcttgagattacctatttatttatttattttgagatggagtctcactctgttgtccaggctggagtgcagtggcatgatcttggctcactgcaacctccacctcctgggttcaagcgattctcctgcctcagcctcccaagtagctcagctcacaggcacctgcaaccgtgcctggctaatttttgtatttttagtagggatgggtttcaccattttggtc

SEQ ID NO: 585081 - DNA, 602 bp, Homo sapiens
ggtctcgatctcctgacctcgtgatcygcccgccttggcctcccaaagtgctgggattacaggttactcttatgtttctaaagtaattaggctcttaccaaatattaatatgaaacttttttagggggaagaggtttcagaggtaaatgatctttacctgatggatcccatttgaaatttcccacatttgtttatggccataatattaagcttgatgaacttttctttaggaccaaggctatgctgtcataccttgttgaaaaagaactacccatttctgtgaaagggacttatagcattttggaggtcaaaaatgtcaaccccttattattctccatttagttttagcctattactctacaatgcttctcaggttttccccaaacctcttttatcctttgttattccatttgcttgtatatctttaaaagtcattgacattatcaagcttgaaaaagagacaacaatacaactccctggatctcaaaggtatgtgtttagaagcaggaagaagggtggtgcgggggcttcatgagtttttaagaacaactttatagttctctttttttctgccatgggttaatctctgccctaatactatg

SEQ ID NO: 585082 - DNA, 442 bp, Homo sapiens
tcaaagtataatgttagacaattccattttcccccatcattttgttaatgattgctcatcttaggatttatgattctaaactcatcaatattaatttctggtcttcttacagctaagatatamtccatcctgagccatgtctgtgaccctttgagacaatgtatgtaattcagttaagatttagcttctagtcccaaccctgcttcttactagcttcatataggcaaatctcagctgccctgtgcttttattttcttatcttaaaatggagcacttgaacttggtcataactaaaatacactaatttctaaatttcttaatttcagaaattccacagcctatcttcccccatgacatcagttaacaaagttcctcccagactattcatccaaagtagaaacttagatctttatgatgatcttcacggttccacatggactgc

SEQ ID NO: 585083 - DNA, 442 bp, Homo sapiens
tcaaagtataatgttagacaattccattttcccccatcattttgttaatgattgctcatcttaggatttatgattctaaactcatcaatattaatttctggtcttcttacagctaagatataatccatcctgagccatgtctgtgaccctttgagacaatgtatgtaattcagttargatttagcttctagtcccaaccctgcttcttactagcttcatataggcaaatctcagctgccctgtgcttttattttcttatcttaaaatggagcacttgaacttggtcataactaaaatacactaatttctaaatttcttaatttcagaaattccacagcctatcttcccccatgacatcagttaacaaagttcctcccagactattcatccaaagtagaaacttagatctttatgatgatcttcacggttccacatggactgc

SEQ ID NO: 585084 - DNA, 531 bp, Homo sapiens
tttctaaaaattccttcaggttggctacattttactttttcagaattaatgaatgggtttggaaacatccctaaagtgcttacttttttatcccctatatttccctcaccccttttgtttttaaatatggactgcttcagaaatttgtatgttatccttgcacaggggccatgctaatcttctctgtattgttccaattttagtatatrtgctgccaaagtgagcaatggattcctcttttgaaaaaggggttggtgagccagatgtggtggctcatgtgtataatcccagcactttgggaggctgaggcaggtggatcacctaaggtcaggagttcaagaccagcctggccaacatggtgaaaccccatctctactaaaaatacaaaaactagctgggcatggtggcaggcacctgtaatcccagctacttgggaggctgaggtaggagaatcgcttgaacccaggaggcagagattgcagtaaaccgagatcacgccactgcattctagtctgggtgacagagcaaaac

SEQ ID NO: 585085 - DNA, 570 bp, Homo sapiens
cttgcaccatcgcccaggctggagtgcagcagtgcaatctcggctcactgcaacctccacttcccgggttcaagctgggactttctcagtctcccgagtagctgggactacaggcgcctgccaccacacccggctaatttttctatttttagtagagatgagatttcatcttgttggtcaggytggtctcgaactcctgacctaaggtaatctacccacctcagcctcccaaagtgctgggattacaggcatgagccaccatgcctggcctgttaatcacctttttaaaggccctgtctccaatgtagtcacaaaggcagtattaaagcttcaacatatgaatttgtctattcagtctacagcagataaccattggactgtatttgtaaaatctgaaaaattatgtatcacataatgactgagaaatcatcctagatctctctttctaggcgttcaataaataatgacctcatactgttaattaaacaaagaattgttgttctagatactgtgttaggggccagatataagtgaacaaatgagagctaattgttgatcacttatatttgg

SEQ ID NO: 585086 - DNA, 531 bp, Homo sapiens
tatatgtacataaacatagagagagggtcttctgttgcttaacaatgggaaaacattctgagaaatgtgtcattaggggattttatcattgtttaaacatcatagagtgtacttattcaaacctagagagtattgcctactacacacctaggctagatgatatggtctattgttcctagactacaaacctgtgtagcatagtactgtactgaattctgtaggcaattgtgacacaatggtaagtatttgtgtatctaaacatatctaaacatagaaaaagtacagtaaaaatatattatgataaccttataagtttatgggagcaccatcgtgtatatagttcattgttgactgtratgtcattatgcagggcatgactatataaataaaatacaaaatattgaagagaattatatacttctattccaaatatgtaaatgtaggcatggtcagattatgaatagtattctaagctatggagtagatgagatcttgaagagcaagtggaacgttagatgagaaacagaataa

SEQ ID NO: 585087 - DNA, 524 bp, Homo sapiens
ccctgcagcaaacttttgcctggscatccaggtgtttgcatacatcttttgaaatctaggcagaggttcccaaacctcaattcttgatgtgtgtgcactcacaggctcaacaccacgtggaagctgccaaggcttgaggctgtaccctctgaaaccatggctcaagctctgcattggcccctttcagccccagctggagcagctaggatggggggcaccaagtccctaggctgaacacagcagagggatcctgggtctggcccacaaaaccaatttttcctcctaaaccgccaggccttcgatgggctgcctgaaaggtctctgacataccctggagacattttcccaattgccttggtgattagcatttggctccttgttacttatgcaaatatatgcaggcttaagtttcgcctcagaaaatgggattttcttttttatcaatttatcaggctgcaaattttccaaacttttatgctctgtttcccttttaaaactgaatgcctttaatagcacccaactca

SEQ ID NO: 585088 - DNA, 579 bp, Homo sapiens
aataatgtaatatattttccaaaatagctaaagaacagacttcaaatgttcttaccacaacaaaaagaactatttaaagggatagatatgttaattgtcctrattttatcattccacaatgtatacatgtatcataatgtcatattgcattccacaaatatatagttattatctgtatatatacatggaaacatagagccacaaaatttcctaaaaaagaaaaatccaggaccagacatcttcagtagttaacaaatatcaaaaaaagaaaaaaaaagtatcaaactgttagcaaaaaaacttgacaataaagagatattttaaaattcagtttatgagcctagcaatgccaaaatcagataaaagcatcacaagaaaagaaaaacatggaacaatatcccttataaatacgtatgcaaaaatccttgggaaaacattagcagatcaaatcaaacaacatatacgagctatacactatgaccaagcaggatttatcttcacccactagattttaagtaggcataatatagcaaaaaattatttttaacaaatttatgatatctcagagtaacatcagca

SEQ ID NO: 585089 - DNA, 412 bp, Homo sapiens
tgttccacattctcattataaggcattctatcttataagatcattgtctatttcagattaaatttatgttgtttcatttattcagagacacaaattcaacttctattcatttgcatctctaacatttttaagaaaatgctcataagcatttagatttacacacatttatttgtatttaatgatataacttatgtagagtatataaatgtcttttatggctttcacataagcacatcttgggactaaacaatattatgaggttatgagtatccttctttactgtattttttttttttgagagtttctctctgcagcctccacgtcccaagttcaagctattctcctgcctcagcctcctgagtagcagggattacaggtgtgcrccaccacgcctggctaactgttgtatttt

SEQ ID NO: 585090 - DNA, 624 bp, Homo sapiens
gcttgtggaatgcattttggagtactcaaaacaacacagaagcagggctcaaaagattggaaaatttaataggaaatgctaatgtcagtgtgtattgtatcatagaaggatttcaaaaagagcagtgccacatagaaaatgaatgtgaatgtattttccaaggagatcygtgtccaaaaaaataataagcagctatttatcatgatgcaagacttcaaaacatagttaataatcatgaaaatcagctagctcttatggactatctctgtgcaattgcccataatctatccctataatacacttttcaatatgtcaaattttctttttagtttttaaatcttttggggttttccccctactatttaaaattgtcagtattattttttacaattcactacccttcatatctcatctttgcatcatttccaatacttgtagtataaattgtatagaggctttcagagttctaatttgttttatgcagcttttacaaatttgactccatgaaagtacagcatcacaatgttggcttgtgtgtaagcattgtacatgtatgtaaaaacattgaagcttcctcagtaaaggaaaatatgtccttttttgtacatctgcatttgtaaaaat

SEQ ID NO: 585091 - DNA, 483 bp, Homo sapiens
ctacaaaaataaaagaaataaaaatttaaacaaaattagccaggcatggtggttcatgcctgtaatcccagctacttaggaggccaaggtggaaggatcgcttgagcccaggccctcaaggctgcagtcttctatgatcgtcccattgcactccagcctgggcaacagagcgagactctctctctcaaaaaaaaaaaaaaaaaaagcccacaaacagttgaaggatcaggaagagggtatgctgaggcckagatggagtcactggtgagttccaccaaatgtttaatgaataacaccgatacttcataaattattccaataagatagaagaggaaggaatacttcacatctcaatccgtgaagccactattaccctgatgccaaacaagacgaagatatcatgagaaaagcatagaccaatatattttatgaatatagatgtaaaatcttcaagaaaatgctagcaaactgaattcaacaaca

SEQ ID NO: 585092 - DNA, 574 bp, Homo sapiens
gttattctggcatctctaatctcaataacacattttttcaaagttctttctctttgaccagggcataggaatcacctaagggycttatagaaaggcaggttctggtctaggaggtatggggtgaggccaaagaaccaatatttctagcaagctcccagggaatgtccttgcagccgacctccatctcttgtgtaaaccaacagggagggcttgcctccctttgcccccaggccttgctcctggcccttgcagaagtgcatcttgcattcaagtgaccaaaagaagaggcattagaaaatgtgaaagggtaaaaggggacctgcacccagttttataggtggggaaacaggcccactccatgccagaaggaatttgttcaagacctcacagcaatttagtgacaaagtcaagactcaggcctcctgtataggggaaaagtcaaaagcaaaaacaaactccagaaaagatatatacttaagcgttaactgcgcattctctgggccaactatgggttcccccccgccagcctttttttttttttttttttgctgttatttccctccctctttatttt

SEQ ID NO: 585093 - DNA, 574 bp, Homo sapiens
gttattctggcatctctaatctcaataacacattttttcaaagttctttctctttgaccagggcataggaatcacctaagggtcttatagaaaggcaggttctggtctaggaggtatggggtgaggccaaagaaccartatttctagcaagctcccagggaatgtccttgcagccgacctccatctcttgtgtaaaccaacagggagggcttgcctccctttgcccccaggccttgctcctggcccttgcagaagtgcatcttgcattcaagtgaccaaaagaagaggcattagaaaatgtgaaagggtaaaaggggacctgcacccagttttataggtggggaaacaggcccactccatgccagaaggaatttgttcaagacctcacagcaatttagtgacaaagtcaagactcaggcctcctgtataggggaaaagtcaaaagcaaaaacaaactccagaaaagatatatacttaagcgttaactgcgcattctctgggccaactatgggttcccccccgccagcctttttttttttttttttttgctgttatttccctccctctttatttt

SEQ ID NO: 585094 - DNA, 434 bp, Homo sapiens
tattacagcttaaaggagttacagagacagaagctgtcttctctggagggccagccagtttttatggtagcatggggatttgagctgaactctgaaggctggaaagamtaagatcagtggaaagatggaaggagaacatttacagtggagagaagtctgtgagcaagagctggaaggctagtgtggccaacgcctccagagaacagaagcgagacttaccctcagcctcctgtgcagcacttctcccagccctgctgggtcttctcaaatccggagctggggagcctctaccacggctccatccagctgctttgggagtcacactcatgcctctctattgcaccaacatggaaggacaggcatcctctccggaaacccacaaatacttccaaaaaaccaaagttaaaaaaaaaatatcctagccactggaattc

SEQ ID NO: 585095 - DNA, 434 bp, Homo sapiens
tattacagcttaaaggagttacagagacagaagctgtcttctctggagggccagccagtttttatggtagcatggggatttgagctgaactctgaaggctggaaagactaagatcagtggaaagatggaaggagaacatttacagtggagagaagtctgtgagcaagagctggaaggctagtgtggccaacgcctccagagaacagaagcgagacttaccctcagcctcctgtgcagcacttctcccagccctgctgggtcttctcaaatccggagctggggagcctctaccacggmtccatccagctgctttgggagtcacactcatgcctctctattgcaccaacatggaaggacaggcatcctctccggaaacccacaaatacttccaaaaaaccaaagttaaaaaaaaaatatcctagccactggaattc

SEQ ID NO: 585096 - DNA, 513 bp, Homo sapiens
cagtcattaaaaagaatgagatcatgtcctttgcagggacatgaatgtagctagaggccatcatccttagcaaactaatgcaggaacagaaaaccaaacaccgcatgttctcacttatatgtgagagctaaatgatgagaacacatggacacatagaggggaacaacacacactggggccttttggagaatggagtgtgggaggagggagggggtgaggaaaaataattgatgggtactaggttgaatacttmggtaatgaaataatctgtacaacaaagtcccatgacacaagtttaccaacataacaaacctgcacttgtacccctgaacttaaaataaaagtttcaaaaaaagaaagtctgagtccgttccaagatggccaaacaggaacacctccagtctgcagcttccagcataagtgacacagaagacaggtgatttctgcgtttccaactgatgtacctgcttaatctcattgggactggttggacagtgggtacaacccacagag

SEQ ID NO: 585097 - DNA, 294 bp, Homo sapiens
aggttagcttattagctttatccagtggaaaaattaatttcttatatgtttataacatgagacagttttgaaaattagagcaaggtgcccaccaaaattaggctcctatcctcccaaaggagatagaggagatatctcttttgatatttgcatttcaagaagatggctctcaagcttcctggatcataaagctgaaaamaaaaatggccagctgactaaagcccaatctagtctaataagggatacattttgaggagaggaaaatataaatttacaattataaattttctaagg

SEQ ID NO: 585098 - DNA, 599 bp, Homo sapiens
aatgactattttgtctcttagctcttgtttctttctaattgattccttagattctttggatgggcttttaactgtctcctgaatctcagtaattttcattgccatcaagcttgtgaattctctattatttcagtcttytcagtctggttaacagctgttgctggggagttactgtggtcatctaaagttaagaagacactctgggttattgaattgccagtgtagttatgctggttctggttctttctcatctctgtgagctaatgttcctttaatcgttgaagtttgtttgtttgtttggatggggctttttacttgtatactttgatgccgttgagggtttactatgctataagttgcatttaattgactggcttcatttctggatgatttcaggtggccaaggctcagctcagctctcctgggatgtgtgctctaacactgcggggattgggacctggcccacagctttgttatatgccccctcaagatgaagtacctgctgcactgacagggccacagcattctcagtccactggcaacaatagtccaatgggggatgccaacaaaagtgcttaattggagcatttgctgagggg

SEQ ID NO: 585099 - DNA, 597 bp, Homo sapiens
gctgggattacaggtgtgaaccactgtgcctggcaagagtttgggtcttttaaaaaaaaatgactattttgtctcttagctcttgtttctttctaattgattccttagattctttggatgggcttttaactgtctcctgaatctcagtaattttcattgccatcaagcttgtgaattctctattatttcagtcttctcagtctggttaacagctgttgctggggagttactgtggtcatctaaagttaagaagacactctgggttattgaattgccagtgtagttatgctggttctggttctttctcatctctgtgagctaatgttcctttaatcgttgaagtttgtttgtttgtttggatggggctttttacttgtatactttgatgccgttgagggtttactatgctataagttgcatttaattgactggcttcatttctggatgatttcaggtggccaaggctcagctcagctctcctgggatgtgtgctctaayactgcggggattgggacctggcccacagctttgttatatgccccctcaagatgaagtacctgctgcactgacagggccacagcattctcagtccactgg

SEQ ID NO: 585100 - DNA, 609 bp, Homo sapiens
gacactctgggttattgaattgccagtgtagttatgctggttctggttctttctcatctctgtgagctaatgttcctttaatcgttgaagtttgtttgtttgtttggatggggctttttacttgtatactttgatgccgttgagggtttactatgctataagttgcatttaattgactggcttcatttctggatgatttcaggtggccaaggctcagctcagctctcctgggatgtgtgctctaacactgsggggattgggacctggcccacagctttgttatatgccccctcaagatgaagtacctgctgcactgacagggccacagcattctcagtccactggcaacaatagtccaatgggggatgccaacaaaagtgcttaattggagcatttgctgaggggtccatgtttacgcacatgtgcaccagctgcagcaggggtgcagtgtggcatgttatactcatactcaccctggcagtggcaggttgtcagggtttacacacacacaccagtggggcccatgcagttgcagtgaggcctctgcatatgtgcacactgacgaaacagtgagtaaagactgtgcacagtgcatgccggcaatgcagt

SEQ ID NO: 585101 - DNA, 583 bp, Homo sapiens
aggactcctctctttgctgagagctttcctttaacttaataaattctatacaattcagaacaatgtgctctccctccgtttttagagacatgtcccttaccccaacctccaatggccacaggtacacatgtgagacaaatgggagagcggcatctcccaacctccctcccctcccggctggggcacataacccaagggccccacttgcctaggtggccagcatttcctgctcactcttccctctccccatgcacccacagtgtctttcctcccctggctgagccagaaaggaggagacagcaattaaaatgttctctccctattggaggaactcatttgcataaaaataaaaggtttctcctccaggcatcttccccaccctgcacttaagctgttttattttatttttttttcttttctccactttgtaaggagttaacttttatgagagggtttttttttttttttkttttttcttattaggccaggaccccaattcccaagatagccttttctctcccttggttaaggaagacccagctccaaagctttaggttagcatgactaatttctgccgattagg

SEQ ID NO: 585102 - DNA, 320 bp, Homo sapiens
ataccactctatatgcatacccatggcttagctaccacttaaaagtgagaatatatgatatttggttttccattcctgagttacttcacttagaataatggcctccagctccagttggagttgctgcaaatgacattatttcattctttttagggctgagtagtatgtcatgrtgtatgtttaccacatttctttatccactcattggttgaggagcacttaggttggttctgtatctttgtaattgtgaattgtactgcaataaacatatacatgcaggtgtatttttgatacaatgactttttttaatttgagtagat

SEQ ID NO: 585103 - DNA, 416 bp, Homo sapiens
cataaaggatgtactaatttacattcccaccagcaatgtataagcatgcccttttcaccacattcatgycaaaatctgtttgtttgttttttttgactttttaataatgcctattatgctgggaaaagatggtatctcactgtggttttaatttgcatttctttgatgattagtgatgtcgagaattttttatatgtttgttggtcatttgtatatcttcttttgagaaatgtctattcatgtcatttttttttactttctgatgggattattttttcttgctgatttgttttccttgttaattctagatattaattatttggtagatgcatattttgtaaatattttcttctattctctgagttatctgtttactgtgatgattatttcttttgctgtgaaggtttttagtttac

SEQ ID NO: 585104 - DNA, 416 bp, Homo sapiens
cataaaggatgtactaatttacattcccaccagcaatgtataagcatgcccttttcaccacattcatgccaaaatctgtttgtttgttttttttgactttttaataatrcctattatgctgggaaaagatggtatctcactgtggttttaatttgcatttctttgatgattagtgatgtcgagaattttttatatgtttgttggtcatttgtatatcttcttttgagaaatgtctattcatgtcatttttttttactttctgatgggattattttttcttgctgatttgttttccttgttaattctagatattaattatttggtagatgcatattttgtaaatattttcttctattctctgagttatctgtttactgtgatgattatttcttttgctgtgaaggtttttagtttac

SEQ ID NO: 585105 - DNA, 416 bp, Homo sapiens
cataaaggatgtactaatttacattcccaccagcaatgtataagcatgcccttttcaccacattcatgccaaaatctgtttgtttgttttttttgactttttaataatgcctattatgctgggaaaagatggtatctcactgtggttttaatttgcatttctttgatgattrgtgatgtcgagaattttttatatgtttgttggtcatttgtatatcttcttttgagaaatgtctattcatgtcatttttttttactttctgatgggattattttttcttgctgatttgttttccttgttaattctagatattaattatttggtagatgcatattttgtaaatattttcttctattctctgagttatctgtttactgtgatgattatttcttttgctgtgaaggtttttagtttac

SEQ ID NO: 585106 - DNA, 416 bp, Homo sapiens
cataaaggatgtactaatttacattcccaccagcaatgtataagcatgcccttttcaccacattcatgccaaaatctgtttgtttgttttttttgactttttaataatgcctattatgctgggaaaagatggtatctcactgtggttttaatttgcatttctttgatgattagtgatgtcgagaattttttatatgtttgttggtcatttgtatatcttcttttgagaaatgtctattcatgtcattttttttyactttctgatgggattattttttcttgctgatttgttttccttgttaattctagatattaattatttggtagatgcatattttgtaaatattttcttctattctctgagttatctgtttactgtgatgattatttcttttgctgtgaaggtttttagtttac

SEQ ID NO: 585107 - DNA, 465 bp, Homo sapiens
atcttcttttgagaaatgtctattcatgtcatttttttttactttctgatgggattattttttcttgctgatttgttttccttgttaattctagatattaattatttgstagatgcatattttgtaaatattttcttctattctctgagttatctgtttactgtgatgattatttcttttgctgtgaaggtttttagtttacttatgtcctttttatttatttttgtttttgttgcatttacttttggagtcttagtcataaagttttggcttaggtaaatgtccagatgtgtttttcttagttttttttctagaatttttatgattttgggttttatatttaagtctgatccatcttataatttttgtggatggtgagaaagagtgatccagtttcattcttctacatgtggctatcctgttttccctgcatcatttattgaatagggtgtcctttcctattta

SEQ ID NO: 585108 - DNA, 465 bp, Homo sapiens
atcttcttttgagaaatgtctattcatgtcatttttttttactttctgatgggattattttttcttgctgatttgttttccttgttaattctagatattaattatttggtagatgcataytttgtaaatattttcttctattctctgagttatctgtttactgtgatgattatttcttttgctgtgaaggtttttagtttacttatgtcctttttatttatttttgtttttgttgcatttacttttggagtcttagtcataaagttttggcttaggtaaatgtccagatgtgtttttcttagttttttttctagaatttttatgattttgggttttatatttaagtctgatccatcttataatttttgtggatggtgagaaagagtgatccagtttcattcttctacatgtggctatcctgttttccctgcatcatttattgaatagggtgtcctttcctattta

SEQ ID NO: 585109 - DNA, 465 bp, Homo sapiens
atcttcttttgagaaatgtctattcatgtcatttttttttactttctgatgggattattttttcttgctgatttgttttccttgttaattctagatattaattatttggtagatgcatattttgtaaatattttcttctattctctgagttatctgtttactgtgatgattatttcttttgctgtgaaggtttttagtttamttatgtcctttttatttatttttgtttttgttgcatttacttttggagtcttagtcataaagttttggcttaggtaaatgtccagatgtgtttttcttagttttttttctagaatttttatgattttgggttttatatttaagtctgatccatcttataatttttgtggatggtgagaaagagtgatccagtttcattcttctacatgtggctatcctgttttccctgcatcatttattgaatagggtgtcctttcctattta

SEQ ID NO: 585110 - DNA, 465 bp, Homo sapiens
atcttcttttgagaaatgtctattcatgtcatttttttttactttctgatgggattattttttcttgctgatttgttttccttgttaattctagatattaattatttggtagatgcatattttgtaaatattttcttctattctctgagttatctgtttactgtgatgattatttcttttgctgtgaaggtttttagtttacttatgtcctttttatttatttttgtttttgttgcatttacttttggagtcttagtcataaagttttggcttaggtaaatgtccagatgtgtttttcttagttttttttctagaatttttatgrttttgggttttatatttaagtctgatccatcttataatttttgtggatggtgagaaagagtgatccagtttcattcttctacatgtggctatcctgttttccctgcatcatttattgaatagggtgtcctttcctattta

SEQ ID NO: 585111 - DNA, 456 bp, Homo sapiens
gaatactatacacagcactgagactttttgggtctacaaaattttaagaaagcacactcatggattcattgaacaactgtttttaaagtaacaaagaaagaaaaaagaaaacactaaaaaagacaagtgtgagaagcaagtggcaactgtaaacctgttaaatgtaagggtaaatctaaataagcattaattatttaaaaatgtgaggycaggagtccagtccaacctgggtaacaaagtgaggcatgagttacaattaaaatactagaaaagtattgaccatttcaattaaatgttcctttcaaatcgctaattattttcatgttccaaaatataaaggttaattttttattctcattttattgatctatcagtagtctctttttctttaattaaaaaacaaacaaacaaaaacacataaacaaacaaacaaacaaaaccagctttttttctttg

SEQ ID NO: 585112 - DNA, 456 bp, Homo sapiens
gaatactatacacagcactgagactttttgggtctacaaaattttaagaaagcacactcatggattcattgaacaactgtttttaaagtaacaaagaaagaaaaaagaaaacactaaaaaagacaagtgtgagaagcaagtggcaactgtaaacctgttaaatgtaagggtaaatctaaataagcattaattatttaaaaatgtgaggccaggagtccagtccmacctgggtaacaaagtgaggcatgagttacaattaaaatactagaaaagtattgaccatttcaattaaatgttcctttcaaatcgctaattattttcatgttccaaaatataaaggttaattttttattctcattttattgatctatcagtagtctctttttctttaattaaaaaacaaacaaacaaaaacacataaacaaacaaacaaacaaaaccagctttttttctttg

SEQ ID NO: 585113 - DNA, 456 bp, Homo sapiens
gaatactatacacagcactgagactttttgggtctacaaaattttaagaaagcacactcatggattcattgaacaactgtttttaaagtaacaaagaaagaaaaaagaaaacactaaaaaagacaagtgtgagaagcaagtggcaactgtaaacctgttaaatgtaagggtaaatctaaataagcattaattatttaaaaatgtgaggccaggagtccagtccaacctgggtaacaaagtgaggcatgagttacaattaaaatactagaaaagtattgaccatttcaattaaatgttyctttcaaatcgctaattattttcatgttccaaaatataaaggttaattttttattctcattttattgatctatcagtagtctctttttctttaattaaaaaacaaacaaacaaaaacacataaacaaacaaacaaacaaaaccagctttttttctttg

SEQ ID NO: 585114 - DNA, 456 bp, Homo sapiens
gaatactatacacagcactgagactttttgggtctacaaaattttaagaaagcacactcatggattcattgaacaactgtttttaaagtaacaaagaaagaaaaaagaaaacactaaaaaagacaagtgtgagaagcaagtggcaactgtaaacctgttaaatgtaagggtaaatctaaataagcattaattatttaaaaatgtgaggccaggagtccagtccaacctgggtaacaaagtgaggcatgagttacaattaaaatactagaaaagtattgaccatttcaattaaatgttcctttcaaatcrctaattattttcatgttccaaaatataaaggttaattttttattctcattttattgatctatcagtagtctctttttctttaattaaaaaacaaacaaacaaaaacacataaacaaacaaacaaacaaaaccagctttttttctttg

SEQ ID NO: 585115 - DNA, 490 bp, Homo sapiens
gggttgtatgcactatgctgatgaagtgtctgcactaagtttggcatcaatatgttagcttccagggagcagaggactaccaggttgcctaaggagtggtcaactcaaaaactgagcataaaaaawctcctctgcttatcagtagtgggatgagtcctttgaatagtcactgcactacaacctgggcaacatagtgagaccctatttcttaacaaaaaaaaagaaagaaatactttccatatttctgcaagtatgtgagttatctttggtgtagtgttacctttttgcagtgaatgaagtgtaataacctcttgctcattttgtttacaaaaataaataaataaataaataaataaaagcagggacattctaagtggaatcaagttccaagtaatacagacaatactatttatagaataattcaattttatgatatatttcatgtgttgctatcctcagttatatttactcatgtatacttacacttgtc

SEQ ID NO: 585116 - DNA, 297 bp, Homo sapiens
gtcctttgaatagtcactgcactacaacctgggcaacatagtgagaccctatttcttaacaaaaaaaaagaaagaaatactttccatatttctgcaagtatgtgagttatctttgrtgtagtgttacctttttgcagtgaatgaagtgtaataacctcttgctcattttgtttacaaaaataaataaataaataaataaataaaagcagggacattctaagtggaatcaagttccaagtaatacagacaatactatttatagaataattcaattttatgatatatttcatgtgttgc

SEQ ID NO: 585117 - DNA, 297 bp, Homo sapiens
gtcctttgaatagtcactgcactacaacctgggcaacatagtgagaccctatttcttaacaaaaaaaaagaaagaaatactttccatatttctgcaagtatgtgagttatctttggtgtagtgttaccttttygcagtgaatgaagtgtaataacctcttgctcattttgtttacaaaaataaataaataaataaataaataaaagcagggacattctaagtggaatcaagttccaagtaatacagacaatactatttatagaataattcaattttatgatatatttcatgtgttgc

SEQ ID NO: 585118 - DNA, 513 bp, Homo sapiens
accttttcaaatccactaaggagaagtgtctatgccttatagattgaaaagctcatctttaccagttaatttactttttamtttttcctataataaaaggctttccatatctgtaggtacacagtttgacttaattatcctatgttatatattgtaaataattacatgagaggtaatggcaatttaaacaaataaaatgatggctatttctttttattaacttcatcatatttcactgaggttttccttactttaggcttccttgatggctgcaatgtatgctaaaagtaaatttttatgtgaaatgtttaaaatatttgaaaatgatgcttattgtttgtcaggttttgccactattagcatgactcagtacccatagtgtctgtctcttagggatgtgaagcaaatgatttctctgatccaaaacatttcatatgctttaaaagtcaaaccatgcaaagatgtgatatttagaatactagttacataataatggataataacttagctttt

SEQ ID NO: 585119 - DNA, 387 bp, Homo sapiens
ctattagcatgactcagtacccatagtgtctgtctcttagggatgtgaagcaaatgatttctctgatccaaaacatttcatatgctttaaaagtcaaaccatgcaaagatgtgatatttagaatactagttacataataatggataataacttagcttttaaaacaactgctttaaacatgacacatttaaagctaatttgtaactttcatatgtttctgaaactttcacagtcactaaataatttgagtaaagcaaatgggcttcagacagattacaatttggaaagattgattataaattktgaataatatgtaacaaagaaaaatgtggtcatttgattatatacctcttccccaagatcaagtaaatactttatcaatagaaa

SEQ ID NO: 585120 - DNA, 387 bp, Homo sapiens
ctattagcatgactcagtacccatagtgtctgtctcttagggatgtgaagcaaatgatttctctgatccaaaacatttcatatgctttaaaagtcaaaccatgcaaagatgtgatatttagaatactagttacataataatggataataacttagcttttaaaacaactgctttaaacatgacacatttaaagctaatttgtaactttcatatgtttctgaaactttcacagtcactaaataatttgagtaaagcaaatgggcttcagacagattacaatttggaaagattgattataaattgtgaataatatgtaacaaagaaaaatgtggtcayttgattatatacctcttccccaagatcaagtaaatactttatcaatagaaa

SEQ ID NO: 585121 - DNA, 413 bp, Homo sapiens
attaacattcattgactgtatgtgtatgtaaatattggccagtaaacacagccatttacatcttcataaagagaataacatttccaactaaaattccttctaaaattggactcatcaattggaagtatktcaaacaattactaaactgatttacttgaacaaatatagaaaatattatctaagctatgtgtacctatttttttatattcctagaaattagggggaacttttatttcctttgattgaatatgagtttctgacttaacaaaatatataatagtgagtcagtaaaacgaatacttttaccaaggatggaaagtgttctgaattatctaaaagacattttcattgcagttaacatttgcctgtgtagaacagattaatattaaaatctattttttcttttaacaaaa

SEQ ID NO: 585122 - DNA, 413 bp, Homo sapiens
attaacattcattgactgtatgtgtatgtaaatattggccagtaaacacagccatttacatcttcataaagagaataacatttccaactaaaattccttctaaaattggactcatcaattggaagtatgtcaaacaattactaaactgatttacttgaacaaatatagaaaatattatctaagctatgtgtacctatttttttatattcctagaaattagggggaacttttatttcctttgattgaatatgagtttctracttaacaaaatatataatagtgagtcagtaaaacgaatacttttaccaaggatggaaagtgttctgaattatctaaaagacattttcattgcagttaacatttgcctgtgtagaacagattaatattaaaatctattttttcttttaacaaaa

SEQ ID NO: 585123 - DNA, 413 bp, Homo sapiens
attaacattcattgactgtatgtgtatgtaaatattggccagtaaacacagccatttacatcttcataaagagaataacatttccaactaaaattccttctaaaattggactcatcaattggaagtatgtcaaacaattactaaactgatttacttgaacaaatatagaaaatattatctaagctatgtgtacctatttttttatattcctagaaattagggggaacttttatttcctttgattgaatatgagtttctgacttaacaaaatatataatagtgagtcagtaaaaygaatacttttaccaaggatggaaagtgttctgaattatctaaaagacattttcattgcagttaacatttgcctgtgtagaacagattaatattaaaatctattttttcttttaacaaaa

SEQ ID NO: 585124 - DNA, 583 bp, Homo sapiens
gatgacttaacatcactgcaactattttctccttcatttaagaacataatcaaccatttatgtgggcatgtttattttacacctcaattttggctcaaggagtataacgcatagtggcttctttctttcatttgccrtatcaaatccatgaacacctgcctttaagatgtatcagattacttttacctcttactagccatgtccaggcaactgccaaagcactggatcattggaatagcttaataaatgatgaccctatttctcttactttcattcctagaggctgtttttcagccaggagtcagaatgattataaaacataaatcaaataatttcacggtcttgctcatagctttctaattgttccccttctcaaagtaaaacccaaaaccttgtcattgcttgtgaaagcaacaatatgggatccttctccatacctcccccaatttattttatcacagccctcattgttttggtcattctatccttaagagcctcctgatatttcttggaaatgccaagattcacccaccttagaaaccactttgtttttctgtctttaaaagagacatgcgctgtagat

SEQ ID NO: 585125 - DNA, 607 bp, Homo sapiens
ctctacattaaatcaaaaatttaacttaaatttttaaagatagagtaagggctgataataggtttaccaccaatgcacattttcaagcagttaagtgattctaattagtaaraaaaaaacatagtagtccatacctagcatatgggctggcatatagttggcactcagtgactgtcttttgaaagttattatgcccttgaggctgttacaattccaaaatgagatcgagcaaagtttgtgatagttgtgattgcacttataattcacttataggtgttgaattctcagtaaggataatccaggtacttcacttccatttatcctttgtaacatttacttaatacacactttgtgttcttattgaacttttctgttatatttttaaaaggtttatttgccctccaggttaactggagaaatagtgttttattcaaagttatgaaaaaggacttgctcattctattatttctacacaaatatttattacaaatatatagattacttaagtagatacttatctgatgacttacaaaatgatttgagaacaatttaaagttacgtggtgtgttttctgtacacataacccacatactaagtaatttataaa

SEQ ID NO: 585126 - DNA, 586 bp, Homo sapiens
gttttattcaaagttatgaaaaaggacttgctcattctattatttctacacaaatatttattacaaatatatagattacttaagtagatacttatctgatgacttacaaaatgatttgagaacaatttaaagttacgtggtgtgttttctgtacacataacccacatactaagtaatttataaaaatccataaaataggaaattaacttaaaggycactaggctctcagaagaataaatgacatttgatgctggaaatcactatttttttcaggttttgcataatatattatgtatcactgctctcaagatatttcttataaaaattaaaagaaaactcacacagaatgaactgttataaaatatgtaaaattttagaaactctcataattatatgaatacttaaagcactgctctggaaaaataattgaaagataaaaggacatttatcttaaatagtagtgattttcatgtttatttaaaataagcacagataaaattctgaaaaaagaatgataaagtgaactcagagtagaaaaatcctttagtagtgaaataacaggtaaaacaggactaaaatcttttaa

SEQ ID NO: 585127 - DNA, 586 bp, Homo sapiens
gttttattcaaagttatgaaaaaggacttgctcattctattatttctacacaaatatttattacaaatatatagattacttaagtagatacttatctgatgacttacaaaatgatttgagaacaatttaaagttacgtggtgtgttttctgtacacataacccacatactaagtaatttataaaaatccataaaataggaaattaacttaaaggtcactaggctctcagaagaataaatgacatttgatgctggaaatcactatttttttcaggttttgcataatatattatgtatcactgctctcaagatatttcttataaaaattaaaagaaaactcacacagaatgaactgttataaaatatgtaaaattttagaaactctcataattatatgaatacttaaagcactgctctggaaaaataattgaaagataaaaggacatttatcttaaatrgtagtgattttcatgtttatttaaaataagcacagataaaattctgaaaaaagaatgataaagtgaactcagagtagaaaaatcctttagtagtgaaataacaggtaaaacaggactaaaatcttttaa

SEQ ID NO: 585128 - DNA, 481 bp, Homo sapiens
tatatccttatcttataacatctggctgctccgwgatggccattaaatccctgctaggaattaggaatccattcctgtttcagggtcctcttcatcaccttcaaattgtttatgtacagtgtacttttgaaggctatacactttatatttttaacatttaaaagacaaatattgatgctatttattcagagctaagtatatacgcatttaaatattaatccaatatacatgtatttggtgcacattacacgctgagtacttttctaggccctgaggctagagctgggcacaactgagacaagtccttgctttgtgaagcagaaaacagatgacttccagtaaagtgctaagttgtgcttgggaaaaataaaattagaaaagcagctagaaggtgtactggagatgacaagaaacgagaagagaggttgctgttatatacagagggcagagaaggcttccagcaaaaagcagcattttacca

SEQ ID NO: 585129 - DNA, 469 bp, Homo sapiens
ttataacatctggctgctccgagatggccattaaatccctgctaggaattaggaatccattcctgtttcagggtcctcttcatcaccttcaaattgtttatgtacagtgtacttttgaaggctatacactttatatttttaacatttaaaagacaaatattgatgctatttattcagagctaagtatatacgcatttaaatattaatccaatatacatgtatttggtgcacattacacgctgagtacttttctaggccctgaggctagagctgggcacaactgagacaagtccttgctttgtgaagcagaaaacagatgacttccagtaaagtgctaagttgtgcttgggaaaaataaaattagaaaagcagctagaaggtgtactggagatgacaagaaacgagaagagaggttgctgttatatacagagggcrgagaaggcttccagcaaaaagcagcattttacca

SEQ ID NO: 585130 - DNA, 613 bp, Homo sapiens
agccaagttgtgaatgcaaagaaaaaattcttgaaggaaatcaaaactgctactccagtgaacacaggaacagtaagaaagagaaacagccttattgctgagacttggaaygttttagtggttttgccagaaagtcaaatcagccacaacattatcttcagccaaaacgtaatctagaccaaagctctaatgctcttcaattctatgaaggctgagagaggtaagagaaaactgcagaagaaaagttggaagctgacaaaggttggttcttaaggtggaaggaaaggagccgtcttaacaacataaaagtggaaagtgaaaaagtaactgctgatgaaaaagcttcagcaaattattcagaaaatttagctgaaataattgatgaatgtgactaccctaaacaacagattttcaatgtagacagaacagttttatattgaaagaagatttcatctaagcctttcatagctagaggggagaagtcaacacctggcttcaaagcttcaaatgacagactgacactcttgttaggggttagtgcagctactgactttcagttgaagccaatgcttatttaccatttgaaaatcctaaggctaataagaattatgcc

SEQ ID NO: 585131 - DNA, 613 bp, Homo sapiens
agccaagttgtgaatgcaaagaaaaaattcttgaaggaaatcaaaactgctactccagtgaacacaggaacagtaagaaagagaaacagccttattgctgagacttggaacgttttagtggttttgccagaaagtcaaatcagccacaacattatcttcagccaaaacgtaatctagaccaaagctctaatgctcttcaattctatgaaggctgagagaggtaagagaaaactgcagaagaaaagttggaagctgacaaaggttggttcttaaggtggaaggaaaggagccgtcttaacaacataaaagtggaaagtgaaamagtaactgctgatgaaaaagcttcagcaaattattcagaaaatttagctgaaataattgatgaatgtgactaccctaaacaacagattttcaatgtagacagaacagttttatattgaaagaagatttcatctaagcctttcatagctagaggggagaagtcaacacctggcttcaaagcttcaaatgacagactgacactcttgttaggggttagtgcagctactgactttcagttgaagccaatgcttatttaccatttgaaaatcctaaggctaataagaattatgcc

SEQ ID NO: 585132 - DNA, 414 bp, Homo sapiens
tcggaattcatgcatagctgaacagtgttaacattaaagtagagacttaagaatgacaaaacagactcttcgtagcaataagatatcaacatgacagatagcaggccttgaaagaaaaagtatttcaccaaaaaaatacatttctttgacatattttgaaatggccctacaaagctgtttctgtggggaaaatctccattttgtagagaatcccsttgtctttccaagtctttttcctgatttttcctgattccaagtcctttttcctttttatgtctgataaaaatcatttacaatctattctcagtgaagcctgctacctgcaagcttcatctgcataagaacctcggtctctaaaacaccttatcttaacccgtacactcctgtctattgattccggtctttagataaatt

SEQ ID NO: 585133 - DNA, 414 bp, Homo sapiens
tcggaattcatgcatagctgaacagtgttaacattaaagtagagacttaagaatgacaaaacagactcttcgtagcaataagatatcaacatgacagatagcaggccttgaaagaaaaagtatttcaccaaaaaaatacatttctttgacatattttgaaatggccctacaaagctgtttctgtggggaaaatctccattttgtagagaatcccgttstctttccaagtctttttcctgatttttcctgattccaagtcctttttcctttttatgtctgataaaaatcatttacaatctattctcagtgaagcctgctacctgcaagcttcatctgcataagaacctcggtctctaaaacaccttatcttaacccgtacactcctgtctattgattccggtctttagataaatt

SEQ ID NO: 585134 - DNA, 414 bp, Homo sapiens
tcggaattcatgcatagctgaacagtgttaacattaaagtagagacttaagaatgacaaaacagactcttcgtagcaataagatatcaacatgacagatagcaggccttgaaagaaaaagtatttcaccaaaaaaatacatttctttgacatattttgaaatggccctacaaagctgtttctgtggggaaaatctccattttgtagagaatcccgttgtctttccaagtctttttcctgatttttcctgattccaagtcctttttcctttttatgtctgataaaaatcatttacaatctattctcagtgaagcctgctacctgcaagcttcatctgcataagaacctcggtctctaaaacaccttatcttaacccrtacactcctgtctattgattccggtctttagataaatt

SEQ ID NO: 585135 - DNA, 451 bp, Homo sapiens
tcaggctatacttagagtaatcacatcatacctgaatctgaagacgagacagtaaacttagagaagtactgaagccttggaagccttggatatattgaatatgttctatcttagaaagaaaaggtgagataatgtatgctggcagtcaaccaacagcatatkctcctaatgaacaactggagagtcatttaagttcaatgttggggattttattagaaactgtaagatgaagacacaattcattttctctttccctgtaaatttggacaatatttgctatattcgcctatattttggcatagaaatttaggttctaagtatatagtagtgatatagccttcttacagggtcacatagacccacaagtaataatttttaatactctttttattctctctggttggctaacattaaaacaatccacagaaaacccccaagagctatgtattga

SEQ ID NO: 585136 - DNA, 451 bp, Homo sapiens
tcaggctatacttagagtaatcacatcatacctgaatctgaagacgagacagtaaacttagagaagtactgaagccttggaagccttggatatattgaatatgttctatcttagaaagaaaaggtgagataatgtatgctggcagtcaaccaacagcatattctcctaatgaacaactggagagtcatttaagttcaatgttggggattttattagaaactgtaagatgaagacacaattcattttctctttccytgtaaatttggacaatatttgctatattcgcctatattttggcatagaaatttaggttctaagtatatagtagtgatatagccttcttacagggtcacatagacccacaagtaataatttttaatactctttttattctctctggttggctaacattaaaacaatccacagaaaacccccaagagctatgtattga

SEQ ID NO: 585137 - DNA, 476 bp, Homo sapiens
aagacaggcctgctgtttttrcctgctatacccctgcccatactgccctcagatcaagagagagcaaagaggcttaaggattatagcaggtcttcagctcagcacagctgccttatggaggtgtcagacttttttccatgcctgtctttgctcctgctacttctcactgggcagggtctcccgacctgggccccagcacagctaccctgctcccacttgaacatttcagacagtggcatctgtgcatttctctgggatagaattcccagcgacaacccacagcccctctgccattacatacagtggtaccacccttgctgcctgatatggtttggctctatgtccccattcaaatctcatcctgtagatcccacaattcccatgttttgtgggaggtacctggtgggaaatgactgaataatggggatgggtatttcccatgctgttctcgtaatagtggatgggtctcaccagat

SEQ ID NO: 585138 - DNA, 476 bp, Homo sapiens
aagacaggcctgctgtttttgcctgctatacccctgcccatamtgccctcagatcaagagagagcaaagaggcttaaggattatagcaggtcttcagctcagcacagctgccttatggaggtgtcagacttttttccatgcctgtctttgctcctgctacttctcactgggcagggtctcccgacctgggccccagcacagctaccctgctcccacttgaacatttcagacagtggcatctgtgcatttctctgggatagaattcccagcgacaacccacagcccctctgccattacatacagtggtaccacccttgctgcctgatatggtttggctctatgtccccattcaaatctcatcctgtagatcccacaattcccatgttttgtgggaggtacctggtgggaaatgactgaataatggggatgggtatttcccatgctgttctcgtaatagtggatgggtctcaccagat

SEQ ID NO: 585139 - DNA, 476 bp, Homo sapiens
aagacaggcctgctgtttttgcctgctatacccctgcccatactgccctcagatcaagagagagcaaagaggcttaaggattatagcaggtcttcagctcagcacagctgccttatggaggtgtcagacttttttccatgcctgtctttgctcctgctacttctcactgggyagggtctcccgacctgggccccagcacagctaccctgctcccacttgaacatttcagacagtggcatctgtgcatttctctgggatagaattcccagcgacaacccacagcccctctgccattacatacagtggtaccacccttgctgcctgatatggtttggctctatgtccccattcaaatctcatcctgtagatcccacaattcccatgttttgtgggaggtacctggtgggaaatgactgaataatggggatgggtatttcccatgctgttctcgtaatagtggatgggtctcaccagat

SEQ ID NO: 585140 - DNA, 653 bp, Homo sapiens
attacattaagctctacatatgcagcattctagcaaatttcaatgcagtagacaaaatctataaataatgtgaaacacatattaacatgttaagcataatatgcattcattgtcttcaacagaatagttctctattaattttttaaatgtaatacaattttactataaaaacactgaaaaatcaacatatttcattaagaaaaaattactaaatgttgcaaaatgatgaggaaaatacctatagtaataattcccaactactaacaattttgttttatctaatactggtcagctttccatgtgtccaagccttacaggacttttcattaagcctaatcctcacaagaacattgctttgagtgatattccagagtggtagtcctttaaggcattagaacgatttgtgaaatcactaaaaatactaggggaaatattcaaaaaatgacaatagtgccattattcctcctcctcaaagagactatcagaactaaaactctttgcttcatgttcctgtttacttctgtcmctttcaagtcacagaggtattatcagactttcatcattatatgactctgcttttccaacagaatcaattacctatcccttatctcacatcttgatagtgatagatattgaatgcttatgttctgatt

SEQ ID NO: 585141 - DNA, 598 bp, Homo sapiens
gatctgcctgccttggcctcccaaagtgctgggattacaggcatgagccaccacccccagccacttctatcattcttaaaatttgtaaattatttatttcctattattttctccttagtctggccagagatttaacaattttattgatcccttcaaagatctaagtttagtttaatttacttagctatataatttttctccatttaatgttgtttatttcttcattaacctttattattttcttccttctgattgcttcagaattaatttgttctcatttttataataacaagytggaagctttcatcataatttcaaggtaatttttcttttctaatgcaagctcttaatgggatagatttttccctaaacacagaaatttccacattttgatatgttacacttttttaaatttctcttacttttggctaggttcatgtttaaatatacatatgtgcaagaatattttcccttgatttatatggatttagaggttaaaaaaaggcaaaaaaattattttggaaatttctaggagacttagttcaccataattgttacataattgtgcatatgttgcaagtaatgtattaagaaaagt

SEQ ID NO: 585142 - DNA, 539 bp, Homo sapiens
aacctagactagggaaagcactagatccgagacataaatgtccaatggctgttgtacacaaggaacaggctgctgtacactacctaggatgctgctgtttgcagcccttgcacaccaggccccatgagaaaaagagctgtgtggcttaattgattgtagaaattattttatatattaagtttttggggaktagtatcttttattcaagatagctaaatgtaatttatattagaccatatacagtaagttgtaaattatagaagttgtgcatatcaaaatcatactcagtgggcaatatggcctttaatataataaagtttattgacaaaaattaaaataaaatcatgtggttttgtagtgctcttgtatgttaactaaaacaaattaataaaacctatgaaacccataatcatttaaactatctacttacactttgggaggccaaggtgggcagatcacctgaggtcaggagttcaagaccagcctggacaacataatgacatcccatctttactaaaaacacaaaaattaaacaggcg

SEQ ID NO: 585143 - DNA, 543 bp, Homo sapiens
tttgtataccagaaaatacttttcaaaaaaaaaaaaagtaaggtcattaggaaggcattgtaaagttaatcttttccagcaaagctattacatttatttttctggagctctttagttataaaaagcagaatgtagttataggatctagtcagcwttaaattgattaaaaaaatgaaaaacactttcatctttaaatagattaacaattaagcatgttgtttatgttgtcccactgatatactagaatatgctacattctttggggcatcttttagaccatagggctaaaatgttgagaatgacagagagacaattaggagctcagcacaaagcaaaatgttatgaatcaggaaaataaatagaacagagatcaaaattagatagatgcagaattggaatgatactgaaaacaagagatggaactgcagaaaatactatggcagatcattcattcctttgaatggtgaaagtagttaatacaacggctgacaattgaaatgaaaaaccagacccagatgaaaaaatgcaaaccagtaaacttgc

SEQ ID NO: 585144 - DNA, 280 bp, Homo sapiens
aatgtttctctacctatagaacaaacaattactttgtcctctaatttycaaataacttacagaacatttatttcctactgtcattggaatggcaggctagcaggctgagttcatagcccaattggttcctcacatcaaaagattccctttattatttccttattttctctttaattctggcactccttcatgattgaacttacagatgttcttttgtctgctaatcttcgagtaagcctgtgctctctataactttcagtctcaatttccttctaccatc

SEQ ID NO: 585145 - DNA, 280 bp, Homo sapiens
aatgtttctctacctatagaacaaacaattactttgtcctctaattttcaaataacttacagaacatttatttcctactgtcaytggaatggcaggctagcaggctgagttcatagcccaattggttcctcacatcaaaagattccctttattatttccttattttctctttaattctggcactccttcatgattgaacttacagatgttcttttgtctgctaatcttcgagtaagcctgtgctctctataactttcagtctcaatttccttctaccatc

SEQ ID NO: 585146 - DNA, 280 bp, Homo sapiens
aatgtttctctacctatagaacaaacaattactttgtcctctaattttcaaataacttacagaacatttatttcctactgtcattggaatggcaggctagcaggctgagttsatagcccaattggttcctcacatcaaaagattccctttattatttccttattttctctttaattctggcactccttcatgattgaacttacagatgttcttttgtctgctaatcttcgagtaagcctgtgctctctataactttcagtctcaatttccttctaccatc

SEQ ID NO: 585147 - DNA, 280 bp, Homo sapiens
aatgtttctctacctatagaacaaacaattactttgtcctctaattttcaaataacttacagaacatttatttcctactgtcattggaatggcaggctagcaggctgagttcrtagcccaattggttcctcacatcaaaagattccctttattatttccttattttctctttaattctggcactccttcatgattgaacttacagatgttcttttgtctgctaatcttcgagtaagcctgtgctctctataactttcagtctcaatttccttctaccatc

SEQ ID NO: 585148 - DNA, 567 bp, Homo sapiens
cctctgttggagggcatttatkcatagacatcatgtgcactttcttcccaaagggtaaggttgacctagagccctatggacgaccctttatagttaagcttgccaactacttgtcagaaatgattagtgagaaatgttggaaagaaaatttcccctgttgataacagggggcaaatagaagatgccctgaagttgtcataaggaatcacatttttttcaataagaatattttttatttgataatatctaatatcacagatcaacctttatttatacatattctagacatgtattgaacttgacaggttttggtaatagaaaattctgtggcaactcacaaaagagtatgtgtgcattgtaatcatttttattataaataataactgtgtcttttcttgataaaatgaagatataataaatcatgatttcccctcaatcatatcttttagaaactgagtttatgtgtctttggatttataataatcccaaactcacattttatgttaaaatactcattaaaatgcgataatttattacaactttattttggattatattctgaatgtc

SEQ ID NO: 585149 - DNA, 335 bp, Homo sapiens
tagatacaagtacagttacatagaaaaatgaaataatattrtaagatatcctgaaatatatataatatgttagtttctaacattgttttaaaagttagttgtttaaccaatcaaagcagaaacaacttaaacagactttacaaaaattcatcagatttaataaagttgtctattcgaagatagggcttttttcttttttaaaaattaaatgagaaagcaactattggcaaattcaaattcctttcttatcaaaatacgtattttgaatttttattgtttaaaacaatacagaatttgaattaatagctatcttagtaaggaaatgtctttcctca

SEQ ID NO: 585150 - DNA, 335 bp, Homo sapiens
tagatacaagtacagttacatagaaaaatgaaataatattgtaagatatcctgaaatatatataatatgttagtttctaacattgttttaaaagttagttgtttaaccaatcaaagcagaaacaacttaaacagactttacaaaaattcatcagatttaataaagttgtctattcgaagatagggcttttttcttttttaaaaattaaatgagaaagcaactattggcaaattcaaattcctttcttatcaaaataygtattttgaatttttattgtttaaaacaatacagaatttgaattaatagctatcttagtaaggaaatgtctttcctca

SEQ ID NO: 585151 - DNA, 335 bp, Homo sapiens
tagatacaagtacagttacatagaaaaatgaaataatattgtaagatatcctgaaatatatataatatgttagtttctaacattgttttaaaagttagttgtttaaccaatcaaagcagaaacaacttaaacagactttacaaaaattcatcagatttaataaagttgtctattcgaagatagggcttttttcttttttaaaaattaaatgagaaagcaactattggcaaattcaaattcctttcttatcaaaatacrtattttgaatttttattgtttaaaacaatacagaatttgaattaatagctatcttagtaaggaaatgtctttcctca

SEQ ID NO: 585152 - DNA, 401 bp, Homo sapiens
aagccctaatccccagtattatggttttggagatgtgggcttttggaggtcaaaaggttgagatgaaaccatgaggatggagtcctcacgatggaattagtgaatttattataaaagacacaaaagagcactttcttgtacacttcctttgtctctgtctctctgtgtgtttctctatttctcttccctgtgggaacacaacaaaaggtatctgtgtgacaagaatgaagaataccctcagcagaaactgaccatgtgtatgctgatcgtgtacttcttagcctccaaactatgaggaaaaaaatttgttgtataagacaccaagtttattgyattttgttatggcagcctgagcagtctaacaagaaagcaataaaaagtataagtaattaagataaaac

SEQ ID NO: 585153 - DNA, 483 bp, Homo sapiens
ttcattattttatattggcaagagaagaaataytttgaaaaacattaataaagtttacttaaacaggagtatgatcctctttcagatgcaaaatacaagataggggatggagcaagtctaccttccttaaaaaggtagctgaagtcatcaggaattgtttgtgtcatgctacagacctatactgaagaataataaatgaaacagacttatgaactcaccagatatatttacactaagcatactgattagaaagctctcctcatgtaatttcttcttcctgaacgatctcaaaaaatataatttcaggtctagataattgaaataaaagtgcatccctgaaacaattatttagctcttactttttataaatactctaattgctaaacttatcaggatcatgacctactttgtatagacaaattaaattctaattctccagatcacaatatataggctttaagtcaccataactttttcccattt

SEQ ID NO: 585154 - DNA, 672 bp, Homo sapiens
ctaaacgtgaaaatgaaggactgttacctagcaccagaaaaacacactcaagtatatagaccatcaacactataaagtaattacacaatcaagtttacataacaaccagctaacaacatgctgggaggatcraatgtgcatatgtcagtattgaagataaacaagctaaacacccacttaaaaggcacggagtggcaaagtggataaagaatcaagacccaactgtatgctgtcttcaagagacccatctcacatgtgagaacacccataggttcaaagtaaagggatggagaaagaagtaccaaacaaatgaaaaacaaagaagaacaggtgttgctgttcttattttagataaaactgacattaaactaacaatgatcaaaacagacaataaaggacattacataatgatgaaggattcaattaaacaagaagacttaactatcctaaatatatatgcacctaacactggagcactcagattcacaaaacaagctcttagagatatacaaagaaacttacataactacacgatgacagtggcagacctcaacacctcactgacagtgtaagacagatcactgaggcagaaaactaacaaagatattcgggacctaaacttgacacttggccaaatacacctaacagacatctacagaacactccacacat

SEQ ID NO: 585155 - DNA, 672 bp, Homo sapiens
ctaaacgtgaaaatgaaggactgttacctagcaccagaaaaacacactcaagtatatagaccatcaacactataaagtaattacacaatcaagtttacataacaaccagctaacaacatgctgggaggatcgaatgtgcatatgtcagtattgaagataaacaagctaaacacccacttaaaaggcacggagtggcaaagtggataaagaatcaagacccaactgtatgctgtcttcaagagacccatctcacatgtgagaacacccataggttcaaagtaaagggatggagaaagaagtaccaaacaaatgaaaaacaaagaagaacaggtgttgctgttcttattttagataaaactgacattaaactaacaatgatcaaaacagacaataaaggacattacataatgatgaaggattcaattaaacaagaagacttaactatcctaaatayatatgcacctaacactggagcactcagattcacaaaacaagctcttagagatatacaaagaaacttacataactacacgatgacagtggcagacctcaacacctcactgacagtgtaagacagatcactgaggcagaaaactaacaaagatattcgggacctaaacttgacacttggccaaatacacctaacagacatctacagaacactccacacat

SEQ ID NO: 585156 - DNA, 428 bp, Homo sapiens
caacacaccagaaactctagaacacagctaaagcatggttaaaaggaaagtttcttgtgctaaacacttatgtcaacagctagaaagatctcaaatttgcaacctaacatcacagatagaggaacctaaaaaacaaaaaagaaccaacctcgaaggtagtagaagaaaagaaatggccacaatcataactgaaattaacaaaatggagatgagaaaaaaatgtwaaaaaatcaacaaaactgaatgttgggtatttgaaagaaaaaataatgttgataggccattatctaaacttataaagaaaaaaaagagacaatattcaaataaacacaatcacaaaagagacaaaggggacattaccactgaccccacagaaatacaacaatcctcagggatgattatgaacacctctatgtacacaaactgaa

SEQ ID NO: 585157 - DNA, 428 bp, Homo sapiens
caacacaccagaaactctagaacacagctaaagcatggttaaaaggaaagtttcttgtgctaaacacttatgtcaacagctagaaagatctcaaatttgcaacctaacatcacagatagaggaacctaaaaaacaaaaaagaaccaacctcgaaggtagtagaagaaaagaaatggccacaatcataactgaaattaacaaaatggagatgagaaaaaaatgttaaaaaatcaacaaaactgaatgttgggtatttgaaagaaaaaataatgttgataggccattatctaaacttataaagaaaaaaaagagacaatattcaaataaacacaatcacaaaagagacaaaggggacattaccactgaccccacagaaatacaacaaycctcagggatgattatgaacacctctatgtacacaaactgaa

SEQ ID NO: 585158 - DNA, 547 bp, Homo sapiens
aaatacaacaatcctcagggatgattatgaacacctctatgtacacaaactgaaaaacccagagaagctgcataaattcctggaagcaatcttcaaagattgaaccaggaagaaagtgaaactttgaacagactaataggaagttccaaaatgaattggcaatacaatgcctatcaatcagaaaaagtgttggccccaaaggattcactgccaaattctaccagatgtataaagaagagctgataccacacctactgaaactatctaaaataattgaggaggagggactcatacctaactcattctatgaggacaacatcattctgataccaaatcctggcagagatgcaatgaaacaaaaaacttcagaccaatatttctaatgaacatagatacagaaatattcaacaaaatactagcaaaccaaatctagcrgtacatcaaaaagctaatccaccacaatcaagtaggttttatttcttgcataatatttccagaatggtatttccaaggttttcttctagagattttatagtttgaggtttta

SEQ ID NO: 585159 - DNA, 190 bp, Homo sapiens
aagactgtgggggattcttggaagggcataattgtgttttgaaatgtgaggacgtgagatttgcgaggggccatggraagaataatatagtttggctttgtgtccctacccaaaatctcatcttgaattgtaatgcaaattgtaatccccacatgctgggggaaggacatcgtgggaggtgattagacat

SEQ ID NO: 585160 - DNA, 190 bp, Homo sapiens
aagactgtgggggattcttggaagggcataattgtgttttgaaatgtgaggacgtgagatttgcgaggggccatgggmagaataatatagtttggctttgtgtccctacccaaaatctcatcttgaattgtaatgcaaattgtaatccccacatgctgggggaaggacatcgtgggaggtgattagacat

SEQ ID NO: 585161 - DNA, 190 bp, Homo sapiens
aagactgtgggggattcttggaagggcataattgtgttttgaaatgtgaggacgtgagatttgcgaggggccatgggaagaataatatagtttggctttgtgtccctacccaaaatctcatcttgaattgtaatgcaaattgtaatccccacatgytgggggaaggacatcgtgggaggtgattagacat

SEQ ID NO: 585162 - DNA, 570 bp, Homo sapiens
  misc_feature 196: n = A,T,C or G
gagaaattcaagccggctgcagaaatttcattaagtagcaaggagcctgatattaatccccgagaccatggggaaaatatctccaggccatgactgagaccttcatggcagcccctcccaccacaggcccaaggcccaggaggaaaaagtggtttcatgggctgggcccagggtcctcatgctgtgtgcagcctanggacttggtgccctgcatyccagccactacagccacggctgaaaggggccaaggtagaactcgagccttggcttcagagggtggaagccccaaggcttggcatcttccacgtggtattgagcttgccagtacacagaagtcaagaattgaggtttggaaatctctgcctatatttcagaagatgtatggaaatgcctggaagtccaggcaaaagtttgctgcaggagtggggcccccatggagaacctctgctagggcagtgcagaaaggatatgtggggttggagcccccacacagagtccctactggggtactgcctagtagagctgtgagaagagggccaccatcctccagaccccagaacagtagatcca

SEQ ID NO: 585163 - DNA, 586 bp, Homo sapiens
caggggcttatagataaaactcccatctttcttggaaagagcacctgggggaaggggctgttgtgggtacagcttcagtagacttaaatgttcctgcctgcgagttctgaagagaacagcagattttccagcacagcaattgagctctgctaagggatagactaccttttcaagtgggtccttgacccctgtgcctcctcactgggtgacaccttccagcaggggctgacagacaccttacacaggagagctctggctggcatctggcagatccccctctgggacaaaacttccagaggaaggaacaggcagcaaactttgctattctgcagcctggactagtgatacctaggcaaacaggatctggagtagacctccagcaaactccagcagacctgcagcasaggggcctgattgttagaaggaaaactaacaaacaggaaggaatagcatcaacatcaacaaaaaggatatccacacaaaaaccccatccaaaggtcaccaacatcaaagacaaaacgtagataaatccatgaagatgagcaaaaatcagtgcaaaaaggctgaaaattccaaaaaccagaac

SEQ ID NO: 585164 - DNA, 584 bp, Homo sapiens
catgaggactctgccttcatgacctaaataccctccaaagcctccatttcctaatgctgtaacactgggggttcgaatttcaacatatacatttcatggggacaaaaaaaatcagtccatagcagatataatttatatcatgcaatttattcatttaaaacatgcagtttaatttatttctttcaaatacacagagttgtgcaaccatcaccacagttaattttaagtcactcctcactcccctcagtgtcgccagccttagcctgccactgatgcttctttgtgtgtgactggcttctttcattttaggtgatgtttaaaatacatctactaaacaatattccatgtggaatcaagcacatatatataacattttatctatccatgaaacaatgtattgacatttgagttgtttctatttatttgtttttacaaagtttacatggacattcatgtacatactttagtgtaaaaatgtgttttcatttctcttaggtatgtcccgaggagttcagtagcagggtcatatggtatctctgtgtttaaccttctgtagaacggycaaactgtttacaaggtggctg

SEQ ID NO: 585165 - DNA, 417 bp, Homo sapiens
tgatccacatatacggattacagctggagacattggtaagaacccatgtttatcttaaaatatyacaaaaggtggcaaatttaaacatttttagatatgtgcatatacacagattaatacacacaaatatatctctttgttttgtctgctgagagggctatcgcaggagccacaaacacatctagtgtccagatcatgatttctaacaccattctcctgtaaaaacaacaaaaagctcctcagagaaatggctgattcaaggactgggacaggaattatacaagataaacctggagcaacttacagtgccaaaatgtaaggaagtgcttaaaaacaaacaaaaacaaaaacatagttggaggtgtgccaaagggacacagaagccaattgaaaaagctcctaatggccaaagctgga

SEQ ID NO: 585166 - DNA, 417 bp, Homo sapiens
tgatccacatatacggattacagctggagacattggtaagaacccatgtttatcttaaaatattacaaaaggtggcaaatttaaacatttttagatatgtgcatatacacagattaatacacacaaatatatctctttgttttgtctgctgagagggctatcgcaggagccacaaacacatctagtgyccagatcatgatttctaacaccattctcctgtaaaaacaacaaaaagctcctcagagaaatggctgattcaaggactgggacaggaattatacaagataaacctggagcaacttacagtgccaaaatgtaaggaagtgcttaaaaacaaacaaaaacaaaaacatagttggaggtgtgccaaagggacacagaagccaattgaaaaagctcctaatggccaaagctgga

SEQ ID NO: 585167 - DNA, 417 bp, Homo sapiens
tgatccacatatacggattacagctggagacattggtaagaacccatgtttatcttaaaatattacaaaaggtggcaaatttaaacatttttagatatgtgcatatacacagattaatacacacaaatatatctctttgttttgtctgctgagagggctatcgcaggagccacaaacacatctagtgtccagatcatgatttctaacaccattctcctgtaaaaacaacaaaaagctcctcagagaaatggctgattcaaggactgggacaggaattatacaagataaacctggagcaacttacagtgccaaaatgtaaggaagtgyttaaaaacaaacaaaaacaaaaacatagttggaggtgtgccaaagggacacagaagccaattgaaaaagctcctaatggccaaagctgga

SEQ ID NO: 585168 - DNA, 588 bp, Homo sapiens
agttctcatgagacctgattattttaaaatgtgtgccacttccccctcaatccctgctctcttgctcccattttgatatgtgatatggctattccccctttgtcttttaccatgattggaaacttcctgaagcctccccagaagcagatgccaccatgcttcctgtaaagcctgcagaatgatgagctaattaaatctcttttctttgtaaattacttagtctcaagtatttatttacagcaatgaaagataggcctaacacagggtatacacccaataatgggatcgctgggttgaatggtacttctgttttaagttctttgagaaatcaccacactgctttgtacrttgactgaattaatttacattccctccagcagtgtataagtatttttttttctccgcaacctagccagcatcagttatttcttgtttttttttttttttttttaataataataagtctgactggtatgagatgatacctcatcatggttttaatttgcatttctctgatgattagtgatgttaagcacttttttcatatgtttattggccacatgtatgtcttcttttgaaaagtgtacg

SEQ ID NO: 585169 - DNA, 588 bp, Homo sapiens
agttctcatgagacctgattattttaaaatgtgtgccacttccccctcaatccctgctctcttgctcccattttgatatgtgatatggctattccccctttgtcttttaccatgattggaaacttcctgaagcctccccagaagcagatgccaccatgcttcctgtaaagcctgcagaatgatgagctaattaaatctcttttctttgtaaattacttagtctcaagtatttatttacagcaatgaaagataggcctaacacagggtatacacccaataatgggatcgctgggttgaatggtacttctgttttaagttctttgagaaatcaccacactgctttgtacgwtgactgaattaatttacattccctccagcagtgtataagtatttttttttctccgcaacctagccagcatcagttatttcttgtttttttttttttttttttaataataataagtctgactggtatgagatgatacctcatcatggttttaatttgcatttctctgatgattagtgatgttaagcacttttttcatatgtttattggccacatgtatgtcttcttttgaaaagtgtacg

SEQ ID NO: 585170 - DNA, 514 bp, Homo sapiens
tatatatttgtatgtgtatatatacatatacacattcatacacatttttaaacacagattctataaggcacttaaaataattgtttaaattacctgatgaaagtgtattacccaaatagtctaatttaaaaaatgaaattacaaaaatagtctacagtataaaatccttacatttcccctcatattactataaagcttcaattttatgtttcaataaattactacttgagatccaaacacatattggatgctgaaaaggaaaaagaaggagttctctctattccactagcccttaattttttacactttgttatggtctgctttccatttgctgggtaatatctttattacagactaaatccctcatggcttcaaaaggaaattttccattagaaagtagycaagtgttgaaaggaaggtgatcaagcccatagaaaaatacaagtttagggaaatgttctattttctaatgacagggagaaaaatatctatttcaatgcctgccctctctaca

SEQ ID NO: 585171 - DNA, 544 bp, Homo sapiens
ttgcagggtttttttttttttctttctttgagatagagtcttgctctgtcgcccaggccagagtgcagtggtgcaatctcagctcactgcaacctccacctcccgggttcaagcaattctcctgtctcagcctcccgagtagctgggattataggtgcccaccaccacgcctggctgatttttgtatttttagtagagatggggtttcaccatgttggccaggctggtttcgaactaccgacctcaagtgatacgccaacctcggcctcycaaagtggtgaggatacaggcgtgagccactgcatccagccgattttgcagttttattgatgaattttgtacagggaaacttctaggtctgagtagaaattaaatgtatattgtaattattttttcaaaacatcaaaataagattttatttattgtctttacccaatgcactgaccattaaaattattttatacagtagccacgtgacaacatatttactttttcatttcactcattaatctgttttcttttaagaaggaaatctcactagatg

SEQ ID NO: 585172 - DNA, 596 bp, Homo sapiens
ttggtctttctgctgactcacccccaacctgaagttatctaagagccccagccaccagtcatctcattggcataaactcaggtatgattaaaaggagcttattatgaatgatgaagatgctcttcttatacctatccttcaggaatttacaagggttttaagagctcaatgccaggaaccagagatgaagaccaaatatgtatttcttagtgtatcatcatatcacaaagtgttctagggtcttagagaaagagggtagctctgtggagtcaagattgtaggtcttggattgataactttactcaaaacctcacaaataaatcttaatcatggtcagtagcaacatccttgaagatggcaattctatcattttatttttcacatcattgtcagcatcatctggaaccgatatttactgaccctcagttgggtgcaaatacagaaacacagtcttggccaggtgctgtggctcatttctgtaatcttagcactttgggaggccaaggcaagaagattacttgagcgcaggagttcaagaccagcctgggcaatatagtgagatctcatctctayaacaaatttacaaattaactggg

SEQ ID NO: 585173 - DNA, 568 bp, Homo sapiens
ttttaaagaactaaaattattgccgtgcatgcatttcatttgttgtttttatcactgcacaagactccatagtatgcaatccacccattttattcatcctttcctccactactggaaaccraggttgatagcaaatagtcacatgtactagataatcatttgaatattttacctctagccaataaataataaacctggccaattgtggcaagctgacctgatcaagtcctagcagtgatgaagagtgaatttcagaagaagcagccttcggataatttgctagagcagaagctgaaaatcacttagctcaacccaaatctgcctctgaaactgtcatctttacgcagttttcaaaattgtgctcttgacattaaagtatgactgttaaaacattttctttaaaatgcagaaaggaatagaaatgatttattattgacctatggcaagtggccttgagctaagactcaggcagtctgtccagttgagcaggtcagggaaggaggtgggatggaaataaggccagatgagtctcctgagaggctcctaaggagacaggttgactttctct

SEQ ID NO: 585174 - DNA, 498 bp, Homo sapiens
gcactccagcctgggtgacagagcaagactttgtctcaaatgaatgaataaataaataaatacttatgtcttctagacctacatttgcactctttccctgagtcccacagatgtgaagggcaagcctggcccaggtcatyttttaactttttcctcctacaagaagcaaatatactgctatgagcacactctaggtgttcagttgatattggtaaacaaacttactgtgtgcctccaagaaggatacttgcaatagagtctcgtcaaatcacagataacgatgacttcctataatcccactcctcagccgctgctaaggacaagagaaaaaatcatctggtgttgtgtaggggttgccatttacatgacacgttagtgtttccttcattggaaacagatgtttcatcgattcatttcaatgttcattagcttgacacataagattatggtgtgctgtctacatgatgccagaaccaccagatgatttaatcaaattca

SEQ ID NO: 585175 - DNA, 596 bp, Homo sapiens
acacacagtagaaagaaaagaagataatgataaacagtatagttcaaatacacctatggcttgtacacttccctttatgtatattatacttcaacaaaattttactttcaatagtgcaggataaaaaatgtaactattgtagtgttcaagtagcacatttcttccctactaaactcttaagttcttaaaggaaggcactgttaataattttttgtattattasctataagaaggctaggggtaatatatctttataaaaaatctatattcgatataaattaaggcttatctcttctcaaagtgcctagtataggacggacacataatcttagctaatattactcaattacaatgattaaactatctgggaaacaacttattgactcatactccagttcatcttgctcacattttaagtttgaataagccaagaaatacgcatcaggaattagtcacctgctagtttggtggctataagaaactgaactggaaacaaagaagtcaacacttaaaacagataatgtcacaaaaaattattttaatttgttatattgccaaacataatatatgttcaataaatgtttattgagggtaag

SEQ ID NO: 585176 - DNA, 552 bp, Homo sapiens
ccttctgccatgattgtaagtttcctgaggcccccccagcaatgcgcacgtgcacacacacacacaattgtatctcaataaaccttatatcatatttccttaattgcatttctgacttttggtaatccaatgtattaagatatcttaatgttcctaataagtctggtggtctgggagaattagagtaaacgtatatttattatactgctttttttttgcatggagatgcataactgatatggtttggacccgtgcccttgctcaaatctcatgccaaattgtaatcctcaatgttggaagtggggcctggtagaaggtgactcgatcatgggggtcgatttcctctcatgagatctggctgttgaaaagtgtatagcacctccctcctcccttctctttctcctgctcyagccatgtaagatgtccctgcttccacttcaccttccaccatgattgaaagtttcctgaggccttcctagaagccatcatgcttcctgtatatcctgcagagccatgagccaattaaacctcttttctttataaactacccag

SEQ ID NO: 585177 - DNA, 279 bp, Homo sapiens
cacttgggttttcctgttgagagcggggactgagagacaggactagctggatttcctaggcggaataagaatccctaagcctagctgggaaggtgactgcatccacctttaaacacggggcttgcaacttagctcacacccaaccaatcagagagctcactaaaatgctaattaggcaaaaacaggaggtaaagaaatagccaatcatctattgcctgagagcacagcrggagggacaaggatcaggatataaacccaggcattcgagccggcaacagc

SEQ ID NO: 585178 - DNA, 449 bp, Homo sapiens
taatgacctctggggtttcagctcaatgctcagaactaattgcagtcattcaggttttacagctcacagcttcagatcctatcaacgttgtctgtgattcagcttatgttgtaaatgtagccagtcacgtataacaattatatatwtttatatatatatatatatatatatatatacacacacacacacacacacacacacacaatcacatatagcagcctttggtaagcttagctatgttcatgcaattataaacacttattctcatatgctgcatgctacatgccaaacaggtgagacagctggtcatgtacagtgacattgtctgtcatcatttgctcatatggggatacctaaacaattaaaaactgacaatggacctgctaatactagtcacacttttaaaaatttcttacagctttgggctataacctataaaacaggaattc

SEQ ID NO: 585179 - DNA, 449 bp, Homo sapiens
taatgacctctggggtttcagctcaatgctcagaactaattgcagtcattcaggttttacagctcacagcttcagatcctatcaacgttgtctgtgattcagcttatgttgtaaatgtagccagtcacgtataacaattatatatttwtatatatatatatatatatatatatatacacacacacacacacacacacacacacaatcacatatagcagcctttggtaagcttagctatgttcatgcaattataaacacttattctcatatgctgcatgctacatgccaaacaggtgagacagctggtcatgtacagtgacattgtctgtcatcatttgctcatatggggatacctaaacaattaaaaactgacaatggacctgctaatactagtcacacttttaaaaatttcttacagctttgggctataacctataaaacaggaattc

SEQ ID NO: 585180 - DNA, 519 bp, Homo sapiens
actccagcctgggcaacaagagcaacaagagcgaaactccgtctcaaaaaaaaacaaaaaaacaaaaaaaacctcgggtgtcaaccttctggaaaatcagccttttaattggcaagtcccagaagaggaagcctaggcagttagaccccaggccacggtgatagggtgctgataccaygcagggcagggctcttggtgcctcgaggcttttgcatctttacttcctgctgaagttagagagagctgactggacttagtacaagcataggagtggggatccaggactcaggaaggccagctctgccatcctgggtcaaagagatgtcctccctggacgtctggctcccgctttaagaaatcatatcagccagtcatgatatggctcacgcctataatcccagctataatcccagcactttgggaggccgaggtgggaggatcacttgagcccgggaattcgagaccaggcactgcaacaaagtgagaccccatttcttcaaaaaataaaataattagctg

SEQ ID NO: 585181 - DNA, 635 bp, Homo sapiens
aatgatagcttatgaaacaataacctagtgattagatattttaggcttttggtaaacataaatttcttaatttaaaagctgaatagtaatgcatatcatttcatttrcaaaccttaaaatgcacatttcactccccacaaaaagaaacacttaatattaaactgattatttggttgtaaatttatttccaaatttaacagaatgtgtaatagaacatataaggtactttttatttgttaaagaccatttacttcatacatcctgcatgcaatgtattgagctttcaatttaaaaaaattcaaggtaaaccatattctgtacataattatttaaaaactattgccaatatagtgagtggtattttaaaataatatttatcattgctccacactcaacatcattaatgttgcacttattctgtaatggttcttatgcttctactcctgaatagattttatattttttattttaactctccttaaaaaaattaaattctgcagttgcattttttgtaaatataagccaaactgcttgttgtagttatgtttagataacatctgggagcattaccccaaagcaaagaggatctatttccaattcatctccagaatgttggagtgtagtaattcattgtc

SEQ ID NO: 585182 - DNA, 635 bp, Homo sapiens
aatgatagcttatgaaacaataacctagtgattagatattttaggcttttggtaaacataaatttcttaatttaaaagctgaatagtaatgcatatcatttcatttacaaaccttaaaatgcacatttcactccccacaaaaagaaacacttaatattaaactgawtatttggttgtaaatttatttccaaatttaacagaatgtgtaatagaacatataaggtactttttatttgttaaagaccatttacttcatacatcctgcatgcaatgtattgagctttcaatttaaaaaaattcaaggtaaaccatattctgtacataattatttaaaaactattgccaatatagtgagtggtattttaaaataatatttatcattgctccacactcaacatcattaatgttgcacttattctgtaatggttcttatgcttctactcctgaatagattttatattttttattttaactctccttaaaaaaattaaattctgcagttgcattttttgtaaatataagccaaactgcttgttgtagttatgtttagataacatctgggagcattaccccaaagcaaagaggatctatttccaattcatctccagaatgttggagtgtagtaattcattgtc

SEQ ID NO: 585183 - DNA, 635 bp, Homo sapiens
aatgatagcttatgaaacaataacctagtgattagatattttaggcttttggtaaacataaatttcttaatttaaaagctgaatagtaatgcatatcatttcatttacaaaccttaaaatgcacatttcactccccacaaaaagaaacacttaatattaaactgattatttggttgtaaatttatttccaaatttaacagaatgtgtaatagaacatataaggtactttttatttgttaaagaccatttacttcatacatcctgcatgcaatgtattgagctttcaatttaaaaaaattcaaggtaaaccatattctgtacataattatttaaaaactattgccaatatagtgagtggtattttaaaataatatttatcattgctccacactcaacatcattaatgttgcactkattctgtaatggttcttatgcttctactcctgaatagattttatattttttattttaactctccttaaaaaaattaaattctgcagttgcattttttgtaaatataagccaaactgcttgttgtagttatgtttagataacatctgggagcattaccccaaagcaaagaggatctatttccaattcatctccagaatgttggagtgtagtaattcattgtc

SEQ ID NO: 585184 - DNA, 639 bp, Homo sapiens
aatgcagtaccatttacagtagctacgtgcgcacacacacacacacacacacacacacacacacctagaaatacttataaccaaggaggtgaaacatgtctacaaggagaactacacactactgaaagaaatcacagatgacacaaataaaaaaaattccatgcccatggatgggaagaatcaatatcaataaaatatctatacttcctaaagcaatctacagattccacrttgttcctgtcaaataaacaatgctatttttcacagaattagaaaaaacaattctaaaattcatatggaacaaaatggaaccccaatagccaaagcaatcttaagcaaaaagaacaaagccagaggcatcatattacctgactccaaactatactgaaaggctatagtaaccaaaacagcatggcacttttatattttatactagaaatataaaagtagacacataaaccaatggaacagaatagagaccccagaaataaagctgtacacctacaaccgaatggtctttgagaaagttgacaaaaataaacaataaagaaaagatatcctatttaataaatggtgctgggaaaactggataacaatattcagaagagtgaaactggacccctacctcagcatacacac

SEQ ID NO: 585185 - DNA, 639 bp, Homo sapiens
aatgcagtaccatttacagtagctacgtgcgcacacacacacacacacacacacacacacacacctagaaatacttataaccaaggaggtgaaacatgtctacaaggagaactacacactactgaaagaaatcacagatgacacaaataaaaaaaattccatgcccatggatgggaagaatcaatatcaataaaatatctatacttcctaaagcaatctacagattccacattgttcctgtcaaataaacaatgctatttttcacagaattagaaaaaacaattctaaaattcatatggaacaaaatggaaccccaatagccaaagcaatcttaagcaaaaagaacaaagccagaggcatcatattacctgactccaaactatactgaaaggctatagtaaccaaaacagcatggcacttttatattttatactagaaatataaaagtagacacataaaccaatggaacagaatagagaccccagaaataaagctgtacacctacaaccgaatggtctttgagaaagttgacaaaaataaacaataaagaaaagatatcctatttaataaatggtgctgggaaaactggataacawtattcagaagagtgaaactggacccctacctcagcatacacac

SEQ ID NO: 585186 - DNA, 644 bp, Homo sapiens
tgggactggatttttcctaacctcacattaatatcctttattcaaagatttgtcctttgaaatatgttccaatattcactagggccatctattgacaaattaatttataagaagaaattaattttaccccatatgtaataatgtagaaacaaatgttccttactttaacaaaagattctatccctttcaatcaggtatgagtgacaaattattttgaagccaataaatatttttgaacaatactttctaatttagaatataagtgctgggctatatattatttgtggatgtgatgagacaatattaatagtaaatatattgagggcagtatatgaagaagacrcgtatgatgttacaacataaataaatcaatacacatttagtgaattacttattgttcaacacattagactatattacttacataaaaattgttaaggtatttaatttttacttcagagactaaaattaacaacaaagtaattttaagaagttgcctagtatctcttatctgttaagtgtcaggcctgtgtttaaaattttgaagccagggtttatttttatacttcaaacaggccatttacatcaagtgtaagtttgatcagagttaattgtttaattcaattagttttcattaaaaccaa

SEQ ID NO: 585187 - DNA, 649 bp, Homo sapiens
ttctttggtggaactgaggtaggtcaaaccatcaaagcttgcttttgttttaaagactgggaagaatgtttactcattctcagtggagactttctcactcttgtcactctactcattttatggtggattccccagaagtagatactgacataatgactttgtgaaagtgattacaggaaatgttcacaggacaaaaccagaagaaacatgaagaaataagatttccatgtgagtaaaccaagttttcggtgtctaaaaaagtcctacagaaataaattttggctcgatttcgcaggataggcatggagagagtgawgatcacacattaatcaggagacaagaaaacttgggtttatatcttttaataggcgactcggtggttaacctctaactccagtggatgtacaaatgtagacactcccactcacagtacctacaggtaaagtgatttggggtagcctgagtgcagttctagtgaaaggatacccacgtgctgggattatctagtatgtggtgaggggagcgacagccagtgagcacaaaagtaataaaggaaaactatgggactttccactttctattcaaatacaacaaaaactcaaaaaaaattattttataaggtatcttactggaaaaactaaattggaga

SEQ ID NO: 585188 - DNA, 626 bp, Homo sapiens
aatgttcacaggacaaaaccagaagaaacatgaagaaataagatttccatgtgagtaaaccaagttttcggtgtctaaaaaagtcctacagaaataaattttggctcgatttcgcaggataggcatggagagagtgatgatcacacattaatcaggagacaagaaaacttgggtttatatcttttaataggcgactcrgtggttaacctctaactccagtggatgtacaaatgtagacactcccactcacagtacctacaggtaaagtgatttggggtagcctgagtgcagttctagtgaaaggatacccacgtgctgggattatctagtatgtggtgaggggagcgacagccagtgagcacaaaagtaataaaggaaaactatgggactttccactttctattcaaatacaacaaaaactcaaaaaaaattattttataaggtatcttactggaaaaactaaattggagaataaaacatggcctaatatctccctttagcaacatagaatttgagaccttcataatccaaaataacttatttaattgcaacaggtaagatacagcaatagagtgagatctaggccagaggttggagggtcttgtttttgtagtacttactggaaa

SEQ ID NO: 585189 - DNA, 597 bp, Homo sapiens
ggattatctagtatgtggtgaggggagcgacagccagtgagcacaaaagtaataaaggaaaactatgggactttccactttctattcaaatacaacaaaaactcaaaaaaaattattttataaggtatcttactggaaaaactaaattggagaataaaacatggcctaatatctccctttagcaacatagaatttgagaccttcataatccaaaataacttatttaattgcaacaggtaagatacagcaatagagtgagatctaggccagaggttggagggtcttgtttttgtagtacttactggaaacacagtattcatctctttttctcgtatgtawggaagaattaagaaaatggaggtaaaaacgggtacccctcagaatttttgatagtctagaaacgatggtgggacttccttttcttttggccaacatgaaaactagttttcattttacataggagataattcatgtacacagtggtttaatggttttcaaatgacaagtggtagagcttcaattttgaccaggaattctacctccaggatcaatactcttaaccactatgctgtattgccttagtgaagttgccagaaa

SEQ ID NO: 585190 - DNA, 565 bp, Homo sapiens
agataagcaaatgcatatgttgaaacaaattgtaattgcttacataatgaaaatatgtccttgttcaactgaattctgaagcaactattcctgattgggagaatctccttcaagctatggttcagattcccaggtatattagttatctaaagctatggcacaagttactcctaaatgtaagtaaccccaaaatgtaagtggattaacagtagcgataacaacacatgtactatatcttacagtttctgtgggtcagaaatttggaagcagcttggctaggcagttctaactaagcatttctcatgaggagtcacatattggccagggatgtagtcatctgtgagcctgatgaaggatgaaagctttcagtagcttccaagggactcactgacatagctggcaattgatgctgactgttggcagktttctcattacaccccacatgggcttctccatggggtttcttgagtgtcaccatgaaatccaagtagaagaagcaagtcaagaaacaaaagtgggagttgcattgcagtttttgatacagtcttagaagtcacacaacatc

SEQ ID NO: 585191 - DNA, 645 bp, Homo sapiens
tacaatttggtgtcacataattcctatttttattgtaacatagtaaaagtatttttacttcttctaaacgttaatttagaaggatagcaaactaacagcagttaagtacttttttgtgctttataatgtgcaacacatttgacagacttagtgctatgttattcttacatcagactcaagaaataactattataattcttatgctacatatgaggaaatagactaaaaattcaagtatattaccaaaagtgatatggctaataagtaaaatatacaaaattcaagactaggttggtctcaacctaatatccttgaagraggtattttccgttataccaccaaattgctattagtgtgttctgtgcttccttaaaaagatatgtgagggtttataaatgttatttacttattttttttagaaattcctttacagacaattactcacacattccagatctgtctaaaattgcagacttttctttaaccttgtacagaaggacataatgcaaaataacagaaaaccctggcctccaaatagcattgtgttagagtgctcttatcttatttggaagcatttttggagagtgatttcatgcatgcaaataaagtagtgcataaacaaagaaatttagctatagaatattt

SEQ ID NO: 585192 - DNA, 488 bp, Homo sapiens
gttaacaacaataaaacaaagctctccagtcatctggcattgtgtaaacccagtcataaagtgcatgttatgatgtaacacccactgggcctaattattcccttttatatacagaaaagcacaagctgtgcaacctttaggagtattgactactcggaaaggcttccattcctctctcctcccactccctgcccacagtagaaattgttccatcaagcctccattctgctaggagagagaatagaatctttggtaattgatagtctctgttctggcatagagtagagcaaagcctgcaattgtcacccctctgctcagacacatttaatggattctcagtgccaasaagttaaaatcttcaacgctgcctgcggtcctaaatgatagagactggctagccttcacagtcttgttctcaccactgtctctctgtaactcttagcttatgccaagactgttctttgttccccagaagcaaatcctacagc

SEQ ID NO: 585193 - DNA, 544 bp, Homo sapiens
ggtaaatgtgtgtcatgggggtttgttgtacagattatttcgtcacccaggtattaagtctagtatccactagttattttccttggtggtctccctcctctcaycctctgccctccgggccccagtgtgagttatcactatatctttataccccttctacctgtgtgaattctgtccttcaacacatgctaatataccaccttcttcccaaagtcttcttccaaactatcttgggctttgttgatgcctcatttctttatttgtaatacttactttgctcctaaattaatctttttattgtgaattttatttttccaacatgttattatttttttctctaccagtaaaaaatttgtcctttactctgtctctaactgcttaaatgctgacatactatcttctcttaggtgtttgaatatagtgtctgattaattttcttggactgagagtttaccctttctgagatagcctttaactttacagtgaatttaaaaaatagccttttttttggttattgtttttcccagagagaaccatttgtaac

SEQ ID NO: 585194 - DNA, 544 bp, Homo sapiens
ggtaaatgtgtgtcatgggggtttgttgtacagattatttcgtcacccaggtattaagtctagtatccactagttattttccttggtggtctccctcctctcaccctctgccctccgggccccagtgtgagttatsactatatctttataccccttctacctgtgtgaattctgtccttcaacacatgctaatataccaccttcttcccaaagtcttcttccaaactatcttgggctttgttgatgcctcatttctttatttgtaatacttactttgctcctaaattaatctttttattgtgaattttatttttccaacatgttattatttttttctctaccagtaaaaaatttgtcctttactctgtctctaactgcttaaatgctgacatactatcttctcttaggtgtttgaatatagtgtctgattaattttcttggactgagagtttaccctttctgagatagcctttaactttacagtgaatttaaaaaatagccttttttttggttattgtttttcccagagagaaccatttgtaac

SEQ ID NO: 585195 - DNA, 614 bp, Homo sapiens
atatgttatgtcagttactctctgggacatttaataatattagcaatatgtttcaatcagaaacacatttattaaggaactttatgtggttttctttttcaatttgaagctaatacattgcttaaaaaaactccaagtatatgtatggtatcaatccttgtataccagctgatgtttatagcagtgcatcatgggacattacttccagaatggcttgaaagccaaaccatgaatttagagggctacatgagtttccattatcaattttcagcaacccagacatttctatacaacataaactaccaactgcatatcataaatgtgacctcaaatccatttattttgttaattttccctctgctacaattcttacctgagccttggcaggtaaaaatggaagtttaaatcaatccaattttaataacacccaggaattcatttctcacccaaatggatatatcttttatccttctgctaaaggaggaaatatttagtttgcttttcctttatgaacaaattatcaacctacagtctatataactatgaggtattcagtaatctaaaattaacacawggatactgtttaatttaattaagcttttgggaaggtttca

SEQ ID NO: 585196 - DNA, 612 bp, Homo sapiens
gcagttaaactgcttaatgattttgtccctggagaagaagcattacagtggccatgttactttgtagttacaattatttgcccaattaacacctaccatccattccttgtttgaacataaatccaacttgtttagttatcttaagataccccattttattatttttttaagtatatgacctaatttgaccaaataaattttaatacaagtatttgtggatctttttggaaatgctatgtattcattttgagacggcaatcagaagtaagttgctttttaatctctgcttyaatttcactggatattatcagtcatgtatatgagctttgtagctgctgtagccatctcatgactgtagtgaaaatgaacctttgaagtaagaaggtaaatccaagaaatttacaggaaaacagaataagagcaactcaccttggaagagagtcaattctcttaattactatttgtgtgaactaataaatttccatatttttacagtttggatgggcctattagtttccaggggctttggtaacaaattataacgaaccttataacaaacctgatggcttcaaacaacagaaatatattccctcacagctctggaggccagaa

SEQ ID NO: 585197 - DNA, 612 bp, Homo sapiens
gcagttaaactgcttaatgattttgtccctggagaagaagcattacagtggccatgttactttgtagttacaattatttgcccaattaacacctaccatccattccttgtttgaacataaatccaacttgtttagttatcttaagataccccattttattatttttttaagtatatgacctaatttgaccaaataaattttaatacaagtatttgtggatctttttggaaatgctatgtattcattttgagacggcaatcagaagtaagttgctttttaatctctgctttaatttcactggatattatcagtcatgtatatgagcttygtagctgctgtagccatctcatgactgtagtgaaaatgaacctttgaagtaagaaggtaaatccaagaaatttacaggaaaacagaataagagcaactcaccttggaagagagtcaattctcttaattactatttgtgtgaactaataaatttccatatttttacagtttggatgggcctattagtttccaggggctttggtaacaaattataacgaaccttataacaaacctgatggcttcaaacaacagaaatatattccctcacagctctggaggccagaa

SEQ ID NO: 585198 - DNA, 591 bp, Homo sapiens
tataacaaacctgatggcttcaaacaacagaaatatattccctcacagctctggaggccagaagtttgacatcaaggtatttgcaaagttgcttctttctggagactctgtgaaagaatctgttccatgcttatctcctagcttctcgttagctgccagcaatgcttggcattcatcagtatgtagacacatcacaccagtctctaactgagacttctcatgtccttctctcarctgttcctctgtgtgtcaaatctctctcttctctctcttataaaaacattagtcattggacttaggtctcaccctaaatccagagtaatatcacctagagatttctaatttaattctatctgctaaaatcctatttccaaataaggtcaccttcacagaaattgggggaaaagagttagacatatctatttggagggacacagttcaacacagttgaatttttgttactcgcagacacaaccattctgattgatccagactccaattttattcaaataaataactcctttattctgtaccaaaattctaggatcctggtccttcaagataatataattctacaatttaaacttttta

SEQ ID NO: 585199 - DNA, 527 bp, Homo sapiens
ttgatgggcatctaggttggttccttgtctttgttattgtgaatagtgctgtgacaacataaaagcactggtgtctttttggtagaatgatttatttttgtttgggtagatacccactaattggattgctgggtcaaatggtcattccatttttatttctttgagaaatctccatgttgttttccccagaggctaaaataattgacattctcactaacagtgtataagtgttcacttttctccacatccttgccagcatctgttaatttttactttttaataatagccattctgactgaagtaagataatatatcattgtagttttgatttgcatttctctggtgtttagtgatgtttggcattttttcatatgcttaytggctgcttgtatgtctttttttgagaagtgtctgttcatgttctttgcccactttttaatggggtttttttttcatgctgattggttaatgtttcttataggttctgtttgttagttctctgttggatatatagtttgcaagtattt

SEQ ID NO: 585200 - DNA, 567 bp, Homo sapiens
atggggttcgcagtcttctgtttatgaagccttcatctttggtacccagctgcagcttggctgtgggcaaaggagcgtctaccttatggctatcactagaatggggttggtggcagagccacttttccctgtccagggcaggtaacttcgcactctgtcctcccttgcaggggtgctagaactctgtgtagggaggggtagttgggtgccatcctttgttttcaactctctggaaaagcatgagaagcacttttttcagtgtgtgctcactttctttgaggatggagccacyggaaaaatgagataaatgatttatttaattgctcactcaccaggccctgataggaagaactactactgcagctgacacagtgtatggagaggtgggggacaaaatattacccaatctccacatcacttcctagtcatcgatgggaccccttttgcagttggtgcctcacctgcatttcctttgcccccggaggggctttgccaggccgtgttcttcaccaagggttagatctccaggagactcacaacttcctgggctccacaagttccctgtgc

SEQ ID NO: 585201 - DNA, 567 bp, Homo sapiens
atggggttcgcagtcttctgtttatgaagccttcatctttggtacccagctgcagcttggctgtgggcaaaggagcgtctaccttatggctatcactagaatggggttggtggcagagccacttttccctgtccagggcaggtaacttcgcactctgtcctcccttgcaggggtgctagaactctgtgtagggaggggtagttgggtgccatcctttgttttcaactctctggaaaagcatgagaagcacttttttcagtgtgtgctcactttctttgaggatggagccactggaaaaatgagataaatgatttmtttaattgctcactcaccaggccctgataggaagaactactactgcagctgacacagtgtatggagaggtgggggacaaaatattacccaatctccacatcacttcctagtcatcgatgggaccccttttgcagttggtgcctcacctgcatttcctttgcccccggaggggctttgccaggccgtgttcttcaccaagggttagatctccaggagactcacaacttcctgggctccacaagttccctgtgc

SEQ ID NO: 585202 - DNA, 567 bp, Homo sapiens
atggggttcgcagtcttctgtttatgaagccttcatctttggtacccagctgcagcttggctgtgggcaaaggagcgtctaccttatggctatcactagaatggggttggtggcagagccacttttccctgtccagggcaggtaacttcgcactctgtcctcccttgcaggggtgctagaactctgtgtagggaggggtagttgggtgccatcctttgttttcaactctctggaaaagcatgagaagcacttttttcagtgtgtgctcactttctttgaggatggagccactggaaaaatgagataaatgatttatttaattgytcactcaccaggccctgataggaagaactactactgcagctgacacagtgtatggagaggtgggggacaaaatattacccaatctccacatcacttcctagtcatcgatgggaccccttttgcagttggtgcctcacctgcatttcctttgcccccggaggggctttgccaggccgtgttcttcaccaagggttagatctccaggagactcacaacttcctgggctccacaagttccctgtgc

SEQ ID NO: 585203 - DNA, 567 bp, Homo sapiens
atggggttcgcagtcttctgtttatgaagccttcatctttggtacccagctgcagcttggctgtgggcaaaggagcgtctaccttatggctatcactagaatggggttggtggcagagccacttttccctgtccagggcaggtaacttcgcactctgtcctcccttgcaggggtgctagaactctgtgtagggaggggtagttgggtgccatcctttgttttcaactctctggaaaagcatgagaagcacttttttcagtgtgtgctcactttctttgaggatggagccactggaaaaatgagataaatgatttatttaattgctcactcaccaggccctgataggaagaactactactgcakctgacacagtgtatggagaggtgggggacaaaatattacccaatctccacatcacttcctagtcatcgatgggaccccttttgcagttggtgcctcacctgcatttcctttgcccccggaggggctttgccaggccgtgttcttcaccaagggttagatctccaggagactcacaacttcctgggctccacaagttccctgtgc

SEQ ID NO: 585204 - DNA, 459 bp, Homo sapiens
cgagaaaacattttaaggccaggcatagtggcccacacttgttatcttagcactttgggaggctgaggtgggaagatcatttgggttcaggagtttgaggatacagtgagctatgattatgttatggtactctaacctgggtgacagagtaagattctgtttctaaaacaaaaagcaatgacaaaaaaaccaaaagatttgctgcatttctttctaacttatttttgtttatatagcatttgtcctgcataatactaagtaatgctaaatagtactattattaaataatattaaatattattgaataataacaatattaaatttttaattctaaaactatttattgtgtacctattatggctccaaaaytcttctaggcaatcaaaatacaattataaacttggaagagaaattctctgttttcatgaaagttgaattctaatgaaaatttaataccca

SEQ ID NO: 585205 - DNA, 336 bp, Homo sapiens
ttgtgtcacgtactgttttaattcttattaaacaataaatttgtgttacttctcttccacctttgtggtggaggagagacttctgggcttraaggagattttgtttataattatattttctcaacatggaatagaaaattatgcaataagatgtttgtgaggatgtggatttagagagaatggcctacaaattctttctagggaaacgatatttgagtagagatctgaatgttagaaaagaactagctatataaaatatctatggaaaagaatccaagtagtgaaaatagcaaacatgatagttctgagacaaagataagcctggtttattttaat

SEQ ID NO: 585206 - DNA, 336 bp, Homo sapiens
ttgtgtcacgtactgttttaattcttattaaacaataaatttgtgttacttctcttccacctttgtggtggaggagagacttctgggcttaaaggagattttgtttataattatattttctcaacatggaatagaaaattatgcaataagatgtttgtgaggatgtggatttagagagaatggcctacaaattctttctagggaaacgatatttgagtagagatctgaatgttagaaaagaactagctatataaaatatctatggaaaagaatccaagtrgtgaaaatagcaaacatgatagttctgagacaaagataagcctggtttattttaat

SEQ ID NO: 585207 - DNA, 541 bp, Homo sapiens
gcatttaaagaactgaaaaagggggagaggctaggaaaggaaaatgatgagtcattagtacagtaggaagtaaaagaagactgtgattttacatatgccaaaaaatgattttgagttgaaagaaagttgtcaacagtgtcagagacatgagttcaagggtgataagaacagatatttgaattttgtatttagaaaggtagtcattggtgaccttgataagatcactttcaatggaatgatggggaagaaaatctaaattgagtggaataaggaggtgaggaaaagaagactaaatataggcagctctcttgttagttgatgggaagcatgactacaaaagagaaaagctgtgcattttwaaaaaaataaccaggattgattttatgtcagattccaagactccagctattttatcgtctttttcgttgttgtcaatatgcccccaccatctcttcagatacataaatagagaaaaatgacagagacaacagcaataaattcagcatgaaaaatgacaatatacactccaaagtatatgcgt

SEQ ID NO: 585208 - DNA, 575 bp, Homo sapiens
cagcttcatgattgagtagtgcttagaaaataagcaggcaggtatgttgtttttaaaggttaatgaaatacaagtccctggaaaatatccttctaagcagttgattacagtatactgagaaaagaataactgttgagggtgccaaaactatcagccctaatgaacaggtagaataagtgactttctacactggataatttcaagggccacaaaagcctcaacaaaactccatgttatccttcaacattacattcatttatccattcaacacaagttgataataatatatttttttcttgccaaactgcagatccccggaatgaagatggggaagatggtgtttctgtgaattaacaataataataataaaataaaaaatacttgaaattcttttcagtcatagaaatgttgaaatgttttgtttaatttttctttgtgtatttattagcrtagtggttgaaatgttgtggattctcatagaatatttgtgtaactttcatgtagggtaaatataaaaacagaaatcagaaatcaggctggtaggaaagtaccaaatgatggtattccttaagggg

SEQ ID NO: 585209 - DNA, 603 bp, Homo sapiens
taaagacaaggccaggttggactgccagaatgagccaacagcrtgtgatgtgcttccccctgcagagagcctatgaatggacatgcagtcagggaggtttaacatcaccaagattcctatcccagaaaagcagatgttcatagctctgggaacttgtggagagcctataaacagacacatggtggggcacctttccatatggataagatagggctataaatgccctcaccttgccacggctcttctaggcctctttagggttaaggcatactcccttctgagaattcctggtctaaccggttgtctagcttcatgtcctgtttctatggattgtttgtaaccagcttttgctgcaactgttattgccaattaatatcttgctaatcataggttatggaaaaattgtgtttctgttttcaggctctgttagaaattactgacacacacactatattgtaaattcttatctctgtatatgtacttctacatccaaatgtactgtacttctacatacaaatgttatgttaaaaaattacttcatgcccatgtgaccatctcacctcataatcaaatgactctaatccctcactaacctacccctgc

SEQ ID NO: 585210 - DNA, 603 bp, Homo sapiens
taaagacaaggccaggttggactgccagaatgagccaacagcgtgtgatgtgcttccccctgcagagagcctatgaatggacatgcagtcagggaggtttaacatcaccaagattcctatcccagaaaagcagatgttcatagctctgggaacttgtggagagcctataaacagacacatggyggggcacctttccatatggataagatagggctataaatgccctcaccttgccacggctcttctaggcctctttagggttaaggcatactcccttctgagaattcctggtctaaccggttgtctagcttcatgtcctgtttctatggattgtttgtaaccagcttttgctgcaactgttattgccaattaatatcttgctaatcataggttatggaaaaattgtgtttctgttttcaggctctgttagaaattactgacacacacactatattgtaaattcttatctctgtatatgtacttctacatccaaatgtactgtacttctacatacaaatgttatgttaaaaaattacttcatgcccatgtgaccatctcacctcataatcaaatgactctaatccctcactaacctacccctgc

SEQ ID NO: 585211 - DNA, 603 bp, Homo sapiens
taaagacaaggccaggttggactgccagaatgagccaacagcgtgtgatgtgcttccccctgcagagagcctatgaatggacatgcagtcagggaggtttaacatcaccaagattcctatcccagaaaagcagatgttcatagctctgggaacttgtggagagcctataaacagacacatggtggggcacctktccatatggataagatagggctataaatgccctcaccttgccacggctcttctaggcctctttagggttaaggcatactcccttctgagaattcctggtctaaccggttgtctagcttcatgtcctgtttctatggattgtttgtaaccagcttttgctgcaactgttattgccaattaatatcttgctaatcataggttatggaaaaattgtgtttctgttttcaggctctgttagaaattactgacacacacactatattgtaaattcttatctctgtatatgtacttctacatccaaatgtactgtacttctacatacaaatgttatgttaaaaaattacttcatgcccatgtgaccatctcacctcataatcaaatgactctaatccctcactaacctacccctgc

SEQ ID NO: 585212 - DNA, 566 bp, Homo sapiens
gtgctccgtctactggatcggtttccccaaggagtgcgtatgtcactaggcatatatgtaacccttggctttcagcagggttggccaaggagagatgttctgaaaatgggtggacagagctgaggcatgtgtgttgggatgtccacatggatgcatttctatcgcagcacatgaataattgaaatggagaggaaaagcctatggggagtcacagagtggagctgaggccatgtcctccccatactgccatcttttagtgaagaaacttaaaagtctaaaaattttaatttcaagtttgactttctaggtcaatgtgaaggcatacttatcgaaataggatggtacaacatatttaattgaatgattttgggggattgatttattattttaaaatgaatcacatatrtgcctccatttaactcttgccttgagaggccataaatgctaaggactgtcttagtttcagagttggtggagaattctgaatgtttgatatcacaataaggtcctgatgacgggggaataaagaaagtcttttttttttgtttttttcagaagagaaaatt

SEQ ID NO: 585213 - DNA, 603 bp, Homo sapiens
taaagacaaggccaggttggactgccagaatgagccaacagcgtgtgatgtgcttccccctgcagagagcctatgaatggacatgcagtcagggaggtttaacatcaccaagattcctatcccagaaaagcagatgttcatagctctgggaacttgtggagagcctataaacagacacatggtggggcacctttccatatggataagatagggctataaatgccctcaccttgccacggctcttctaggcctctttagggttaaggcatactcccttctgagaattcctggtctaaccggttgtctagcttcatgtcctgtttctatggattgtttgtaaccagcttttgctgcaactgttattgccaattaatatcttgctaatcataggttatggaaaaattgtgtttctgttttcaggctctgttagaaattactgacacacacactatattgtaaattcttatctctgtatatgtacttctacatccaaatrtactgtacttctacatacaaatgttatgttaaaaaattacttcatgcccatgtgaccatctcacctcataatcaaatgactctaatccctcactaacctacccctgc

SEQ ID NO: 585214 - DNA, 527 bp, Homo sapiens
tactgtacttctacatacaaatgttatgttaaaaaattacttcatgcccatgtgaccatctcacctcataatcaaatgactctaatccctcactaacctacccctgccctcactaaacttaataataaatgctggtatatccagtgcattgttggcaccgtgggaccagaagtttgtgacccccctggacccagctttcactatcttgtgtgtgtctattatttctcaacctgccgatccacctgggaacaaagagagagccccgttgcattgmgggctgctggccagatcccgcagtacatactgttctccatagtggttgtactaatttacatttcccccaacgatgtacaaggaagggttcctctttctccacatccttgctgtcaattgttagtgcctgtcttttggataaaagccattttaacttgggtgagatgatatctcattgtagttttgatttccatttatctgatgattagagatgttgaacatttcttcatatacctgttggccatttgtatatc

SEQ ID NO: 585215 - DNA, 527 bp, Homo sapiens
tactgtacttctacatacaaatgttatgttaaaaaattacttcatgcccatgtgaccatctcacctcataatcaaatgactctaatccctcactaacctacccctgccctcactaaacttaataataaatgctggtatatccagtgcattgttggcaccgtgggaccagaagtttgtgacccccctggacccagctttcactatcttgtgtgtgtctattatttctcaacctgccgatccacctgggaacaaagagagagccccgttgcattgagggctgctggccagatcccgcagtacatactgttctccatagtggttgtactaatttacatttcccccaacsatgtacaaggaagggttcctctttctccacatccttgctgtcaattgttagtgcctgtcttttggataaaagccattttaacttgggtgagatgatatctcattgtagttttgatttccatttatctgatgattagagatgttgaacatttcttcatatacctgttggccatttgtatatc

SEQ ID NO: 585216 - DNA, 679 bp, Homo sapiens
aaagcccaggtaataagacatatttttctaaacaaagattgtgttttctttatatgaaaatatcaacagtgtctagcacagtactaggcatgtagtgctaagtactataagtaaagttttgctccctggcacatccaaaatctaactttaaaatgattccttgtgttatatatttgttgatatgtgttaattgcctctgatatattaataaagtacttacctaggagctttgaacgcttcctgttgctacattttgatttgccactcatttgccaatctctcttggtttgcttttatttttgaaatgcaggtttttcttagtttttctaagtataggtagttataaaagagcattgtgggtttctatttttcatatgtgagttaacaccattacatgctgccatgaaagtgggtgagccaccattaatcatagaatcatgctgctggaaggaaactccaaaggtcagatagttaatcctcttgactccacrtaggctgccttgaaattaacctagacaaataggtgtctgtctaagcacttaaaggttgaatggcaccatgaatgtataaacaatcatagccaagtggagtatgagctgatcatttagataattcaagcagcatatcttcacattggttcaatcccctaaatatatcaatatttccatttgaacagtgg

SEQ ID NO: 585217 - DNA, 560 bp, Homo sapiens
atttcttcttgaaattttcctgtacatattgtaaattttctacccttataaataacttacctccacaaagccaatccttttaattcatcacatatacatttaattctgctgttcatattaccacttgaactttcctgaaactttcctttccactgtcagttcaagctgccaactcaaaaacacacacagaaaggcacaaaggaaagaaccagataagtcatataataacaatattgccatatatattcaccataatccgtaatgagctcataaattcacctgcagtactgtatttcatatttccatcaacctgtatgttcaattttttttccaattttatgtataaggaaattgaggtttgatgaaataaagtaacttgaccratattaaagattcagtaagtgacacattgaatttaggaacttacactctatgtcataaaaggttacctattttgccaagcttaaaatgtttttacataaaatggagaatatataaaaggatttataatatattgaaggatattttatattcataaaaaaaaactatggaaaattgga

SEQ ID NO: 585218 - DNA, 529 bp, Homo sapiens
gcaaacagcagttaggagtagaatgcaccctttttacatcactcacattagggctcatacacctcttccaggaccttcgactgaagggaatcaaatggctgatcacctagttgctaatgcaatagctaatgctagacattttcacaatttaacccatattaatgcctctggtctcaaacgcagatacagcattacctggaaagaagctaaagctattwtctggtgatgcccaacttgccaaatggtatattcctcatcttttacaggaggagttaatcctcgaggatggaaacctaattctctttggcaaatggatgtcacacatgttccctcatttgggagactagcttatgtacatgtatgtgtggacaccttttctcactttgggctacatgtcaatcaggagagtcttctgcctgtattatacgtcaccttttgcagtgttttgcagtgatgggcattccagcttctattaaaacagataatgccccaggctatactagccaagctctagctacatttttctcta

SEQ ID NO: 585219 - DNA, 497 bp, Homo sapiens
ttttaatttaaaaagagagatttgtgactcttyctttaacttagacacttagaggccattgtgcagttatcaattggcctgatttccaaattactgtggctcaggaaatagggaagtccaaggagagagagagagacagggaatggcttgttgatggagcagtcagaacacatacaaaatttatcaatgaagttcactgttggatatgaacgtaattcatggtgcctcaaaacaattacaataataatagcaaagattattcatcatatatcaccataaagatgtaattataataagaaaatcttgaaatattgcacgaatttctaaaatgttacacaagaaaatgagtgaccacatgctgttggaaaaatggtgccaatatgcttgctcaagatatgtttgccacaaaccttcaatttgtgaaaaaccaacaaacaaaaaaatgcagtatctgtgaagaataatgaaatgaaatgaaataaagtatgcctataatt

SEQ ID NO: 585220 - DNA, 611 bp, Homo sapiens
ttatagctcccaacattttaggaagatttttataacagaactttaaaatattgcataattttatggtaaaccaatcatttttcttaactctgggtaacatttcctagaaatctcttaagatgtaaaatcataaccttctgtagcatgttgctgtgcttgaggctagattttataccattcatctctcaccacctgtcttgttgaatcataacctaggcacctgtaatcaattgcatatcaaatcagagattcccctaacattttaatataaaatgaccsttttggggccccaagagataggtatcatatcagattaatacaggcctgaaaattacttatcatttgttagaatagtgataacaggagaaatcttgagttaaagacatgggtgagacagctcatttgtattttctgtcatgatgattgaaatagaatgaataccaatcatttttatatgatgtataaattttctaacttatttgtcttggggaaacattggctaatttgcccaaaatttgattattaataagaacatttttgatatgtgcctaaaatcctcactctgattctatctctgctttgttggaaaattctagctcatatcacaaaat

SEQ ID NO: 585221 - DNA, 323 bp, Homo sapiens
acctgccatactacagcctctgatagaaactctaaacgagaaggaatgactattaaccagccaccacaaaaatacacttaagaacaccaaacagtaacatgaaaaagccacaacacaaacaagtcggaataataaaaagctaaaatgatgacagggtcaaatccacacatattgatactaattatgaatgtaaatgagataaatatgccaactaaaaggcatagagtggcaagctggataaagaagcaagacccaatggtatgctttcttcaagaaactcatctcacakgcaatgacacctagaggcacaaaatgaaggaatg

SEQ ID NO: 585222 - DNA, 595 bp, Homo sapiens
agaaaaatatattaccatggatcttttaaacccagaccagacatttgaactgtcattttcacctctgatttccatcaaggttcacaaagcttttaaaggcactcagtaatgtatcctgtatatcaagatccacaaaaggcgacgtttctgttctacaggggtgagaggcagagcgccggactctttgtagcccacgaccagggagttcaaaagcaccaacaaaggacttttatgcagccaaggacttttttctatgacttttattctgagcaaaatgtattcagccaagaaagaatgggaaatagtggtcttaaaataatttccgtggcagaaactggatttcaaatgatataatgaactaatgtgcagtacaragatggaaataattagctcagacaaggcatttgatagagttagcagaaaaataattgatctacattttatgtgattcttataaaaacgaactctatgggaaaattagtagtctttgataggtatattcaaaaatacagattcacaataaatattggcattacattttgtgaaatgtcatataggctggattacaattcagatattctgtttatgagtccat

SEQ ID NO: 585223 - DNA, 499 bp, Homo sapiens
aatacccaagaaaacgttaatttctatggccagatgaaaatgaacattcagaaactcatgagcaggtttaatacgttttgctctactctgctttaacttatgtgatccttaactctaaaatatgttctttttctgtctgctagcattaccatagccttttcctttctgcatagtcacaaaaactagagaaatgttttaaggagataggtagatagaagataggcaggtaractgctataaataattagagatacattttaagaatatatacacacacatgcatatacacacatacaaacatgcacaaacacacatacgttatatataataaatttggaatatggtttaacattaatttgtaataattatttaccctagtaatcttgaaatacagttttttattcctgtttttcagctgtatatactgaagaaagaaatcaaatgttgcttaaagagcagagtatcctcaaaaacatgacctgagagtttttcacctttc

SEQ ID NO: 585224 - DNA, 532 bp, Homo sapiens
cacacacatgcatatacacacatacaaacatgcacaaacacacatacgttatatataataaatttggaatatggtttaacattaatttgtaataattatttaccctagtaatcttgaaatacagttttttattcctgtttttcagctgtatatactgaagaaagaaatcaaatgttgcttaaagagcagagtatcctcaaaaacatgacctgagagtttttcacctttcatgttgattttatagttattkccctcagcaaaatttcctcacttcctgcagtgttttgtttctctgtctctggattctcagtaatgtcaacactccactcagatctacaaaagaatgtccacctattaaaatgtgtcacgttaatgatgggcagatcaattcttttttaaaaaaatacttgaattaaaaactttaatgtaaacagaaactactaaagagaaacaatacatttttcccaaatcttaaggtttttctgtatttgcttaaccctagcctctcaacttatttcaggtaaaaataacc

SEQ ID NO: 585225 - DNA, 568 bp, Homo sapiens
ttaagaacacagaatttgaaatagttgggaaaatttggaatatgtgttgatcacagaaaggcagtagaattgacagtaattatagcatatttgagattagtgattaggaatacatgcctaatgtattttgagactccccacagacaattctaggctgtttcatgcaagctgggaaaatggacagtgaggctcattttctaattaagttttgccagatccataagattaaaggacagttaaaaaaaaaaagtgttcagggcattggtattactgtaatgacccaattcactgtagactctattatgaatagagaaaaagtaaagaaaccaaataaaaataaaasaacctgctggagaagggaagttgaattatttaaaggaaaacaagcaacataactccatataattaaatagctaagtaaatactctgaaatgaatttgatgcgtaggtcatttggttgtgagttttgctatccatagtgattatcttcttaggaaatttatggaaaagaatcatatttaaagaaaaaaattataagattattttattttatcccttttctcttgaa

SEQ ID NO: 585226 - DNA, 563 bp, Homo sapiens
gattagataacacctcacttcctcagaatttgtcttaaatgatattttcaagtacttgtcaaaacatattcatagtaaagaaatggaaaaagcctaccagtcttaaatactaattaaaagaaccttaaggagcaatactaagatcagacaaaactgactttaagaaaaatggcaattttaggttatcaaaaagattactgcatagtgctaaaaagttcatttgaaatagcaaaatgaaactagtttaaatgtgtgtgcatccaaagcaatgacattaaaaagatataaatacaaagccaaaagtttgtttctttaaaacattaataaaaagtttaatctctctcaacatcaagaataaggaaaagtaagagataattagtattacaaatgaaaagtagtcataaccccagaattcatagagtctgaaaagataagaaaataatgcaaacaactttatgccaacaaaatttatttttaaaaagtcatggccaggcagggtggytcacgcctgtaataccagtactttgagaggctgaggcagcagatcactggaggtcaggagt

SEQ ID NO: 585227 - DNA, 289 bp, Homo sapiens
atttctcccatttgcttttgaaagaagagaaatatggctctgttccacccagctcaccagcggtcagagttyaaggttttctctctgttccctgaacattgctgttatcctgttcttttttcaaggtgcccagatttcatattgttcaaacacacatgctctacaatttgtgcagttaacgcaattatcacagggtcctgaggtgacatacatcctcctcagcttacgagatgacaggattaagagattaaagtaaagacaggcataggaaatcacaaaggtattgatt

SEQ ID NO: 585228 - DNA, 289 bp, Homo sapiens
atttctcccatttgcttttgaaagaagagaaatatggctctgttccacccagctcaccagcggtcagagttcaaggttwtctctctgttccctgaacattgctgttatcctgttcttttttcaaggtgcccagatttcatattgttcaaacacacatgctctacaatttgtgcagttaacgcaattatcacagggtcctgaggtgacatacatcctcctcagcttacgagatgacaggattaagagattaaagtaaagacaggcataggaaatcacaaaggtattgatt

SEQ ID NO: 585229 - DNA, 289 bp, Homo sapiens
atttctcccatttgcttttgaaagaagagaaatatggctctgttccacccagctcaccagcggtcagagttcaaggttttctctctgttccctgaacattgctgttatcctgttcttttttcaaggtgcccagatttcatattgttcaaacacacatgctctacaatttgtgcagttaacrcaattatcacagggtcctgaggtgacatacatcctcctcagcttacgagatgacaggattaagagattaaagtaaagacaggcataggaaatcacaaaggtattgatt

SEQ ID NO: 585230 - DNA, 515 bp, Homo sapiens
tagcacatgccaaaaaaattccatgcactatggtaagtgctataatattaataaatacatactgccatgtaagtaaaaggggaagattgaccagctatgactggaaactctaggcttcacagagtgaattttatttcaaatgagcctgaacagtttaacagtaggaaatggcaagaactaaaaagaaaaacataacaaaggcacagaggcatactcaaccaaggcatggttgaggaaccatgtataatttcatgttgagatagtatagagtacacagtgatattcacaatatgtgaagaaatttattaatttgactcaatttaatcaaagaagaagatgagtcccagggcagagagacccaggaatttttaatcattttcttgagctgacactctcctctggtcaatttcacctttttktccccataagttattggggtacaggtggtatttggttacatgcataagatcattagtggtgatttgtgagattttggtgcacccatcacctgggca

SEQ ID NO: 585231 - DNA, 509 bp, Homo sapiens
tggctggttttcaagagcaattgttccaagagacagatagtggaagctgtcagtttcataaggcctaggcacagaaacaggtacagagtcacttctgtagttttctgtygattaaagcaattgcagaacacacacaaaatcaaaagggaaagaacataaatcccccacatcgccatggttaggttgaaatgttaaatgaaaaaaaaaaagtgtgtcattcctactcgattgtcaagaatttttatattttaagactctatttggtttactgcatctaacacagtaccttaagttgtcattgttaaagttaatttaaagttaaattgaacaatgattttatattgctcaatatttgagggaaagtgtgaaagctgtttttctaaaattgagagagaataaactggatagaatcttgaaaaaaaaaaaaaaagacagaaagaaagaaagaaagagtgtttttccccactttatgtttttgtttgctttgtggaagattagttggctgtaag

SEQ ID NO: 585232 - DNA, 501 bp, Homo sapiens
gtgtgaaagaacctggtccttccaggctggggctggtggctcgagctgcgcacactggggcttcagtctccagagtcagtgaccttccccatgagggtcgcctgagccctccaggacgctgggtcagacaaggtcttgaagctcctcatggggggcactcatttgagtggggatgtggctcctggagagaggggcttgcccagggcttgaggcttccctgagccctctcaagtcgggtcctggcccagtctgcccatgaggctgggcctgagccccagccattgccctgggatgacccctcttgggcagagggttttgcttgtgtgtcctttggggacccgcctgagcctcctgtgggctgggagtgagccagacccccgggctggggaagcagggcactgcagggcaaggagggtccctgagccagggtctccctatgcctccttaccccrtcaatcaatatccggatgaggcagcctaaggacgaacactgcccacata

SEQ ID NO: 585233 - DNA, 613 bp, Homo sapiens
aggaggtccccggggcagctgttcacttaccctgcagggagtgcctctcactggccagcagctgcaccagtgcccagaatgcatcctcctcaggaagataraggaggaacaaggcggcgatgtggctcaggtccctgcagtagcccacctcctgcaagagccagagtcaccatggaaggacatcagctgggagggctgaggtcacctgggaggactcatgtcattggagagggcagaggtgactggagaggcttcctctgaaggagaggcttcctctgaaaaagaggcttcctcaggatgcacattcatttcatgacaagagccaagtccatcaggcacttcagcaccttgtccaaaatgtctgctgatagcaccatcctgtgtgcgatgctgccaagctcctgggctttggggcagccccaggaggagggcgtcatttcttgttctgagaagtggtggtcaggcccaggtgacaccaggagtccaggccctgactcctttgtgtatcagcttgaccccttgagaccacccccttccttggaggtttatgccagcggtgagctcacatcctacctcctatatcctggtgggtcacaaatactaattttaaaag

SEQ ID NO: 585234 - DNA, 613 bp, Homo sapiens
aggaggtccccggggcagctgttcacttaccctgcagggagtgcctctcactggccagcagctgcaccagtgcccagaatgcatcctcctcaggaagataaaggaggaacaaggcggcgatgtggctcaggtccctgcagtagcccacctcctgcaagagccagagtcaccatggaaggacatcasctgggagggctgaggtcacctgggaggactcatgtcattggagagggcagaggtgactggagaggcttcctctgaaggagaggcttcctctgaaaaagaggcttcctcaggatgcacattcatttcatgacaagagccaagtccatcaggcacttcagcaccttgtccaaaatgtctgctgatagcaccatcctgtgtgcgatgctgccaagctcctgggctttggggcagccccaggaggagggcgtcatttcttgttctgagaagtggtggtcaggcccaggtgacaccaggagtccaggccctgactcctttgtgtatcagcttgaccccttgagaccacccccttccttggaggtttatgccagcggtgagctcacatcctacctcctatatcctggtgggtcacaaatactaattttaaaag

SEQ ID NO: 585235 - DNA, 613 bp, Homo sapiens
aggaggtccccggggcagctgttcacttaccctgcagggagtgcctctcactggccagcagctgcaccagtgcccagaatgcatcctcctcaggaagataaaggaggaacaaggcggcgatgtggctcaggtccctgcagtagcccacctcctgcaagagccagagtcaccatggaaggacatcagctgggagggctgaggtcacctgggaggactcatgtcattggagagggcagaggtgactggagaggcttcctctgaaggagaggcttcctctgaaaaagaggcttcctcaggatgcacattcatttcatgacaagagccaagtccatcaggcacttcagcaccttgtccaaaatgtctgctgatagcaccatcctgtgtgcgatgctgccaagctcctgggctttggggcagccccaggaggagggcgtcatttcttgttctgagaagtggtggtcaggcccaggtgacaccaggagtccaggccctgactcctttgtgtmtcagcttgaccccttgagaccacccccttccttggaggtttatgccagcggtgagctcacatcctacctcctatatcctggtgggtcacaaatactaattttaaaag

SEQ ID NO: 585236 - DNA, 439 bp, Homo sapiens
tctagacatgttatctaaaacctggttcatctgtccttccacgcagggcctaggggatgccaaattccagggtccagaaagagcttgggataaaatgaaacttcaaggggasggctttgacctgggctgagtctgcctgtgccgagtctgcctgtgccatccaactggagtctcaagtcctgaggcagtacgtccagatgccccagtgcagggtcctcctgatcaacacctgctcccctgtactcattagcaacctcacccaccctactctcaaagcacacttggctctcatatccaggagctctgcatctgtggattcagcaacagcagatggaaaatattcagaaaataaattggacggttatgtttctattgaattgctcttgtcattattccctaaagaatacagtatcacgaccatttatgtagcatctgcatt

SEQ ID NO: 585237 - DNA, 440 bp, Homo sapiens
ttctagacatgttatctaaaacctggttcatctgtccttccacgcagggcctaggggatgccaaattccagggtccagaaagagcttgggataaaatgaaacttcaaggggacggctttgacctgggctgagtctgcctgtgccgagtctgcctgtgccatccaactggagtctcaagtcctgaggcagtacgtccagatgccccagtgcagggtcctcctgatcaacacctgctcccctgtactcattagcaacctcacccaccctactctcaaagcacacttggctctcatatccaggagctctgcatctgtrgattcagcaacagcagatggaaaatattcagaaaataaattggacggttatgtttctattgaattgctcttgtcattattccctaaagaatacagtatcacgaccatttatgtagcatctgcatt

SEQ ID NO: 585238 - DNA, 439 bp, Homo sapiens
tctagacatgttatctaaaacctggttcatctgtccttccacgcagggcctaggggatgccaaattccagggtccagaaagagcttgggataaaatgaaacttcaaggggacggctttgacctgggctgagtctgcctgtgccgagtctgcctgtgccatccaactggagtctcaagtcctgaggcagtacgtccagatgccccagtgcagggtcctcctgatcaacacctgctcccctgtactcattagcaacctcacccaccctactctcaaagcacacttggctctcatatccaggagctctgcatctgtggattcagcaacagcagatggaaaatattcagaaaataaattggacrgttatgtttctattgaattgctcttgtcattattccctaaagaatacagtatcacgaccatttatgtagcatctgcatt

SEQ ID NO: 585239 - DNA, 428 bp, Homo sapiens
ttctagacatgttatctaaaacctggttcatctgtccttccacgcagggcctaggggatgccaaattccagggtccagaaagagcttgggataaaatgaaacttcaaggggacggctttgacctgggctgagtctgcctgtgccgagtctgcctgtgccatccaactggagtctcaagtcctgaggcagtacgtccagatgccccagtgcagggtcctcctgatcaacacctgctcccctgtactcattagcaacctcacccaccctactctcaaagcacacttggctctcatatccaggagctctgcatctgtggattcagcaacagcagatggaaaatattcagaaaataaattggacggttatgtttctattgaattgytcttgtcattattccctaaagaatacagtatcacgaccatttatgt

SEQ ID NO: 585240 - DNA, 315 bp, Homo sapiens
agaattctcaaattttgattttgctgatattatccccagagtttcattgaccatgttcatctgttccccaaatttccaaaaactggtatttaaatttaggtggttgatctgattcagattacactctcagtatcgcatatgctttgatcaggaggcataatgtgtacttgtgtgtgtgtatgtgtgtttttttagttatgttagtggtcactgcctgtgtcagcatttcactaccagggtaatttggcaatgtctggagacacactgattgtcacaggttgggrgagggaatgctataggtaccttcaggggtaa

SEQ ID NO: 585241 - DNA, 454 bp, Homo sapiens
gaattctcaaattttgattttgctgatattatccccagagtttcattgaccatgttcatctgttccccaaatttccaaaaactggtatttaaatttaggtggttgatctgattcagattacactctcagtatcgcatatgctttgatcaggaggcataatgtgtacttgtgtgtgtgtatgtgtgtttttttagttatgttagtggtcactgcctgtgtcagcatttcactaccagggtaatttggcaatgtctggagacacactgattgtcacaggttgggggagggaatgctataggtaccttcaggggtaagagtcagcacagcacagccccctaacgcaaagtattaataggcctaaaatgtcagtagccctgaggttgagaaactctrgcctacttttatagtttcatcaggtgtttgtgaaatggttttattctaactgttacttctt

SEQ ID NO: 585242 - DNA, 454 bp, Homo sapiens
gaattctcaaattttgattttgctgatattatccccagagtttcattgaccatgttcatctgttccccaaatttccaaaaactggtatttaaatttaggtggttgatctgattcagattacactctcagtatcgcatatgctttgatcaggaggcataatgtgtacttgtgtgtgtgtatgtgtgtttttttagttatgttagtggtcactgcctgtgtcagcatttcactaccagggtaatttggcaatgtctggagacacactgattgtcacaggttgggggagggaatgctataggtaccttcaggggtaagagtcagcacagcacagccccctaacgcaaagtattaataggcctaaaatgtcagtagccctgaggttgagaaactctagcctacttttrtagtttcatcaggtgtttgtgaaatggttttattctaactgttacttctt

SEQ ID NO: 585243 - DNA, 630 bp, Homo sapiens
tgcagtgaatgctgggtgcatcttcatgttgggttctgagtccttttgacatgagcacattgtctggtgttgtacgaaagagcaaaataaggaaactggtgttctatgcttatcttgtacattttccccacacttggaatcagccattcctccagggagtgcaggttcacagtctgggctctragagaattataaggtcaatgtggtcatcatcttttagtattaagtcagatattctaaattattatttacttcttacatttggcccaagagtttaaccagatattttgggaaagagagaaggaattaaataaataaatctcatggttagaactgaagtgataactatactttcacaaggaaatataacttataacccatgcagaatagaaaattatttttgctcctttagttttctgaaggaatgaaatgagctgtgggaagaaactttaactggagcatcttgccagtattattcatgttttaactctgcttcagtagtttttcaggtttattacaaacctgcagtagccaactgaactaattatctctaaacagggatttagccagtggactaggcacactgaagctttgtgagaggggaaattgatattcacattttttccagct

SEQ ID NO: 585244 - DNA, 630 bp, Homo sapiens
tgcagtgaatgctgggtgcatcttcatgttgggttctgagtccttttgacatgagcacattgtctggtgttgtacgaaagagcaaaataaggaaactggtgttctatgcttatcttgtacattttccccacacttggaatcagccattcctccagggagtgcaggttcacagtctgggctctgagagaattataaggtcaatgtggtcatcatcttttagtattaagtcagatattctaaattattatttacttcttacatttggcccaagagtttaaccagatattttgggaaagagagaaggaattaaataaataaatctcatggttagaactgaagtgataactatactttcacaaggaaatataacttataacccatgcrgaatagaaaattatttttgctcctttagttttctgaaggaatgaaatgagctgtgggaagaaactttaactggagcatcttgccagtattattcatgttttaactctgcttcagtagtttttcaggtttattacaaacctgcagtagccaactgaactaattatctctaaacagggatttagccagtggactaggcacactgaagctttgtgagaggggaaattgatattcacattttttccagct

SEQ ID NO: 585245 - DNA, 638 bp, Homo sapiens
gtgcttattttttcccttcgttgaatgctgggtgcagtgaatgctgggtgcatcttcatgttgggttctgagtccttttgacatgagcacattgtctggtgttgtacgaaagagcaaaataaggaaactggtgttctatgcttatcttgtacattttccccacacttggaatcagccattcctccagggagtgcaggttcacagtctgggctctgagagaattataaggtcaatgtggtcatcatcttttagtattaagtcagatattctaaattattatttacttcttacatttggcccaagagtttaaccagatattttgggaaagagagaaggaattaaataaataaatctcatggttagaactgaagtgataactatactttcacaaggaaatataacttataacccatgcagaatagaaaattatttttgctcctttagwtttctgaaggaatgaaatgagctgtgggaagaaactttaactggagcatcttgccagtattattcatgttttaactctgcttcagtagtttttcaggtttattacaaacctgcagtagccaactgaactaattatctctaaacagggatttagccagtggactaggcacactgaagctttgtgagaggggaaa

SEQ ID NO: 585246 - DNA, 630 bp, Homo sapiens
tgcagtgaatgctgggtgcatcttcatgttgggttctgagtccttttgacatgagcacattgtctggtgttgtacgaaagagcaaaataaggaaactggtgttctatgcttatcttgtacattttccccacacttggaatcagccattcctccagggagtgcaggttcacagtctgggctctgagagaattataaggtcaatgtggtcatcatcttttagtattaagtcagatattctaaattattatttacttcttacatttggcccaagagtttaaccagatattttgggaaagagagaaggaattaaataaataaatctcatggttagaactgaagtgataactatactttcacaaggaaatataacttataacccatgcagaatagaaaattatttttgctcctttagttttctgaaggaatgaaatgagctgtgggaagaaactttaactggagcatcttrccagtattattcatgttttaactctgcttcagtagtttttcaggtttattacaaacctgcagtagccaactgaactaattatctctaaacagggatttagccagtggactaggcacactgaagctttgtgagaggggaaattgatattcacattttttccagct

SEQ ID NO: 585247 - DNA, 577 bp, Homo sapiens
acatcatggtagctgtgggtcaaagggcatgcacgctctgggatgtacattgccagattgctcatgatcagcctttctcatgtcaaaatgttttgtgaccaccagaaggctggttctgcttttattatccattgactgaggaatagaaatgacatggcatgtatgcaggatatttaaccatcgtatagataatccttgtgcacaagtgcattctatattctttcccaatargtccacatctgccagagttgaaataaaataaaacaaaacaaacctatttagcaccttctctgtagcaggtccattcatgtatgttgttgtatttcattctcagaattcttatgacctaggcattttaaaaatttttaaaaaaatatttagttgacaaggattgtgtatatttaatgcatacaatgtgatgatttcatatatgtatatattgtgtactaattatcacaatcaaatttattacatccattaccacctatgctgtacacgaaatctccagaatttgttcatcttataactgaaagtttataccctttgattaatagcttcccattttccccaaccccag

SEQ ID NO: 585248 - DNA, 577 bp, Homo sapiens
acatcatggtagctgtgggtcaaagggcatgcacgctctgggatgtacattgccagattgctcatgatcagcctttctcatgtcaaaatgttttgtgaccaccagaaggctggttctgcttttattatccattgactgaggaatagaaatgacatggcatgtatgcaggatatttaaccatcgtatagataatccttgtgcacaagtgcattctatattctttcccaataagtcyacatctgccagagttgaaataaaataaaacaaaacaaacctatttagcaccttctctgtagcaggtccattcatgtatgttgttgtatttcattctcagaattcttatgacctaggcattttaaaaatttttaaaaaaatatttagttgacaaggattgtgtatatttaatgcatacaatgtgatgatttcatatatgtatatattgtgtactaattatcacaatcaaatttattacatccattaccacctatgctgtacacgaaatctccagaatttgttcatcttataactgaaagtttataccctttgattaatagcttcccattttccccaaccccag

SEQ ID NO: 585249 - DNA, 601 bp, Homo sapiens
ttccatgcctctcccctggcttctggtggtttgctggtcatctttggcatactttggcttgtaggtgcatcacctggatctctgccttcatgttcacatggtgttctacctgtgtgcatatctgtggacaaatttcccctttttataaggataccaggcatattggattagggttcctctctactccagtaggacctcatcttcactaattacatctgcaataaccctttccaaataaggtcacattctgaggaactagaggttagagtttcaacatacgaaattttctggggggtgggtaagggacacgattcaatccataacaatatgtttatgagtaaatgagttagtgtgytattgtctttctgccacctcagaatctgagaaaacacagtttctttttccattccttgggctgtaggtggagaaggaggaggatggtgatgatgattattttttggtcatggagcataatgtgacccactttaaaaaacaacaaacaattgtaaggaggagaactgtcatacacctactgcccagcttaaaaataattagatcatcttctttaaacataactgtcatcccatcatcacacctaaaa

SEQ ID NO: 585250 - DNA, 601 bp, Homo sapiens
ttccatgcctctcccctggcttctggtggtttgctggtcatctttggcatactttggcttgtaggtgcatcacctggatctctgccttcatgttcacatggtgttctacctgtgtgcatatctgtggacaaatttcccctttttataaggataccaggcatattggattagggttcctctctactccagtaggacctcatcttcactaattacatctgcaataaccctttccaaataaggtcacattctgaggaactagaggttagagtttcaacatacgaaattttctggggggtgggtaagggacacgattcaatccataacaatatgtttatgagtaaatgagttagtgtgctattgtctttctgccacctcagaatctgagaaaacacagtttctttttccattccttgggctgtaggtggagaaggaggaggatgrtgatgatgattattttttggtcatggagcataatgtgacccactttaaaaaacaacaaacaattgtaaggaggagaactgtcatacacctactgcccagcttaaaaataattagatcatcttctttaaacataactgtcatcccatcatcacacctaaaa

SEQ ID NO: 585251 - DNA, 601 bp, Homo sapiens
ttccatgcctctcccctggcttctggtggtttgctggtcatctttggcatactttggcttgtaggtgcatcacctggatctctgccttcatgttcacatggtgttctacctgtgtgcatatctgtggacaaatttcccctttttataaggataccaggcatattggattagggttcctctctactccagtaggacctcatcttcactaattacatctgcaataaccctttccaaataaggtcacattctgaggaactagaggttagagtttcaacatacgaaattttctggggggtgggtaagggacacgattcaatccataacaatatgtttatgagtaaatgagttagtgtgctattgtctttctgccacctcagaatctgagaaaacacagtttctttttccattccttgggctgtaggtggagaaggaggaggatggtgatgrtgattattttttggtcatggagcataatgtgacccactttaaaaaacaacaaacaattgtaaggaggagaactgtcatacacctactgcccagcttaaaaataattagatcatcttctttaaacataactgtcatcccatcatcacacctaaaa

SEQ ID NO: 585252 - DNA, 475 bp, Homo sapiens
gaacctgaacctcccgccttgacctctcaaattgctgggattacaggtgtgagccaccacaccyggcctaaatttcttatgtgccatgggactgcaaaacatcattattaggggcagctggatggaaggtataggacactatagtgccttttcaatatttctgtctaaaatctaaaatcatttcaacaggaaacatttatttcaaaacgtgaaggtggttatccttccatgagtttaaagtacaaaggcaggctcacggtgtcgtcagaattcagaacgatggtcgtggggctgggggtgttgggaggggctgggcatggttggctttgtgatctggggtctggtgtgctccatctctgaatgtctctcgagctgcactctttcttaatacattctcataagtttaacaaaaaataaaacgaggaggcgaagcttgcttgggttgttaagcctagggaaattatccagccatgag

SEQ ID NO: 585253 - DNA, 524 bp, Homo sapiens
gagacaaaaatcaactagttttagtttccatacatagcaataaataattggaaaattaagctgaaaaatagtttgcttataattgaaacaaatattctggaatacctggacataaaactagaagaaaagtgcaacactataacaaaaaaacctgaaacattattaaggacctttttttaaaagcctaaatcaatgtatagattatgcaaaaatactctaatttttaaggacattaattttcctaaacaaatrtatgaagtcagataatcacagcaagattttcatgaaacttgacaaaccaactttaaagttcatttgaaagataaaataaaaataaacaagaaaagatttaaataaataagagggaatgccctaccagatatcaacatggtgtatgaattcatggtaattagcataccatatattagcataataatagattaatcaacagactagatagtacgaaaaagactcgtactaatattggaatttagaatattaaataattagtatacagttaagag

SEQ ID NO: 585254 - DNA, 524 bp, Homo sapiens
gagacaaaaatcaactagttttagtttccatacatagcaataaataattggaaaattaagctgaaaaatagtttgcttataattgaaacaaatattctggaatacctggacataaaactagaagaaaagtgcaacactataacaaaaaaacctgaaacattattaaggacctttttttaaaagcctaaatcaatgtatagattatgcaaaaatactctaatttttaaggacattaattttcctaaacaaatgtatraagtcagataatcacagcaagattttcatgaaacttgacaaaccaactttaaagttcatttgaaagataaaataaaaataaacaagaaaagatttaaataaataagagggaatgccctaccagatatcaacatggtgtatgaattcatggtaattagcataccatatattagcataataatagattaatcaacagactagatagtacgaaaaagactcgtactaatattggaatttagaatattaaataattagtatacagttaagag

SEQ ID NO: 585255 - DNA, 524 bp, Homo sapiens
gagacaaaaatcaactagttttagtttccatacatagcaataaataattggaaaattaagctgaaaaatagtttgcttataattgaaacaaatattctggaatacctggacataaaactagaagaaaagtgcaacactataacaaaaaaacctgaaacattattaaggacctttttttaaaagcctaaatcaatgtatagattatgcaaaaatactctaatttttaaggacattaattttcctaaacaaatgtatgaagtcagataatcacagcaagattttcatgaaacttgacaaaccaactttaaagttcatttgaaagataaaataaaaataaacaagaaaagatttaaataaataagagggaatgccctaccagatatcaacatggtgtatgaattcatggtaattagcataccatatattagcataataatagattaatcaacagactagatagtacgaaaaagactcrtactaatattggaatttagaatattaaataattagtatacagttaagag

SEQ ID NO: 585256 - DNA, 528 bp, Homo sapiens
gtggtgttgagcctgtgggtgcacagaagtcaacaattgtggtttgggaacctctgtctaggtttccagggatgtatggaaatgcctggatgtccaggaagaagttttccacaggggtgaagccgtcatggagaacctctgctagggtagtgtggaaggaaaatgtggggtcagagcacccatacagagtccccactggggcactacctagtgaagctgtgaaaagagggtcactgtcctccagastccagaatgatagattcactgacagcttgctccgtgcacctggaaaagctgcagacactcatcaccagtccgtgggggtagtacactggaaaagctgcagacactcatcaccagtccatgggggcagtacactgcaaagccacaggggtggagcttcccaaggtcatgagagcccacctcttgcttcagtgtgacctggatatgagacagcgagtcaaaggagatcattttggaactttaaggtttaatgactaccccattgggttttggacttttatgggg

SEQ ID NO: 585257 - DNA, 528 bp, Homo sapiens
gtggtgttgagcctgtgggtgcacagaagtcaacaattgtggtttgggaacctctgtctaggtttccagggatgtatggaaatgcctggatgtccaggaagaagttttccacaggggtgaagccgtcatggagaacctctgctagggtagtgtggaaggaaaatgtggggtcagagcacccatacagagtccccactggggcactacctagtgaagctgtgaaaagagggtcactgtcctccagactccagaatgatagattcactgacagcttgctccgtgcacctggaaaagctgcagacactcatcaccagtcygtgggggtagtacactggaaaagctgcagacactcatcaccagtccatgggggcagtacactgcaaagccacaggggtggagcttcccaaggtcatgagagcccacctcttgcttcagtgtgacctggatatgagacagcgagtcaaaggagatcattttggaactttaaggtttaatgactaccccattgggttttggacttttatgggg

SEQ ID NO: 585258 - DNA, 528 bp, Homo sapiens
gtggtgttgagcctgtgggtgcacagaagtcaacaattgtggtttgggaacctctgtctaggtttccagggatgtatggaaatgcctggatgtccaggaagaagttttccacaggggtgaagccgtcatggagaacctctgctagggtagtgtggaaggaaaatgtggggtcagagcacccatacagagtccccactggggcactacctagtgaagctgtgaaaagagggtcactgtcctccagactccagaatgatagattcactgacagcttgctccgtgcacctggaaaagctgcagacactcatcaccagtccgtgggggtagtacactggaaaagctgcagacactcatcaccagtccatgggggcagtacactgcaaagccacaggggtggagcttcccaaggtcatgagagcccacctcttgcttcagtgtgacctggatatgagayagcgagtcaaaggagatcattttggaactttaaggtttaatgactaccccattgggttttggacttttatgggg

SEQ ID NO: 585259 - DNA, 557 bp, Homo sapiens
cacattattgagttttcaaataaattgaaaaaaattttagtcaggcatcagcattatcttaatttataaacattaacacaagaaaatattggatttgttttaaataattactccacactgcattaccagtattatctctttctgctgtttagatgtgwaccagaatacattcccaatctataacaatgaacaaccatgcaaaatttctctgatattgaatagagtgttctagtcgaggtgtttctggaatttagtgacagagcatttcaccagatttatattgtatttcagtttctcagttgatgaagccctctaacctgtttgtcttttcgatcctgcaatatggaggactgatggcttcagggactttgccctctaacctgtttgtcttttcgatcctgcaatatggaggactgatggcttcagggacttttgccctctaacctttaaatctgttttcttgtcattgtaacatgattgtcccattttccataaacacatttaatttttcttcctccacatatatgcacacagacacacacacacacacacacaca

SEQ ID NO: 585260 - DNA, 590 bp, Homo sapiens
catgggaggaagaaatattatgatagagaaggcaagaagaatctgaacagacaggacttgctaggtttccccactgtctattggcattagatcttaccttcttttgtccagtcatatttctacatggctttccatgcttcattgaatttaagcataaaaatgaatagttcacccctgggtcttagggtcttcattctgaaggctcycatgtcacataaaactatgatcgaataaatctgttatgcttttctcttgttaacctatctttgttatagggatattagacatgacctttatgaagatgaggagaggaataaatctttttctccccctacaaggtcattgttcaaaattacagggcaccttggggaacaatctcctgggattgtcactagacaaaaccagcaggagcagttaagtgccaaaaaggtcacagacacaactataaaataagtgtatttacttaagtaaacaaacacctatttaaataaatgtgtagtagtcattaatctgacatgtaaatataagaattaaaaacacaatacatgacaagtctatctgaaaaacatcaggtaagttttaaaatagat

SEQ ID NO: 585261 - DNA, 639 bp, Homo sapiens
tgcctcttaacagaacgccccatgatcatagatcatgtgtaaactaaacaggggacattttttaatatccattgttaggtcaagtggtaatgcaagacatgccaaattaaaacttggtcctgagagcttccagaaatctgcaagtttatacattcatcaactgaaaatcaaatccctatctcctgccccatacagagttccactcagaaatattttttcttttcttttctttctttcctttcttttttttttttttttttttctttttgaggccagggataaaaattggagacagtcagtgtgtagtccagtaacatagcagtacatttcagccagtggcagagactgccaggcacgttctgataggtacgtkgtgataaacgaaatggaatatgaaagaggggcagggactaacttatagattttaaatcttggagccaggtattactgaaagaatttggtaaaaatcaagttcaagaacaaaaccatccaaaagcaaaaccaattcaaaccgctaagatgtggaaagctgttgagggctagtgaaaggcagatccataaggttcttaaatatggatgcaaataatatttgaaggagaatctgagactgcacccatactctggaaacaaccagtaagc

SEQ ID NO: 585262 - DNA, 539 bp, Homo sapiens
cacttgttcccaagatcttcctaccttggcctcccgaagtgctggaattacaggcataagccaccacacctggccttaatgacataatttacactaaaygttttgagagggagggagagaaaagctgaaagccagaatgctaactggaagaaatatattaaaaagttgaaaggacttatctctgtgagatgggatttttctccttttcatgtttctgtattttcctaatttcctatgacaagtatgtgttacttttataattaaattaaaaaactgtaaggtgaaaaatgtaagattgttataagtatgctggcacccagtgatggtaatatttatcttcaaatataccttaagctaaaatgtatctttctaatgaaattttagtttttaaatgttcctttataacttttctttcaatattttatctataattagcttcctggttttaaaatttcacatttaaggaacaactttcaaatatgtgcctatgtattcagagatatttacagtgctttcgtacattatgtcatttaatccag

SEQ ID NO: 585263 - DNA, 539 bp, Homo sapiens
cacttgttcccaagatcttcctaccttggcctcccgaagtgctggaattacaggcataagccaccacacctggccttaatgacataatttacactaaacgttttgagagggagggagagaaaagctgaaagccagaatgctaactggaagaaatatattaaaaagttgaaaggacttatctctgtgagatgggatttttctccttttcatgtttctgtattttcctaatttcctatgacaagtatgtgttacttttataattaaattaaaaaactgtaaggtgaaaaatgtaagattgttataagtatgctggcacccagtgatggtaatatttatcttcaaatataccttaagctaaaatgtatctttctaatgaaattttagtttttaaatgttcctttataacttttctttcaatattttatctataattagcttcctggttttaaaatttcacatttaaggaacaactttcaaatatgtgcctatgtattcagagatatttacagtgctttygtacattatgtcatttaatccag

SEQ ID NO: 585264 - DNA, 585 bp, Homo sapiens
cctgggcaacatagtgagaccctgtttctaccaaaaaaaaaaaaaagtttaaaaattagccaggtgtggtggcacgcctgtagtttcagctacttgtgagactgaggaaggaggatggcttgagcccaggaggtggaagctgcagtgagctatgaccacaccattgcaccccagtctgtgcaacagaacaagaccctgtcttgaaaagggaagaagatatttcccttaaatttcatgcatttctcatatttcctgatagaataatacaggatcagcttcawaaagttgtttctgttaggaatttcttcctccttgataaaccattgtattttataatgtgtccttcctactctaaaagcagcaaagattattccattgttacaaacttgtctttccatctgctctccttaacaagggttaatcttagtgtcacttttcaatgccttaactctgaattccatttagcttacagaaagttttaggaaaaaatctgtttggtggtgtttaaaatacatgtgctctaatttttccaagtgccacacttttattcgggaagaaattacttgttggctaagtgatttctta

SEQ ID NO: 585265 - DNA, 373 bp, Homo sapiens
ctagctacaaatagcaaaatagcaacttgcctcctcccattcttttattcatctttttaccaactacttttttttccaagacacttaacacctgacacacacatttgtttatatccccacatrtaagtatagtatattatatccccaaatagaagcgctccataagcagtttgttttgttcagtgaggtattcccaacacctagaagagtgcctatcacaggaggtgcctatcacagtaggtgctccttagacacttaagaattgtggactggcagagataaggagctaactttatcatcaagcaaacagactctttatagtataataaagcaataaaggcatgaaggcttaattcacttccctgaagacata

SEQ ID NO: 585266 - DNA, 646 bp, Homo sapiens
agagggcagagatgagtgtgctacaacatgctggtagagggcacctcaattttgcttggggctttcctatgtttcatagaaaaatgtgttttccttaatttttcccataagaaccaccctacttcatgccctgtctctctgtccaaacaccaggacagtcctctcaccagtctcaaccacccaatggattgacaaatgtccaaatatgattcagtggagaaggcattctcttgtcaacaaattgtgtagaaacaactggacatgcatattcccaaaggaaaaaaattcacctgaacctcaatactgactcaaaaactaactcaaaaaggattatgcaactaaatataaactataaaactagaaaaagtatagcagaaaatgtaagacaaaatcttcatgacacagagttaggcaaggtgttctttgttttcaataaacacaaaccattaaagaaaacattgataacttcaactttataaaaattaaaagtttttgctcaacacaagacagtaataagagaayaaatataagctgcagattgggagaaaaacagtggaaatcacaaatatgacaaacggcatgtgtgatagttacttgtacttgtcactgtgaccgagcaccatggtactgggacatttggccaaac

SEQ ID NO: 585267 - DNA, 587 bp, Homo sapiens
cagggtacagtctcccacccagttgccttcatggctggcattgagtatctgtggcttttccaggtgcacagtgcaagctgtcagtgcatctaccattctggggtctggaggatggtggccattatctcacagctctactaagcagtcctccagcaggaactctgtgtgtgggctcccacctcacttttcccttctgcactgctctagcagaggttctccatgagggctccacccctgcagcaaacactgcatgggtatccaggtatttccatacatcttttgaaatctaggcagaggttcccaaacctcaacttttgacttctgtgcacttgcaggctcaacaccatatgaaagctaccaaggcttgagggtkacaccctctgaagcaacagtccaagctctatgttggcccctttgaaccacagctggagtggctgggatgcagggcaccaagtccctaggctgcacacagcaggggatcctggacccagctcatggaatcacttttttctcctaggcctctgggcctgtgatgggaggggctgccatgcaaacctctgacatgccctggaaacattttcctcatt

SEQ ID NO: 585268 - DNA, 535 bp, Homo sapiens
agtttcaatcccttagcttgcagctatgactcattttggcttagaggaaagtccccttggtgaagtccctactgacccaggaagtccagccaacttagccacttagtacctcagtaggttggttggataatggagatttttgcccacatatggaggtagtttgaagactcactggaagaattaggtatttataaataccttcccaatgatatgttgcaattttggagtatccatttgtcttartcggctatggctgctgtaacaaaatttcatagactgagtggcttaaacagcagacatttatttctcacagttctggaattatgggaagtctgaaatttgggtaagagcacggttgggcctgatgaaggccctctttctggcttgtagatgactgctttcttgctgtatcctcacatggcagagtcagggggaccggggaggcagggagaactctcttgtgtctcttcttataagggcactgaacacattcatgaaggctgcacactgatgacctcatctaaaccccatcaca

SEQ ID NO: 585269 - DNA, 601 bp, Homo sapiens
tgataggaaggtgacatttgagcaaaggcttcgaggagtgaaggatacgttctgggatatctagcctgtggcaagaacatgcccggcatgattgtagtcctaggaagatagaaattctgtaggagtagaatagtaggacatgagatcagacaggtaactgggtccagatcttataaggcattgaagaactgtctgtaagggctctgggtttctttcatgctagaagagatagggggttattggagagttttgatcagaggaatgatgtagactgacttgttaacattgctctgattgttgtgtggacccttgtggggtaagaatgaaaacagtgaggaacctgttgcaataattcaggtaggagatggcagtggcttggaccataaatgcagatttgctatttatggaaagtggtcgcatatattttaaaagtagagctaccaggatgtttgaaatgccaccatcagygtaaatatgtactttctaaacatttggtgattatgtatatatattttttctttattattttctttctatatgtatttttttaaatatgatttaaaaaactacatgatgttgtaaaacttatcagctaaccaaa

SEQ ID NO: 585270 - DNA, 565 bp, Homo sapiens
tgggtttctttcatgctagaagagatagggggttattggagagttttgatcagaggaatgatgtagactgacttgttaacattgctctgattgttgtgtggacccttgtggggtaagaatgaaaacagtgaggaacctgttgcaataattcaggtaggagatggcagtggcttggaccataaatgcagatttgctatttatggaaagtggtcgcatatattttaaaagtagagctaccaggatgtttgaaatgccaccatcagtgtaaatatgtactttctaaacatttggtgattatgtatatatattttttctttattattttctttctatatgtatttttttaaatatgatttwaaaaactacatgatgttgtaaaacttatcagctaaccaaaactacataaaacaatattgcaattttcatactccttgagcaaaatattcacacctttgatattataatattttatttaaaaggatattcctaggagaggagaaccagagcccctgagaagcctacactagttatggcagaggttctccagttccttaatgccgttatg

SEQ ID NO: 585271 - DNA, 357 bp, Homo sapiens
tgagatattataatgaatagctcccttttggtaccaaaacccaattcagcactcttggttaccagaactcaataaaaattaactttagaagcacaagtaatagaaaaaagtggagtggggacaagaacagctccaagaattagaactggggactttactgggataaagtctctctcttcccatctttcctgtctgcttctttctacttattggtttcatatactcttatattaagtcaagctttttccaggattcagcaaacaaagagagaacagagccatgggcatartttcagtttagtgagtgaaaatcagtttccctgttagatagtttaagaaccttcctatagaggaattc

SEQ ID NO: 585272 - DNA, 553 bp, Homo sapiens
ttaacttattccagcattaacacaawtgtccaagtccaatcatcgcatctaagacaaggcaagtcccttccacctatgagcctgtaaagtcaaaagcaaatcaattacttcctagatataatggggatacaggcattgggtaaatgtacctgttgcaaagaggagaaattggccaaaacaaaggggctacaggacctatacaagtctgaaatccaatagggcagttattaaaccttaaagttccaaatgatctcctttgacttcatgtcttgcatccaggtcaagctgatgcaagatgtgggctcccacagccttgcacagctctgaccctgtggctttgcagggtacagcccctactcccagctgttttcacaggctggcattgagtatctgtggcttttccaggtgcacagtgcaagcttttggttgatttatcattctgtggtctggaggatggtggccctcttctcacagctctaccaggcagtgccccattgggtactctgtgtgggggtgccagccctacaattcccttttgcattgccctagcagg

SEQ ID NO: 585273 - DNA, 553 bp, Homo sapiens
ttaacttattccagcattaacacaattgtccaagtccaatcatcgcatctaagacaaggcaagtcccttccacctatgagcctgtaaagtcaaaagcaaatcaattacttcctagatataatggggatacaggcattgggtaaatgtacctgttgcaaagaggagaaattggccaaaacaaaggggctacaggmcctatacaagtctgaaatccaatagggcagttattaaaccttaaagttccaaatgatctcctttgacttcatgtcttgcatccaggtcaagctgatgcaagatgtgggctcccacagccttgcacagctctgaccctgtggctttgcagggtacagcccctactcccagctgttttcacaggctggcattgagtatctgtggcttttccaggtgcacagtgcaagcttttggttgatttatcattctgtggtctggaggatggtggccctcttctcacagctctaccaggcagtgccccattgggtactctgtgtgggggtgccagccctacaattcccttttgcattgccctagcagg

SEQ ID NO: 585274 - DNA, 553 bp, Homo sapiens
ttaacttattccagcattaacacaattgtccaagtccaatcatcgcatctaagacaaggcaagtcccttccacctatgagcctgtaaagtcaaaagcaaatcaattacttcctagatataatggggatacaggcattgggtaaatgtacctgttgcaaagaggagaaattggccaaaacaaaggggctacaggacctatacaagtctgaaatccaatarggcagttattaaaccttaaagttccaaatgatctcctttgacttcatgtcttgcatccaggtcaagctgatgcaagatgtgggctcccacagccttgcacagctctgaccctgtggctttgcagggtacagcccctactcccagctgttttcacaggctggcattgagtatctgtggcttttccaggtgcacagtgcaagcttttggttgatttatcattctgtggtctggaggatggtggccctcttctcacagctctaccaggcagtgccccattgggtactctgtgtgggggtgccagccctacaattcccttttgcattgccctagcagg

SEQ ID NO: 585275 - DNA, 553 bp, Homo sapiens
ttaacttattccagcattaacacaattgtccaagtccaatcatcgcatctaagacaaggcaagtcccttccacctatgagcctgtaaagtcaaaagcaaatcaattacttcctagatataatggggatacaggcattgggtaaatgtacctgttgcaaagaggagaaattggccaaaacaaaggggctacaggacctatacaagtctgaaatccaatagggcagttattaaaccttaaagytccaaatgatctcctttgacttcatgtcttgcatccaggtcaagctgatgcaagatgtgggctcccacagccttgcacagctctgaccctgtggctttgcagggtacagcccctactcccagctgttttcacaggctggcattgagtatctgtggcttttccaggtgcacagtgcaagcttttggttgatttatcattctgtggtctggaggatggtggccctcttctcacagctctaccaggcagtgccccattgggtactctgtgtgggggtgccagccctacaattcccttttgcattgccctagcagg

SEQ ID NO: 585276 - DNA, 469 bp, Homo sapiens
taaaaaataaggtatgttagtgtgggcactgtaacactggtctgctcagtccagtctgcattccaccttgccttctgtaaatgatgaacacaccaagggtattaacacaatagacatgtccaggaatgccaaagacctaaagttcattagatgcgtgtacatattacagacaaagcttgaaaccccaattgagtttaaagaaattgtacttaatatgtgacttgtgaaagaatgagcaayatttgatggtttctataaaacattcataaggctgagtaaacagtgaccgatatgacaaatatgttatctataataagcaagactttgaagaaaggactgcaacttcaaaatgagtttcctggtttacaacaagcattaatgtcaggaaagtcaattaagaggtgacctccagtagcaagcttttgtcattcaggtttaggcaacattctttgtcagcctcaatgtaaca

SEQ ID NO: 585277 - DNA, 469 bp, Homo sapiens
taaaaaataaggtatgttagtgtgggcactgtaacactggtctgctcagtccagtctgcattccaccttgccttctgtaaatgatgaacacaccaagggtattaacacaatagacatgtccaggaatgccaaagacctaaagttcattagatgcgtgtacatattacagacaaagcttgaaaccccaattgagtttaaagaaattgtacttaatatgtgacttgtgaaagaatgagcaacatttgatggtttctataaaacaytcataaggctgagtaaacagtgaccgatatgacaaatatgttatctataataagcaagactttgaagaaaggactgcaacttcaaaatgagtttcctggtttacaacaagcattaatgtcaggaaagtcaattaagaggtgacctccagtagcaagcttttgtcattcaggtttaggcaacattctttgtcagcctcaatgtaaca

SEQ ID NO: 585278 - DNA, 496 bp, Homo sapiens
caatatatgcaaaacaatcaatgtgatatatcatatcaatgaaatgaaggacaaaaatcacatggtcatttcaattgatgctgaagacctaattaatgaaattcaacatcccatcatgataaaaaaaaaaccataaaaaactgggtatagaaggaacatacctaaacacaataaaagccatatatgacagacccatatcttgtatcagtgaatggggaaatactgaaagccttcactttaagatctggaataagaggagaatgcccacttttaccaatgttattcaacatagtactgaagtcctagctacagtaatcagacaagaaatawagggcatccaaataggaaggaaagaagtcatattattcttctttccagatgagataatcttatgtttagaaaaacctaaagattccaccaaaaaaagttagaactctaaaaaaaattcagtaaaattgcaggatacaaaatcaacatgcaaaaatcagtagcattt

SEQ ID NO: 585279 - DNA, 583 bp, Homo sapiens
aatccagtaatgtcactgctaagtatatgccctccaaaaagaaaatctgtattgaagagatttctgcacttccatgtttattgcagcatgattcgcaatagccaagaattagaagcaacctaagtttccaacaacacataaatgaataaagaaatgtagtacatgtacacaatgtaaaatgtgtaaaatgtacacaatggagtactatttagtcataataaatgatatycttcattcaaaactgcatgggtggtagtggagttcatttggttaagtgaaataagccaggcacagaaagacaagcttcacatattcttacttatttgtgagatctaaaaattaaaataattgaactcacagagatagacagtagaatgatgtttaccagaggttatgaagggtggtgaaggttggggaatggttaatgggtacaaaaaaatagaatgaataagatctaatatttgatagaacaacagggtgactacagtcaacaatttatgatacaattaaaaataactaaaaaagtataatttgattgtctgtaacacaaagaaaggataaatgcttgaggtgatggataccc

SEQ ID NO: 585280 - DNA, 601 bp, Homo sapiens
aatgacagtgaatggagaaaataagattttctatttttaaatttccgtgagatacaatagtggatgacttgctctaaaaagatgccccacagtaaaatcttatatgattgatagttctttaattaaaaataagaagctatttcatagtcatgttagtttttctctgtcagaaatagctgakagactttggccatgctgatctttctttgtattttagttgtagctcattaattaaatttatcatatcttcctaactcacttaaatattcaaagggtcattttatcccagagaggcatgtgagagttttctcattcatcacaattttgagagaaatatactccattatttcaaattatttttatgtttttgtttttctctttggttgacaattattttaagaagggcagaataagtacataagaattgtgatgacgaatgctgtaatacaaaggcaacagagtcaatgtaagctattacacacatatttatatgtgtttaatttataacagaaatatgtatttataatattatttatatataattatacatgtatataatatataactatatacaatatataaatacatataaaattatata

SEQ ID NO: 585281 - DNA, 565 bp, Homo sapiens
ggattattatatatttaagaaatataacaacacaaaatgagacaaaattaaccttcagaaaatcttacttaaggttaaatataaataatttagttaccaaaaaaccttaatagattataattagatgggctccaaagatattcaaatgatggtaagcactatgtaatttaaaatattaaacaagtacatgtttctatgaaaaaggaagccatctaataaaaagaaagttactacaaatacatatgactagttaaattagaaaacctaaaattaccctaaaagcacatattagaatctatatgaataataaataaaacagttacatacatgataacattaaggaaatgtttcataatttagaacagaaaaaaaagtaatttttttttctttttttgagacagagtttggctttgttgcccaggctgagtgccttggtaagatcttggctcactgcaacctctgcctcctgggttcaarcaattctcatgcttcaacctcctgaatagctggattacaggcacctaccaccacgcctggctgatttttcatattttagtagagacag

SEQ ID NO: 585282 - DNA, 560 bp, Homo sapiens
ttgtctcaaaaaaaaaaaaaaaaaaaaattgtgagaaagcatagatacaataaatgacaatacaaggcaacaggagaataaagaaaaagacaaatttgagcctctgaacaatagagatagaaacactgggtaaaacaaagaacaggataattttttaagtggcacacacacatacaaacacraacacatacacatatatattctcacatacacaaacaacttcctatcataggattaacctcaaaagaagaacctcaaaagctaatttttcaaaaggataggctaaatacaatctataaatttaacttcagccctagatctttgaaatgcctagaatactattattaatttataattgtactagaatataagaaggaaaaatgaccttagataatagtataaatgatcatataagagtaataggcaagatgtgattaaataaattgaactcaacacagtctagacataggcaaagctgtgctagaagcagtggacttgaccaacaatgctttacaaattaggatgaaagattctgacatctggagaggactcattaggaa

SEQ ID NO: 585283 - DNA, 430 bp, Homo sapiens
cataaatcacactacattgatcccaatctgaagtttaaaccttttctcacttgctttgtctgcacactcatgcacacacacacacacaaacacacacacataactgttatgtagcaaacaaaataacttgcactatgtctctattcagtggttgaaaaagaatacattttagggaatttttgaggaaagtcagaaaacaatgatcagactaacatcttatgaggtacctgcattcttataactttccataatttaattagcttgatttaattatttcttcaaagagttttttttaakatttctgatgtgtcacttttttggttattaaaagtttatagaagctttgtttttaggattcattttggaataaagtgttttattattaatactttcactgacaagtgcatgaaaagtttaatttcttttgata

SEQ ID NO: 585284 - DNA, 532 bp, Homo sapiens
  misc_feature 495, 496, 497, 498, 499, 500, 501, 502, 503, 504, 505, 506,507, 508, 509, 510, 511, 512, 513, 514, 515, 516, 517, 518,519, 520, 521, 522, 523, 524, 525, 526, 527, 528, 529, 530,531, 532: n = A,T,C or G
cgagatcacgccactgcactccagcctgggcaaaaagagcacaaaaaaaaaaaaaaaaaaaaaaaaagagccagctctgccctcatgatctaatcacccccaaaaggcctcccttctcagtgctatcaaattgtggtttcagttccaacacatgaattttggggcacatattcagaccagagcacctacaaaatttaggttcagatttgaataagacaaatcttaaatctcgtcctatataaaagtgggcctaagacaaactaacatcaaatttgaaaataaaagtatgagcaatgrtatattaaatatgaacaacattatattgtaaaactgcagattaaaaaaaggaggagtagcaattttcctatcaaggtggatgtaaaacataaagcttaagacaaagaagacttataacattgatatttgtgcagcatatttcaaaacaaatgaaaccactaaatttgcttctaagacagaataaggaagatctctatnnnnnnnnnnnnnnnnnnnnnnnnnnnnnnnnnnnnnn

SEQ ID NO: 585285 - DNA, 532 bp, Homo sapiens
  misc_feature 495, 496, 497, 498, 499, 500, 501, 502, 503, 504, 505, 506,507, 508, 509, 510, 511, 512, 513, 514, 515, 516, 517, 518,519, 520, 521, 522, 523, 524, 525, 526, 527, 528, 529, 530,531, 532: n = A,T,C or G
cgagatcacgccactgcactccagcctgggcaaaaagagcacaaaaaaaaaaaaaaaaaaaaaaaaagagccagctctgccctcatgatctaatcacccccaaaaggcctcccttctcagtgctatcaaattgtggtttcagttccaacacatgaattttggggcacatattcagaccagagcacctacaaaatttaggttcagatttgaataagacaaatcttaaatctcgtcctatataaaagtgggcctaagacaaactaacatcaaatttgaaaataaaagtatgagcaatggtatattaaatatgaacaacattatattgtaaaactgcagattaaaaaaaggaggagtagcaattttcctatcaaggtggatgtaaaacataaagcttaagayaaagaagacttataacattgatatttgtgcagcatatttcaaaacaaatgaaaccactaaatttgcttctaagacagaataaggaagatctctatnnnnnnnnnnnnnnnnnnnnnnnnnnnnnnnnnnnnnn

SEQ ID NO: 585286 - DNA, 532 bp, Homo sapiens
  misc_feature 495, 496, 497, 498, 499, 500, 501, 502, 503, 504, 505, 506,507, 508, 509, 510, 511, 512, 513, 514, 515, 516, 517, 518,519, 520, 521, 522, 523, 524, 525, 526, 527, 528, 529, 530,531, 532: n = A,T,C or G
cgagatcacgccactgcactccagcctgggcaaaaagagcacaaaaaaaaaaaaaaaaaaaaaaaaagagccagctctgccctcatgatctaatcacccccaaaaggcctcccttctcagtgctatcaaattgtggtttcagttccaacacatgaattttggggcacatattcagaccagagcacctacaaaatttaggttcagatttgaataagacaaatcttaaatctcgtcctatataaaagtgggcctaagacaaactaacatcaaatttgaaaataaaagtatgagcaatggtatattaaatatgaacaacattatattgtaaaactgcagattaaaaaaaggaggagtagcaattttcctatcaaggtggatgtaaaacataaagcttaagacaaagaagayttataacattgatatttgtgcagcatatttcaaaacaaatgaaaccactaaatttgcttctaagacagaataaggaagatctctatnnnnnnnnnnnnnnnnnnnnnnnnnnnnnnnnnnnnnn

SEQ ID NO: 585287 - DNA, 598 bp, Homo sapiens
cccactattatcgtgttgctgtctatctcatttcttaggtctgttagtaattgttttataaatttgggagctccagtgttaggtgcgtataagtttagtattgtgatattttcctgttggacgaagccttttaccattatataatgtccctctttgtttcttttaactgctgttgctttaaaatttgttttgtcttatataagaatagttaccccctgcttgcttttgggtaagttaccccatttgcatgaaatgctttttccacccctgtactttaagtttatgagagtccttatgtgttaggtgagcctcccaaggcagcagatagttagttcgtgagttcttacccattctacagttctgtatcttttaagtggagcatttaggcaatttacattcartgctagtattgaaatgtgaggtactgttgcattcattgtgttctttgttgcctatgtttttttttgtttgttttttgctttttaatatgtatttttgttttataggttctgtgtgatttatgttttaaagagtttctgttttgatatgtttccaagatttgtttcaagatttagagctccttttagcagtgcttgta

SEQ ID NO: 585288 - DNA, 463 bp, Homo sapiens
aaaaagactttgttaactgtaaagcattgtattaatataaatattaataattcaaatatccatgtaattttctgaaatacatgtagaatatgttgcattaaacatcaaagttattcataacaactgctagaaatgaccactgccatgcattgtggcttgcccgaatgtcttaaaatttagctcttacaattaataactatataatactccatgtgatattttctttaactagttttaaatctctagaagtattagcatgtacacttactaaaagayaattccacacgctagaatgggatgatttttagtttagaaaatacggtggccaaagatttctggttcctaaaatacattctgagaatttctttgttacccaattttaccttgccaaagccatgaatcatgttatcttgttgctaatatgttgacaaattggttgaaagatatgttgatcatttgcaaa

SEQ ID NO: 585289 - DNA, 640 bp, Homo sapiens
aagtacatgatatgacatatctggatttcaggcttggaactttgaattaaaaacatttttaattatccatctaaatttaaaagaaagataatttcaaatcagtgctttcttaccttgcttcattattttatgtcttaagtctaattacttcaatatctgataacagyatcatctactttggtcattaggattcctcaataaaaaagagattgtatgtttttttattttgttattttttattattattatactttaagttttagggtacatgtgcacaatgtgcaggttagttacatatgtatacatgtgccatactggtgtgctgcacccattaactcatcatttagcattaggtttatctcctaagagattgtatttttgacttggctattaaaataattaaaattagccatttctttgaaaaaaatagtatttttgaaatttatcctcactaatgcatgtatcaatggttccttcttaatgctagtagaattctatcacatgaatgtaccaccatttgtttatatcttttcctcttggtggacatttttctatttaatttatttctaatgtttgtcattttcttttttaatttgctcctttttttagcttcttgagaataaagtttttatcattaaat

SEQ ID NO: 585290 - DNA, 522 bp, Homo sapiens
gttttttcccattccattttattttttcctgtctttttagttacaactctttgcattactttttttagtgttcactctaactggtgaaactccccaatatggtagccactagaaaaatggggctgcttaaatttaaatttacatcaatcaaaaattaaataactgcacaaatttagtttctagttgtggattttctctctctccctctctctctctctctctctctctctctctctctctytctctctctctccctctctctctctctctctctatatatatatatacacacacacatatgcatatatacttacttatttgttatatgtaggatcataacctcctgcaatgggatatgtgatagcagacaccaattgcaaaaaaaaacaatcttaatgctcatccctgagcctagtgtcaatcctttcaaactggaagtggataaaatctatcctcaccttctccagtttccctttctgctcttcctcccctggtttcccctgtgaactcctcttctagatg

SEQ ID NO: 585291 - DNA, 596 bp, Homo sapiens
ttaatgtcttttgataaagaaaagagagagacacagagacacaaaaagagaatgtaaaaaagggaaatkgccagaaatagaatgaataaccagagaaaacaaagaaccaacgaatagcccccacctcatcccaaagtcctgattaatccaacatgaaagaaaaaagagagcaaaacataaacaatcagaacatgaaacaaaatggcaggaataaggcacaatttagacattacagtgaacaacgatgattaaatcacagaaattgtcaaatagttaacaaacaaatgagcaggaagtttgaaaataaaaacaggtaacaataaaacagcaaaatgataataaagttgcagtaatattaaaattagaaagaatattcaaggtggaaaggattgcatggcatcatgccattatgctaattataatacagtatgaggtgcttgtatctttatgcaaaaattatagagcaaaaatgttagggatacaaagagattttaaaaagccttttatgttttcatcattgttgtaacaaattatcacaaatttagtggcttacaacaccacaaatttactatctgattctccagcagtctaaaatg

SEQ ID NO: 585292 - DNA, 632 bp, Homo sapiens
atttaattatttgcagctattgtaaatgggattactgtttaaacttctttttcagattgttcactgctggcatatagaaaggctactggtttttgtacgtcgattttgtatcttgcaactttactgaattaatttatctgttctaatagggcttttttgtagagtctttaggtttttccaaatataagattatatcatctgttattaaggataatttgacttctttcttaccaacttggattctctttatttctttgtcttgtctgattgctttctctctttttttcttgaccattttagttagtggtttatcaatcttgttgatcattcaaaataccaatttttgagtccataattttttctatgtcttgtcaagtttccattttatttattttcactgttaacaytactgttatctttctactatcgttgagtttaatttactctctttgaccagattcttaagtaaaagtttgataattgatttgaaaactttcttcttttctagtgaacgtctttaaaattacaaattttcttctaggcattgctttaatttggttcatacaaattctgatattatgtattttctttaccatttcattaaaaagttctctgattcttcttgtaatttt

SEQ ID NO: 585293 - DNA, 490 bp, Homo sapiens
acataatttataagaatgatgtgtagttctgcatgtgaagagagctgaaatcagcagataaagatgtatgaggtaactaagcaggccaatgatgaatctcattagcaggatttcagctgcttggctaaggaaggtcttagtgtttttattagactgaaatgtaaattacttgccttcatgattattctttaaaactataatcacattttgtgtcaggtgagactaaaactatgcctgtgatgacaccactgaagcatctatggcatggatacccactcttctgtcagagtccacatgtcagccagtaccaaggtgacaggagatttctattaccaagatgctcagcaccttgtgaactgttaataatatcattttctttttctctctttttttttytctctctctctctctttctctctttttttttgagatggattcttgctctgtcacccaggctggagtacagtggtgtgatcttggcccactgcaa

SEQ ID NO: 585294 - DNA, 579 bp, Homo sapiens
gtgaatttttcttcagaatattttcagtttatttcacccagttccaccagaggaatcactgtctatggcagctatagctgtaacaaatgcatttcttaaataataaaatgtgcaaataaaaattacacattaatccatgggtcgaagaaagratgttgtgttagcaggcaggaaaacaacataaatctccttgcataggtccatcacagctcttgggtgactatgtgcattgttaacgagcagtgatattttgaaagaaatcattttttctgaccagtaggtctcaacagtggcttaaaatattcagtaaaccttggagcaaagagattgtgctgccatgcaggcttcattgttttatttctagcacacagacagaatagaaattatcatcattcttaagggtcctagaattttcagaatggtaaatgagtgttggtttcaatttaaagtcatagctgcattaggatcagacctaaatggttcttacagagacttcttctgctccttatgtttcttaattccaaacgtgtagaagtcccagaattcctccaatctcttttcttttacctttttccacat

SEQ ID NO: 585295 - DNA, 412 bp, Homo sapiens
aattaatgcaaaaaactgcacctaggaatatcataatcaaattctagaaaattaaagataaagaaaaattcttgaaagaagccagaggggggaaaaatcctacctcttacttatagagaagaaaggataaaaattacatctagcttcttctcagaaaccatgctaacaaaaagagagtagagtggaatatttaaagtcttgagaggaaaaaagaaaaacatcaacctagaacttttttactctgtgaaaatatcactcasaagtgaaggataaatactttctcagacaaacaataattgaagggatttgttgccagcagaccaaccttataataaaggttaaaagaagtttttcagagagaaggaaaatgatataggtcagaaagtcagatctacaaaaaaaaaggagaaga

SEQ ID NO: 585296 - DNA, 410 bp, Homo sapiens
taattaatggcattcacagcaacctggatgggattggagactattctaagtgaagtaactctggaatggaaaaccaaccatcgaatgctgtcactcacaagtgggagataaggtctgagaatgcaaaggcrtaagaatgacacaatggattttggggagtcagggggaaagggtgggagggaggtgagggataaaatactacaaattaggttcagtctatactgctcaggagatgtatggaccaaaatttcacaaatcacctctaaagacttagtcatgtaaccaaataccacctgttgttccccccaaagcctatggaaataaaaaattaaaaaaaaaaaactaaattaaattgaataactggtggtaaaacaagcttcacaagccagtgtatgtgaggaaaacagaac

SEQ ID NO: 585297 - DNA, 613 bp, Homo sapiens
ggaagaagatcatgctatatctttaggtgaaaaaagcaaactacaaggaaatatgaatacttccatctattttataaaaaatatgtagctgaatctagacagataagtgctagaaagatatagattgtgttacctttatagatgcactaggtgctatatgaagcgctctttttttaaactcatgttttgtcctcagtctctcaaatgaggcagatattattatcatcttcattttacagatgaggaaactgatgcatagcaattatttataaaacttaccttacaaatgcatagaaaaaaattctggaagcatttactctaaaagttgtaagactatgtgtgatgtttgctcttttgcctgtgtataatttctaaaaagagtttgtatcacttatgtaacaaagtgaacggggagactgtcagttcccacgttcgcggggagactgtcagttcccatgytcattttcccatgttctcatttggcgtgtgagcagtggagggcttggaatcacagaccccgccctgcttgggaatgggacaatgatccgttaagatttgcagatggttttctgctctgtgttatatgggatggtagcaatttttattcaattgg

SEQ ID NO: 585298 - DNA, 601 bp, Homo sapiens
ttttgaccaaatagccagccaattttcccaacactgtttattaaataattcacctatcttcattgatctgagatgcttccattctgatatgcacatattaggttgactgtaaacatcttagaaaagcaacattgatcttgttaatgatggagcaatgctgacacatctccatttctcctgctctaacatcttgggcatcaatagcctatttccaactgagtgttcaaaagacatccttaaggtcaacatttcccaaactaaactgatcccatttgtcttcatgaattcctgacctcagaaaacaacatcatcagcagcctaactgcccagtgatctttcaactactctgaccctgtcctcccctctcactcttaaatctcttccttctttccctattctctgcaactcctgagtttggacttttcycatgagctattatgattatattatatttgtttccaatgtaatattgaaaatctttcaaaaattgaaagaatccatgagaaaataaagcatttggcctgtttgacagtcagggctgatttgaagaatctgagtgaccagatcccacctaatctacctttcacactgatttctgaat

SEQ ID NO: 585299 - DNA, 637 bp, Homo sapiens
gctctctgggcacatcaaggcccattatgacttccctactggctttcattcctgatggtgagaaagaagcctagtggagaacgccaacttaatgtactcatttaggggagtgacagaatctctgtgtcactgtgccagattcaaatggagtccttcctccatgggaaagggtttgctggctttaaggcctctgggactagaatcttcatttttggctcaggtacaaggtgtgccttctgaaagcctccagctcatttcctgagacactttctgtgtcagcctgttttgtattgctctaaagaacacttgagaatggatagtttataaagaaaagaggtttatttggctcatggttctacaggctgtacaagcatagcattggcattggctcagcttctggttgggcctcaggaagttttcctcatggcagaaggcaaaagggggagcagatgtatcacatggcaagagagggagmaagagagagaggcaggaggtcccagactctttttcacaaccagatctcatgtgaaatagtagagtgagaactccctcattactgtgaggatggcaccaagccattcatgagggatcttctgccatgatccaaacacctcccactaggccccacctataacat

SEQ ID NO: 585300 - DNA, 533 bp, Homo sapiens
gagaagggaaccagtatctaaactcagacctgtaagatcccaccccagaacacgcatgagaaaacactttgcaaactaaggttctacacacattacctcttgttgtaatgcataattgtatagctgttgctgttcatagccagcagttcttgagtacttatgatgtttttacatatattgtctcaattaatcttaacattagccctttgaatatattactgcccacataaggtgttcttttgtttgtttgttttcccagagtaacacagctgataagttttgaaccctggcaatctggcacctgcttttctcatcactaaactatgctgtcttcccaaaggctcaaagattcatgaaaaatgtatgatgaggtgttactatttctttttttcttttcttttctttttttttttttttttttttgagatggaggcycactctgttgcccaggctggaatgcagtggtgcgatctcagcttactgcaacttcctcctcctgagttcaagcagttctcctgcctcagcctcctaag

SEQ ID NO: 585301 - DNA, 574 bp, Homo sapiens
tactgtgaatatatttgtctcctaaaacgagttaatagctttctacatttttctgtgatgtgagatacatccatttcttcaccatttggtagaactcacttgtaaagctgtttgacctagtgtcttttcttcaggggtagatatttgacttctttttcagtatattctatgattatttttctattcaggttttctactccttgtggtaattttaataacgtatgttttcccccaactcatccatttctcctattttttaaagaagttgtatatagcattctcttatctgtttttactgccttaaatatctgcaattgtatttctttcctggttcctaataagagttatgagggtttttttgttgtttatttgtttttttagagacagggtcttgctcttttgcctaggctagattgcagtggtgcaatcacagctcactgcagcctccaactcctgggctcaagagatcctcctgcttcagcctcttaggtagctggggcgacaggtacgtaccactacactcagctgatygttttagttttttgtagagatggggtcttgctatgttgtctgg

SEQ ID NO: 585302 - DNA, 523 bp, Homo sapiens
gtcttataaccattaaagaaatagtttcaaatatccccatttttaagaacccactaagtcctgatagatacagaagagttcatccaatgatttaagaaataaatwatttcaaacttaaactcttttcagagaaaaatataaaagacaatattacccaacttattttataaaactaacttaatttttataccaaaacccattaaaccaggtcacaaacataaagatttcaggccatttcacactcattaattcaaaaatataaatgtaaaacattcaccaaaatattaacaaactgaatccagcaaagcataaaaagataagatataatgaggttgagtttattccaggaatgcaaggttggtttaacattacaaaatccggtgattcaatttactatactaccccattaaagaagaaaaaacatatgatcatctcaataaatccaggaaaaatttcagtagaaccaaacaactattcatgtgaaaattccttaacctgatcaaggataactttttaaaatatg

SEQ ID NO: 585303 - DNA, 523 bp, Homo sapiens
gtcttataaccattaaagaaatagtttcaaatatccccatttttaagaacccactaagtcctgatagatacagaagagttcatccaatgatttaagaaataaattatttcaaacttaaactcttttcagagaaaaatataaaagacaatattacccaacttattttataaaactaacttaatttttataccaaaacccattaaaccaggtcacaracataaagatttcaggccatttcacactcattaattcaaaaatataaatgtaaaacattcaccaaaatattaacaaactgaatccagcaaagcataaaaagataagatataatgaggttgagtttattccaggaatgcaaggttggtttaacattacaaaatccggtgattcaatttactatactaccccattaaagaagaaaaaacatatgatcatctcaataaatccaggaaaaatttcagtagaaccaaacaactattcatgtgaaaattccttaacctgatcaaggataactttttaaaatatg

SEQ ID NO: 585304 - DNA, 533 bp, Homo sapiens
gcattgctaggtaacattgtgaaatgcattgctaggtaacggagtcaaatgcagaaaagcagcatggtggaaatgattccagatgctcccacttccttcagagacccaattaagatgaaacctcattgtccatttgctttctgtgagtcataaaagggaaaattttgaattttaaagacaattcagggcttctgatttttatcttaattgaattaaagaatggagattgaattagatttattaaaaagaaaatcaccccaatcattgaaaacacttttgagttttcagagtaataagtaagtaatatgctacatattggttactcagcatctctccaatgttgttttcctcttatctcaaatttctccttttggaattttttttttttagatatatgtgtttcctgtggaattaccatgtctcttaaaygtctctgcacatttctggtctcactatgatgtattctgggtatttttctaagatcttttttctagttgactaattctttcttcagctatatctactcttcagtg

SEQ ID NO: 585305 - DNA, 446 bp, Homo sapiens
ttattcatttatttatttaaatccttgttaatgtcttcccataaagttttacaacttttgctttgaagttttcaagtatgttttgttgatttatttttacgtactttatatttttgttgctattataaatagaaccttgaaaactaaatttttctgactgttgctggatatagaaatacagttgaccttcgtaaatgtttgctaatcctgaatcttactctcttgtttattttattttatttattttttgagaccacttcttgctctgttgcccaggctggagtgcaagtgatgtgatcrtagctcactgcagccttgaactcctgggctcaagtgatcctcttgcctcagcctcccaaatagctgggactacaggctcactccatgatccctggctaacttttttaaaaagttgtagagacgaggtcttgctatgttgcccaggc

SEQ ID NO: 585306 - DNA, 471 bp, Homo sapiens
acagagcgagatgtcatctcaagaaaaaaaagaaaarcagaatgagctagacctgtatttaagtaaatggaaagatgtccaagatatattatgtgaaaagcaagttacagagcaaaattcagagtgtcatcctagttttgttattaaaacactgaatgtatttgggatgactatatgtatctggctgcacactactctacaattaatacacatatgatcctgcagcttgcttttttctagacgttcctctaggccaatgcatttgataaatcaaggtttggcaaacttttcccataaaaggccagatagtaaatatttggggctttgaaggctatacagtctctgccaaaactactcaaccctgcctttggagggtggctgtgatgacaaagacaatatgtaatcaaaggacgtggctatgttccaatacaacttgatttacgaaaacaagcagcaggacagatttggcct

SEQ ID NO: 585307 - DNA, 623 bp, Homo sapiens
gtagcagtggccccagatccaggactgaaggactaaattccaggcgtggctctagaccttgcccacgtgccaggagggtaagcttttgagcactctgggcaatctgaaacaccagggtttggctgtagaatttctggaaaacataaaaacaaaacaagcatctgaatttatttccattacatgtcatgtaaaacaaaacaccgctgaggggaaaaaacttatctatttagattaagggagaaaacttattataaaattgcataagagtaatttttattaccraattaacataagtactgggtatttagcatgccaagcattgtaccaagtgctagatatcaaataaattctgggtatctagcattctagcacttgtatcaagtgcttcatcgtttgtagcaagccctctgagtatcactttcacatccctcaaatcttccagtgtgctcagacttccagctgccactgtctgcatctctgggcctgaaggttctcatttcatggaccctgctgtccatgggcaggggagggcagggcaaaaatgccagggaaatgataccatctggaattagttattaagcaatgactctggggatttacggtaaaaagaccccagctccctt

SEQ ID NO: 585308 - DNA, 654 bp, Homo sapiens
aaggtgggaagggaagtggacttttggatactttgtctgcccygctttccctgcttcagagggtgaggtgatttgagagttgaatctgtattagagacctcactgagttcaatgagattgtgctttagtgaaggactggctggttctccagaacttgaagttagttacattcgaagacactcatagggtgacccacttgatcctggcttgcttggggttttcttggttctagcacttaaacccctacaccctggagctctcccagtgctggacaaacccagacagccggtcaccctttaagtaactttttatgtttattaaatctcaattaacaaaagatatgtttgggtcaagttgttttaattaacactaaatatgccacattatcctgaatcagggagggtaggtaatcggtggagagattcccacccgaatttaccactacgccagtgcaaattcaaatcctttgaaaggcaaaggtaggaaagtcatttaaaatgcctactataggccaggtgtggtggctcacgcctgtaatcctagcactttgggaggttgagggcgggcagattgcctgagcttaggagttcaagaccagcctgggcaacatgacaaaaccccgtctctacaaaaaattagctgggcatggtggtg

SEQ ID NO: 585309 - DNA, 654 bp, Homo sapiens
aaggtgggaagggaagtggacttttggatactttgtctgccctgctttccctgcttcagagggtgaggtgatttgagagttgaatctgtattagagacctcactgagttcaatgagattgtgctttagtgaaggactggctggttctccagaacttgaagttagttacattygaagacactcatagggtgacccacttgatcctggcttgcttggggttttcttggttctagcacttaaacccctacaccctggagctctcccagtgctggacaaacccagacagccggtcaccctttaagtaactttttatgtttattaaatctcaattaacaaaagatatgtttgggtcaagttgttttaattaacactaaatatgccacattatcctgaatcagggagggtaggtaatcggtggagagattcccacccgaatttaccactacgccagtgcaaattcaaatcctttgaaaggcaaaggtaggaaagtcatttaaaatgcctactataggccaggtgtggtggctcacgcctgtaatcctagcactttgggaggttgagggcgggcagattgcctgagcttaggagttcaagaccagcctgggcaacatgacaaaaccccgtctctacaaaaaattagctgggcatggtggtg

SEQ ID NO: 585310 - DNA, 654 bp, Homo sapiens
aaggtgggaagggaagtggacttttggatactttgtctgccctgctttccctgcttcagagggtgaggtgatttgagagttgaatctgtattagagacctcactgagttcaatgagattgtgctttagtgaaggactggctggttctccagaacttgaagttagttacattcgaagacactcatagggtgacccacttgatcctggcttgcttggggttttcttggttctagcacttaaacccctacaccctggagctctcccagtgctggacaaacccagacagccggtcaccctttaagtmactttttatgtttattaaatctcaattaacaaaagatatgtttgggtcaagttgttttaattaacactaaatatgccacattatcctgaatcagggagggtaggtaatcggtggagagattcccacccgaatttaccactacgccagtgcaaattcaaatcctttgaaaggcaaaggtaggaaagtcatttaaaatgcctactataggccaggtgtggtggctcacgcctgtaatcctagcactttgggaggttgagggcgggcagattgcctgagcttaggagttcaagaccagcctgggcaacatgacaaaaccccgtctctacaaaaaattagctgggcatggtggtg

SEQ ID NO: 585311 - DNA, 654 bp, Homo sapiens
aaggtgggaagggaagtggacttttggatactttgtctgccctgctttccctgcttcagagggtgaggtgatttgagagttgaatctgtattagagacctcactgagttcaatgagattgtgctttagtgaaggactggctggttctccagaacttgaagttagttacattcgaagacactcatagggtgacccacttgatcctggcttgcttggggttttcttggttctagcacttaaacccctacaccctggagctctcccagtgctggacaaacccagacagccggtcaccctttaagtaactttttatgtttattaaatctcaattaacaaaagatatgtttgggtcaagttgttttaattaacactaaatatgccacattatcctgaatcagggagggtaggtaatcggtggagagattcccacccgaatttaccactacgccmgtgcaaattcaaatcctttgaaaggcaaaggtaggaaagtcatttaaaatgcctactataggccaggtgtggtggctcacgcctgtaatcctagcactttgggaggttgagggcgggcagattgcctgagcttaggagttcaagaccagcctgggcaacatgacaaaaccccgtctctacaaaaaattagctgggcatggtggtg

SEQ ID NO: 585312 - DNA, 467 bp, Homo sapiens
gagtttatatgtacacatatgtacatatatatgtacatatatattttatttttgagacaagatgtctgtctctgtcacccaggctggaatgcagtggcatgatcagagctcacygcagccttgaatgcctgggctcgagtgaccttcccacctcagcctccctaaagtagccaggactgcaggcgtgcaccaccacacaccctggagtctcgttatgttgcccaggctggtcttgaactcgtggcctcaagccatcctcctgccttggctcccaaagtactggggttacaggcgtgaaccactgtttctggcctattcttgagttttctatgacacgcatctttgaaaatagaaaaagaagaattaatatttaaaagacaaatattttatatactcacacatactcattctaaaaaatttttaaaatatagaaagctccaaggaaagaaataaaagtccatctcagg

SEQ ID NO: 585313 - DNA, 467 bp, Homo sapiens
gagtttatatgtacacatatgtacatatatatgtacatatatattttatttttgagacaagatgtctgtctctgtcacccaggctggaatgcagtggcatgatcagagctcaccgcagccttgaatgcctgggctcragtgaccttcccacctcagcctccctaaagtagccaggactgcaggcgtgcaccaccacacaccctggagtctcgttatgttgcccaggctggtcttgaactcgtggcctcaagccatcctcctgccttggctcccaaagtactggggttacaggcgtgaaccactgtttctggcctattcttgagttttctatgacacgcatctttgaaaatagaaaaagaagaattaatatttaaaagacaaatattttatatactcacacatactcattctaaaaaatttttaaaatatagaaagctccaaggaaagaaataaaagtccatctcagg

SEQ ID NO: 585314 - DNA, 590 bp, Homo sapiens
cttgctaaatagaagtataagcataactcggggaacagagtaaaatgaataattattattgactaaaaaaaaaaaatcaagaaatgtttcttggaggtatcattgagttagaccctggaggaggagaatgatttaacagatacacaagaatggaaaagagaattggattcatggaggtatgtgttgcagattgggttcttggggtcagatgctgagatgtagtctgcggtgcaggctcttttctagtgatcagcgtctgtgaaaagaagggaaaggaagcaagagggaggaagttttcaaactgctaggtccaacaaagcctcagctatccagcagggaggagtctagagtaactctgaaatgaccacatctttatttacttatttttawctcttcctttaggttcaagggtacatgcgaaggttgttatatagataaactgtgtgatacaggggtttgctgtacagattatttcatcgcccaggtaataagaatagtatccaataggtagttttttgatcctctttctcctcacaccctccattttcaagtggctctgaggctctggcagatattgtctggagacagga

SEQ ID NO: 585315 - DNA, 485 bp, Homo sapiens
ttgtggcctcttttattcctcaatatatgagcttgttcttttttctatttttttttttttgcactttaaaatgtcaccgtctacaagttattcctgataattacgcaaataacctaaaaactctgtaggcacctttaaatcaagagattttttaaaaagtattaattaactatgctttctatgtgccaggcactgtgctatgtgctagaaacacaaagacaaactaaagaaagtttctccccaacaaagtttgaagttcagtaggagaggcagataataaagagattaatgtgatcagtgaaattaatagttattgatgagrgctctggaaaaaggagagtgtgtctagtactgataggagtaagaagaatgtagaaaaaattcaaagcagaggtgacccttgcactcatacttgaagacattccaaagagagccaatagtacacatcaaagtcatgagagcctgagacactttatctttcattg

SEQ ID NO: 585316 - DNA, 507 bp, Homo sapiens
aaaaactagccagatgtggtggcgcacgcctgtaatcccagytactcgggaggctgaggtaccgaatcgtctgaacgtgggaagtggagcttgtagtgagccgagatcgccccactgcactccagcctgggcaacagagctagactgtctcaaaacaaacaaaaaatggtgtcaagactctcagacgagattctaatggattaaggcctatatgtaaatagcaccaaagactatggaacagagatgggagaagcaagcagggaggcaggaatagtttagctgtggcagttttagcttagtccacttacataaatggttctttagggtagcacgtggagcatcctcatttccaaacattggactgagagtagagagctgtgcaaaataaccacaagtccccaactatgccctcttaattatccctatcatctaagactgttgttcccatccatcactgaacttccccgtcctcttccttcaacccctgtgttagtcaatggttgaaat

SEQ ID NO: 585317 - DNA, 507 bp, Homo sapiens
aaaaactagccagatgtggtggcgcacgcctgtaatcccagctactcgggaggctgaggtaccgaatcgtctgaacgtgggaagtggagcttgtagtgagccgagatcgccccactgcactccagcctgggcaacagagctagactgtctcaaaacaaacaaaaaatggtgtcaagactctcagacgagattctaatggattaaggcctatatgtaaatagcaccaaagactatggaacagagatgggagaagcaagcagggaggcaggaatagtttagctgtggcagttttagcttagtccacttacataaatggttctttagggtagcacgtggagcatcctcatttccaaacattggactgagagtagagagctgtgcaaaataaccacaagtccccaactatgccctcttaattatccctatcatctaagactgttgttcccatccatcactgaacttccccgtcytcttccttcaacccctgtgttagtcaatggttgaaat

SEQ ID NO: 585318 - DNA, 527 bp, Homo sapiens
ttaactcctcccagacagctggcaaaacactcaggtggggcagtagaggctgtgctgtgggcaacctcctgcaggagtagccaggcaggttgtcttaggagggactggtggacaaggcagcgtgtggatcagatgtgccctgctcctgcaggaaagrcagccttgctctctcctggcccaacagtcagcaggagctacagtcactcagagcaagatagagagccttctgggataaatgcctgaagtcacgtttagttgctgctgcaccacgtgccaccttgaaaccttcagggttctatgcaggttcaatctctgcctctgtctggtctctgagaagttcctcctgccaattcaaatgtctgtgggggtaatgggatctcttgtctctaggatcccagagggttgtatttggggtgtggtgccttggagttcctttactcaccccttccttaggacctgttgagggccaggagctggtcttggtgctcggtgactccatgcaggcttcccagtttcctccctcttta

SEQ ID NO: 585319 - DNA, 527 bp, Homo sapiens
ttaactcctcccagacagctggcaaaacactcaggtggggcagtagaggctgtgctgtgggcaacctcctgcaggagtagccaggcaggttgtcttaggagggactggtggacaaggcagcgtgtggatcagatgtgccctgctcctgcaggaaagacagccttgctctctcctggccsaacagtcagcaggagctacagtcactcagagcaagatagagagccttctgggataaatgcctgaagtcacgtttagttgctgctgcaccacgtgccaccttgaaaccttcagggttctatgcaggttcaatctctgcctctgtctggtctctgagaagttcctcctgccaattcaaatgtctgtgggggtaatgggatctcttgtctctaggatcccagagggttgtatttggggtgtggtgccttggagttcctttactcaccccttccttaggacctgttgagggccaggagctggtcttggtgctcggtgactccatgcaggcttcccagtttcctccctcttta

SEQ ID NO: 585320 - DNA, 527 bp, Homo sapiens
ttaactcctcccagacagctggcaaaacactcaggtggggcagtagaggctgtgctgtgggcaacctcctgcaggagtagccaggcaggttgtcttaggagggactggtggacaaggcagcgtgtggatcagatgtgccctgctcctgcaggaaagacagccttgctctctcctggcccaacagtcagcaggagctacagtcactcagagcaagatagagagccttctgggataaatgcctgaagtcacgtttagttgctgctgcaccacgtgccaccttgaaaccttcagggttctatgcaggttcaatctctgcctctgtctggtctctragaagttcctcctgccaattcaaatgtctgtgggggtaatgggatctcttgtctctaggatcccagagggttgtatttggggtgtggtgccttggagttcctttactcaccccttccttaggacctgttgagggccaggagctggtcttggtgctcggtgactccatgcaggcttcccagtttcctccctcttta

SEQ ID NO: 585321 - DNA, 488 bp, Homo sapiens
gggtggctagactcagaagagaaataacacctactgcagtttggctctcaggatgccccatcccttggggaaggagaagagcaccacatcaaggaagcaccctgtgagataaaataatctgaacagcggcccttgagccccagatcttccccctgacatagtctacccaaatgagaaggaaccagaaaaacaattctagtaatatgacaaaacaaggttttttagtacccccaaaagatcacactaactcaccagcaatggatccaaaccaagtctttgaattgccaaaaaaaaaaaaaaaaaaaaaaaaaagaattcagaaggtcaattattaagcttctcaagaaggcaccagagaaaggtgaataccaacttacagaaatgaaaaaaagttacagaatatgaacagaaaaatctccagagaratagacagcataaataaaaaacaatcacaacttctggaaatgaagaacacacttagagaaata

SEQ ID NO: 585322 - DNA, 543 bp, Homo sapiens
gttttcagattattgtggaatgtaaagttttcttcactcaataagagaaatacttttttgttgatacattgaccacattattttcttaataattacgataactcaataattgtagagactggtttataaaaaaaattttcatatcaaaggccaaaattactttactttcatctattactctctgtcaagtgaaaacgtttatgtcccacagttaagagtatctctcaaaataccaaggccttagaagtttctttcctgatacttccatacttgataatggctatagaataaatagccattagaacacagatgtcacaaaaatgaaaatagmaagcatttagacacctaggaaataatctctttggaatataatataactactgtttcagagggggaaatagttgtgtctttctcacaggattgttttcaaatatattataatatggtccacttcaaattttgccctttcaaagcacaacaattatttaccataaaatagcttggaaaatgggaacaattttatacatactgttagtatgtata

SEQ ID NO: 585323 - DNA, 543 bp, Homo sapiens
gttttcagattattgtggaatgtaaagttttcttcactcaataagagaaatacttttttgttgatacattgaccacattattttcttaataattacgataactcaataattgtagagactggtttataaaaaaaattttcatatcaaaggccaaaattactttactttcatctattactctctgtcaagtgaaaacgtttatgtcccacagttaagagtatctctcaaaataccaaggccttagaagtttctttcctgatacttccatacttgataatggctatagaataaatagccattagaacacagatgtcacaaaaatgaaaatagcaagcatttagacacctaggaaataatctctttggaatataatataactactgtttcagagggggaaatagttgtgtctttctcacaggattgttttcaaatatattataatatggtccacttcaaattttgccctttcaaagcacaacaattatttaccataaaatagcttgraaaatgggaacaattttatacatactgttagtatgtata

SEQ ID NO: 585324 - DNA, 490 bp, Homo sapiens
tgactacaatgaaaggataagtgttctcaggctctcatactttgatgtgtactattggctcttcttggaatgtcttcaagtatgagtgcaagggtcacctctgctttgaattttttctacattcttcttactcctatcagtactagacacactctcctttttccagagccctcatcaataactattaatttcactgatcacattaatctctttattatctgcctctcctactgaacttcaaactttgttggggagaaactttctttagtttgtctttgtgtttctagcacatagcacagtgcctggcmaatagaaagcatagttaattaatactttttaaaaaatctcttgatttaaaggtgcctacagagtttttaggttatttgcgtaattatcaggaataacttgtagacggtgacattttaaagtgcaaaaaaaaaaaaaatagaaaaaagaacaagctcatatattgaggaataaaagaggccac

SEQ ID NO: 585325 - DNA, 490 bp, Homo sapiens
tgactacaatgaaaggataagtgttctcaggctctcatactttgatgtgtactattggctcttcttggaatgtcttcaagtatgagtgcaagggtcacctctgctttgaattttttctacattcttcttactcctatcagtactagacacactctcctttttccagagccctcatcaataactattaatttcactgatcacattaatctctttattatctgcctctcctactgaacttcaaactttgttggggagaaactttctttagtttgtctttgtgtttctagcacatagcacagtgcctggccmatagaaagcatagttaattaatactttttaaaaaatctcttgatttaaaggtgcctacagagtttttaggttatttgcgtaattatcaggaataacttgtagacggtgacattttaaagtgcaaaaaaaaaaaaaatagaaaaaagaacaagctcatatattgaggaataaaagaggccac

SEQ ID NO: 585326 - DNA, 594 bp, Homo sapiens
gaaaatgtgccaaaataccactgttagttcagtgtagcccatatccatagataacaatgttctctgttgaatgacaattcgctatgatttataaattttgtaagacctttcatcttgaactccaaatgagttgagaatgacagttttcagcctayttttagtatctaattaaaccaagcagattttattcagtagaatttgatgaggaaaaaacaggaagaaaatatagcacttcacaatactgttcatgcagagacatagtattattttcttaaatataataacattgttatttctaatcatctttaaatgcaaggactatatcttttttaatctttgtatctccagcgtataacacagtgccaggcacatctaagtattcaaaaattttgttgttgaataaataaaagcatggatttcagtgatttggtggcgggagataagttccatcacaacatagaacaaggaggaacaatttgtgaccaagtgcttctataactacatcctgggcccatttcaaccattttaatcatatcactctatgcattgagcctagatcgaacctcagaatccttctcaatacagcagaccagg

SEQ ID NO: 585327 - DNA, 500 bp, Homo sapiens
tcacaccatcacaagaagaagggtgagtatagtacaatatggtattttgaggaagagaggccatattcacataacttttattatgctatgttattacaattgtcctatttattagctattgttaatctcttactgtgcytaatttatgaattaaactttatcataggtgtatatagaaaaaatagagtatatataggttttggtacttgctatgatttcaggcatccacttggggtcttggaatatatccctcaaagataaatgacccttgtatattcataattcaaatacttaacatatccataaacaagcatattttagagtttgctattctgtcttcttcttcctctcttacaagtcaccatttacatctataattcttgagccaaccacaggaccaacataagaaacttttgctagtatccttgttataaataaaattaatttgtgaatttgtagtattatattatttataagatttgataccagtttttctatta

SEQ ID NO: 585328 - DNA, 577 bp, Homo sapiens
cttcacggcagcccctcttatcacaggcccagaggcctaggatgaaaaagttgtttcatgggctacacccagggtctccctactgtgtgcagcctagggacttgttgctctgtgtcccagctgctttcaccatggctgaaaggggccaatgtagagttcagactgtggcttcagaggatgcaagccccaaacctctgagcatacaaatggtgttgagcctgccagtgcacagaagtcaagaactggggcttgggaatctctgcctagatttcaaagatgtatggaaatgcctggatgcccaggcagaagtttgctgcatgggtggggccctcatggagaacctctgctagagcagtgtgaaagggaaatgtaggattggagtccccacacagaatccctactggggcaccacctagcggagctgtgagaagtgggccaccatcctccagaccccagaatgataggtccaccaacagcttgcactgtktgcctgaaaaagctgcagacactcgacaccagcccatgaaagcagccgggaagaaggctgtacactgataagccacagaggcagagctgc

SEQ ID NO: 585329 - DNA, 576 bp, Homo sapiens
cttaacacctggccgatgaaataatctgtacagccaaccmccttgacacacatttgcctatgtaacaaacctgcacatcctgcacatgtacccctgaacttaaaatacaagttaaaaaataaaaataaaagaaatcctgtgttattcaaatgtaaaaaaaatgatagcaagagaagaaggaaacaaaggacaacggaaccacataaccttcataaaacaatgaacaaaatggcaactttttgaaagtcctaacttgtcaactttaaatgtaaatagattaaattatccaatcaaaagccacaattcatgaacaaaataagtttgacaaaaatagaaataattataaataagaaaaatcctagaaataaaaatacaataagtgaacaaaaatatttagtagaaaacttcagtagcaggcttcctaaatcataataaagaatcagtgagctccatgacaggatattggaaattatccagtcaaaggaacaaaaagagaaaagaataaaaaagaatgaagaaggcctatgggagttacgggaaaccatcaagagaactaaactttgcgtagtaggtgtt

SEQ ID NO: 585330 - DNA, 522 bp, Homo sapiens
gttagatacctaccattacctcctaactcatttttatctgcagctattaccctactctggtctattctccacaaaataatcagacaaatctgtttataattacagttcctattttcaaaatcaagttgtgaagtgagcaaataaataaccaactgctatttaaaatgctcaaagcacaattctaatgagtcaatattacttttttcatttatcacattttatctaatttatagtacataattatcaaaccacaaaagcaaatatattagcctaaagtacagtatgccattttggatattggctactttgcccctaccaatttgattctgacaygtcaaaatctttatttataacctaacataaacatatattactttaaagtatacaggataaagaagagtttttaaccctttgtaataacataaaacatgattacattgtcatatgtatacatatgtatgggcatatgtgtatgtatacagagagtctttttaaatgaggtatcaatacttgtttcataat

SEQ ID NO: 585331 - DNA, 611 bp, Homo sapiens
aattagggaggagtctcctctccttgattttttggaatagtttcagtaagattggtaccagctcttctttatacayctggtagaatttggctctgagtttgtctgctacagggctttttttggttggtacattttttgttactggctctatttcagaattcattattggcctgttcagtgtttcagtttcttcctgattaaatcttgggagactatgaatttacccatttcctctagattttttagtttgtttagatagatgtattcatagttgtctctgaggatcttttgtatttctatgggattggttgtaatgtcaccattgtcgttggcattgtgctcatttgaattgtctctctttttttcttgtttaatctagctagtagtctattggcattatttgtttctcctttcaaagaaccaattttttgttttgttgatcctttttaatgaattttggcatctcaatgtcaattagttctcttctgattttagtaatttattttcttctgccagctttgggattagtttgttcttgtttttctagttcctctaagtgtgatattagattgttaatttgagatttttctaacttctcaatatagatatgt

SEQ ID NO: 585332 - DNA, 611 bp, Homo sapiens
aattagggaggagtctcctctccttgattttttggaatagtttcagtaagattggtaccagctcttctttatacatctggtagaatttggctctgagtttgtctgctacagggctttttttggttggtacattttttgttactggctctatttcagaattcattattggcctgttcagtgtttcagtttcttcctgattaaatcttgggagactatgaatttacccatttcctctagattttttagtttgtttagatagatgtattcatagttgtctctgaggatcttttgtatttctatgggattggttgtaatgtcaccattgtcgttggcattgtgctcatttgaattgtctctctttttttcttktttaatctagctagtagtctattggcattatttgtttctcctttcaaagaaccaattttttgttttgttgatcctttttaatgaattttggcatctcaatgtcaattagttctcttctgattttagtaatttattttcttctgccagctttgggattagtttgttcttgtttttctagttcctctaagtgtgatattagattgttaatttgagatttttctaacttctcaatatagatatgt

SEQ ID NO: 585333 - DNA, 611 bp, Homo sapiens
aattagggaggagtctcctctccttgattttttggaatagtttcagtaagattggtaccagctcttctttatacatctggtagaatttggctctgagtttgtctgctacagggctttttttggttggtacattttttgttactggctctatttcagaattcattattggcctgttcagtgtttcagtttcttcctgattaaatcttgggagactatgaatttacccatttcctctagattttttagtttgtttagatagatgtattcatagttgtctctgaggatcttttgtatttctatgggattggttgtaatgtcaccattgtcgttggcattgtgctcatttgaattgtctctctttttttcttgtttaatctagctagtagtctattggcrttatttgtttctcctttcaaagaaccaattttttgttttgttgatcctttttaatgaattttggcatctcaatgtcaattagttctcttctgattttagtaatttattttcttctgccagctttgggattagtttgttcttgtttttctagttcctctaagtgtgatattagattgttaatttgagatttttctaacttctcaatatagatatgt

SEQ ID NO: 585334 - DNA, 587 bp, Homo sapiens
tggattaagaaaatgtactatatataygcaatgaaatactatttagctttgaacaagaagttttgccatttacaacagtatggatggaactggagaacaatatgctatgtcaaataagccaggaatagaaagataaatagtacatgtcttcacatatgtggaatctaaaacaatcaaactcttagaaggcaagagtagaatggtggttgctagaggcagaggctgagggagggggtggtggtcgacagaggaatggagagatggccaaagggcacaaagcctcagaaaggaggaatactttggattttttttttttttttgagatctattgcacagcatggtgaatatcataaataacagtctgttgtacatttcaaaataactaaaacagtaaatttcaaatgttctcaccattaaaaaatggtacatatttgaggtgatggatatgttaattagcttgatatattctacattgcattcgtaaattttaatatcactttgtaccccataaatatatgcaatgtacatttgtcaattacaagaaaaaagaataatctctttgcaacgattcctcacaaaactgaata

SEQ ID NO: 585335 - DNA, 567 bp, Homo sapiens
tctcatgttattttcttatactcatctcttaatgaagcattagagcacacaaagtcctttaatgcattgactgttcttacatgagatcaacaacctgccttgattttaaagcaattctaaaattattgtccaaccaaaaagttgatctattatttttgtgtacagtaaccattctgtctccagctaattgacaagctttggtgaatgtgtcgatttcagctttctgagcagattttgcctctggcagagagtcatattttagggatgaaggagtcattctgtcaaagaatgtacccactgattttttttttaagtcttatgattaaccaataatataaacattgtaaagrcttttctaataaatctacctgaatcatagttcatggataaaggttagataatcttgagtttccttttcttcttataatggaataaaagtagcaggagctttgagtattacaataaggaatgaaaatgtgtgagaaaataaaataatcgaattttagaggaggtaagcctacttgttgataaatgcgtattttcagcaatcaacaaatgtaaaatata

SEQ ID NO: 585336 - DNA, 580 bp, Homo sapiens
taggcttaggcaggagaatcgcttgaacccaggaggcagaggttgcagtgagccgagatcgcaccactgcactccagcctgggcaacagagggaaactccrtctcaaaaaattaaataaataaaataaaaatgtgctgtcctcattagaaaaagaaataaaggaatataattactgtattattatattaaaagtttattcaaatttttttttacttgttctaattatagaactgaaaaaaatctctaatgcagctgtaagtaatttatttatgtagactactgccaaatagtgatattttaatcccatcaggaatagagaacagcaaattgttctttctctcatgacttgagcttattctgttgacctgtagttctgcaatactggagaagctcgaaatagaaaatcctgtgtatatttatgacatttgattccctccagggaaataaacttatttcccttgtttaatatttcttagtgaattattaacgattggttgtttctcagtgatggctttctctagctctatggatactccctctcagtgatgtgaagacaaataaaatactaatagaaaaaac

SEQ ID NO: 585337 - DNA, 580 bp, Homo sapiens
taggcttaggcaggagaatcgcttgaacccaggaggcagaggttgcagtgagccgagatcgcaccactgcactccagcctgggcaacagagggaaactccatctcaaaaaattaaataaataaaataaaaatgtgctgtcctcattagaaaaagaaataaaggaatataattactgtattattatattaaaagtttattcaaatttttttttacttgttctaattatagaactgaaaaaaatctctaatgcagctgtaagtaatttatttatgtagactactgccaaatagtgatattttaatcccatcaggratagagaacagcaaattgttctttctctcatgacttgagcttattctgttgacctgtagttctgcaatactggagaagctcgaaatagaaaatcctgtgtatatttatgacatttgattccctccagggaaataaacttatttcccttgtttaatatttcttagtgaattattaacgattggttgtttctcagtgatggctttctctagctctatggatactccctctcagtgatgtgaagacaaataaaatactaatagaaaaaac

SEQ ID NO: 585338 - DNA, 580 bp, Homo sapiens
taggcttaggcaggagaatcgcttgaacccaggaggcagaggttgcagtgagccgagatcgcaccactgcactccagcctgggcaacagagggaaactccatctcaaaaaattaaataaataaaataaaaatgtgctgtcctcattagaaaaagaaataaaggaatataattactgtattattatattaaaagtttattcaaatttttttttacttgttctaattatagaactgaaaaaaatctctaatgcagctgtaagtaatttatttatgtagactactgccaaatagtgatattttaatcccatcaggaatagagaacagcaaattgttctttctctcatgacttgagcttattctgttgacctgtagttcwgcaatactggagaagctcgaaatagaaaatcctgtgtatatttatgacatttgattccctccagggaaataaacttatttcccttgtttaatatttcttagtgaattattaacgattggttgtttctcagtgatggctttctctagctctatggatactccctctcagtgatgtgaagacaaataaaatactaatagaaaaaac

SEQ ID NO: 585339 - DNA, 580 bp, Homo sapiens
taggcttaggcaggagaatcgcttgaacccaggaggcagaggttgcagtgagccgagatcgcaccactgcactccagcctgggcaacagagggaaactccatctcaaaaaattaaataaataaaataaaaatgtgctgtcctcattagaaaaagaaataaaggaatataattactgtattattatattaaaagtttattcaaatttttttttacttgttctaattatagaactgaaaaaaatctctaatgcagctgtaagtaatttatttatgtagactactgccaaatagtgatattttaatcccatcaggaatagagaacagcaaattgttctttctctcatgacttgagcttattctgttgacctgtagttctgcaatactggagaagctcgaaatagaaaatcctgtgtatatttatgacatttgattccctcyagggaaataaacttatttcccttgtttaatatttcttagtgaattattaacgattggttgtttctcagtgatggctttctctagctctatggatactccctctcagtgatgtgaagacaaataaaatactaatagaaaaaac

SEQ ID NO: 585340 - DNA, 580 bp, Homo sapiens
atttgttgtttgatagtttttgagattataaaatatgattcttaaaaacaacttaaaatgaggaaggatcttaacactgcctttattcaaaagagggcaaattaaaaatagtgtatactccataagatgaactgtgtttgaggtagaagacatagaaaaaatcggttaagatatctatactaacttaaatagaagttcaactatttttatascatctatcatatatgatttataataataaaatattacaaattggattttgtggaaaatcttttaaaaccaagaatttatcagtaggatttccacatagagtgaacattttgtaatatctatctaaaagaaagacggctgtaaagtaaaagcattatattaaactttcctacatagtgggaagaaataggagcataaatttcctcacaaattccaagtaaaaaacaaactaataaaaaggactatatatttactgattagttacataacctaattttgtgtaaagtatgatctaaggagccttagaaaaatacaagataaagaactagtaaattttatttttattatttatttaaatattaaattacaa

SEQ ID NO: 585341 - DNA, 580 bp, Homo sapiens
atttgttgtttgatagtttttgagattataaaatatgattcttaaaaacaacttaaaatgaggaaggatcttaacactgcctttattcaaaagagggcaaattaaaaatagtgtatactccataagatgaactgtgtttgaggtagaagacatagaaaaaatcggttaagatatctatactaacttaaatagaagttcaactatttttatagcatctatcatatatgatttataataataaaatattacaaattggattttgtggaaaatcttttaaaaccaagaatttatcagtaggatttccacatagagtgaacattttgtaatatctatctaaaagaaagacggctstaaagtaaaagcattatattaaactttcctacatagtgggaagaaataggagcataaatttcctcacaaattccaagtaaaaaacaaactaataaaaaggactatatatttactgattagttacataacctaattttgtgtaaagtatgatctaaggagccttagaaaaatacaagataaagaactagtaaattttatttttattatttatttaaatattaaattacaa

SEQ ID NO: 585342 - DNA, 539 bp, Homo sapiens
tacacttgtgaaactgtcacaattcacaaacgtgtccatcacctcccactttcttcttcttatttgkgtgtgtaagagcatttaacacaagatctaccctcttagcaaattttaaagtatataatacattgtgaactacaggtaacatgctgcgcagtaaatctctaggatttattcttcttgactaacagaaacttcgcacatactcttcaacaaataccttcctatgtctccatccctccaccctcagccaccactatttcattctcagtttctatgagtttaactattttatattcatcatataagtactatgatgcagtatttgttcttcagtgtatggcttggaatagtaccctctagttttgttcatgtcattgtaaatggtattatttttaaaaagctgaataatattccgttgtgtgtgcagacatgcacacatacatgcacaataaaatatatattgtgtgatatatatgtcatatatatataatctcacatttttgatccaattttccactgataaacatttgtgttgc

SEQ ID NO: 585343 - DNA, 533 bp, Homo sapiens
tctccttgtgtgcacctactcttggttctctttctctggagaactcttactaatacagtgctacaccaaaggcataatmactaaaattttaaaaagataaattgaactgtactgaaagtagaaggcttttctctacaaaagacactattaaaagaatgagaagacacatcataaactgggagaatatatttgtaaatcacgtatctgacaaagaatttttcaagaatatgtaaatagttctcaaaactcaaaaataaaacaaaaaacaacacaatttttaaatgggcaaaagatttggatatacactttatcagatgacataattacgtggcaattaagcacatgaaaatatgtacaatatcgctatttattagtgaaattcatattaatgctacaatgagatactattacatatctattagaatgtcaagggggaaaaagtgtgacaatatgttgacaaagatataaaataacttgaactcttcttgtacatttctggtgaacattcaaaatgttacagccactttagaaaa

SEQ ID NO: 585344 - DNA, 558 bp, Homo sapiens
ttgaaactgtgatgaggggctgactacaaagaaacagcacaaaatttctgtattgtgttggtagacacgcaactctctcgcaacccacaaaatggtacaccacaaagactgaattttgaagtaggtcaatataaaatctaaactaagaaaagatgtctgcaatatttttaytcagatttcctgtcccagccttcgtacaggtgttgtgttaaacctcttttatttattgtttctggatgaggagtcttatgatagatgatacattacatatattcccaagaagaaaaattgggataaggaaaactaattaaaattgatgataccccctctgtgcacttgagtacaatattatacatttgcatccatcatgccatttaactcttatatcaaccttatgaaggaagttgttaacatatagacacttatcctacagaaagaacaggaaacccaggagggtttggagggctaacaacgtagttgtctgattcagcattttgtgcaatctccattatattacttttataaaatttattttttatttatttttaaattattatt

SEQ ID NO: 585345 - DNA, 526 bp, Homo sapiens
tggtactagtcagccataaaaaagaatgagatcccatcatttgcaacaacatgaatggcactggagatcattagttaagtgaaataaaccagatacagaaagacaaacatcaaatrttctcacttacttgtggaatctaaaaatcaaatcaattgatctcatggacatagagagtaaaaggatacttaccagaggctgagaaatatggtggggggatgagagaggaggtggggatggttaatgggtccaaaaaaattaggaagaatgaataagacctactatatgatagcacaataagaacactatagtcaataataacttaattgtatatttttaaataaagaatgtaattggattttttgtaattcaaaagataaatgcctgaggggatggataccccgttctccatgatgtgtttacttcacattacatgcctatactagaacatctcatgtaccccataaatatttatacctactatatacccacaaaaattaaaaaaatattcagtaggaaaagaatgaac

SEQ ID NO: 585346 - DNA, 526 bp, Homo sapiens
tggtactagtcagccataaaaaagaatgagatcccatcatttgcaacaacatgaatggcactggagatcattagttaagtgaaataaaccagatacagaaagacaaacatcaaatgttctcacttacttgtggaatctaaaaatcaaatcaattgatctcatggacatagagagtaaaaggatacttaccagaggctgagaaatatggtggggggatgagagaggaggtggggatggttaatgggtccaaaaaaattaggaagaatgaataagacctactatatgatagcacartaagaacactatagtcaataataacttaattgtatatttttaaataaagaatgtaattggattttttgtaattcaaaagataaatgcctgaggggatggataccccgttctccatgatgtgtttacttcacattacatgcctatactagaacatctcatgtaccccataaatatttatacctactatatacccacaaaaattaaaaaaatattcagtaggaaaagaatgaac

SEQ ID NO: 585347 - DNA, 526 bp, Homo sapiens
tggtactagtcagccataaaaaagaatgagatcccatcatttgcaacaacatgaatggcactggagatcattagttaagtgaaataaaccagatacagaaagacaaacatcaaatgttctcacttacttgtggaatctaaaaatcaaatcaattgatctcatggacatagagagtaaaaggatacttaccagaggctgagaaatatggtggggggatgagagaggaggtggggatggttaatgggtccaaaaaaattaggaagaatgaataagacctactatatgatagcacaatargaacactatagtcaataataacttaattgtatatttttaaataaagaatgtaattggattttttgtaattcaaaagataaatgcctgaggggatggataccccgttctccatgatgtgtttacttcacattacatgcctatactagaacatctcatgtaccccataaatatttatacctactatatacccacaaaaattaaaaaaatattcagtaggaaaagaatgaac

SEQ ID NO: 585348 - DNA, 523 bp, Homo sapiens
gtgtacaaatctttcatctccttggttaaatgtattcctaggtatttgttttattctatcatatatgtgattattttctttccttttctttggctggattgttatctgtgtatagaaatgctttcttcaaaggctccatggggagattctgttttttgcttctagtttctggtagctccaggcctccttgacttttggcagcattgcttcaatctctgcctctatggtcacagtgcctttttctctgatttctgtcagatctcccctgtgtgtttcttayaaggaaccctgtcattggattgaaggcccactggataatccagaacaatctctcaaaattcttaatttaattgtatgtataaagacctttttttccccaaataatgtaacatttataggttctaggagctaggatataggcaaaaatttttgagaggcaggacagattttgtttggttattttaaaatatcatgctaaaaacatgtattagtattcgaatgtttgtcaaactgttcaaaatag

SEQ ID NO: 585349 - DNA, 538 bp, Homo sapiens
tcaccttgcaattttgctatgaaggcagcctctttgtttaatcctcatgaaacaacgtcttctagcttcaaattatttttctgmagcttccttacttctgtcagccttcacagaatttttttttaaaagttagggcctttgtttatattaggctttggcttaagggaatgttattactgggtttgaccttctattcagaccactcaaagactgtccatatcatcaatacagctagttccctttgttgtcattcatgtgttcactggagttgcacttttaattttcttcaagaacttttttttttttttggcattcatgatttgactaacgggcacaaggcctagattttggcctgtctcagctttcaacatgccttcctcactaagcttaaatatttctaggttttgacttaacgtgagagatatgtaactttttctttcacttaatcacttggagcccattgtagggttattaattggtctaatttcaatattgttgtgtctcagggaatagagaggcaaaggagagggaaagagat

SEQ ID NO: 585350 - DNA, 304 bp, Homo sapiens
tgtggatataaacttttaaaatgtgttttgacaactcttttgttttatcgaatatttattcttgaaaatctcttttgagaggagatcctaaactgtacagatgaccacccacatggtattctctgaatgtctccgaaaaggacaaatgcattttactaaatgaaagtcaattgcctcatctgtaaaggtgaaaaggagacagttaatatgagagtcttactgaatatgacttagttaataattggaaagctctcraacacacattaaaaagaagaaaaagatttcttcagaatgtctgtggtgt

SEQ ID NO: 585351 - DNA, 617 bp, Homo sapiens
ccataggtggactttacagtggggctacagtcactgaattggaaaacctaaatgcaataggaataattggattatgttgtggcagaggccaagtggcaacagacaactgccaaaggcaaggtgcggtggttgtcataatggtcagcagattcaatgcagaaattagaatagtctgacttgtacagatttatggcattggttaggtgatcatggtgttcctagaagtaaaatagatagaaagcctactacttgaaagccttcttacttgatctgtataagcagaaaggctctagctcaggtgaacaaaggtgtaayttgattcatgaaaacagagtcattacccttcaatcagtttccagatttgaacgagtttacagtaccagaagtccctaaaaagaagaggctgtgttaccttaaggaaggactcagtacactgtggaaggataaatgtttatgttcttaatctttctctgaaactactccaaagggacctatagtcttctaccaggttaactgtgcatgtaggaaataaaaataattggacctttggagaactactgaacataaacaccagttatgggagacctaacacatcactatagtttaccagtcagaat

SEQ ID NO: 585352 - DNA, 442 bp, Homo sapiens
gccctttgtccttgaggagctgaggcaactgcctggcatggcgtgggtgttggtgaccacrggcccctttgttcctctctcccactcaccctcccgctccttcctcgctcctgtgaccctcggtccctggcccgtggagactgtgggcagggctcagggccactgggtggtgtctgggtgaaggtggctgcttagcactggcacatgtggagaatgtggtggtgagctccctctcagctgccgtttcctggccggcattagcgttgccacccaaagccttcccaagcgtggctgaccctgacctggggcattcagaagtgtctggcttcttcctggcagtaacttcggtgtcagacacgggcctctagggtattgtttttcaaatgtcattaactggccgggcacagtggctcatgtctgtaatcccagcactttgggagac

SEQ ID NO: 585353 - DNA, 402 bp, Homo sapiens
ttcgttcctaacatcctccctcaaaataaagcacatgcttaaaaraaaaaatcacctaagcagactttttccaagaagcacatatagtactttttattcaaggcaacatgcagacctgttaaacattttttttttaatttttttaagtttgcagtcttctctgaagacttcaataaagcaaagggagctcatatgcctcacccagtctgcctgacttaaagtagtgtgaggcaagaatcatccacatgtagagttaaacaatgaaattttccaagtatatacatgctgtgagaatcaataacctcttctcaaaccagcaaattggtttcaagtattcggttcactggttacatccaacagccacaataagaggccacctttggagtgaaagggaaggtgaag

SEQ ID NO: 585354 - DNA, 607 bp, Homo sapiens
cagtaagggtagagctgaactcaacgataccatcaattaaatggaaataatgggcatctatggaatactttatccagtacagcagaatgyacactcccgccaatctcacatggaaaattcacgaagatagaccacaaaggaagaaaggctattacaaggaagaaaagatagtctttcaataagttgtgctataacaactggacatccacatgcaaaacaaaacaatacaaaacaaaactagaaacagaccttactcccatcagaaaaattaacgtgaataggttataaacttaaatgtaaaactataaaatctttagaagataacataggagaaaatctagacaacattggttttggagatgagtttttagatacaacaccaaaggcgtgaactgtgaaggaaataattaataagctagacttcattaaaactataaattgctgctctatgaaggacattgtcaagaaaatgaaatggcaagacacagactgggagaaaatatttgaaaagacaaatgtgataaagaactattatctgaaatatacaaaaaactcttaaaactcaaccataagaaaataaacaacctaactaaaaaattgtctagag

SEQ ID NO: 585355 - DNA, 594 bp, Homo sapiens
gggtagagctgaactcaacgataccatcaattaaatggaaataatgggcatctatggaatactttatccagtacagcagaatgcacactcccgccaatctcacatggaaaattcacgaagatagaccacaaaggaagaaaggctattacaaggaagaaaagatagtctttcaataagttgtgctataacaactggacatccacatgcaaaacaaaacaatacaaaacaaaactagaaacagaccttactcccatcagaaaaattaacgtgaataggttataaacttaaatgtaaaactataaaatctttagaagataacataggagaaaatctagacaacattggttttkgagatgagtttttagatacaacaccaaaggcgtgaactgtgaaggaaataattaataagctagacttcattaaaactataaattgctgctctatgaaggacattgtcaagaaaatgaaatggcaagacacagactgggagaaaatatttgaaaagacaaatgtgataaagaactattatctgaaatatacaaaaaactcttaaaactcaaccataagaaaataaacaacctaactaaaaaattg

SEQ ID NO: 585356 - DNA, 594 bp, Homo sapiens
gggtagagctgaactcaacgataccatcaattaaatggaaataatgggcatctatggaatactttatccagtacagcagaatgcacactcccgccaatctcacatggaaaattcacgaagatagaccacaaaggaagaaaggctattacaaggaagaaaagatagtctttcaataagttgtgctataacaactggacatccacatgcaaaacaaaacaatacaaaacaaaactagaaacagaccttactcccatcagaaaaattaacgtgaataggttataaacttaaatgtaaaactataaaatctttagaagataacataggagaaaatctagacaacattggttttgkagatgagtttttagatacaacaccaaaggcgtgaactgtgaaggaaataattaataagctagacttcattaaaactataaattgctgctctatgaaggacattgtcaagaaaatgaaatggcaagacacagactgggagaaaatatttgaaaagacaaatgtgataaagaactattatctgaaatatacaaaaaactcttaaaactcaaccataagaaaataaacaacctaactaaaaaattg

SEQ ID NO: 585357 - DNA, 468 bp, Homo sapiens
gcggcattccttcctccagggtatgagtcaggaccttctctggaatgagggtcttatgacccacaatcagattagagttctactctgggaaggtgagaggagagcaggagaaggtcagaaagagactgtttcctgaagcctatttctgagtgccccagcattataacaaacactgtaacaatggctatggggcttatgagccaaaaactggatgaaaacctgcacacayacacacacacacacacacacacacacacacacacagtaatatcacaactagtaaataagtcgaccatagtaatatgtagagccaaatagcctaccatttattgatttacagtattatacttgtcagatggtatgctatgcatgttaatatgttccttcgatgtctcatgacaaacctttagatagtacctcatattataataaagaaatgaaggtttaaagaaatcaattttaatttca

SEQ ID NO: 585358 - DNA, 579 bp, Homo sapiens
tgtagccagtaatattctttcatttttctgatgtcccccscctcccaatctttgcctggcaaattcccacattccttagttgtctctgctttagaaaggtctgccttaatctatagtaggtcagctttattgcctatatcatcttgtgcttagcctttctgaacactcagcttacctgttaaatgtctgctttctgcaccagactttaagctccactggggaacatattgcttttcacagaacctgccacaaaatgaatgatcaataaatatatactgaattaaactattttctttctggccaaacttcttaaaagagatgttcataatcatcataaaagcttcctcagctcaaattcactcttcattattctaaaatatgacttctgcccccacaaatctgttgtatttgctttcagagaagtcaccagtgaccttgtaattgcctttagttattgtaactccttaaccaagctgacctctctaagacatttgatactcctaaggcgaacattcagtaatttgtttaacatttattgttttctgtgtgtcagaaaatgtgaaaacgcttcccttagat

SEQ ID NO: 585359 - DNA, 552 bp, Homo sapiens
tcagcagcagggttgtcacgtaatggatatcagacaatatttgttgaatggcctagggaaactatattttatagaaatgttgaacaattatgagagtaatactatgttttttcaatttaacccatcacacatttattgggtgcctgctgggtgtaagtcaatcatcacatattgtgcatagtgaaaatctgaagttagagaacaagcagtgtgttttccaaagaaagaccattctgatgttttcatttctctatggaaattattgtaatcacaactgcaagaaaataaaacagagatcaaaaagaaacatctgatattgggacatagacagaaaaaaagttactaaaaaagtatctgtatttttaaaatataggtgtgctattcaattatgtattgtgtaatagattataatgtaagatataataattctatataacaacatatttactatgatatatatgtaatctttgaaagttattttgcaaaatatttttgccattaagcgtacaaattaatgggatttcaagsaaaattatagtggagcagttattg

SEQ ID NO: 585360 - DNA, 554 bp, Homo sapiens
atacaccatgggatactatgcagtcataaaaaagaacaaaatcatttcctctgcagcaacatggatgcagttggaggtcattatcctaatggaattaacacagaaacagaaaaccaaatattgtatgttttcacttataaatgggagctaaacattgggcacatatagacataaagatgaaaacgatagacactggggactacaagagggaggaggagagagtaggacaagggttgaactacccagtgggtactatgctcattacctgggtgatgggttcaattgtaccctaaatctcagcatcatgcaatacaatcatgtaacaaacytgcacgtgttacaccttgaatctaaaataattttaaaaagacaggaaaaatatttggaaaaatgcacgcccaactgctttacatggtgggcagaatgaaagccatttcactttcatgtagaaatttcagaagtggttaaactagtataaacagaacatattaattttgtaatttggaaatttttccatggtaaacactgtattttttctcttaaaaaaaaagaaa

SEQ ID NO: 585361 - DNA, 189 bp, Homo sapiens
tgattatgtctccccaaattcaaatgctggagttcaggwtatgactatttggatacaggatttttaaagaggtaattgagttaaaataaggtcatatgagtgggccctaatctgatatgactggtgtccttataaaaggaggaaacttggacacagacatatataaagggaagtccatgtgaagacata

SEQ ID NO: 585362 - DNA, 417 bp, Homo sapiens
gctttgcttaactatcttattcaaataacaagcctcttcacagcattactggatcatagtgggtgctccaaaatatttgaatgaatagtcaatatttcaaggaatagtctccatcttggaaatgagtaccttgtggcttaaattgtaggagctaaagygttaggaactaaagaagattttcaagttaatattgggatttatatccccataagataactaaggttttgaagtaaaaaagaattggattaaagtttctgctctagaatttaaaaatataaaaacagaacatttatttaaggcacaagtgggagataagtgatgagaacacattgacacatagaaggcaacaacacacgctgaggcctttcagagggtggaaggtgggaggaaggagaggatcaggaaaaataactaatg

SEQ ID NO: 585363 - DNA, 417 bp, Homo sapiens
gctttgcttaactatcttattcaaataacaagcctcttcacagcattactggatcatagtgggtgctccaaaatatttgaatgaatagtcaatatttcaaggaatagtctccatcttggaaatgagtaccttgtggcttaaattgtaggagctaaagtgttaggaactaaagaagattttcaagttaatattgggatttatatccccataagataactaaggttttgaagtaaaaaagaattggattaaagtttctgctctagaatttaaaaatataaaaacagaacatttatttaaggcacaagtgggagataagtgatgagaacacattgacacatagaaggcaacaacacacgctgaggcctttcagaggktggaaggtgggaggaaggagaggatcaggaaaaataactaatg

SEQ ID NO: 585364 - DNA, 489 bp, Homo sapiens
ataatattttaaatctccaaatccgatagtaatactaaggggagtttaaattgaatgtctagcccctttatttctctatttgtctatcaatttatctattcatccattgacttaaaaaaatagcattgctaataaagtggaaatcctcatgcattatgtatggactctgcctgagtgactgacaggactacccagagtgtcaatgtattctccgctccagcttatcagttaactagtgaaatttaacacggatggtgtcggctttttatttagagtgttactgtataaacagaagaggccactgggagaatcttgttttggagttttcacctcatttaaattcttaattgttcccctcagtttagaaaaggctattgcagtgtggtcctgcttccaattaatgagcttcwgaaaaggattaggtttgcctcactcagtctttccaaaataggctaaccttgaatcacacaaattccaagaaaaggtaaa

SEQ ID NO: 585365 - DNA, 661 bp, Homo sapiens
ttgttctaagcatcacaactactaaatagtggaagtgagttttgtttttttttaaataatgaatcataaattttatttcaaaatgtaaacatcactaaacatgcatacacattaaaacaataaaatttacaatttcattaatttttctttttgcataggacatcattacaatatagaatctatgccatacaaaatacatacaaagttttatctgagcaagccaaggccagactgggaactgtacaactgtaatacktcactgtagtgatccaggaaagatgaaacatggccttcgggaagtgagttttgaaaccaagcagtataagcccagagtctgtgccttgccatctccattaaaaataaagatttaaataaataaatgtagctagtatctcattttagacaactaaatttaacacatgtgctgacaagatccttcatgcctgcttcctagtttttacatcttacttatggattctgaggtctacagtttgcaagaaaaggcataacctcgattaaaataactgattggagaaaataaatctcagtgcacaatgaatgaacacaaataagaagtaaaagtgatgttaattcggtaataaatatgtgctttttcatcgtagaacgtattttgtcttaactatgcaggaatgtaactttc

SEQ ID NO: 585366 - DNA, 610 bp, Homo sapiens
ttgttaaaatgacatactacccaaagcaatttcaagactaaatgctactcctattaaactatcaatcacattcttcacagaattgggaaaaaaaactaactattctaaaattcacatggaacacaaaaaaagagcccaaatagcaaaagccatcctaagcaaaaagaacaaagtcaggggcatcacattatgcaaattcaaactawactacaatgctacagtaaccaaaacagcatggtactggtacaaaaatagacacatagaccaatggaacagaatagagagtacagaaataaagctgcacacctgcaacaatctgatctctgaaaaagtaacaagcaatgggaaaatgattccttattcaacaaatggtcctaagatacctgagtggacatacacagaagacatacacagaaactggaccccattccctaagccatatataaaaatcaacccactataaattaaagacttaaatgtaaaatgtaaactgtagaacccttgaagaaaacctaggaaatacctttctagacataggccctgacaaacattctctaattatttgagaaatccaaatcaaaaccacaatgagatactgataccattttat

SEQ ID NO: 585367 - DNA, 526 bp, Homo sapiens
atttcttctgtaatacaaacttgagtgtcattttttttaaaattcctgtctcttctccctcataggcatcagctatcaaaacttatggtaagtatttttaacgtattatttattttattactacaacaatcctctgtattattaggcccatattaagtgagaaacggctcagagagggagtctgcttatatagactgaaacaactgtattcttcacttatttgggaaattaccacacacatctcataagtggcagagcagtttgacttcrggatctgaacttccaagcattactgtaatttctaaatctattttgtcattaattcgcttcacctgtattgccatcatattaattcaagccactatcatcccacagtaaatttactaacaacactcagtgtcttccttctttccttccttcttttccttccttccttctttcttttctttctttcttttccttccctccttccttccttccttccctccttacttattttctttctttctcctttcttctttcctcc

SEQ ID NO: 585368 - DNA, 553 bp, Homo sapiens
atcatcctcagcaaactaacacagaaacagaaaaccaaacaccacgtgttctcacttataagtaggagttgaacaatgagaacacatggacacagggaggggaacaatgcataccaggggatggggagctaggggagggagaacattaggacaaacacctaatgcatacggggcttaaaacctagatgacaggttgataggtgcagcaaaccaccatggcacatgtataccgatgtaacaaacctgcatgttttgcacgtgtgtcccggaacttaaagtaaaaattttttaaaaagccaaaaaatattattaattggatgtgattttgtttttgggttgttttgtggaaaaagaacttattcagagataaatactaaaatatttatacacaaattgctttgawgtttggaatttgccttaaaataattcaaaacggttaagaaatgaaatgacctgatacatgttggagctggatgatggatacctgaggtcctttattctcttatctctattttgtatacttctgaaattttccacagtaaaaagttgcaaa

SEQ ID NO: 585369 - DNA, 528 bp, Homo sapiens
gtttagctttttggggggagttttttggggggttttttggttttggtttttgttttttgagacagaatactattctgtcacccaggatagggcgcaatggcgtgatcacagctcactgcagcttctacctcccaggtttaagtgatcctcctatctcagcctcccaagtagttggaaacacaggcacacaccaccacatcaagctaatttttttatgtgtactttatagagatgggatctcactatgtttcccaggctggtctcaaactcctggactcaagcgatccacccacttcagcctccccaatgctgggattacaggagtgagctgccacgtccgactggtccctcttctttactagctatgaagagtctcaaaaggcagagccccgggaagaaggcatgatatacaatacaatgagaccagcgttctcaattgttagttctcactaagtgyttcacaccaggaatctaggcagactccagtttttctcaacagcacaaagatatgtatgctcatgaccagat

SEQ ID NO: 585370 - DNA, 529 bp, Homo sapiens
attccccttcacctgtgttttcagctgtcttgttggtctgatttcaaggagaaaagagtggaaaataattgattcattttctaaagattttacagcttcagtgaaaggcacatataacaaaggtaagtttctgttttacattttgattcagattgtggagaacaatttcattatttttcctaagagattactgaatactgtaaacacactaactttttacttgaccaagggttctgctgtcagtcatcaacatctttagtcatctatacattcctcctatttattacaataagaataacaaaataaatatgttgtagcttatactataaataatacawtgaccagccatcattaatacatggcgataccctctcttctgtttgctactaatttttgcaaaatacatttatccaatgtcctgaacctaaaatctgcctccatttattatgattaattctactgtctcaaatgtgcatttgctgctctagttctgtatttttcaccatgaaattacgttactgtactatct

SEQ ID NO: 585371 - DNA, 580 bp, Homo sapiens
caaatgtgattatcgcttcttggctcccttttgcaggtggtcttgaactgtacctctcttttcctttttaacctcttgtatttaaaactccttaattaaggggaaatctaaaattttcttcattcttttttgaggagtcctgcaattaaaaagttgagaatctgcctagatgtttgaggagcacagattatactgaacaatccacccttaataattaaatagaatgttataatcataaatagctctgccttgcagtcatttctgtaattttgtctgacattcatattgtcatttgattagttaatcatccattttcaaaggtgtgaatgtgttttcacacttctgctaagacagtgttaactatgaaactatagatagcartagagattaattatctattgcaccagttcccacaccttgtgcttaccagatagaggaaaagagtgcatgccttaacacaggtgtgatttcaaaaaatgggaaaaaaactgcttggtcaaatgagcttaaggagtactttcaattgatctttaaaacattaacagcatttacacttttaatttcatttcataaaacaatt

SEQ ID NO: 585372 - DNA, 606 bp, Homo sapiens
ggcatgatctcaactcactgccatctccgcctcctgggttcaagccactctcctaactcagcctcttgagtagctgggattacaggcacatgccaccacacccagctaatttttgtatttttagtagagatggggttttgccatgttggccaggctggcctcaaactcctgacctcatgtgacccaccccccttggcctcccaaagtgctgggattayaggcatggtccaccatgcccagccagttaaactattctgtatgaagtataagggtggatacatgctgttacccatttttcaaaacccatagaatgtacaacatatacagtgaagcctcgtgtggacttcaattagtaataatatgtcaaagaaccatgttattcctgatttaaaccctccagtggcaccctcttgcccaccaaataaagtccacactctgcccagtagcatccaaagctctcatcacctggtctcttgctctatccatcctggattactagaagctccctaagcagactgtcatgttcatctgtcgttcttgcctgcccaacatctgcttttccttcttctgcagatatcacccatttcccttcaggaaacagcagcc

SEQ ID NO: 585373 - DNA, 641 bp, Homo sapiens
tcataaggcatgcacaacctagattcctggcatgggcagctcacaatagggttcacgtccctatgagaatctaatgccgtggctgatctgacagagggcagagctcaggcatcaatgctcacttgctcacctcctgctgtacagcgtggttcctaacacgccacagatcagtactggtctgcagcccgggggttggggacccctgttttagagtacacattgtaactaaccaccacttgtgttggtgtagcatcaaagaaaaatatctcccgattatctgagaaagctatcacaatactcctcgcttttccaactatgtatttgtgcaagactagatagtctttatatattttaaccaaaacaatatattgactgcataaacagataagaggatcccactgtcttctattaagccaacattaaagaaatttatgaaaatgtaaaacaatgccactcttytaattttttgttttggaagatatagtttttttaataaaaaaaaattgatgttaaaatgtattagggctattattttctttttattttaaaatttatttgacacattacatatttatggaggtacagtttgatgttttgatgcatatctgtgttgtataatgatctaatcagagtagttagta

SEQ ID NO: 585374 - DNA, 567 bp, Homo sapiens
gttagtcctgcaaaggcagactggtccccastcaagaaggaggtgttttggggaaagggctattatcaattttgtttcagagtcaaaccatgagctgaattccttcccaaggttagttcagcctactcccaggaatgaacaatgacagcttaaatgttagaagcaagatggaattggttaggtctgatctcttttactgtcatcattttctcagttataatttttgcaaaggctgtttcatgataatttttagtctcttttcttctcctgtggtgaatcttttctggttatttcatgagattcctagtgaggctatcttaagataatttcatttcttttagaaaaaaattaattaaaaaatttcagaaattcctccatgaactcggggaaacaaagaggatcagcgagactaaggatagagacatcagaaagaaaccttggatctgaggcttgtttatgaggccttcttatttcagctcaaagtgttcagcatgccaaagtaccaaacttttagagtatcgttttcccagccccaacatcatcacagtatattcattcactcataac

SEQ ID NO: 585375 - DNA, 495 bp, Homo sapiens
gccgaaatgggtggatcacctgaggtcaggagttcgagatgagcttggcctcatctctaccaaatggtaaaacctcgtctctactaaaaaagtacaaaaaaattagctaggtgtggtggcatgtgtctgtagtcccaggtacttggaaggctgaggcacgataatcacttcaacctgaggggctgagkttggagtgagccgagatcatgccactgcactccagactaggcaacagagtaagactctgtctcaaaaataataataataataacatttgattgtataagtgtagattcatatctaagatccttattcttttccacaggcctatgtgtctatttttatgctggtgtcattctgctttgcttactatagcctatgacacctttttaagcctggtagtgtgatacctctagctttattctttcagcgtaagattgctttaggtatttgtggtcttattcagtttcatacacattttagcattgcttctta

SEQ ID NO: 585376 - DNA, 392 bp, Homo sapiens
gaatcacttgaacccgggagatggaggttgcagtgagccgagatcatgccactgcactccagcctgggtgacagagcgagactccatctcaaaacaaaaacaaaaacaaaaaaactaaawgataaaaactctgttgtaaaaaatttactggatagatggatagatatctgagaaatataaataatgttaaagaaaatatcagtgactaactcaaggcatactaaaagacaattctatctggcaagattttttagacatggagaagacacatataacaaacatgattgataaaaaatggacatcactacagatgttgaaggtaacaaaaataagatgatatgataaatatctaatgatatatttaagaaatttggaaacttacataacaaagg

SEQ ID NO: 585377 - DNA, 527 bp, Homo sapiens
atgcacatatatgtacattgyagcagtattcacaattgtaaagacatggaatcaacctaaatacccatcagtggtagactggatacattaaatatggtgtatatacaccatagaatactacaaagccacagaaagaatgatatcatgtcctttgctggaacatggatgaagctggaggccattattcttagcaaacttatgcagaaacagtgaaacaaatacagaattttctcacttgtaagagtggaatctaaatgagaacacatggatacatagagaggaacaacacacacttggtcctatcagagggaggagtgtgggaggaaggagaggatcaggaagaataactaatgggtaccaggattaatacatgggccatgaaataatctgtacaatgaactcccatagcatgagtttacctatataaccaacctgtatatgtacacctgaaattaaaatataagttttaaaagttttataacatagttatattttaatttattgcatatcaatagctattataaata

SEQ ID NO: 585378 - DNA, 566 bp, Homo sapiens
tcagggctggcagagtcagtcaggggtagccctttggcaagagtaatatgagtttggattatcgaacttcagagtttaaccctaagaggtaagtatttgctcgtttctaaattttgaagttttaaagccggcgttttgataatctgatatattttactaaccctctgaattcactgagagtaggtagggcactaattcagaggtcctagggaaaccttctggggggagataccaagttatggctacaaaatgacccaactttacatggcacggagctctaaaagtaagcagaattagcaagtgtggatcaacagatacaggatttaagaggcatcataagtttgcaggcggtacgtgaaactaacaaatgaggtaaccagaggaaaaaggtgtaactgtgtgtgtgtgtatacatacacacatayacctactattttactatatataataaaatatatagatattatacatatataaagagagtttatgtatatgtgtgtgtgacagaatatctaaggggtaaaggaagaacaaatgaggcttctgaaaggcataatcagaggaag

SEQ ID NO: 585379 - DNA, 594 bp, Homo sapiens
tgttattagttcagtaagataaaagatggagaggagaagtaaccattggatttagctatatgaaagttactggaaaccacaaaagcataattttagtgagttgtgggagttgagagccagcctgtcaggaacagattcaggataatggaagaaaaaatggaggtgactgaaagcggcggttcagggatctttaccgcaaagggaggcagagaaatgggtctgtagctaaaaggttgaggcaagagggttgaagtcaaaaggttttctgtgtttaagattggagaaataagtgtgtatgctgatgagaatgattcaagagagggaaaaaaataggagaaagaaaaggaattgctacggacagtgctgttgagaaggagaaaccatataggatctggtacacaatgaagggactggttaccaaaartttatctaggctgggcatgatggctcacgcctgttattcccagcactttgggaggccaggcgggcagattgctgaggtcaggagttcgagaccagcctggctaacatggtgaaaccagtctctacaaaaatacaaaattagtagggcatggtggccataccctgtatcca

SEQ ID NO: 585380 - DNA, 550 bp, Homo sapiens
ttattacctttctgcttcccctaggaactcttgtgcacagggtgtgtgtgggggtggggagggaggcattagactgtgcctcagaacctaattttattttttaatttaatttaatttaaattttttttgagacagtctggctctgttgcccaggatggggtgcagtggcgcaatctcagctcactgcaacctccgcctcctgggttcaagcgattctcctgccttagcctcccgagtagctgggattacaggtgygcaccaccacacctggctaatttttgtatttttagtagagacgggggtatcaccatgttgaccaagctggtctcgaactcctgacctcaggtgatctgcccaccgcagcctcccaaagtgctgggattacaggcgtgagccaccacacctggccaaaagatagttgaatcactggttaaggataacattatggtgggaaaaaaaacggaagaaaatataagagataaatgagaaggagagaggtgacaggtagagattagagagaaagaatagatattcttgacctgcctagtgg

SEQ ID NO: 585381 - DNA, 587 bp, Homo sapiens
gccacctggaagccaacagccccctagacgttggcaccgcactggagcctggatattggtttcctcactggtaaacaaggctttgcagggacagcagctggactggctgtggaagtgtcatgactgagctaggccaagccccagcagccttgcacggctsgtttgctcatgatcccactgagaaacactggtatggggtggaacagggcagctgtcatcagacagagagggcatctatcgcccctaagagcatcccccttgcaggcagcgattcatgagtactcaaacaggagagtgttctcatcctccagcagagtgaccagcagtccagttgggcctggaactgaggaatttcataagatgcaggatgttatcggtaacagaagcaaaaattcagaaagtttgaacaggtaggtcaccctgctctctgggctcattgtgaagtgcatctgaccccttctgctgcaagcctccctgttagcaatcttgtgctcttgcctctcccaagactttgagcacagggccctgtttacgccgttgttgtctgtaccctggggcactgttcaagacggcaacacgataaacgt

SEQ ID NO: 585382 - DNA, 587 bp, Homo sapiens
gccacctggaagccaacagccccctagacgttggcaccgcactggagcctggatattggtttcctcactggtaaacaaggctttgcagggacagcagctggactggctgtggaagtgtcatgactgagctaggccaagccccagcagccttgcacggctcstttgctcatgatcccactgagaaacactggtatggggtggaacagggcagctgtcatcagacagagagggcatctatcgcccctaagagcatcccccttgcaggcagcgattcatgagtactcaaacaggagagtgttctcatcctccagcagagtgaccagcagtccagttgggcctggaactgaggaatttcataagatgcaggatgttatcggtaacagaagcaaaaattcagaaagtttgaacaggtaggtcaccctgctctctgggctcattgtgaagtgcatctgaccccttctgctgcaagcctccctgttagcaatcttgtgctcttgcctctcccaagactttgagcacagggccctgtttacgccgttgttgtctgtaccctggggcactgttcaagacggcaacacgataaacgt

SEQ ID NO: 585383 - DNA, 624 bp, Homo sapiens
taatacatatctaacactccagggtcttcatgtgttaatgattttctcatactttgtgttaggtgctatagaggttactatgccgggacaatttgattagagtatagcaaaagttatgctaggggaggtaccgggttcaacgagaccaaatagaattttaatcagcaaattgatactatacacagaaatacttccaatattttctgttgctgatatgtttgtacacattgctcatcaatgcaaatacactacaacataaagtatttaaagttcttcaaattatttaggaatacattatgcctattttttaaaaagttgttttctaatttgcaattgagacaagtttttgcaacaagctctaaaagtaggaaaagcagagtgatgttggagmcacattttcttgatctgggttttgtggtgaaattaaatactttctcatttagctatcggagtagacttacatatggaaaagtatcatgcatatatgtgaaaaagcctattgtgggtaggattagatatgcataacaaattaagaggtttgtataatgaccattttgtcacgatggcttcagttgggggaaaaaaacctgtaaaacattagactaggccaaaattgaagtgctt

SEQ ID NO: 585384 - DNA, 624 bp, Homo sapiens
taatacatatctaacactccagggtcttcatgtgttaatgattttctcatactttgtgttaggtgctatagaggttactatgccgggacaatttgattagagtatagcaaaagttatgctaggggaggtaccgggttcaacgagaccaaatagaattttaatcagcaaattgatactatacacagaaatacttccaatattttctgttgctgatatgtttgtacacattgctcatcaatgcaaatacactacaacataaagtatttaaagttcttcaaattatttaggaatacattatgcctattttttaaaaagttgttttctaatttgcaattgagacaagtttttgcaacaagctctaaaagtaggaaaagcagagtgatgttggagacacattttcttgatctgggttttgtggtgaaattaaatactttctcatttagctatckgagtagacttacatatggaaaagtatcatgcatatatgtgaaaaagcctattgtgggtaggattagatatgcataacaaattaagaggtttgtataatgaccattttgtcacgatggcttcagttgggggaaaaaaacctgtaaaacattagactaggccaaaattgaagtgctt

SEQ ID NO: 585385 - DNA, 642 bp, Homo sapiens
ttatttttgtttttaataaaaatacctaaaaaaatccactattaaatattatgctccctgtggtttttagtaagcaaattagaaaagcaactacttaagtataatgtacatatatatattatgtatatatacgcatatggagacatatatatggagatatatgtatatagtacatggatatgcatatatgtgtatatactcataaattcctgattaatattaccaaggacatttaccatatctatgtggaagaatatgattttcaccttgaaaatgttatcttttgaattacatcttatgtattaaattacttagaggatattttacytttcataatgcattttatatatacctgttatattaaagcatattattttgggatccattaacactttgaaaaaattaagattgagttttcattgaagttttagtgaaatgtttatataaaaccctctgtacctgatattttttatagctgagagtggaggagtaaacaaggttaatgtaattaccatttcaaatctttatgttaatataacccaattccatttcaatcaattatggtaattttatacaaaattctccattttttatttaaaaagtatacaaaatttttgaaaattttttttttacatctccact

SEQ ID NO: 585386 - DNA, 504 bp, Homo sapiens
tagcaagatggatggggagagagaagggggatggaataagaaggtggtcttcccctggagtcaggccatccagtggctgaactctcctctgactgcccctggccaaattccccttggcatctgtgtcattctgctgtcaatggcctgctggtgtctgccagtgtgttcttctcctttcgacgtccagccatttgggactgttcctctagggtcttggatttttatgggcayaggatggggagcatggcaagccaaaaggcaaattttgggcatgaaaacagaaatgcctgtccccatttaggtcaactggcacaggcccgagggtggagcccctgccatggacctcgcccttctctacccagtacttccctgcctccctcccatatcattacaaatacttaagtatacatatttttatgacaatatatggttttattccatctttctaaacacatagactttcacactttacttgtcccattaggtgtgcattcgtatttcatt

SEQ ID NO: 585387 - DNA, 565 bp, Homo sapiens
gcatggtactggtataaaaataggtacatagacgaatggaacagaatagagaacccagaaataagcccaaatacttacagccaactgatcttcaacaaagcaaacaaaaacaaggtgggaaaaggactcacttttcaacaaatggtgctgggataacwggctagccacatgtaggagagtgaaactggatccttatctctcaccttatacaaaaatgaactcaagatggattaaggactaaaatctaagacctgaaactacaaaaattctagaagataacactggaaaaacccttaagtcattggcttaggcaaagatttcatgaccaagtacccaaaagcaagtgcaataaaatgaagattagtagctgggatttaaagagcttttgcatggcaaaggaccaatcagagtaaacaggcaacccacagaatgggagaaaatgttcacaatgtgtacatctgacaaaggacaaatatccagaatctacaacaaactcaaatcagcaaggaaaaaataaatcacatctaaaagtgggctaaggacatgaatagacacttctcaaaag

SEQ ID NO: 585388 - DNA, 514 bp, Homo sapiens
taggttttctttcataggtttactgttgcttttgcttcacagatattaaaattccttctgtcatcttgactttagataacctaatgactgtgtgcctaggcaatgatctttttgcaatgaattttccggattttctttgagctttttgttatttggatgtctagatctctagcaagagcgrggaagttttccttaattattccctcaaatatgtttgccaaaattttagatttatcttcttccttgggaacaccaattattcttaggtttagttgttcaacatcatctcagacttcttggagactgttcatatttccttattcttttttctttgtctttgttgaactgggttaatttaaagaccttgtctttgagctctgcatttctttcttctacttgttcaattctatcgctgagacttcccagagcattttgcattccataagtgtgtctagtgtttcctgaatgtttgattgttttttctttaagctatctatttccttgaagatttctc

SEQ ID NO: 585389 - DNA, 514 bp, Homo sapiens
taggttttctttcataggtttactgttgcttttgcttcacagatattaaaattccttctgtcatcttgactttagataacctaatgactgtgtgcctaggcaatgatctttttgcaatgaattttccggattttctttgagctttttgttatttggatgtctagatctctagcaagagcgaggaagttttccttaattattccctcaaatatgtttgccaaaattttagatttatcttcttccttgggaacaccaattattcttaggtttagttgttsaacatcatctcagacttcttggagactgttcatatttccttattcttttttctttgtctttgttgaactgggttaatttaaagaccttgtctttgagctctgcatttctttcttctacttgttcaattctatcgctgagacttcccagagcattttgcattccataagtgtgtctagtgtttcctgaatgtttgattgttttttctttaagctatctatttccttgaagatttctc

SEQ ID NO: 585390 - DNA, 390 bp, Homo sapiens
tataatacacattcaataactgatccataaatattcaaaaatgcaattccccccactttaaatttcttccttcttccttctctctcaattttttttgacattactaccatctcttttgcttagattgagcatttatacaccatatgatggtgagtataaaatagctaaattgaaacctctgggaccctgagagcaatggcatggaattcttgttttatgcttaatgagggatgctttctaatttagattctacttarcagtgactctttttgtcaagaaataaggaaggaaacatcccatcatcacaaggcataaaacgaaggtgcaaaatccgaaagacagactggactgggacatatagctaggacagagagagagagcgagagagag

SEQ ID NO: 585391 - DNA, 564 bp, Homo sapiens
tatttattgattgattgagacaggctcttgctctgtcactcatgctggaatgaagtggcatgatcacagctcactgcagcctccaccttccaggctcaggcaatcctcccacctcagcctcctaagtagctgggaccacaggtgtacaccatcatgtccagctattttttttatgttttgcagagatgaggtctcactatgttgcccrggctggtcttgaactcctgggctcaagcagttctccctcctcagcctctcaaagtgttggaattacaggcgtgagccaccgcacctggcctaactgcactttcaacttaggatatttttaacttacaaagagtttatcaggaatgtaaccccattttaagtcaagcaggatctgtatgatgtgagctatatgtgtaatttaatattttctggtagcctaatttaaaatagtaaaaggaaacaggtaaaattaaatatattttatctaaccaaacacatctaaaatatgatagttcaacctaaaattaatgtaaaagtcactaatgatatatatatatatatatttttagatggagt

SEQ ID NO: 585392 - DNA, 467 bp, Homo sapiens
ataccattataacaagtcattaggaaaaagatatgaacaaatatatcacagaagaaaaaaaataaaatggtccatcaacatataaatgagtctctgtttcactagtagagagggaaatgcattccttagtgaacccaaaaaagtttattttcctttcttttttttttttttttttttgagtcagactctcactctattacccaggctggagtgcggtggcatgatctcggctcactgcaaactctgcctccccagttcaaatgattcttctgccttctgcctcagcctcccaaatagctggaastacaggtgagtaccatcccgcccagctaattttttttttttttgtatttttagtagagacggggtttcaccatattggccaggctggtcttgaactcctgacctcctgatctgccggcctcggcctcccaaagtgctgggattacaggcgtgagccactgctc

SEQ ID NO: 585393 - DNA, 467 bp, Homo sapiens
ataccattataacaagtcattaggaaaaagatatgaacaaatatatcacagaagaaaaaaaataaaatggtccatcaacatataaatgagtctctgtttcactagtagagagggaaatgcattccttagtgaacccaaaaaagtttattttcctttcttttttttttttttttttttgagtcagactctcactctattacccaggctggagtgcggtggcatgatctcggctcactgcaaactctgcctccccagttcaaatgattcttctgccttctgcctcagcctcccaaatagctggaactacaggtgagtaccatcccgcccagctaattttttttttttttgkatttttagtagagacggggtttcaccatattggccaggctggtcttgaactcctgacctcctgatctgccggcctcggcctcccaaagtgctgggattacaggcgtgagccactgctc

SEQ ID NO: 585394 - DNA, 532 bp, Homo sapiens
agaaaaaaaaggagatgcaagaaacaattctcagatggttggaatagtggcacgaggagaaagcttattacctcttgccttcttagtcccattcacaacaatgtttaccacaggccaatctaacaccaaacaagaggttcctactaaaattactcaccaaggtagataaatcaagagtgaagaggattattccctttcaaagscgacaagtggcatcatcactgccctccctgatcccctcacaaatcctaccaacttggggtaagacaaaattcaattgtaatctaaaactatattatgcttttaggctttttgttcgttttgcttctctctctctgtgtatatgtgtgtgtgtgtaaaagaaagcttaaatgtatgtgtgtgtgtgtgtgtaaaagaaagcttaaatgtccactggtgggtaaatggttatattatacttcatttgtttacattaagaaagtgaggtatgtctttacgtgctgacaccattatatattgttaaagaaagaaatataagtggtagtatgac

SEQ ID NO: 585395 - DNA, 532 bp, Homo sapiens
agaaaaaaaaggagatgcaagaaacaattctcagatggttggaatagtggcacgaggagaaagcttattacctcttgccttcttagtcccattcacaacaatgtttaccacaggccaatctaacaccaaacaagaggttcctactaaaattactcaccaaggtagataaatcaagagtgaagaggattattccctttcaaagccsacaagtggcatcatcactgccctccctgatcccctcacaaatcctaccaacttggggtaagacaaaattcaattgtaatctaaaactatattatgcttttaggctttttgttcgttttgcttctctctctctgtgtatatgtgtgtgtgtgtaaaagaaagcttaaatgtatgtgtgtgtgtgtgtgtaaaagaaagcttaaatgtccactggtgggtaaatggttatattatacttcatttgtttacattaagaaagtgaggtatgtctttacgtgctgacaccattatatattgttaaagaaagaaatataagtggtagtatgac

SEQ ID NO: 585396 - DNA, 556 bp, Homo sapiens
aatgacaaaaggtgggaataaaaaaagactgtcttcttaagagttcatatacaaaaatacagagtttaagaaaatgagctgatgccataaccataaaaactagatgtttagggcataatactgttaagtacaacatctagaaaaataatcatatttacgcaaaatatagcccatgtcacgatctactgacataagcaatcagagaggatggacacagtgtttaatatgaggcaggcaaatatcaggaaagaaacactcccaattataaacagatatttgagacttccacagaacaaagcatataataggttytaagtagacattatgctgtctatgcattttccaagcattctgaggactataccaattagaattacctgatatacttatgaaggatatatattcctgggcccatctcagattttaggaatctgggggtagaactcaggaaacaaaatatatatatatatatatattttttttttttttttttgagacggaatcttgctctgtagcccaggctggagtgcagtggcgcaatctcagctcactgcaa

SEQ ID NO: 585397 - DNA, 575 bp, Homo sapiens
aaatataaaagaatgggcataattagcttccaatgaaactttactaaaatagatggtaggtaggatttgttctacagatcatagtttgctgaccctaaactactatgttgtcttgatcaacagaaatttccagactgtcattcgacacagttgtttattacaatagcagtccagtaaggtaaggttatattccctttgattgataaggttttattttcttttttcctaaaattactttatatctgttaggactcctttttctctgtacatacaaacatccagagatatcccagatataccttgggtgttgctgccaatgtttgcattttcaaaayctgtatcttattaaatacatctagaaacgatattttcatagataattttttgttgttgttttcctttgaagcatttatcctttcagttacaaacaatccaattatactcttttttgttattttaaaacgtacaattaagttcttattgactatagtcacctattgtgctatcaaagagtaggtcttactcattctttctacttgttgggacccagtaagcatactcacctccacgtcagc

SEQ ID NO: 585398 - DNA, 608 bp, Homo sapiens
attcatctttttaacttttattttaggttcaggagtgcatatgaaggtttgttatattggtaaacttgtgtcatggggggtttcttacatacattatttcgtcatccaggtacttggcctaatacccaatagttatttttttaatcatctccctcctgtcagcttccaccctcaagaagatcccagtgtctgttgttctcctctatgtgcccatgtgttctcataatttagctcccacttataagtgaaaacatgcaggatttggttttctgttcctgttttagtttgctatggataatggcctctaactccatccacgttgctgcaaagacatgcactcattctcttttatggttgaatactataatattacagagtgtatgtgtaccgcattttctatatccatcctaccatttatgggcatttaggatgattccatgtctttaccaaatagtgctgtgatgaacatacatgtgaatgtgtctttatgacagaatgattwatattcctttgggtatataccccgtaatgggattgctgggtcaaatggtagttctgatttcaggtctttgagaaatacccacactgctttctacaatggctgaact

SEQ ID NO: 585399 - DNA, 547 bp, Homo sapiens
tttccagcctggaccattattaatgagccacarcttagcataggtttatcaaatgtggaaagaatgaggatgaaatgaaatgagatgtggaactaagtaaagtaaaggcaggagatcacagtgggttggtgaggggcgtgtaataatttagacagaaaacgtatcattgccaagggaaaaattagaaaatttaggggcagtgtgtaaattttattgtctaatgattgtgtatcagtaatatcatttaatggatgggacaggaatactaagtgtcttcctatgtgggctgtcaaatggaacaaagagttgcctattcttttcctgacttttgaatggcctgctagatttccagaaaatgtttacctgagcctctagtctaattccattttatatataaatgcaaatttttttatatcactatacaatgacctttgcagtaaagtgatgaaagtgtaagtcatattaagctcaactgtttaacaagaattgttctcaatttcagaaatagatttcactgatggtgataatatcgtagtttttttttttt

SEQ ID NO: 585400 - DNA, 214 bp, Homo sapiens
gggttttactgctaaattctaccaaacatttaaagaagaactgataccaattcttctctaattcttaaaaagaaattcagsaggagagagcactgtcaaatctatcctgtgaggctcacattgccctggtccaaaagcagataaggacataacacacacacaaaaactacagccagtggtccctaatgaacatagatgcagaaatcctcaacaa

SEQ ID NO: 585401 - DNA, 456 bp, Homo sapiens
ccatgcaaaagctctttagtttaattaagtcccagctatttatctttatttttattgcatttgcttttgggttcttggtcatgaaatccttgcctaagccaatgtctagaagggtttttccagtgttatcttctagaattttatagtttcaggtctttgatttaagtccttgattcatcttgagttgattttgtataagatgagaaatgrgaatctggtttcactctcctacatgtgtctcgccaattatcctggcaccatttattgaaaaaggtgtcctttccccactttatgtctttgtttgctttgttgaagatcagttggctctaagtatttgggtttatttctgagttctgtattctgttccattggtctatgtacctacttttctactagtaccgtgctgttttggtgactatggccttatagtatagtttgaagtcaggtaatgtgatg

SEQ ID NO: 585402 - DNA, 420 bp, Homo sapiens
tatttatctttatttttattgcatttgcttttgggttcttggtcatgaaatccttgcctaagccaatgtctagaagggtttttccagtgttatcttctagaattttatagtttcaggtctttgatttaagtccttgattcatcttgagttgattttgtataagatgagaaatgagaatctggtttcactctccyacatgtgtctcgccaattatcctggcaccatttattgaaaaaggtgtcctttccccactttatgtctttgtttgctttgttgaagatcagttggctctaagtatttgggtttatttctgagttctgtattctgttccattggtctatgtacctacttttctactagtaccgtgctgttttggtgactatggccttatagtatagtttgaagtcaggtaatgtgatg

SEQ ID NO: 585403 - DNA, 500 bp, Homo sapiens
acttcctctttgaaccagcaattacttaaaagtatgcagtttcggccgggcacagtggctcacacctgtaatcccagcactttgggaggccaaggcgggcggatcacgaggtcaggagatcgagaccatcctgtgaaaagtgaaaccccgtctctactaaaaaaaaaaaaaaaaacacaaaaaattagccgggcackgtggcaggcgcccgtagtcccagctactcaggaggctgaggcggaagaatggcatgaacccggaaggcagagcttgcagtgagctgagatcgtgccactgcactccagcctggggaacagagtgggactccatctcaaaaaagaaaaaaaaaaaaaacacacacacacaaaaagtatgcagtttcatttctaagtatacggagatttcccttttatttttataagactgatttctcatgagcagataaacactgtataatttaattttaaaaaaatttgttgaggttttatgtcacagattat

SEQ ID NO: 585404 - DNA, 563 bp, Homo sapiens
taacatgcagaaggaattaatagaaacaatgataaattatgaaagcctatcttgataatcatacctcaaaattttatgagtatagccaaggctgtgcaaataactctgaacttagtatcaagacattagggtatcagtttaatttttactacactagagttgtgtagtccaacatgtatcttaaagtacttagacttcagttttctcatctctgtactgaatggggttggattagataatctctaatatccttttaatctccagagaaatattatatatatgtattttaaaatattactgtaacaattttctctttctttctctcttctctctttcttctctctttctttctccctccctccctgcctccctccctcccttccttccttccttcctttccttctttctttctttttgagacggagtcttgctctgttgcccgggctgaagtgcrgtagcctgatctcggctcactgcaacctctgcctctggggttcaagcgattctcctgcctcagcttcctgagtagctgggattacaggcgtgcaccaccatgcccagct

SEQ ID NO: 585405 - DNA, 541 bp, Homo sapiens
atccattttgattccattttggatgtggtgagggatagcaatcctgtttcatttatctttgtatggatatccagtttatcaaagcaccatttgttgaaggaactatccttttcccagtgtatgttcttggcttctttgtcaaagatgagttaactctaaatgtggagatttatatctgggttctctattctgtttaactcatctatgtatcttatttttatgccagtatcatgctgtttggttactatatccttgtagtataatttgaagttgggtaatgtgatgcctccagctttgttctttttgtttatgacagctatagctattcagtgtcttttttagtcccacatamattttagaataatttttccatttctctgaagaattccattggtattttgatagggattactttaaatctgtagatcactttgggtgaaatatttcatatacattattttaaaatgtctgaacattttaacaatattgattcttccaatccatgaacatgagatatctttccatttttagtgtgtcctcc

SEQ ID NO: 585406 - DNA, 533 bp, Homo sapiens
ttattctttctcctttttatgaatttgccatcatcaggaatatattttgtatgaaagtatttcctacaacctagtgcaaaatccaataggttttatgttttgtaattaggggttacttcccttctaatagtgatacttgcttatctatttctaataatgtactttttttcatagtaagcaaacagtatatttattatttatattcaaatccatgatttgtatgattttaaattttaagataaacataaattctgcacaaattcctgtcacttttataactatatataatataataaaattgcatacagaaattctctacatcagtgaaaaacaagcactttagtaatgtacacaacatttaggtttcaaatgtgccataaaaawgttgaaaaatgtacagcttatgcatatgtacaggagtgttcacagctacccatatttaatgtaattatctgctttacccatgtattcctgatttaaaattatttaaagaaaatagactttgcattgaattttttaatgttgaagtataa

SEQ ID NO: 585407 - DNA, 515 bp, Homo sapiens
gtagattaagaaacaactaatgaattgtaagcagaagagtaaacaacttctattaaataatatatgatttatactaattgtccaataaatatatgtaagaaataaatgggagatataagcatatttgtacttagcaacatccactcccatggttctatggggaaatacttgagagggcggttcaggtgacatgccgatgtagtccaagcataagaacatagcttggattatggttttagcaatagagaaatgtggcattatttttgaaatgaatacaaaataataaaaaataatccaaacttaaaagtgttttaaggaaaaagtaaataattattaattattatttttgaaaattagactgaggattgtgctctcactttatttctgtttggaaaatttctgttttgcacaccctggggtagagcrtagtaagtctaataattcttgacttagccctagatttcgaagatcttctaatttttcccctaaaatttgtatagctttacatgttacac

SEQ ID NO: 585408 - DNA, 629 bp, Homo sapiens
agcccaattgaaaaaaagatcaaagaatggtttagaattcataattcgtaaatattaactccaagtggttaataaacataaaaaagtcttaactcttattgatgatcaagaaattaaaaattaaaactacaatgctacccaaccatgtacttattgtattggctaaaactaaatagatgtagacctcattaargtctttcatactctgctggttggagagtgtggtacaacctcattagaaaaaaatttaaatatttatctaaatcttaaggtagacatatcctatgacacagcacaactaaatatttatcttagaaaacccattggataaatacacaaaaatattcattacaaatttttgactaattttctcaggtaggaaacaactaaaatttcattgtgtttattaaatgatggacaataaattgccataaattttataatgtaatattacacagcaacaatgataatgaaggagtgacaacagtaagatttgagatgaatacatttttaaagaaaacactaattttgagcaaaatagcaagattaaactcaatttagtttgattcatttatataaattaataaaagagatatattagttttctattgctgctgtagtaaattgcc

SEQ ID NO: 585409 - DNA, 632 bp, Homo sapiens
atgatgtatattttacatactctgagagtcctagaaaaatgatacayatctgtatgtggccatgtgactgtaaatactgattgaaacagagttattcaataattttttggatattttcctgatatgttaacattttataaagaaagacacattttctatatttatcaatatgtttaatataggtacaagtcctgaacctcaatttgtttattttctttatttaactcaaaattaaataaatttttgcggacctaaatctgtaagtcaataattgattcaattatttgggtactttaagacaaaatcaaaagttcacatggatagatctacattttttatataaaaaatattaaaatcatatatatgttcaaggtaatttttgaaatgttcggagggtaaaatgggctaatattattaaattagagagtacgtgttttttccttctattttcacttcttatttatacctgtcaccacagagtttccatcctacattaagcttaccagctacataactacacttcagcccaaagctccatcattctaattttgtgactttccctttccgtacttgggttactgtgtacaactgcaatctttgtaaataaatgggcacctactgctggatgttta

SEQ ID NO: 585410 - DNA, 562 bp, Homo sapiens
cacaatttcaaagttttcttatgcttttaaaatttcctagygcggactggctgggtgcggtggctcacatgcctgtaaccccagcattttgcaaggtggagaaaggcagattgcttgaccccaggagtttaacaccagcctggcctatatatataatgttataatatatataacatataatatataaaacatatatatcgtaggtacagcagctgtctaatatgacatatatctgttttatatatatatgttatatatatatataaaaataacaaatgttgttttaagtcatgccttctttgtatgtaacctggacaattaggtgtattaaccacttattagatttgatattatcactatattgcttagccacaataaatgtattctattattctagcttactgaacttaagattattctcattattatattcaacaatttctattttatgaaaagatgtatatatatatatatatatatatatttcaactatttgttgctcattcctatatatatgtgtgtgtgttttctgactattccagaagtgaggaaatgcaattta

SEQ ID NO: 585411 - DNA, 607 bp, Homo sapiens
tgtctccgggccatgtcagagacgttcatggcagcccctcccatcacaggtctggaggtccaggaggaaaaagtggttttgcaggctgggcccaggtcgctggtactgtgtgcagcctaggaacatgttgccctgtgtctgagccactccagccatggctgaaaggggccaacttacagctcgggccgtggcttcagagtgtggaagcctgaagccttgsgagctcccatgtggtgttgagcctgcaggtgcacaaaagtcagtaattgaggtttgggaacctccgcctagatttcagaagatgtatggaaatgcctgaatgcccaggcaaaagtttgctgcagggccagggccctcatggaatacctcctctagggcagttcagaaaggagatgtgggattggagcccccacatagaggacccactggccaatgcctagtggagctgtaagaagagggccaccattctctagaccccagaatggtagatccatcaacagcttgcaccatgcacctggaaaagctgcagccactcaatgccagcctgtgaaagtagctgggggtgtagctgtaccctgcaaagccacagggatagtgctgcccaaga

SEQ ID NO: 585412 - DNA, 607 bp, Homo sapiens
tgtctccgggccatgtcagagacgttcatggcagcccctcccatcacaggtctggaggtccaggaggaaaaagtggttttgcaggctgggcccaggtcgctggtactgtgtgcagcctaggaacatgttgccctgtgtctgagccactccagccatggctgaaaggggccaacttacagctcgggccgtggcttcagagtgtggaagcctgaagccttgcsagctcccatgtggtgttgagcctgcaggtgcacaaaagtcagtaattgaggtttgggaacctccgcctagatttcagaagatgtatggaaatgcctgaatgcccaggcaaaagtttgctgcagggccagggccctcatggaatacctcctctagggcagttcagaaaggagatgtgggattggagcccccacatagaggacccactggccaatgcctagtggagctgtaagaagagggccaccattctctagaccccagaatggtagatccatcaacagcttgcaccatgcacctggaaaagctgcagccactcaatgccagcctgtgaaagtagctgggggtgtagctgtaccctgcaaagccacagggatagtgctgcccaaga

SEQ ID NO: 585413 - DNA, 563 bp, Homo sapiens
atctgtgagccttgagactgtaaattaaaaaaaaaagtttgttattttcaagatataattgaggtacagtcattgggcatgactttccatgcaaaaagagtgaaattgacaaaaacaaagaggctacaggccccatgcaactccaaaaccgagcagtgcagtcattaaatcttaaagctccaaaaaaatcttccttgattccatgtctcacatccaggccaaactgacacaaggggtgggctcacaaggcttgggagctgtgcccctgtggctgctctcatggrttggcattgattacctatagctttttccaggcacactgtgaaaactgttggtggatttaccattctggggtctgaaagtcagtggccttcttctcacagctccattaggtagtgcctctgtgtgagggctccaaacccacatttccccttcacactgtcctagtactggttctccaaaagggctccatccctggagatgacttctgcctggacattcaggtgtttccacacatcctctgaaatctaggaagaggctcccaaacctcaattctgtgcacc

SEQ ID NO: 585414 - DNA, 563 bp, Homo sapiens
atctgtgagccttgagactgtaaattaaaaaaaaaagtttgttattttcaagatataattgaggtacagtcattgggcatgactttccatgcaaaaagagtgaaattgacaaaaacaaagaggctacaggccccatgcaactccaaaaccgagcagtgcagtcattaaatcttaaagctccaaaaaaatcttccttgattccatgtctcacatccaggccaaactgacacaaggggtgggctcacaaggcttgggagctgtgcccctgtggctgctctcatgggttggcattgattacctatagctttttccaggcacactgtgaaaactgttggtggatttaccattctggggtctgaaagtcagtggccttcttctcamagctccattaggtagtgcctctgtgtgagggctccaaacccacatttccccttcacactgtcctagtactggttctccaaaagggctccatccctggagatgacttctgcctggacattcaggtgtttccacacatcctctgaaatctaggaagaggctcccaaacctcaattctgtgcacc

SEQ ID NO: 585415 - DNA, 569 bp, Homo sapiens
gtttgttggccatttgtatatcttcttttaagaattgtctgtgtcttaatttgctttttgatggaattatttgttttttacttgctgatttgtttgagttgcttgtagattctgaatattggttctttgttggatgtatagattaacaagatattctcccactctgcaggtggtctgtttactctgctgataatttcattattgcacagaagctttttagtctaattaggacctgtctatttatctttgtttttggttgcattttctttttgtttcttggttataaagtcttggcctaagccaatgtctagaaggatttttccattgttatcttctagrattttttggtttaaggtcttagatttaagtctttgatccactttgaggtgatttttgcataaggtacagatgaggatccagttttattcttctacgtgtggcttgcaaatatcccagcacaatttgttgaatagggtgtcctttccccactttatgtttttgtttgctttgttgaagatcagatgactgaaagtatttggtcttatttctgcattctcttttctgttcca

SEQ ID NO: 585416 - DNA, 569 bp, Homo sapiens
gtttgttggccatttgtatatcttcttttaagaattgtctgtgtcttaatttgctttttgatggaattatttgttttttacttgctgatttgtttgagttgcttgtagattctgaatattggttctttgttggatgtatagattaacaagatattctcccactctgcaggtggtctgtttactctgctgataatttcattattgcacagaagctttttagtctaattaggacctgtctatttatctttgtttttggttgcattttctttttgtttcttggttataaagtcttggcctaagccaatgtctagaaggatttttccattgttatcttctaggattttttggtttaaggtcttagatttaagtctttgatccactttgaggtgwtttttgcataaggtacagatgaggatccagttttattcttctacgtgtggcttgcaaatatcccagcacaatttgttgaatagggtgtcctttccccactttatgtttttgtttgctttgttgaagatcagatgactgaaagtatttggtcttatttctgcattctcttttctgttcca

SEQ ID NO: 585417 - DNA, 568 bp, Homo sapiens
ggttaactagtattttgttaaaatttttgcatctatgttcatcagagatattggtctgtatttttcttgttttgtttttctctggtttttctcttgtttttctctggtttaatctagaagggttgtatatttccaggaatttatctatctcctctaggttttctagtttatgcacataaaggtgtttatggtaggcttgaatgctcttttgtatttctgtggtatcacttataatatctcctgttttatttctaattgagtttatttggatcttctctcttcttggttaatcttgctaatggtctatcaattttatttatcttttcaaaaaactaacttttcatttcatttatcttttgtatttttttgttttaattttatatatttctgctctgatcttggttatttcttttcttctgttgggtttcgttttggtttgttcttgtttctctagatccttgagatgtgrccttagattgtctatttttgctctgtcagactttttgatgtaggtatttaatgctataaactttttgcttagcaccacatttgctgtatcccagaggtt

SEQ ID NO: 585418 - DNA, 313 bp, Homo sapiens
aatttgctccagaatggttcacctatttttgctaagagaatgttttgatctagttttctaattacaaataagtcaatattacaccctcaccttatatttaatgttttgtgtttaaaactttttccttatccgtgaagatagataatccaattatgaatataatctttacaatatatctggaatgctcactttatttacatttggaagcaatgtcttttaaaatgacacaatcatctataaaataatctgaaaattaattggaawtaataatgcacttataaattttaattacatactactatcttattaaaaa

SEQ ID NO: 585419 - DNA, 313 bp, Homo sapiens
aatttgctccagaatggttcacctatttttgctaagagaatgttttgatctagttttctaattacaaataagtcaatattacaccctcaccttatatttaatgttttgtgtttaaaactttttccttatccgtgaagatagataatccaattatgaatataatctttacaatatatctggaatgctcactttatttacatttggaagcaatgtcttttaaaatgacacaatcatctataaaataatctgaaaattaattggaaatrataatgcacttataaattttaattacatactactatcttattaaaaa

SEQ ID NO: 585420 - DNA, 313 bp, Homo sapiens
aatttgctccagaatggttcacctatttttgctaagagaatgttttgatctagttttctaattacaaataagtcaatattacaccctcaccttatatttaatgttttgtgtttaaaactttttccttatccgtgaagatagataatccaattatgaatataatctttacaatatatctggaatgctcactttatttacatttggaagcaatgtcttttaaaatgacacaatcatctataaaataatctgaaaattaattggaaataataatgcacttawaaattttaattacatactactatcttattaaaaa

SEQ ID NO: 585421 - DNA, 579 bp, Homo sapiens
ccatcgcctgcacccgagggacgctgtgggccactgtcccttagcacagcctgtaatggagtgtggaaaggagaaaccaaaaattctctagaaagaaatggcatcaaaattgaggcttaaaggtctatctttaagctatctttgttgctatctttttcaaaaggaagagattggtagaaaagagaaaaaccttttttttatttctgttgtccttccactagtatttattatgggaaatctgtgtctactgcttcttcagaattcattacacctggtgagtcccaygggccaaggcccccatataatttctatgcctttgcttaattaagacactgtgatagactgggcagacatttcctggcaatttatgatcagctggaggagcttaagtcttaaagcaaagctgtgaaaatatgcagttatgtttatataaaaagtagtgaaattataacttttcatgtcttagctaaaagttgaaaaggcacattgttgtggttgacaagctgcatttatactttttgttcttttcctattcattaaaagccattcacaaataaacaggaagaaagagacacacac

SEQ ID NO: 585422 - DNA, 579 bp, Homo sapiens
ccatcgcctgcacccgagggacgctgtgggccactgtcccttagcacagcctgtaatggagtgtggaaaggagaaaccaaaaattctctagaaagaaatggcatcaaaattgaggcttaaaggtctatctttaagctatctttgttgctatctttttcaaaaggaagagattggtagaaaagagaaaaaccttttttttatttctgttgtccttccactagtatttattatgggaaatctgtgtctactgcttcttcagaattcattacacctggtgagtcccacgggccaaggcccccrtataatttctatgcctttgcttaattaagacactgtgatagactgggcagacatttcctggcaatttatgatcagctggaggagcttaagtcttaaagcaaagctgtgaaaatatgcagttatgtttatataaaaagtagtgaaattataacttttcatgtcttagctaaaagttgaaaaggcacattgttgtggttgacaagctgcatttatactttttgttcttttcctattcattaaaagccattcacaaataaacaggaagaaagagacacacac

SEQ ID NO: 585423 - DNA, 579 bp, Homo sapiens
ccatcgcctgcacccgagggacgctgtgggccactgtcccttagcacagcctgtaatggagtgtggaaaggagaaaccaaaaattctctagaaagaaatggcatcaaaattgaggcttaaaggtctatctttaagctatctttgttgctatctttttcaaaaggaagagattggtagaaaagagaaaaaccttttttttatttctgttgtccttccactagtatttattatgggaaatctgtgtctactgcttcttcagaattcattacacctggtgagtcccacgggccaaggcccccatataatttctatgcctttgcttaattaagacactgtgatagactgggcagacatttcctggcaatttatgatcagctggaggagcttaagtcttaaagcaaagctgtgaaaatatgcagttatgtttatataaaaagtagtgaaattataacttttcatgtcttagctaaaagttgaaaaggcacattgytgtggttgacaagctgcatttatactttttgttcttttcctattcattaaaagccattcacaaataaacaggaagaaagagacacacac

SEQ ID NO: 585424 - DNA, 540 bp, Homo sapiens
gatccagattttgaaggcaaataaacaaaaatttcagtcccaaacccacctcctcttcattgtgtggtctttagtaagtttctgaaaatgtttaagcttggctttgtcagctagaaagtggcaataatcatttaacccataagtaccaggtcctggctggatcagttggcatgctaaaaaaaggataactgaagagggtttaatcaagagttcattcagggtatrgacaaagctaaggaacccactagaagcagtgacgcacccagggactagaggtggtgaaggccattcctaccatcagtcctgtagggatgggggaggtgggagctcttatcagagcactggggaacctgcacatgggagatactacccagcaagagctgcttcagtgagggatgctgccaccgccactgccacatcactgccaggccaggtgggggtggaataaaccccactaaggctctttcctcttgctctccaatcccatggcaatgtgctccattggctgcacttgacataaagtcagaggacaaaggaaga

SEQ ID NO: 585425 - DNA, 495 bp, Homo sapiens
ttgccttgttgcccaggccggtatcgaactcctgagctctggcaatctgcccgcctcagtttcccgaagtgctaggattacaggcgtgagacactgcacctggccagagaacaaagaattatgaacacacaatacaatctaccacaatattcatggcctagaccaaccatggctcatcctctcggattgggagaggaatccattgtctgtgaacttgttgcaacaatacaaacataaacaatctatggtcattgtaaacaagaaataaggaattgtggttattgagtagacaacagttcaatgttgacttctcactatttaaacaaattagacttttttctaattgagaaaacacacaaacttgaagaaacaactccaayattgatgaaaatagcagtgatttatttattaactaaatattttaattcaacaatttagaaagagagtttttaatcttccacaaacaattctaccttattttaaaaaggctgcaat

SEQ ID NO: 585426 - DNA, 604 bp, Homo sapiens
aataaattcccaaactaaatttctcccctactaatttaatttggaataaaattagaaccaatcgttatgagcaaaatgttwtcaattaagacataattaattaaatgtgcaaatgcagaatacatttagatgggctatcagatgactgattatactggaaatctaattttacacttaaattgccagccacacacttcatcttgagctgttgatccatagcaagttaccgtaagttaaaccttacctctggaggaagcagcctcagtggacaaatttttcccgcagtaattctatgaccatgccatagtatctgtctttagagggtaatcagaggtatcttgcatgaaggagcttcattcttgccatcctccttgtttttcaaacagcatttttttttattttaaataagtaatgcatgtcttggcaaattgtgaaagaaaggccttttactcttttctacttactaacccttttctactcactctttaaaaggaagttgataatcaaagtattaatgtgtgaaaaggtactgagctttgaacaatttttgaattacttaatattgcattttaaactgtctaaattatagatacaaatgtctgaa

SEQ ID NO: 585427 - DNA, 497 bp, Homo sapiens
agctgactgtagaaagaggaatatttmgaaaaataggcaaagtgatgttacggtttaaaatcatcaagtgggaaatccaaaaccacggttctcaaccttagctactcatggaaaccacctgggaaatttttaaaaatactgatggatgggttccatgcccatagacttttaaaaaattcttccaaaggattctgacatcctaatcagggttgaaagctactgctccaaagagcttgacataatcaaatgaacatttatcaggtgttcacaaggtttaggaaggcccagcacaaagcaaaaccatagagacgttgagtactcttttgcttcagcattcagcatccaattccaactccatgcttttccttacttccaacttccatttttgccccgagcaacctgtgcaggaaaccatcagtttccctgctccactggacatctaaagactatggtggtgatagaaaatgagagtcatcaaaaaggtccaagtttagtga

SEQ ID NO: 585428 - DNA, 579 bp, Homo sapiens
aggaaacaaaagtaactttgacttctgttcccagtaagtgcttcattttcatctgagaccttctaagtcgggctttcactgaccattttcctgtgagccttctgatcacaagtgtttaacaattctttacaaagatccaaactttcattcatcttcttgtctttgaagccctccaaactctcccaacctctgtccgctactcccttctgaacctgcttctacattatcactatytttgccacagcctggcaatgtggtaaaggaagacaagtccattttcagggggaaaattcatgaagccttcacatacttgaatgaaaagaagctgagtgctgatttgcaagacattgacatttaatagttccactttgctccactaattttctctatgatcataaagaaaagaggtttaattggctcatgattctgcaggccataaggaaacataatggcttctgaatctggaaggactcaggaagcctcccaatcatatcagaatgtccaggggcaatgaggtgattcatgtggcaggcgtaggcacaagacagagagacgaaagggggccacaccctattatac

SEQ ID NO: 585429 - DNA, 579 bp, Homo sapiens
aggaaacaaaagtaactttgacttctgttcccagtaagtgcttcattttcatctgagaccttctaagtcgggctttcactgaccattttcctgtgagccttctgatcacaagtgtttaacaattctttacaaagatccaaactttcattcatcttcttgtctttgaagccctccaaactctcccaacctctgtccgctactcccttctgaacctgcttctacattatcactatttttgccacagcctggcaatgtggtaaaggaagacaagtccattttcagggggaaaattcatgaagccttcacatacttgaatgaaaagaagctgagtgctgatttgcaagacattgacatttaatagttccactttgctccactaattttctctatgatcataaagaaaagaggtttaattggctcatgattctgcaggccataaggaaacataatggcttctgaatctggraggactcaggaagcctcccaatcatatcagaatgtccaggggcaatgaggtgattcatgtggcaggcgtaggcacaagacagagagacgaaagggggccacaccctattatac

SEQ ID NO: 585430 - DNA, 579 bp, Homo sapiens
aggaaacaaaagtaactttgacttctgttcccagtaagtgcttcattttcatctgagaccttctaagtcgggctttcactgaccattttcctgtgagccttctgatcacaagtgtttaacaattctttacaaagatccaaactttcattcatcttcttgtctttgaagccctccaaactctcccaacctctgtccgctactcccttctgaacctgcttctacattatcactatttttgccacagcctggcaatgtggtaaaggaagacaagtccattttcagggggaaaattcatgaagccttcacatacttgaatgaaaagaagctgagtgctgatttgcaagacattgacatttaatagttccactttgctccactaattttctctatgatcataaagaaaagaggtttaattggctcatgattctgcaggccataaggaaacataatggcttctgaatctggaaggactcaggaagcctcccaatcatatcagaatgtccaggggcaatgaggtgattcatgtggcaggcgtaggcacaagacagagagacraaagggggccacaccctattatac

SEQ ID NO: 585431 - DNA, 450 bp, Homo sapiens
agacagggctccactctcaagggaaactgctgacaatgccaaaagtcagaatcttttcactgtctctttacatcccagctgtcagacaagctaactttaaattttaagttaggcaagattgtgytttttatagaatagttcaacactgagggcaaatttcattctaatgtgacaaaagcagcgttgggaaaagaattggaaatgtgtgcttttgaatgtgacctgagatatagcttccaaagctggccattgctctcctggcccagagcctgaccccatctcatgacaggagaagctgaatctcacgctctgtaagaacctggcttactccttcattaatgtgagtccctgttctcagaagtggatcactgtagtttgaaggatcaacattgatcaaacatgtccatttctgccagttttacccctctctatgctgttactaaacaagag

SEQ ID NO: 585432 - DNA, 450 bp, Homo sapiens
agacagggctccactctcaagggaaactgctgacaatgccaaaagtcagaatcttttcactgtctctttacatcccagctgtcagacaagctaactttaaattttaagttaggcaagattgtgctttttatagaatakttcaacactgagggcaaatttcattctaatgtgacaaaagcagcgttgggaaaagaattggaaatgtgtgcttttgaatgtgacctgagatatagcttccaaagctggccattgctctcctggcccagagcctgaccccatctcatgacaggagaagctgaatctcacgctctgtaagaacctggcttactccttcattaatgtgagtccctgttctcagaagtggatcactgtagtttgaaggatcaacattgatcaaacatgtccatttctgccagttttacccctctctatgctgttactaaacaagag

SEQ ID NO: 585433 - DNA, 450 bp, Homo sapiens
agacagggctccactctcaagggaaactgctgacaatgccaaaagtcagaatcttttcactgtctctttacatcccagctgtcagacaagctaactttaaattttaagttaggcaagattgtgctttttatagaatagttcaacactgagggcaaatttcattctaatgtgacaaaagcagcgttgggaaaagaattggaaatgtgtgcttttgaatgtgacctgagatatagcttccaaagctggccattgctctcctggcccagagcctgaccccatctcatgacaggagaagctgaatctcacgctctgtaagaacstggcttactccttcattaatgtgagtccctgttctcagaagtggatcactgtagtttgaaggatcaacattgatcaaacatgtccatttctgccagttttacccctctctatgctgttactaaacaagag

SEQ ID NO: 585434 - DNA, 424 bp, Homo sapiens
tcagtcatcaagacagaatgagtrtattcatatatacacataaaaacaatgctccaaaatatatgaagtaaaactggtagaattgaagggtgaaatagataatacaataaataatagttggagactgttataccccacttacaataatagatagaacaactaagcagaagatcaaaaaggaaagatctgaacagcactataaaccaaactgggcacaacagacaatctacaacagacactctagacgtaatagcataatagaacactctacccaacaacagcataatacacattcttcttgaaacatatggcattctacagtattgtggttaggtcatgaaacaagtctcaacaaatttaaaacaattaaaatcatgtagagtatattcttctaccccagtggtagaagaatacttttaaatga

SEQ ID NO: 585435 - DNA, 554 bp, Homo sapiens
acataccatcgccaatcctctgcatgtgtgtcacaattttagttagattaatagtgtttgcatgattgtggttgtataaataatatttattgttaagctaagtaatctaccataattcagtttcctttcttgtatgttttctgcttttcctggaattaataattgccttttaaatttatttactgtgtactaaactatcattaaattctttattcagttgcttagttttctatgtgccaccactacattttaattctttgggataagctgtaaaacttcaaccaakggggtcagtcacatccagcaatctctttgtcttttgtcctggagatgactctcttagaggaaaccttcatccttctcctacctggattgatggagctgaaatcccatgggatttctcatcattgtaatcattggaatcccttaacttctctccttctattagatcctcattcctgtgattcattccattgttttggtggaacacatcctccagtaactttctgagaaaaagttcctgaaatgtaaatgttttgaaacttttcatgtct

SEQ ID NO: 585436 - DNA, 507 bp, Homo sapiens
tcttcttctaagttttccagaaaatggagttctgtcacttaattgaatctctgaacctcctcaaggcctcctgcctgcattgtcttaccatctgctattagktatttctttacctgtctttcccatggctcttagtctgctggttctgatcatccctattctggcagagctttttatgacggacatgagattaacatacattgattacaagtgtttgattcaaccagaaactttcagttaaataattgtattataattctacttggtgagatctctaaggatgctatcttgaaatgaagtatagtctacctaagaaaatattgagatctattatgtaatagaaacagttgtaaaactctaatgttagatgttattttgttaaagatgtaaataactctaatattagatgttatataaagaacagagagcataaaatcatagaaaatgagaaaactttggtcttagggaagtggatatccttcagaaatatggcataaaaggacaaag

SEQ ID NO: 585437 - DNA, 520 bp, Homo sapiens
tttaccatctacagtcaaagtaatggcaggctggtttctcttggaagctctggtaggaaaatccatttccttgcctttcttttagctttttgtggctgcctgtttactttggcttgtggcctcttcctccatcgccaaaacacaacattccatttgctactttcatcatcatatcaccttctcttttatggtaataaagccctctgcttccctcttataaggatacttctgtttacatttaagacccacttgatgatctagataatctccycatcttgaaatgtgtgattcaatcacttctgagaagttctgtcttccataaaaggtataattcatagattccagaaattacaatgcaaatatctttagaaccattatttagcctaccacaattacttgtataaaatatttttctttaatcaagaagagacattgactactataaaatagaaagagatgtccttctctaatgagttgatagtactctttgtctcttaaatattttaaatataaaatcatg

SEQ ID NO: 585438 - DNA, 539 bp, Homo sapiens
attactttatatactgcaaacttatccctttacttttataatttatttgtagttaatctttggggcacttttataccatgactgactttttttttgtttcttttaaacacaatttgttcccttttactctgaaagaaaaaataaccctcatgaactctccactattctaaaatttcagtttaacctccaagtagagcatgcattaaaagactaaatagctaaaatcaaattattatttagcattctgaatttattttatgttagagaaaaattaagccatgagtgtcacaatgataaaagactttccacagaattcatataattgagtaaaaatgaacttcaataatatattttaaatgctattttttaaagtttcytctcatgaaggaaccatttaaaataaggattaattgatatatgtagctattcaagaaacataaaatcttaaaaaaaggcacctgctgcgagacgtggtggtggacttttttattcccagctgcttggaaggctgaggtaggatgattgcttgagttcacgag

SEQ ID NO: 585439 - DNA, 601 bp, Homo sapiens
atccgtttatttctttaaatcactaagagtgattgcatagaaaataaactttctccagccaattccaaatatcaagttttggcaataaaatgtttttcagtttattttcatgtgaaaatgtcagtttggaagctctccttaagctgctgatttcactttttttcttttagcaagttccaaatgcacataaggattgggtctgtgccctgggagtggtgccagaccacccagttttgctcagtggctgcagagggggcattttgaaagtctggaacatggatacttttatgccagtgggagagatgaagggtcatgatagtcctatcaatgccatatgtgttaattccacccacatttttactgcagctgagtaagttttcttatatgatttttctctatattggttgcttctgttcagatttaataaatatgttgtaaatatctagaaacgttgaatatacaaaatccttcttataatcattctaatgtctgttttaagatgtcttattcatattttctsatgtacatgtgggcactgaatttaggcaccccaggttacatgacaatactgttactcctgtatagcactctgcttatttta

SEQ ID NO: 585440 - DNA, 600 bp, Homo sapiens
gggtggggggtgggggagggatagcattaggagaaatacctaatgtagttgatggtttgatgggtgcagcaaaccaccatggcaggtgtatacctttgtaacaaacctgcacgttctgcacatttaccccagaacttaaagtgtaattaaaataaaataaaataacaaaaaagtaactaatgtcatgacttccgttatcttcctagtgttttacactaatatgtgttttataagcctttctccaaattcatataagtctaggttatttttactgaagcttcagtcatagtatgacgctaagtatttgctcatggttttaattactatggagatctcaaagacaaaaaycattttatgagcaaaggctacccttttacctcttgctcatcgtataaaaatcatgacattcacatgggtcaccagcagtaaatggcctacagaaattatggaaggaaaactccatgtaactgaaaaatcatctcaaatgcatattggtctcatcatgatttctgtcatcttcacacataaaggccagcatgctttcgttttctcaagcatgtgtgtaattatggtttggctcgtgtcttcacagagtagtga

SEQ ID NO: 585441 - DNA, 526 bp, Homo sapiens
caacatagcaagacccatcgccaatatattttaaaataataataataaataaaaataaaaccccagaagcattctgggcttagattgctttacagttatctttaaagttttattccactttaaagcaattgaaaccacagatcataagatgatggaatctgagtgtggttagataaggaggcacctttgaactccaccagaggactcatgctcaagactgggccctggctcctagcacatgtggctgcccatgtttcacatcaaatataaaatattagggtgtttacacagcatttctatgattctctattttaactgatatgttctattgatctcttgagaagccacgaaagattttcaagcaaggaagtgacatatttaagacaattaaggtataatttatttctawttattaaacattttaggccatgtgcagtggtttatatctgtaatcccagcactttgggaggtcgaggcaagattgtttgaggccaggtgttggagatcagcctggacaacagcatga

SEQ ID NO: 585442 - DNA, 339 bp, Homo sapiens
gtatatcttcttttgagaattgtctattcatgtccttagcccactttttgatggcatcgttttttttcttgctaatttgtttgaattccttgtaggttctggatattgrtcctttgttggatgcgtagattgtgaagattttctcccactctgtcggttgtctgtgtactctgctgactgttccttttgctgtgcagaagctctttagtttaattaagtcccacctatttaccttttgtttttgttgcatttgcttttgggttcttggtcatgaagtctttgcctaagccattgtctagaagggtatttccgatgtcgtcttttagaatttttatagtc

SEQ ID NO: 585443 - DNA, 574 bp, Homo sapiens
tggacaagacagacaatacaagtattgcaatcatgtggagcaaacaggaccttcatattgctgatgggaaagtaaataggtacagccactttataaagcagtctggctgttttctaaagctggatatgtgcattccctataactcaacaagatcctagctgggcatgtgccgcctaacaaaaataccttcatgtgttcaccaaaatacaggtaacaaaatgttcttaaaagtactatttgtagtggccaggcatggtggccacgcctgtaatcccagcactttaggaggccgaggcgggcrgatcatgaggtcaggagatcgagactatcctggctaacgcggtgaaaaccccgtcctctactaaaaatacaaaaaaattagccgggcatggtgatgggcgcctgtagtcccagctgcttgggaggctgagacaggagaagggcatgaacccaggaggcggagcttgcagtgagccaagatcccgccactgcaccccagcctgggcaacagagcgagactctgtctcaaaaaacaaaacaaaaaacaaacaaacaaaaaaacccaaacaaacaa

SEQ ID NO: 585444 - DNA, 574 bp, Homo sapiens
tggacaagacagacaatacaagtattgcaatcatgtggagcaaacaggaccttcatattgctgatgggaaagtaaataggtacagccactttataaagcagtctggctgttttctaaagctggatatgtgcattccctataactcaacaagatcctagctgggcatgtgccgcctaacaaaaataccttcatgtgttcaccaaaatacaggtaacaaaatgttcttaaaagtactatttgtagtggccaggcatggtggccacgcctgtaatcccagcactttaggaggccgaggcgggcagatcatgaggtcaggagatcgagactatcctggctaacgcggtgaaaaccccgtcctctactaaaaatacaaaaaaattagccgggcatggtgatgggcgcctgtagtcccagctgcttgggaggctgagacaggagaagggcatgaacccrggaggcggagcttgcagtgagccaagatcccgccactgcaccccagcctgggcaacagagcgagactctgtctcaaaaaacaaaacaaaaaacaaacaaacaaaaaaacccaaacaaacaa

SEQ ID NO: 585445 - DNA, 514 bp, Homo sapiens
ccccagtgctccaggagagcaggaacttttgtctgttttgtttactgctgcagcctaaggccatagaagaatgtgtggcaaatagtaggtgttcaataaatattgattattttgatggtaaaataaatcagcagaactgtggaggaagcacaggcaatgagtatatccatagtaggcaacagacatgatagacagtgggaagagctgcagctgagggatgatagaagctggaaggggtatgaatgatgtgtaggacaatcctcccagaaaggaaagagccgagattctgtcacttgacaagtggggctacggattcagcagacttagatacaaatgtttaggatgaccttatttaagatctactgatctgtggracccaggagatgttcaggttacaggtgaaaatatcccgatgcatctcaaaaatgtcagaggtcattgcctcctataaatggactttcaaagaacatgttcctgatgctaccttgagacatcaaaaaagatttatcatgct

SEQ ID NO: 585446 - DNA, 518 bp, Homo sapiens
agactgtttttggaaggatttaataaggcaataactacagtaagctaagaattattgagcagttattacatactaggaatttttctatgtactttttatgtaatgactcagttcatcctcacaataaccctatgaggtcagattattatccccatttatagacaaagtccaaggggagtaagcaatttgtcccaaatcatacaaccagtaattgctggaactgagacttgaatccagaccacctggctccagagcccacatgtttatcatacacatcaggtactcagttaattgaagctgtaattatccacagcagaaaaaatcacaaatttactcacacaacatgacttagacaaggaaatgctagtgtagtaaaaggaacatagaacaaaataagttagatttgagtgttagtttktatatgtgaacccaaaatatctgagacaggtctcaaccaacttagaaagtttattttgccaaggataaggatgcatccacgacacagcctcagaaggtct

SEQ ID NO: 585447 - DNA, 591 bp, Homo sapiens
ggactacatattcttttattcctttctacagtttatgagagagagattggttaatctaaaagaatggctttgtaatagtggaatttcaagtaactgttttggtcacataggtgagctatttaaggccaaaggaattttctcaatgtgcttgaaatcacaaatcataccatgtaggtcacccctaaggcaggcgttgcaaactggcctaaacagtactgtttgcracacagtgcttcaaaaaaaacaatggatataaatcactagaggttagaggctcaaatgtctcagtaacttatatcccttcaacttggccaccatcagagacaggtgaatttgccatttttgtagattagcacttttctagaactttggggaaagtttcagttgcttaaatgagccacaaaggattgaacaccatgtgctgtttttattcatttagttctgtactttaagggaaaagaccttagaatttactgtcaaagggaaaaataacaaacccttttggatcttaacctctagtcagttttaacccacccaaaaactccctaaagtacttagatatgttgcatagcactgatttatagggcaaca

SEQ ID NO: 585448 - DNA, 503 bp, Homo sapiens
gtctttagatgtcaactttatcagggtcttcctcagctttgtagctaaagtcatgctatttttggagtgccccagacaatgagtgagcaaggtgatgacagctgaggtcatgcttttctggggacgaccttcagcctatgactgaataaagtagcgagacaatgtattggcaatgtgggactcctctaatgagaaaccttcgaacaagagttccttgctaggctgctaaaatcttatgatgtcagaaaagggtctgatggccctccctatccataatgcttcctccctkctttcacaaatttaggtgttacttcccaataaggcttttgcactcattctacctcagaatatatgctcccaggtaacttgtcctgcaaccctactacatgctagctacattctggacacaggattcatcaggggcaaaggaacaaaaaagcaatgtatcacacttaaattctattcaagagagctagggtataagcaaatatgtaaccaagaaa

SEQ ID NO: 585449 - DNA, 603 bp, Homo sapiens
actctgtcacgcaggctggagtgcagtggcctgatctcagctcactgtaacctctgcctccccggttcaagagattctcctgcctcagcctcccgtatagctgggattacargcctgcactaccccacccaactaatttttgtatttttagcagagacagggtttcacaatgttggccaggctggtctcgaattcctgacctcaagtgatctgccagtctcagcctcccggagtgctgggattacaggcgtgagccaccatgctcggccctgttcttgttagagtgttttgtcctcctaaagagtgactttgttaactttgatttgggcttcctgttgagacagttacccccatcagtttaaggcattttataacattctacacattcttgcttccgggacattgaatgatttttccttttggaaactgaatggctcgaatagtaccgtatcttataatagcatcaacctctgcactcccctcagagcggtctcccaatttaaagaaaaaatcatggaaacgtctttgttcatttgtgacaaaaattgatgttttcctggtagtcagaaacagggcatgaattttttgttctaaatatccaat

SEQ ID NO: 585450 - DNA, 565 bp, Homo sapiens
actaccacctaccacactggataacacagatctagagcctgaagaatgttgctgtctcggrtaatatcagagtggctataaaatgcaaactgaggattatagttatcctcactatgatccttaccatgccactcataaagtcctccagtacttagatgccaactcacggcaaaaaaaagcttggcattcttaatacaagtgagattaagttatctccacttcacagaatagaggcctaatgtacaaattaagtttcattatgaataaattagaaatttgtatttcttatactcttcagtttgtggtctgagttctctacctgttgtatttacctcagagtggtttagattattaaataggtaactgtatacaacaaatggtataatttatgtgtcttagaaagaactcaatagtctaccatttcttaaattgattcaaatccagagatggccaaggccatcctatcactcttaggaccaataaactttcacagctggatatctcaagatttcaggatgtgggcacagtggtcattagatgagaagatattaaattgactaactta

SEQ ID NO: 585451 - DNA, 517 bp, Homo sapiens
ttatgggagtataagtaatcacatttctaaaggaagcctccataagctttctatggaaaaaactcttacgtctctaaagccttaaaatgatacttggaaacaatagtaccttcaggaaaggccctgaacacagagcgaggggtaaaatggctggccatgagaagtatgaagggagagaagcccctctctcatgttcttacagactagaaacgctcaccagggcagtggaaaaagaggtcccctatgataaatgaggttttattttgaaatttactggccaatcaggatcagccaggcaggagaatttacagggccaaacattcagttcaggcttttcatatctagaaggaatttttatatcaatatgatgatatgaactggaaagttacacaaattacactgttttgaaaggacaaatattcactctgatgcagaagcattgtagaaagaatgctgaggtaaccaaatatacagggcaaagatgggragggttggttacctaaattgattctaactc

SEQ ID NO: 585452 - DNA, 225 bp, Homo sapiens
atgggcacagtaccaaaaacatttttgaagtctctggtgaagctttttctggcatcactacacaacaacagcacatcattttcattaacttgaacaaacaaaaccaagcagagattaaaaagcagcacagatgtgatatgactctcttctcctrtcctggactggacagccttgtggagtcacttcccttaacaaggcaggaaatgttctttcagcctgcccccg

SEQ ID NO: 585453 - DNA, 575 bp, Homo sapiens
aggggagccaggattgaacccagatttgttctcttcaaattcccttcacttgcccattgtgatgggtatactaagaatgaagtaaatgatttatacaactgttggacttttgtggcttgcacactttttcttttcctgatgtatgtgaatcaatagaaacacatgtagagaatagaaggaatatagagaggggcttgaaataatatccacatgggctgaaggaagtgaggctgttcagatggaaaaataaaaccctgtgaaggaatataacatctttctgccttcaaggatgtcatgtgaaagaggaattttacttgcctgttaccgtaaccacagagctaagagagggtcattgttaaaaggaagcaagtttgggttccatatgaggaaggatttttataatagaattgttgtagaataaactaattcagaaagaggagaatccaatttgtagagatgttcaaacatgacagtattayggaggggcctcagcaggatggggaagtgaaagagagattgtgactgtagctctgcctctgaaggctaaagagcaaaagaaattggcagtcttacac

SEQ ID NO: 585454 - DNA, 500 bp, Homo sapiens
ttcagcttcagaggatgagaaaaccttcattaggagatgtaccttaaagaacaaattaagttaaacaaatgtgaaagaaatcatactttattatgttgaatagtaagatttttttgttactattgtgaattaatgccatccaaatattgagtgatgtaattcaatttagtaaaacaaaaaagtctaaattatcaacttctttccttataaaaatgaaatatgctataacttgcatttttccatggcagtgaccctgatgatcagaaakacaggttaaaacataaaaacatttaaaatcatctaatctaaattataaaaaagaaatccctttcttcagaaaaaaataattttttaaggaagcactcaaaaacaaatctctgctagtagatatacagcatacacgtctcttactatctcccatgcagactgcataaaaaggcttgctaactacttttaagaaaacaacattcagatgtctggaaagtatctgaaatgcatga

SEQ ID NO: 585455 - DNA, 500 bp, Homo sapiens
ttcagcttcagaggatgagaaaaccttcattaggagatgtaccttaaagaacaaattaagttaaacaaatgtgaaagaaatcatactttattatgttgaatagtaagatttttttgttactattgtgaattaatgccatccaaatattgagtgatgtaattcaatttagtaaaacaaaaaagtctaaattatcaacttctttccttataaaaatgaaatatgctataacttgcatttttccatggcagtgaccctgatgatcagaaatacaggttaaaacataaaaacatttaaaatcatctaatctaaattataaaaaagaaatccctttcttcagaaaaaaataattttttaaggaagcastcaaaaacaaatctctgctagtagatatacagcatacacgtctcttactatctcccatgcagactgcataaaaaggcttgctaactacttttaagaaaacaacattcagatgtctggaaagtatctgaaatgcatga

SEQ ID NO: 585456 - DNA, 641 bp, Homo sapiens
acattcaatattcattgccaaatgtctgagctcacctctctcgaagcaatrttcaattatcaaatgaaaataatttaccaagcaacctcacaaaacataaactctaggtagcattaaggtttttcaaagtgattattccttactggtagtgatcctaagatattaaaactcatagatcacatgatctgagattttctaattaaaagctgtagctgtaaacctttaattcaaagtcagatactaccttcagctctcaaaagaattatacaatcacttaaatttctggaatgaaagagaaaatgaagggaacaataaaagtaactttgaaatgcactgggaaacgattgtaaggaaccgaatggaggcaaagacagagagagagagagggctgtttatctaaccttcccttcttgagtaggttttctctgatatctctagagaaaacttggatgtgtaacaatgaaatacaaaacacaagatattgtcttcatataattacttgtaatgattccaggatggcataatttgagaacttgctaaataggacaacaaagtgatctgcttttccaaaattttgccccttaacttaaatattatttcatggtgaagaccaataaaactgaaaattggaattgccagat

SEQ ID NO: 585457 - DNA, 627 bp, Homo sapiens
tattgcacaataagaggcagttttgagaggctaaaatatgtagatacatttactttcacaactttttagacttaagtcacattatatttattcgatggcaataggaaaatrgtttgttgatcccatgtagaacatacagagatgtgtgtttatacagatagtatttttgataaattgatgagctttattttatttttgtcgggctataacatatttttaacctgtcctcaaaatataaataataacaagtaaaatgaactataataatctttttcacaatggctaaaaaaaattgaattatttttaagattcataatatatgcttaaaatttggaagaagatacatacttcgggattagaattggctagatataaaatagttggcagatatctagacaattatcactagcatagattggtttattttgtaattgggtacaatacatgaatattggcaaattgggtaaataaggtctgccacagatacaaatttaaacatatttgtaccaatttaatagtttgttggcctctttataggtacttttgcaaggccaaattctttgtcaaattatttatataaaaatgaataatttttataaatgactaagatatttgaatatttgaaga

SEQ ID NO: 585458 - DNA, 630 bp, Homo sapiens
tattgcacaataagaggcagttttgagaggctaaaatatgtagatacatttactttcacaactttttagacttaagtcacattatatttattcgatggcaataggaaaatagtttgttgatcccatgtaraacatacagagatgtgtgtttatacagatagtatttttgataaattgatgagctttattttatttttgtcgggctataacatatttttaacctgtcctcaaaatataaataataacaagtaaaatgaactataataatctttttcacaatggctaaaaaaaattgaattatttttaagattcataatatatgcttaaaatttggaagaagatacatacttcgggattagaattggctagatataaaatagttggcagatatctagacaattatcactagcatagattggtttattttgtaattgggtacaatacatgaatattggcaaattgggtaaataaggtctgccacagatacaaatttaaacatatttgtaccaatttaatagtttgttggcctctttataggtacttttgcaaggccaaattctttgtcaaattatttatataaaaatgaataatttttataaatgactaagatatttgaatatttgaagagca

SEQ ID NO: 585459 - DNA, 569 bp, Homo sapiens
ggcaatgatatatgttcatcttcattacaaattcttatatctttagtagacctgttttcaggcaaaacttcatgagagaatagtaacaaagataaaaaaagcagtgttctcaaattatctctaacccacctgrtaactttgagttaaatggcctcaacattttgtgatgcttttccctcttataaagtaaggagtatagatgaggtgaggtatccaatttcatttagcttcaatttcctgtaatttgacggctgtcaagccatgctttgctttgttctgtttgtgagtcagagcaactttaaggcagtatattaactaggagaactatttctttacttttaaacttcaaaattatgatgacataagtattttaaagagcatttagaaagtagacaaatgaaaaatttttaacattttggaatgcttcttttatttctttttgaaacctaggtttttggtggtagtggtgatatttatttttgccaaactaaccattctgtgtaattttgtagcattttgggttgatgaccactgtaagtctagtattcccatacgtgttaaaatttatc

SEQ ID NO: 585460 - DNA, 541 bp, Homo sapiens
ccgttaacatttcttgcaaggtaggtctaccagtaacaatgccttcaggtttyatttgtctgagaagaactttagttcttattacttttgaaggataattttacagggtgcagaaatctaggctggtggtttttctctcaacctcactcttcttgcttgcatggtttctaagaaaattgaagaagtaattcttatttttgctcctttatatgtaaggtattttgcgctctggcttctttcaagacgtttttttttcttatttgtgattttctgaagttgaatatgaaacgcctaggtgtaatttttcttttcatgtatcctgttggggtactctgagcggtcttgatctctggtttggtgtctgacactagtttggaaggaattttcagtcattattgtttcaaatattgcttccatttttttctctctttcctgtccttttaaaattccaaatatatatattaactccttttgtagttttgttactgttctttgatattctattctgtttttactgagtaatttttttccttgctcttta

SEQ ID NO: 585461 - DNA, 541 bp, Homo sapiens
ccgttaacatttcttgcaaggtaggtctaccagtaacaatgccttcaggttttrtttgtctgagaagaactttagttcttattacttttgaaggataattttacagggtgcagaaatctaggctggtggtttttctctcaacctcactcttcttgcttgcatggtttctaagaaaattgaagaagtaattcttatttttgctcctttatatgtaaggtattttgcgctctggcttctttcaagacgtttttttttcttatttgtgattttctgaagttgaatatgaaacgcctaggtgtaatttttcttttcatgtatcctgttggggtactctgagcggtcttgatctctggtttggtgtctgacactagtttggaaggaattttcagtcattattgtttcaaatattgcttccatttttttctctctttcctgtccttttaaaattccaaatatatatattaactccttttgtagttttgttactgttctttgatattctattctgtttttactgagtaatttttttccttgctcttta

SEQ ID NO: 585462 - DNA, 541 bp, Homo sapiens
ccgttaacatttcttgcaaggtaggtctaccagtaacaatgccttcaggttttatttgtctgagaagaactttagttcttattacttttgaaggataattttacagggtgcagaaatctaggctggtggtttttctctcaacytcactcttcttgcttgcatggtttctaagaaaattgaagaagtaattcttatttttgctcctttatatgtaaggtattttgcgctctggcttctttcaagacgtttttttttcttatttgtgattttctgaagttgaatatgaaacgcctaggtgtaatttttcttttcatgtatcctgttggggtactctgagcggtcttgatctctggtttggtgtctgacactagtttggaaggaattttcagtcattattgtttcaaatattgcttccatttttttctctctttcctgtccttttaaaattccaaatatatatattaactccttttgtagttttgttactgttctttgatattctattctgtttttactgagtaatttttttccttgctcttta

SEQ ID NO: 585463 - DNA, 598 bp, Homo sapiens
actcttcttgcttgcatggtttctaagaaaattgaagaagtaattcttatttttgctcctttatatgtaaggtattttgcgctctggcttctttcaagacgtttttttttcttatttgtgattttctgaagttgaatatgaaacgcctaggtgtaatttttcttttcatgtatcctgttggggtactctgagcggtcttgatctctggtttggtgtctgacactagtttggaaggaattttcagtcattattgtttcaaatattgcttccatttttttctctctttcctgtccttttaaaattccaaatatatatattaactccttttgtagttttgttacwgttctttgatattctattctgtttttactgagtaatttttttccttgctctttagttttggaaatttctattatcatatcatcaaactcaaagattcttttctggctatgtccagtctattaatgagcccatcaaagcccttctttatgtctattacaatgtctttgatctccagcacttcttttttgatttttttctttgtatccccatctctctgtttacataattcatctgttcttgcatgttgtctgtttac

SEQ ID NO: 585464 - DNA, 480 bp, Homo sapiens
gtatttacattatagttcaataaaacaataaaaatattgatgcaaagaaatgtagaaactttcaaatctctctgtgctcttttatacacaatctctacttccatccttgatgcctggcaaccactgtttgcattcataagcatcattttatgaatacgacaatctaatggttttataaccattagtggaatgttctttctaaaattaaggtgggtgtggtggttcacgcctataatggaagcattttgggarcctgaggtagaagaatcatttaaggctcgagtttgagatcagcctgggcaacacagcaagaccctatctccacaaaaaataaaaataaaaaaattaactgggcattgtggtgcaaacccgtagtccccactactagtgaggctgaggcgtgaagattgcttgatcccaggagtttgaggctgcagtgagctgttgtttgcacctctgaactctagcctgggcaacaga

SEQ ID NO: 585465 - DNA, 480 bp, Homo sapiens
gtatttacattatagttcaataaaacaataaaaatattgatgcaaagaaatgtagaaactttcaaatctctctgtgctcttttatacacaatctctacttccatccttgatgcctggcaaccactgtttgcattcataagcatcattttatgaatacgacaatctaatggttttataaccattagtggaatgttctttctaaaattaaggtgggtgtggtggttcacgcctataatggaagcattttgggagcctgaggtagaagaatcatttaaggctcgagtttgagatcagcctgggcaacacagcaagaccctatctccacaaaaaataaaaataaaaaaattaactgggcattgtggtgcaaacccgtagtccccrctactagtgaggctgaggcgtgaagattgcttgatcccaggagtttgaggctgcagtgagctgttgtttgcacctctgaactctagcctgggcaacaga

SEQ ID NO: 585466 - DNA, 308 bp, Homo sapiens
  misc_feature 267, 268, 269, 270, 271, 272, 273, 274, 275, 276, 277, 278,279, 280, 281, 282, 283, 284, 285, 286, 287, 288, 289, 290,291, 292, 293, 294, 295, 296, 297, 298, 299, 300, 301, 302,303, 304, 305, 306, 307, 308: n = A,T,C or G
ccggcagcttcctccgtccctctctcccaccggggcggggcggccgtggtgcacggactcgckccgaagaccgcgccgtcagcctccgcctgcaggtggagaacgccaggctttatcactccgctgttcacccaacgcaggggctgcacccaggaaaatcctgtcctgtttgagttcaaatagggaagatggggcagaaataactctgcggcgtgtactcgggcagacgcgcgcacactttgattttgctaggaattctgacttgtnnnnnnnnnnnnnnnnnnnnnnnnnnnnnnnnnnnnnnnnnn

SEQ ID NO: 585467 - DNA, 308 bp, Homo sapiens
  misc_feature 267, 268, 269, 270, 271, 272, 273, 274, 275, 276, 277, 278,279, 280, 281, 282, 283, 284, 285, 286, 287, 288, 289, 290,291, 292, 293, 294, 295, 296, 297, 298, 299, 300, 301, 302,303, 304, 305, 306, 307, 308: n = A,T,C or G
ccggcagcttcctccgtccctctctcccaccggggcggggcggccgtggtgcacggactcgctccraagaccgcgccgtcagcctccgcctgcaggtggagaacgccaggctttatcactccgctgttcacccaacgcaggggctgcacccaggaaaatcctgtcctgtttgagttcaaatagggaagatggggcagaaataactctgcggcgtgtactcgggcagacgcgcgcacactttgattttgctaggaattctgacttgtnnnnnnnnnnnnnnnnnnnnnnnnnnnnnnnnnnnnnnnnnn

SEQ ID NO: 585468 - DNA, 603 bp, Homo sapiens
atgacattctgagccagctgatttggccttgtgaccaatatgagggactatttaactttgtatttttttatctccttctttctttacacccagttatattgttttccatttcgtttactcgcataaatgtcagatttgtccatgtgatttatcaggtttatcagaatatcaacttgaatcttttcttttctctaacatttatctaaatatctcaggagactctcatccttccttctctcctttattccatttgcaaagttaaaaaaaaaagcctcaattatggcatttcagtattcatagtagtacagataatacatttatatcaagggaaaagaaacgcattttaggccaggcgcggtggctcacgcctttaatcccagcactttgggaggccaaggcgagcggatcaagaggtcaggagatggagaccatcctggccaacatgatgaaaccccgtctctactaaaaatacaaaaattagctggatgtggtggcgcgttccagtagtcccagctactccgkaggctgaggcaggagaattgcttgaacccgggaggcggaagttgccgtgagccgagatggtgccatcgcactccagcctgg

SEQ ID NO: 585469 - DNA, 477 bp, Homo sapiens
ttataaatctcatattaatccttgtgtgcctgttttgtctgttgttagtctgcaggtgtacccaacagctccgaagagacagcgaccatcgagaacgggccatgatgacgatggyggttttgtcgaaaagaaaagggggaaatgtggggaaaagcaagagagatcagattgttactgtgtctgtgtagaaagaagtagacataggagactccattttgttatgtactaagaaaaattcttctgccttgagattctgtgaccttacccccaaccccgtgctctctgaaatgtgtgctgtgtcaactcagagttaaatggattaagggcggtgcaggatgtgctttgttaaacagatgcttgaaggcagcatgctccttaagagtcatcaccactccctaatctcaagtacccagggacacaaaaactgcggaaggccgcagggacctctgcctaggaaagccaggtattgtccaaggt

SEQ ID NO: 585470 - DNA, 477 bp, Homo sapiens
ttataaatctcatattaatccttgtgtgcctgttttgtctgttgttagtctgcaggtgtacccaacagctccgaagagacagcgaccatcgagaacgggccatgatgacgatggcggttttgtcgaaaagaaaagggggaaatgtggggaaaagcaagagagatcagattgttactgtgtctgtgtagaaagaagtagacataggagactccattttgttatgtactaagaaaaattcttctgccttgagattctgtgaccttacccccaaccccgtgctctctgaaaygtgtgctgtgtcaactcagagttaaatggattaagggcggtgcaggatgtgctttgttaaacagatgcttgaaggcagcatgctccttaagagtcatcaccactccctaatctcaagtacccagggacacaaaaactgcggaaggccgcagggacctctgcctaggaaagccaggtattgtccaaggt

SEQ ID NO: 585471 - DNA, 477 bp, Homo sapiens
ttataaatctcatattaatccttgtgtgcctgttttgtctgttgttagtctgcaggtgtacccaacagctccgaagagacagcgaccatcgagaacgggccatgatgacgatggcggttttgtcgaaaagaaaagggggaaatgtggggaaaagcaagagagatcagattgttactgtgtctgtgtagaaagaagtagacataggagactccattttgttatgtactaagaaaaattcttctgccttgagattctgtgaccttacccccaaccccgtgctctctgaaatrtgtgctgtgtcaactcagagttaaatggattaagggcggtgcaggatgtgctttgttaaacagatgcttgaaggcagcatgctccttaagagtcatcaccactccctaatctcaagtacccagggacacaaaaactgcggaaggccgcagggacctctgcctaggaaagccaggtattgtccaaggt

SEQ ID NO: 585472 - DNA, 493 bp, Homo sapiens
ggactttctatcctcagaatcaccttatgattattcaccttttacaaaattattggcgttcagagaggtgaactactttcccaaggtcacacagcaaataaatgatgaagtcaggactcaaaccaagacctttgacaatctgatactagtctatgcttgttaactacatgccaaactagtaaacacatgtgtgtccttaaatatatttgttttctaatactggagatcatctacaaacaatggaacgatgtctctgatatctatttatacagctttaatcaaatgttaaaagaaaattagactgcaattgagttttaattaaataatcttgaatatccaatcatgcaatcaagttcaatataagcagttctgatttaaggtagatagatttttttttcttttcctcctgctcacagcaaaagatctaatcaagaagatatattcaaacacattaatttggagacagaycatggattccacaagataaaacaga

SEQ ID NO: 585473 - DNA, 583 bp, Homo sapiens
taaaacatcattttctttttttcctggttgtaaaacatgcttttacctttctgagaatatatgcattttaaatgtaagttttgcatttctgcctgctctttggttcccccatgttgtcatcaggatttaagttttgtcattagattatttccttagatatctgctaatcctgattatatgggtatacttaagagcaaggactgaaagctaactagaagctcttggttcgtgggtgaggcttgtgcactgtaagctttagtgtaggatgatttggctgctcttttttcctttagggaaatttgatagcaatacattcatatctttcctcttgggatggtcaattttattctactttttatttccaatgaaaaaatatccagtcttttactgattgtgggaggacaattcccctttcctgaggcagaagmggggcttcaggattctaagtgcttccaaagcacatttctgaccaatcttccttattttatattctagcacctggcttccattctctcttccagaggtaactagtagagctaatttatgagtcttttgcagattgtactgtgttaagttagttaat

SEQ ID NO: 585474 - DNA, 559 bp, Homo sapiens
gttttacatccttcacaagagagtagccagagaaagaaataaaagttgcctctcataatcttccagagaatgaggagaaaagttcccagaagcctgaaggaagccatttctggggcctcaccggactgaaatgcaccaagtttctatacctggcaaaggagattaaattagaattatccttagaccaagaagctctgtgggtagcggcatggcctatttggaagaaggcatagatattttattaaaatcaaagggtaagagtcaaaattaatactggttaggtatagtaagcagaaaaaaagccctcaaaagatatccacataaagtccctagaatctgtgaytgttaccactttatttagaaaaagagtctttgcttctacacagcaaaaaaacaaaaacaaaaacaaaaacaaaaaaaaaacaattagcagagtaaacagacatcccagagagtgggagaaaatccttgcaatctatacatccaacaaaggactaatagccagaatctacaatgaactcaaacaaatcagcaagaaaaaaaaatcccatcaaaaagt

SEQ ID NO: 585475 - DNA, 533 bp, Homo sapiens
ctctttgccttcagaaagcacttcagcaggccatggttttatttcctggtggagtgacccacaccttcattcctgaagggtctgggccatttgtagtcctggctgaattgggctgttgtagtttcccattgccttaatcacaggtcacggtaattctaagtgatgtcctaagggatctcctgtattccatgcatactcttccttacctccattgtggagtagcagactgatttcatcgtgatagtccgggtcagtcatcccagccaacaccgtaactcccttcttagcctgttgacttaaagataagaggagcccaaagtgtccaggtggcaatcttaacttccagtttaatggaattgttgttgtgtctcctggtggcagcattcttcccgctgtaactaagacctctaggccagcagaatgtaatgttgcgggaacaggaagcaaaaatttggctagtggatcactgggrgtgatggtgagtggtgccacctccgctgtatggatgtgcatatacatgcgtaaatagattt

SEQ ID NO: 585476 - DNA, 428 bp, Homo sapiens
cacacacacacacacacatatatagctttgacatacatatacacrcacacagactttgattgtaaataaacctagtgcagaatatcaatatctcaaagatatttggatagatataagtatttactaatgtaatgttacataattttaaactccctaactgtaagcatattatatattatgaccagagtataacaatattattaacatttaattgaatcttaacagttaaaaatgcatcagatattatgctttcaaatcattctccccaaaaagataaagtgaaatttttttatgaatttctataccttctgattatctaggccatgctagaactatttcctaaatacattaatgtttatggtggtaacacattaattgagcacatttaatcaaagtgctatgtgttacatcctatttgccagaattat

SEQ ID NO: 585477 - DNA, 612 bp, Homo sapiens
cttctatcttttcaaatgtatttttctatagggacataataataactcattaaaacattaacattgtaaaacacttattatactatgctacaaagaaagaaaactggkgctatataattttaatgatggcgatcctgagtgtgggagaggacaccaagcccccagatatttgttggaggttcctgacagagcactgtaaaaaaaaccttagtacagctgctgtctattctgagcagaattctaataggggatgcttaaaatagaatgcccctcttccaggaaaaatgaccagatacagaaatagtgtagaaggaattaaaagagacttacctggcttgttcgtatttgtgtgagtctattccctgactctgtgtctgcagaattgaagtttctgtttaatttcctcttgataatatcaactttggaaatactattaggttggtgtaaaaataattgcaccaatctatagtaatgacttttgcagcaacctatagtaattctaatattatgaaatattacttatgatttttaacatttaatttagtttttgttttttcttttagagacagggtcttgttctgtggcccaaactggaatgcagtggtgcaattg

SEQ ID NO: 585478 - DNA, 588 bp, Homo sapiens
gtacacctcatgaagaaccctggaagtatgtttagaagtaaaatattttaatgcaatttagtttagactatatttctttcattctgccttcctatcacacgtcccttcatgtagggtggatcaggtccatttgggattcagctaaggggaggtagagacggcaataccattggtttgtgttcagggggatataattgggtgtgtcacagtcatgttcatgtatagctcagttgttgtcatctatttcagcatatcatttcctttagcacacagcactggatatatatgagttgtaaagaaacgcattttgaaatgtacaaagcagaagcacgtcattggaaaatgtgtctcatcattggatgtgtaaaacttaagtgcaagatttagctctcactgagcttgttgaaacagagaacctttcctttaaaaccagactaaacaaagcagtaaataaaattataagcacaccacattttactttggatggaaatcatgtaaaacacattttatyggagttctcaggtttttaggacacaaatgtgtggcagctctacaaatagcaagactgtctttatatggagtcataag

SEQ ID NO: 585479 - DNA, 448 bp, Homo sapiens
tcctgggtccacgccattctcctgactcagcctcccgagtagctgggactacaggtgcccgccaccatgcctggcaaattttttgtatttttagcagagatggggtttcactgtgttagccaggatggtctcgatctcctgacctcgtgatccacccacctcrgcctcccaaagtgctgggattataggcgtgagccactgcacccagtcaatgtttgtatctttagtagagatggagtttcaccattttggtcaggctggtctcgaactcctgacctcgtgatctgcccacctcggcctcccaaagtgctgggattataggcatgagccactgtgcccagccaatgtttgtatctttagtagagacagagtttcaccattgtggtcaggctggtctcgaactcctgacctcgtgatccacccactttggcctcccaaattgttgaga

SEQ ID NO: 585480 - DNA, 448 bp, Homo sapiens
tcctgggtccacgccattctcctgactcagcctcccgagtagctgggactacaggtgcccgccaccatgcctggcaaattttttgtatttttagcagagatggggtttcactgtgttagccaggatggtctcgatctcctgacctcgtgatccacccacctcagcctcccaaagtgctgggattataggcgtgagccactgcrcccagtcaatgtttgtatctttagtagagatggagtttcaccattttggtcaggctggtctcgaactcctgacctcgtgatctgcccacctcggcctcccaaagtgctgggattataggcatgagccactgtgcccagccaatgtttgtatctttagtagagacagagtttcaccattgtggtcaggctggtctcgaactcctgacctcgtgatccacccactttggcctcccaaattgttgaga

SEQ ID NO: 585481 - DNA, 638 bp, Homo sapiens
agtcagtcttggaacttgttattggtctattcagggttttcatttcttcttggttaaatctttggaggttatatatttccaggaatttagccatttcttctaggttttccagtttgtgtcatagagttgtttgtaatagtctctcagagttttttgcttttctacagggtcaatggtaatatmtcctttgtcatttctgattgtgtttatttgggtcttctctctctttttctttattagtctagctagtggtctattaaatttatttgttctttcaaagaaccaacttgtggttttgttgatcttttgtatggtgttttgtgtctcaatttcattcagttcatctctgatttggttatttcttgtcttctgctagatttcgggttggtttgctcttatttttctggttcctctaggtgtgatgttaggttgttaatttgagatctttctaactttgaagcgggcatttagctctgtaaattttcctcttaacactgctttagctgtgttccagcaatcctggtatgttgtatctttattttcattagtttcaaagaatttcttgatttctaccttaatttctttgttgactcagaaagtcattcaggagcaggttgtttaaattccgtgtaattatg

SEQ ID NO: 585482 - DNA, 638 bp, Homo sapiens
agtcagtcttggaacttgttattggtctattcagggttttcatttcttcttggttaaatctttggaggttatatatttccaggaatttagccatttcttctaggttttccagtttgtgtcatagagttgtttgtaatagtctctcagagttttttgcttttctacagggtcaatggtaatatatcctttgtcatttctgattgtgtttatttgggtcttctctctctttttctttattagtctagctagtggtctattaaatttatttgttctttcaaagaaccaacttgtggttttgttgatcttttgtatggtgttttgtgtctcaatttcattcagttcatctctgatttggttatttcttgtcttctgctagatttygggttggtttgctcttatttttctggttcctctaggtgtgatgttaggttgttaatttgagatctttctaactttgaagcgggcatttagctctgtaaattttcctcttaacactgctttagctgtgttccagcaatcctggtatgttgtatctttattttcattagtttcaaagaatttcttgatttctaccttaatttctttgttgactcagaaagtcattcaggagcaggttgtttaaattccgtgtaattatg

SEQ ID NO: 585483 - DNA, 638 bp, Homo sapiens
agtcagtcttggaacttgttattggtctattcagggttttcatttcttcttggttaaatctttggaggttatatatttccaggaatttagccatttcttctaggttttccagtttgtgtcatagagttgtttgtaatagtctctcagagttttttgcttttctacagggtcaatggtaatatatcctttgtcatttctgattgtgtttatttgggtcttctctctctttttctttattagtctagctagtggtctattaaatttatttgttctttcaaagaaccaacttgtggttttgttgatcttttgtatggtgttttgtgtctcaatttcattcagttcatctctgatttggttatttcttgtcttctgctagatttcgggttggtttgctcttatttttctggttcctctaggtgtgatgttaggttgttaatttgagatctttctaactttgaagcgggcatttagctctgtaaattttcctcttaacactgctttagctgtgttccagcaatcctggtatgttgtrtctttattttcattagtttcaaagaatttcttgatttctaccttaatttctttgttgactcagaaagtcattcaggagcaggttgtttaaattccgtgtaattatg

SEQ ID NO: 585484 - DNA, 638 bp, Homo sapiens
agtcagtcttggaacttgttattggtctattcagggttttcatttcttcttggttaaatctttggaggttatatatttccaggaatttagccatttcttctaggttttccagtttgtgtcatagagttgtttgtaatagtctctcagagttttttgcttttctacagggtcaatggtaatatatcctttgtcatttctgattgtgtttatttgggtcttctctctctttttctttattagtctagctagtggtctattaaatttatttgttctttcaaagaaccaacttgtggttttgttgatcttttgtatggtgttttgtgtctcaatttcattcagttcatctctgatttggttatttcttgtcttctgctagatttcgggttggtttgctcttatttttctggttcctctaggtgtgatgttaggttgttaatttgagatctttctaactttgaagcgggcatttagctctgtaaattttcctcttaacactgctttagctgtgttccagcaatcctggtatgttgtatctttattttcattagtttcaaagaatttcttgatttctaccttaatttctttgttgactcaraaagtcattcaggagcaggttgtttaaattccgtgtaattatg

SEQ ID NO: 585485 - DNA, 532 bp, Homo sapiens
acttgaggtgaggagttcgagaccagccttgccaacatgatgaaaccccgtctstactaaaaacacaaaaattagccagccatggtagtgcatgtctgtaatcctggctgctagggaggctgaggcaggagaattgcttgaacccaggaggtggaggttgcagtaagcagagatcatgccactgcactccagcctgggcgacagagtgagactctgtcttaaaaaaaacaaacaaaaaaaaacaaaacctcaattgtatatctaaaattcttgtggcttttttcacccttccttccatcccaggcctccaaatcagaacagaggcaggttagtgtttgttttttaagtttcaagtgattctaatgtactggccttgggaaatacctccataactgttgaaaagggttcagaatataattttaagtgaaattactttagatcaaagcagacttacaataagtataatatcacataaaggataaactttcaagtgccaaagaatacaggtgtgtacttgaagaccttttagtag

SEQ ID NO: 585486 - DNA, 532 bp, Homo sapiens
acttgaggtgaggagttcgagaccagccttgccaacatgatgaaaccccgtctgtactaaaaacacaaaaattagccagccatggtagtgcatgtctgtaatcctggctgctagggaggctgaggcaggagaattgcttgaacccaggaggtggaggttgcagtaagcagagatcatgccactgcactccagcctgggcgacagagtgagactctgtcttaaaaaaaacaaacaaaaaaaaacaaaacctcaattgtatatctaaaattcttgtggcttttttcacccttccttccatcccaggcctccaaatcagaacagaggcaggttagtgtttgttttttaagtttcaagtgattctaatgtactggccttgggaaatacctccataactgttgaaaagggttcagaatataattttaagtgaaattactttagatcaaagcagacttacaataagtataatatcayataaaggataaactttcaagtgccaaagaatacaggtgtgtacttgaagaccttttagtag

SEQ ID NO: 585487 - DNA, 448 bp, Homo sapiens
ttgcccaggctggagtgcaatggctcgatcctggctccctgcaacctccgactcccgggttcaagcgattctcctgcytcagcctcccgagtagtggggattacaggcttgctccaccatgcccagctgattttgtatttttagtagagacggggtttctccatgttggtcaggctggtcttgaactcctgacctcaggtgatccgcccaccttagcctctcaaagtgctgggattacaggtgtgagccactgtgcccggcgcattcttaccactgctaattcaacattgtacaggtagttttagccattgcaataagtcaggaaaaatcaaagtcattgtgattgaaaagacagaagtaaaactatctttgtgtacaggcatcgtgattatctatacagaaaacccaaatctccaaaacccactagaacaaatgtgtttggcaagtt

SEQ ID NO: 585488 - DNA, 448 bp, Homo sapiens
ttgcccaggctggagtgcaatggctcgatcctggctccctgcaacctccgactcccgggttcaagcgattctcctgcctcagcctcccgagtagtggggattacaggcttgctccaccaygcccagctgattttgtatttttagtagagacggggtttctccatgttggtcaggctggtcttgaactcctgacctcaggtgatccgcccaccttagcctctcaaagtgctgggattacaggtgtgagccactgtgcccggcgcattcttaccactgctaattcaacattgtacaggtagttttagccattgcaataagtcaggaaaaatcaaagtcattgtgattgaaaagacagaagtaaaactatctttgtgtacaggcatcgtgattatctatacagaaaacccaaatctccaaaacccactagaacaaatgtgtttggcaagtt

SEQ ID NO: 585489 - DNA, 448 bp, Homo sapiens
ttgcccaggctggagtgcaatggctcgatcctggctccctgcaacctccgactcccgggttcaagcgattctcctgcctcagcctcccgagtagtggggattacaggcttgctccaccatgcccagctgattttgtatttttagtagagacggggtttctccatgttggtcaggctggtcttgaactcytgacctcaggtgatccgcccaccttagcctctcaaagtgctgggattacaggtgtgagccactgtgcccggcgcattcttaccactgctaattcaacattgtacaggtagttttagccattgcaataagtcaggaaaaatcaaagtcattgtgattgaaaagacagaagtaaaactatctttgtgtacaggcatcgtgattatctatacagaaaacccaaatctccaaaacccactagaacaaatgtgtttggcaagtt

SEQ ID NO: 585490 - DNA, 448 bp, Homo sapiens
ttgcccaggctggagtgcaatggctcgatcctggctccctgcaacctccgactcccgggttcaagcgattctcctgcctcagcctcccgagtagtggggattacaggcttgctccaccatgcccagctgattttgtatttttagtagagacggggtttctccatgttggtcaggctggtcttgaactcctgacytcaggtgatccgcccaccttagcctctcaaagtgctgggattacaggtgtgagccactgtgcccggcgcattcttaccactgctaattcaacattgtacaggtagttttagccattgcaataagtcaggaaaaatcaaagtcattgtgattgaaaagacagaagtaaaactatctttgtgtacaggcatcgtgattatctatacagaaaacccaaatctccaaaacccactagaacaaatgtgtttggcaagtt

SEQ ID NO: 585491 - DNA, 415 bp, Homo sapiens
caggagtctttttttgtagagattgacaaagtaatattaaatttcatatggaaatgcaaagaactagaatagccaaaacaactttgaaaaaaagatagagtactaatactacctaatgtcaaaagttctaataattttattcagctacagtaatcaagacagtatagttttggtgtcaagttccacaaacacatcaatagaataaagagtccaagagtagacccacatgtatgtgatggagaagggacagtcttctcaacaagtaatgttggaataatgggatattcataagcacaaaaataaacaattcataactcattcatatataaaattaactcaagatgaatcatagacacaaacataaaacctcacactataacacttwcagaaaaagactaggagaaaacttttgtgg

SEQ ID NO: 585492 - DNA, 443 bp, Homo sapiens
agatctaaaataatcctgaccaaaatcacaggagtctttttttgtagagattgacaaagtaatattaaatttcatatggaaatgcaaagaactagaatagccaaaacaactttgaaaaaaagatagagtactaatactacctaatgtcaaaagttctaataattttattcagctacagtaatcaagacagtatagttttggtgtcaagttccacaaacacatcaatagaataaagagtccaagagtagacccacatgtatgtgatggagaagggacagtcttctcaacaagtaatgttggaataatgggatattcataagcacaaaaataaacaattcataactcattcatatataaaattaactcaagatgaatcatagacacaaacataaaacctcacactataacactttcagaaaaaractaggagaaaacttttgtgg

SEQ ID NO: 585493 - DNA, 457 bp, Homo sapiens
catccccactaccctctagtccacccttatcaaagtcaccagtgatctcctcattgctaaacccagtggtcagttctcagacctcatcttccttggcctgtcagcagcccttggcacagtcattcgttctctcctctttcctttctggaaagaggcttcccagaccactcagtcttctgttttttattccacttcatttaccatgctttctgtrtgtccctcattggctcctcctcatctcattcatctgtaaacaccatgtgttccagaccttagtccttgcacttctcttctcagtctacatctggtctctgggtgctctgtctcggttttatgcctttaagtaccattatatgctgatgactattgaacctacatttctggttctggcctctccagattcaaatatctgactggctattgcttttaattttccctgtccccctaagagcacctc

SEQ ID NO: 585494 - DNA, 457 bp, Homo sapiens
catccccactaccctctagtccacccttatcaaagtcaccagtgatctcctcattgctaaacccagtggtcagttctcagacctcatcttccttggcctgtcagcagcccttggcacagtcattcgttctctcctctttcctttctggaaagaggcttcccagaccactcagtcttctgttttttattccacttcatttaccatgctttctgtatgtccytcattggctcctcctcatctcattcatctgtaaacaccatgtgttccagaccttagtccttgcacttctcttctcagtctacatctggtctctgggtgctctgtctcggttttatgcctttaagtaccattatatgctgatgactattgaacctacatttctggttctggcctctccagattcaaatatctgactggctattgcttttaattttccctgtccccctaagagcacctc

SEQ ID NO: 585495 - DNA, 457 bp, Homo sapiens
catccccactaccctctagtccacccttatcaaagtcaccagtgatctcctcattgctaaacccagtggtcagttctcagacctcatcttccttggcctgtcagcagcccttggcacagtcattcgttctctcctctttcctttctggaaagaggcttcccagaccactcagtcttctgttttttattccacttcatttaccatgctttctgtatgtccctcattggctcctcctcatctcattcatctgtaaacaccatgtgttccagaccttagtccttgcacttctcttctcagtctacatctggtctctgggtgcyctgtctcggttttatgcctttaagtaccattatatgctgatgactattgaacctacatttctggttctggcctctccagattcaaatatctgactggctattgcttttaattttccctgtccccctaagagcacctc

SEQ ID NO: 585496 - DNA, 606 bp, Homo sapiens
agcacttataaacttgaaatatggattgaatttttaaagtatatgcagaaattctcacacagcctaggtagcagacaaatgtaatttgaatgcaggatgacttggcacaatgagaatatatgtcatcattgaaccatcactgtcacaaccacccccaactggtcttcctgcatttggttttgcgcctctctctgttctgtttccaaacatacccaatgtgttttctttcctgccaccaaagtaatctttctcaacataaatttggccatgccctcctaatttcgtgattcttctctggctttcaaaatactacggaatgaagtctagatttcttaatatggtatatggtcctttgtatgctgggctttataattgttgaacaacactttcctagtttacatttcagcaattytaaactcgatagatctatgatacaccatattctctccttccttcatgcttttgtatgtgttgtttcatctacatacctttcgtttgtttttttttttttttttttttttttttaagacggagtcttgctctgtctcccaggctggagtgcagtggtgcatctcggctcactgcaagctctgcctcccgagttca

SEQ ID NO: 585497 - DNA, 606 bp, Homo sapiens
agcacttataaacttgaaatatggattgaatttttaaagtatatgcagaaattctcacacagcctaggtagcagacaaatgtaatttgaatgcaggatgacttggcacaatgagaatatatgtcatcattgaaccatcactgtcacaaccacccccaactggtcttcctgcatttggttttgcgcctctctctgttctgtttccaaacatacccaatgtgttttctttcctgccaccaaagtaatctttctcaacataaatttggccatgccctcctaatttcgtgattcttctctggctttcaaaatactacggaatgaagtctagatttcttaatatggtatatggtcctttgtatgctgggctttataattgttgaacaacactttcctagtttacatttcagcaattctaaactcgatagatctatgatacaccatattctctccttccttcatgcttttgtatgtgttgtttcatctacatacctttcgtttgttttttttttttkttttttttttttttaagacggagtcttgctctgtctcccaggctggagtgcagtggtgcatctcggctcactgcaagctctgcctcccgagttca

SEQ ID NO: 585498 - DNA, 393 bp, Homo sapiens
aacaccatctctgacttcaatcctcagtctctcacatgctatttcatagttaccccttggtccacacagctaatattacttgtaaaaggcatcctcacttcctactcaggactcagggtctgtgtaagttgtaagagcatccccttgccccccagcgggaaaaggggaattatgagaggaagataaattgtaactcattttaagggtctgtgatttctatggccccttataagtttaccacaaaattaaatgaattcgtgtgtcaattcacataygcgtgcatacatatacacataaatagaggatacagaagccatctttttttatttttatctattgttttatttatttattttagagccaaggtctctctctgctgcccaggctggagta

SEQ ID NO: 585499 - DNA, 551 bp, Homo sapiens
atacagtgggggtacaggcattgggtaaatacacctattccaaatggaagaaattggccaaaattgaggggctacaggtcccatgcaagtccaaaaactagtgggacagtcaaatattaaaactccaaaatgatctcctttgacttcatgtctctcatcttggccatgcttgatgtaagaggtgggttcccatggtcttgggcagttgccatatggccatttctagtaccatgtaaccagagacctgcaagtaaaagcatcaacatactgacaagataatcagcctaatcatcagtgagtggcagggttattattagaaaatgcctgcaagaggccaggccccgtggctcatgtctgtaatcctagmactttgggaggctgaggcgggcggatcacgaggtcaggagatcaagaccatactggccaacatggtgaaatcccaactctattaaaatacaaaaaaacaactcagccgggtgtggtggtgtgcacctgcagtcccagctacttgagagactgaggcaggagaattgcttgaacccaggaggcag

SEQ ID NO: 585500 - DNA, 534 bp, Homo sapiens
agcacagaagtgtcggtcaagtcacagagtgggtcattggtcaggaaatgtagakagatttgccatgaagataattgagagcaaataatcaagagaatgcttcacccatattgattttaccaatatcttatgataaaaactgactcagaaataacgttcatgtataacatcaaattaatttgcatagcaaaaaatactccaattgcattttgttagaaatattttaacttctgtacgtctgcataagaatataattcaaaaataaaatgatactgatagaaacacttgtccaagcaatttagaatcatgaagagtttgaataatgtagatttacttatatttattaatactttacttttgatcacaccctgtgcagacctggctttttgagcaagaggcttgtgcagttgtacagggctccatgttctgaagtcttgctctggatttagtgcttaccagcagtcatacaatacttccttcatctatttactcccctagtctcttacacaattatttcataatattccctttctc

SEQ ID NO: 585501 - DNA, 591 bp, Homo sapiens
tcattgaaaaatagctacatgaataaaaataatgaactaatgaattaatgattcagttttatctattacagggcagttgcacaacctggaggctggcatcatggggtcatttaggattgaatctgaaggagccgctgtggtggaaatgaaatccctgcacaaaagaagctggggctgaactatcatattctcctggaagtagtggtaggaaagagatatttattttcgggacccagtacctctgaacacttattttagctgtttactgcagctatgcttwcttgaaagagatatgcaggaaggatggaaaagtgtctattagccttttaattttctcttctgagaaattccaaaaactgtttttttttttcaactaatctatgcaattagcatcgttcacttagcttctcagcttacttagtggactttttcactacaaaaataatcatatcaaaatttaatttatgaacaataatttgctccatttaagtgtacagttctgaattttcacaaatgtttacacccatgtaacaattgccatgttcaaaatagaaggagactatttacatcacccccacccctgccccgcaa

SEQ ID NO: 585502 - DNA, 520 bp, Homo sapiens
acctagtaccctacagttatttattctgttcctctccctcctcccaccctccaccctccaccctcaagtagaccccagtgtccattgctccctcctttgtgttcatgagttctcatcattcagctcccacttataagtgagaacatgcagtatttggttttctgttcctgtgtcagttttctaaggatgatatcctccagtccatccatgttcctgcaaagacatgatctcattcttttttttggctgcatagtattccatggtgtatatataccacatttcctttatccaatctgtcaytgatgagcatttaggttgattccatgtctttgctattgtgaacagtgctgcaatgaacattcacgtgcatgtgaaagactatgtattacgagaatgatttctacaagctattatacaataagatctagaacttttatgtgttaataaaaggaccattttctcaaaaagcaaaggcaggaacaataaaaatagaatataaatttaagagaatttaaaactg

SEQ ID NO: 585503 - DNA, 548 bp, Homo sapiens
tttggttttgctttagttgcttgttggatttgtcagctaaatatattgttttataaaagagaaggaagctaggcacttctatttttactttaacaaaagtacatcaagaaaactttctccccacagaaacagtaacagatctttgtgattcagatatttagttactatcttctctctgaaagaaaataccagaattgttttacctataggtatattcttcaatttgtcactggtgaaatgccctgaaatatttaggccttgtttaacctagaaattctagcagttttggagacagcaacgctgttaagaatttttttcctgaacgcagttacagtaaatgataactgaaatttcttcccctatatcctaacctaacccagaaactrtgaagtaatcttcctgaattattttgtgtccatccgaggaagaggaagaaaaatggataagggatttttctcttttggattctttgtgtgatctcaagggcttaaaacattaattatactactctcaaatgaaactgctgacaccattcttttgatgcccat

SEQ ID NO: 585504 - DNA, 557 bp, Homo sapiens
atgccaccatacctggctgattttctttttttgtatttcttgtagagatgaggtttcatcatattgcccagactagtctcaaactcctgagctcaagtgatatgcctgcctcagcttcccaaagtgctgggatgacaggcatgaaccagcatgcccgaccatctgcttaactttgaataaactacttgtattcagttaaaatattaccctaacattcatagctaatttttaagtgggacacttaaaaattctttttttaaaaaaatatttcccatttctagaggaaaaccagtaacatttaggttatttatttacttaggtgagcatgtaatcaccaaatgtcatatcattagtttkaaactacttctttattaaaacttttttctgaagtatatatgagttatagtctattaatttgaattttggcttctctgttccttatgccccccttttccttctttttcttctaaaagttattattaatttgtgctgatatttaaaagacaattccaaatctgtgtatgcatatggtgtgaacaaccaaaaaaagaagcaga

SEQ ID NO: 585505 - DNA, 550 bp, Homo sapiens
aagtaatcgcccaagtcatgcagccactagtgtcagatcctggttgtgaatcccagtctgggtttaaaacatgatgctaatgacaaccacataagaacatcaccacagtaatagaaagcacgcaacaaatattagctgtcaggtgctagaaactccactaaggatgcatgcatctcctcattcagtgctcataaccacctgatggggttggcactgtcattatagttgaggaaatgcaggcttggaagagttaagtatcttgtgcaaaatcacagaagcagcaaggggcagcctctgaattttcacttaggttgtctggctctagaatgctcactgtggcctgtgttgagcaaagatttcacacagaattagggagaggggcttcttcctacctctctgtggaagacggccatgccgacttggtgaggcaaaggctgcagggcacctcaaggctttgcagctttggaagtcccttcagacaggatcccggaagggagccagaacctttatggaggacagtgrccacagtggtgtggtgaagaccaccctc

SEQ ID NO: 585506 - DNA, 566 bp, Homo sapiens
gcctctcatataatttaaattatttctagattacttataatacctaatacagtgtcaatgctatataaatagttgttacactctatttttaaattttgtatttttgattgttatgttttatttttaaaaatatttttgatccatggttggttgaatctgcaaatgcagattccaccaatacaaaggcccaactccatgagcctcattttttatgctgggaaaccaaggtgtcagaaggtgaaaagctggcatgcttttaaaccattagtcatcaggtccctaagatgttgatatgccaccatttttattaatcctgaaacttcttttcttggataattagccytagactaagcatgtccacaggccatcaaattcagtacagggactacccatgtaaggtaagagtaaggtacactgaatgtaacacagttggaagtggtatgaaatggagtgtgcttatgtccactaaagaaaaccaaaatcaaattattaaagagaaaacacaggtaggccaaagtaagcatcccatttattggtagaattgggtccataagcagtcaatttgc

SEQ ID NO: 585507 - DNA, 502 bp, Homo sapiens
gtctgagcaatatggcgaaaacctgtctctaccaaaaatataaaaaattagccgggcatggttgcatgcacctgtggtcccacctacgtgggaggctgaggcaggaggatcacttgagtccaggaggcggaggttgtagtgagccaagatcgcaccactgcactccagcctgggtgacagagcaagatcctgtctcacacacacatgcaaaaaaccaaaagccccagaacttttcctttaagttactaattcagaaagcgtgaaacaaaaattttcaaaaatactgaagcatattcaagcatatttttgattaaaatattattttactttattttcatgagtgaaaacataaataaatcaatgtatttatcataccattgataaatacaaccaaaacattattttrtctatgactcgcccttttaaatgtacacttttatctatattttccatagtatattagcataatactaattattaataaatgagtacaaagaagagg

SEQ ID NO: 585508 - DNA, 533 bp, Homo sapiens
ggccagctttaatctagttcacaaatcctaacagtataggaccaaccaaggcatctcacaggatttcttgctcagaattccttctaaaacagtgtgaataccagctttgcgtgattttgggagtggggtgggatgatggggcaggagaggaatggaggcctatagacctcgcttttgtcttaaatgattaattgaaataaaattatgcacataccatatgaatgatcaagattgattgttgacccaggccaaatctattatctgtctaacctttccttaaataagcatggtgctcatttagttaagaaatatttatagatcacccacactctgccaagccctgcaccagacactacgggttcagtggtcaacacactcaacccctgatctcacctgttacttcttagggctgggcactaaggaatcaaaagaaataagggcttttcttcagggatcttatagtctaggtggagaggaaaaggcaaacaaaaaagcacattaaattatrattcaggatttcagagaagagaaat

SEQ ID NO: 585509 - DNA, 575 bp, Homo sapiens
atatagcatagtatctggcatagagtaaggactcaataataaaaacaatacaggaagtattatttttttccctatcatttatcttttatcttctttcaatgctttttttatttactcagccttttgaaggtatcactgatgtggtattccttacctcattctttcttggcccttctagtttagaggctggaaagccaattactcccctcccagtttcgcttgctattatgggtggccatgtaacagatgcagaaaactactgggggcatcttctggagaaatattcgaaatcctcatgaaaatgaacatacttggtggtataatccttttctttcctgctgccccttcttctgctgagaatacaaatctattgtctatagccatggtatctatctcatgaccatccaggaaaggctaagagcatcrcagaaatgtggtccttacattttttgggtggctgaacaaatgtttgtaaacacccatctctggttttttcattatgtgagaaaaaataaatatatttctacttgttcaagtcactgtatgttttctcttactggcagccagatgcattc

SEQ ID NO: 585510 - DNA, 548 bp, Homo sapiens
ttgtatgtgaatctatgtaattaatttaaagtttcttggaataaggttcttaccttattcttctcagtatatctacaatgtttttcatgtaatattctcattgaatagtaggtaaaagaccagataattagttagcaagagtaaatttatatgtaagtttatttcacgaaaactaaatgtaattagacataaggatcacatatcttcatggaggtaaaatttcctccgagttgggatcatcaatatytaatacgggataaaaaatttaagttaaatgaaagtcttcctaaggtgaacattcaggctttcactaaagatgatggacttttaagggctgtgggaacctattccagggtccatgctcatgccacatgagcaatcttttggggatgactgcagtaaagggtgcagagattaagaacacgggctctggggcctgatctgagtttaaatcctgcagtcatgccttcctagctttgtgacatttggcacattgctcaacctctctctgggcacaataccacttactttgggaattatggtaaaat

SEQ ID NO: 585511 - DNA, 323 bp, Homo sapiens
gcccactaaagtgaggcaagagtactatatttccttagaaatcatcctttcagttgcctggtctgagaaaatcccataatgaatatccagsgataaggcagaatacatttattgttgttttaaagtagagtgtcgcaggaaatatctgattagtttgttaatttctgtctgtaagtatttctactatttgtaacatctccaagttttctataatgtataaaagaagaattcactaaaagtttaggaagggagggagaaaaatgagggagggaataaaagacacagcaagggaaaaatggacaggaagaaaggtacaagaaagg

SEQ ID NO: 585512 - DNA, 513 bp, Homo sapiens
gcctacaaaaaatcaacttttggctgggagcagtggctcacacctgtaatcccagcactttgggagactaaggctggaggatcacttgatgccagaagttcgagaccagcctggccaacatggaggaacccacatctctactgaaaatacaaaaaaatttgccaggcatggtggtgcatgcctktaatcccagctaccagggaggctgaggcatgagaattcctcgagcccgggaggcagagattgcagtgagccgaaatcacgccactgcactctagcctgggtgacagaacgagactctgtctcaaaaaaaaaagaaaaaaagaaaaaaagaaaagaaaagaaaaagagaatcaactctttagaagatatattctgaaagatctaccatgaaaatacttggtgctttctatatagatgacatcagaaaaatggtaacaggtatacaatagctgtgttgagaactaataattgcacaggtagattaaattttgttacaaaaataacaactgt

SEQ ID NO: 585513 - DNA, 563 bp, Homo sapiens
gaagcatgggcttagagaagtttaatagcttgctcaaggtcacaagactaatgcctggtagaatggggactcagaccccaggttcctgcttttacaaagctcaagcccttaggcaccttgcgtctctcgagggtgatctgatgccccagagttggagccatgcatttatgcatactgagcgaggtagggttcttgtcgagggggagacggttgaaggagacactggtggaaatgtgtgtggttcactcatactgcaatctcaaaggggaaaaggagaacccctccactgacgtgagttggatkcagtgacttggtgtttggggagaaaggaggagagttgctgcagaccagtctgtgataaactcagccctcagtatgagggaacttgagtgcaggaaaggagacagcgtcatcaaggcaagaggacaccgatggtttccaggaagataacaaagcaagaaaaatggtgcatgacgacttccattgcccgacattttcttatccctaagatgctctcctttgccctctttccatctacctcagtcttctccctctacctacag

SEQ ID NO: 585514 - DNA, 591 bp, Homo sapiens
tccccctacaatgaatgaacaaaactctaagataaagagaagataataaaagtagccaaacagattctatagaagcacaataattagaacaacagagaactccttgacaacagcaatggaagtccaaaaacagtggaaaaatatcttcaaagtgctgggtgcaaaccaaccgttaactcaaaattgtatacctagttaaatcaatcttcaaaaatgacastttaaaaaagacgttttcagacattaaaaaatgtattaaccttaagcatacaatttcctgagtttttacagttgtaatttaagcccttatcaagatatggaacattaccacgcccctagaaaattctatcatgccctttcccagtcaatccctactcccccgccccacccaatggcaacctgatacattttccacgatagactagttttaccagttctagaacttcatataaatggaatcctactcttctgcactttttatgtaaggcttctttcagcataatgttttgagattcactcacattattgcatgaattatatgtcatgtcttgttcttgttgagtgttattgaatagtgttccattgtatgaa

SEQ ID NO: 585515 - DNA, 622 bp, Homo sapiens
agataaggaatgctcaacctgtataatatttctgattgcctgatgataggcttctagaagtggaaatacaggctgttgatatgcattggcaaaatgccattagggaagtttggaatcattttcattctcaacagtgagaaatgagagcttctttcaccacaaaattaccaaagttgaggatattctaccttaaatctttcccccaaggtagggtatgagggaaggggaggaatatataaataacattgaaatgttgtcttattttgcaccctttgaatcatcactgggcagtcatgaaatgcagttcaaagagtgtgatcacattattatgaagattgctgtaagaatagctccatctgggctgccataaaagcaactccataaaatggccgtcatcaataagacaagaaaatcattaaaataaaacagatttatcaaagtgcaaactgaatggtatacagggggtctcaaacatttgtgttcttaaaaatcttgcctagctcattttgatacccctacccctctcccagcacacacacacacacacacacacacacacacacacaccccacaatccyttaggagttattgcataaaaagttaagttgttctgacccagata

SEQ ID NO: 585516 - DNA, 523 bp, Homo sapiens
cattgtgcgctggcatttccccatcagccttcacattttttcctactctcatttttctttgttctgagtctcttttgtttttcttctttttttaattttctattttctttttattcttctttgttggcccatatttctctagctgctttcaaatctcttttgtgtacaagacgagatgttgaataaatgagaatgaggaaggttctccttcactcccagcacactctaaacttgggcttctttgtctcctcagagaaacatctcagagagtcagaaagggcttgaccctagaattaactgccattggaggaaggaggaaatagctagtggtgaaaccagctatttgcatcctttcaagaactcagccaaagggtatttaggaaatytgtttccagtagcccagctaggaggaattgcccagaacaggggagccccagatccccatgaacccagaaacttatggccatgggtgctggaggcatatttctggttgactatctttggatttctggtcaagttgtct

SEQ ID NO: 585517 - DNA, 570 bp, Homo sapiens
attgtacaacctgtgatcaagcaataataattttaggcacccatcctagagaaaacttgaattcatagaaaaagtaggtacacgtaaatctgttcaaggaatcattgtttggcattgaaaataggagagagatcatgagaaattaccaaaatgtccaccaatagaatgagtgaatcacctgtggtatatttataaataaaaatmttaaatagaaggtaaaacaaatcagacatacacacattagatagataaatttagaggacaaaataaggaacatgaaaagcaaatagtagatggcaaatgtaatataatatactatgcataaattttaacaacacacaatattatattgcatattgcccaataagcagaagccataaggtctcacacttttcttataatgcaatagaataaaaatgacaacaaagtaaaagggtatcccaaaaataaaactatccttttggaaaaaaaaagatttaaaataattcctggtttgaagaaataacaaattaaaagctatatataaacggttaacaatattaggtggacatatttgtttgaagagatagg

SEQ ID NO: 585518 - DNA, 519 bp, Homo sapiens
ttcaaagaatatttcccttgcaattctctttgttcttactagttgataccattttaaaacttttgctattattttaccagtgtttgtggagggttcaaacctccatttttaatgtaaaatcctggaatttagtcttactaacctctaactttttattttattttattttattttattttattttatttttgtagagacaggatctcaatatgttacccaggctggactccaactcctagcttcaagcaatcctcccacctatgtcagcgactccatcttgaatasggactgggtaaaataaggctgaggcctactgggctgcattcccaggaggttagttattcttaatcacagcatgagatatgaggtcagcacaagatacaggtcacaaaaaccctgctaataaaataggatgcggtaaagaagccagccaaaacctaccaaaaccaagatgaggatgaaagtgacctctggtcatcctcactgctcattatactctaattataatgcattagccag

SEQ ID NO: 585519 - DNA, 519 bp, Homo sapiens
ttcaaagaatatttcccttgcaattctctttgttcttactagttgataccattttaaaacttttgctattattttaccagtgtttgtggagggttcaaacctccatttttaatgtaaaatcctggaatttagtcttactaacctctaactttttattttattttattttattttattttattttatttttgtagagacaggatctcaatatgttacccaggctggactccaactcctagcttcaagcaatcctcccacctatgtcagcgactccatcttgaatagggactgggtaaaataaggctgaggcctactgggctgcattcccaggaggttagttattcttaatcacagcatgagatatgaggtcagcacaagatacaggtcacaaaaaccctgctaataaaataggatgcggtaaagaagccagccaaaacctrccaaaaccaagatgaggatgaaagtgacctctggtcatcctcactgctcattatactctaattataatgcattagccag

SEQ ID NO: 585520 - DNA, 396 bp, Homo sapiens
cttatcacatactagttatttctyaaacagttggagtaagagctaaattttctgttatttgtgacgggtgcctgagccgtttgggaaaaggtgaccctagaaggccagaggaattgggaatgcctgggttgcctgtggagagttgagtaacagtctccatgtgctgggcacctgaagaaattactcctgaaggttaatcctaaagtgtttcacttcattatttcccatgggaggagaaactctagctgaacttcgcgacctatgtaggacttggggaagggcttagcagacgtttagggtctttgcaatgaatctgaccctataagtcagctgcagcttctcattggtctatacatacctgtctgggtaaagggctcctttgaatatatctgatca

SEQ ID NO: 585521 - DNA, 560 bp, Homo sapiens
ttcctcccatctcctctggtactccaaccaatcgtaggttcagtctttttataaagtcccatgtttcttggaggctttctccattccttttaattcttttttctctattcttgtctgcatgtcttatttcagtaaggttgtcttcaaactctgatatcctttcttccacttagtggattcggctgttgatacttgtgtaagcttcacgaagttctcatgctgtgtttttcagctccatcagatcatttatgtttctctctaaactggttattcttgttagcaattcctctaaactttcatcaaggttcttaccttctttgtattgggttagaacatgctcctttagttcatcatagttttttattactcatcttctgaggcctacatctgtcaattcatccatctgatcctccgtccagttctgcacccttgatggagagayactgcaatcatttggaggagaagaggcagtctggccttttgggttttcagaatttttatgttgattctttctcagcttcgtgagtttgtctagtttcagtctttgaggctgctgaccc

SEQ ID NO: 585522 - DNA, 597 bp, Homo sapiens
tccacttctacccaaaaaatctttagaacactggacaaattgaagttgtctcttcctttccatcccactctctggatactgtatagagagaagcggccaacaatgagcaataagttcaataaacaaggagcctagataattctttgaactagctcatcagtctctgagctgttaatttcctgctttatctttactatcattaactaaccaagatcgttggccaaatattttctttgagcatttgctttctcaccatcaatagggagctaatttctgtaggaggaacacactgatattctggtgtaatttactgaatgaggaattacttagtttatctatgacactcagacctcccactccatacaatttactatttctcttaggacattactctgggaattatctttccacttcacaaagttagtgcctggaggtcagtatcccgtaagtggcacagttgagcaccctctgctttmagaaaataagtagctcatagtcatctaaaggagaagggagaaattcaaacacatcattaatggttataataataaaagctatttgttatctaacaggaccagatattgtgctagtcccgtt

SEQ ID NO: 585523 - DNA, 210 bp, Homo sapiens
gttgccgtgtctgtgtagaaagaagtagacatgggagacttttcattttgttctgyactaagaaaaattcttctgccttgggatcctgttgatctgtgaccttacccccaaccctgtgctctctgaaacatgtgctgtgtccactcagggttaaatggattaagggcggtgcaagatgtgctttgttaaacagatgcttgaaggcagcat

SEQ ID NO: 585524 - DNA, 180 bp, Homo sapiens
ggaatctctagcatttgttttcaataaaggatacaccaggcctttttctgcaaacagccatgtccattacattagacttgtccctgtgtcagtttgcagatccctttgtttattctgcccttccttcccccagattsgttggggaatgggtcttgaatgtggcgtctgacccgaatgctt

SEQ ID NO: 585525 - DNA, 180 bp, Homo sapiens
ggaatctctagcatttgttttcaataaaggatacaccaggcctttttctgcaaacagccatgtccattacattagacttgtccctgtgtcagtttgcagatccctttgtttattctgcccttccttcccccagattggtkggggaatgggtcttgaatgtggcgtctgacccgaatgctt

SEQ ID NO: 585526 - DNA, 574 bp, Homo sapiens
tcactgtagcctcaaattcctgggctcaagtcattctcctgcctcagcctccgaagtagctgggatgacaggcttaagccacagtgcctggctgtttcctttcataaaactactattttaaatgatagagtttaaggttaaaatatcaaaacccaaamgtacacttctgatgtcgctgaagtcacaaagaccaacgtgtcttatttgtatgttagttttaggaggtaaagaagtctgggtgagagaagaaaggaggaaattaatgtccattaagggtctattaggttttgctccaaattggttttttcagcagtgtttatgttagtgccatgaaaaaagatctatgatccaatatgtttgggaattgctataatagtccctctcttgaagatttaccatgcacattaggacaacacaggtttccagaagctctgaaggcaagaaacctgtttaagtttgtctaattcagtgtttcttacattttgttgaacatggcctgtttattttaatgtgttcctaatactggtctctcaggtgccagatactgtgctaggggcttcagccatgttaactg

SEQ ID NO: 585527 - DNA, 205 bp, Homo sapiens
tgaattcagtccctgacatggytatttgcccctgtgctaaggaataaacatttattgggctgaagatattctaagagtcatcccctcgcagttatttgcaaggtgtttacatttaggaatattcttctattaggtttgtgtgtgtggttttgtctctttctcttagaactcaagtatcaggaaattctaatcaactagtgttttc

SEQ ID NO: 585528 - DNA, 574 bp, Homo sapiens
tcactgtagcctcaaattcctgggctcaagtcattctcctgcctcagcctccgaagtagctgggatgacaggcttaagccacagtgcctggctgtttcctttcataaaactactattttaaatgatagagtttaaggttaaaatatcaaaacccaaacgtacacttctgatgtcgctgaagtcacaaagaccaacgtgtcttatttgtatgttagttttaggaggtaaagaagtctgggtgagagaagaaaggaggaaattaatgtccattaagggtctattaggttttgctccaaattggttttttcagcagtgtttatgttagtgccatgaaaaaagatctatgatccaatatgtttgggaattgctataatagtccctctcttgaagatttaccatgcacattaggacaacacaggtttccagragctctgaaggcaagaaacctgtttaagtttgtctaattcagtgtttcttacattttgttgaacatggcctgtttattttaatgtgttcctaatactggtctctcaggtgccagatactgtgctaggggcttcagccatgttaactg

SEQ ID NO: 585529 - DNA, 578 bp, Homo sapiens
tttctcagctgttttgtctatgacattgttttgacagctgatccggtcttttgtgtcttgttttctgtttttttttttttttttttttttttttttttaaggaggagcaatgctttgcctactcggaaatccaccattctgagttgtcaggtttcagccgtataatgccacagagcagcagaaaaacaacacaggccagccaggcatttgcaagaactggataggggagaggaattgacctaattgaaatggagcagaggctgcggtggggccaggaggcagtccgagttcagcggcctccagtgtgctgcccccacccagggcagacccgggccaggctgcaaccaaatgacttgaagctctgaggyagcaaggccttgggagtttgaatcctgccctccgaggggtggatattccgtcaggatgcaccgggccagttagtgcaaacgttgggtgcttctgttttcatcgggaaacggctgctgccttgaggttgccaatgcctttctccagcccatcagccttggccttgctctgggaccctgcaggcccccatctgtggctcctggacagttagc

SEQ ID NO: 585530 - DNA, 595 bp, Homo sapiens
atttctttgcacatattttaatcaattgatatttattttcattttattataattttggtctcagttttaggttactttttttgaataactgtttgtatttatttatttatttctattataaaatccaaatctatttgtaggtcattcagattatacagaaaagcataaamctataatccatccctagagataactactgtttaactgtcactatgctcataggtctatagttcttcccaagaaaatagattcttcaaattttgtagtgacaatgaagaaaaatgcaattaatttggtggaaatttgttttacagtcaaatttctggtcaagcaccttaaaactagctatgtgatcttgaaaaaaaccactgaatatgtctaagcctattttctcatttgcaaaatgggaatggtaatacataacctatctcatatgcagttgtaaagattaaatctataatgtgaggaataaagagcgttaaatattcattgaaagtaatggcaaaatgccaattacttttgtaccaacctaatatagatatagggatatttgaaaattgagatttgtatttttatgacactattaaaaatggta

SEQ ID NO: 585531 - DNA, 595 bp, Homo sapiens
atttctttgcacatattttaatcaattgatatttattttcattttattataattttggtctcagttttaggttactttttttgaataactgtttgtatttatttatttatttctattataaaatccaaatctatttgtaggtcattcagattatacagaaaagcataaaactataatccatccctagagataactactgtttaactgtcactatgctcataggtctatagttcttcccaagaaaatagattcttcaaattttgtagtgacaatgaagaaaaatgcaattaatttggtggaaatttgttttacagwcaaatttctggtcaagcaccttaaaactagctatgtgatcttgaaaaaaaccactgaatatgtctaagcctattttctcatttgcaaaatgggaatggtaatacataacctatctcatatgcagttgtaaagattaaatctataatgtgaggaataaagagcgttaaatattcattgaaagtaatggcaaaatgccaattacttttgtaccaacctaatatagatatagggatatttgaaaattgagatttgtatttttatgacactattaaaaatggta

SEQ ID NO: 585532 - DNA, 595 bp, Homo sapiens
atttctttgcacatattttaatcaattgatatttattttcattttattataattttggtctcagttttaggttactttttttgaataactgtttgtatttatttatttatttctattataaaatccaaatctatttgtaggtcattcagattatacagaaaagcataaaactataatccatccctagagataactactgtttaactgtcactatgctcataggtctatagttcttcccaagaaaatagattcttcaaattttgtagtgacaatgaagaaaaatgcaattaatttggtggaaatttgttttacagtcaaatttctggtcaagcaccttaaaactagctatgtgatcttgaaaaaaaccactgaatatgtctaagcctattttctcatttgcaaaatgggaatggtaatacataacctatctcatatgcagttgtaaagattaaatctataatgtgaggaataaagagcrttaaatattcattgaaagtaatggcaaaatgccaattacttttgtaccaacctaatatagatatagggatatttgaaaattgagatttgtatttttatgacactattaaaaatggta

SEQ ID NO: 585533 - DNA, 595 bp, Homo sapiens
atttctttgcacatattttaatcaattgatatttattttcattttattataattttggtctcagttttaggttactttttttgaataactgtttgtatttatttatttatttctattataaaatccaaatctatttgtaggtcattcagattatacagaaaagcataaaactataatccatccctagagataactactgtttaactgtcactatgctcataggtctatagttcttcccaagaaaatagattcttcaaattttgtagtgacaatgaagaaaaatgcaattaatttggtggaaatttgttttacagtcaaatttctggtcaagcaccttaaaactagctatgtgatcttgaaaaaaaccactgaatatgtctaagcctattttctcatttgcaaaatgggaatggtaatacataacctatctcatatgcagttgtaaagattaaatctataatgtgaggaataaagagcgttaaatattcattgaaaktaatggcaaaatgccaattacttttgtaccaacctaatatagatatagggatatttgaaaattgagatttgtatttttatgacactattaaaaatggta

SEQ ID NO: 585534 - DNA, 429 bp, Homo sapiens
aaaccccatctctactaaaaatccaaaaattagctgggcatggtgatgtgcgcctgtggtcccagctattcaggaggctaaggcgggaggatcccttgagcctggaaggcggagattgcagtgagctgcgatcgcaccrctacactccagcctgggcgacagagtgagactctgtctcaaaattaattaattaaaaattaaaaacaaataaataaaagctaaacaaacaaatgaacagacagacagctagaataaactccatgccccactccgccctgctccacagttactgactcatcattcctcgggtgaaaacctggttgggaccgctcttctttttgtctgcccagcactcactgtcccatcttctgagaccaccctgcctttcctttggagaccacccccaaccccaatatcagtccaggggca

SEQ ID NO: 585535 - DNA, 375 bp, Homo sapiens
gtagcagtggctggagagttaagatgagaactaggttagagggtatcctggagtctaatgaggaaagtgtttcaaggaatagggagtgatcamctgtgtcaaatactacaattgagatgagggctgagaattaactatttgatttaacaatgtggcagttattggtaaccttgataaagggtagttttagtggagcggttggaggttaaagactgattggagatgttgtctttccaaatgcaaaacatttcctaaaccctgatgagactgggtattcagataaaaatctgtaactctgggtagatgttcttggcaggagaagatttaagatatgtaagtaatattattaacaactgtctttattaattattcatt

SEQ ID NO: 585536 - DNA, 555 bp, Homo sapiens
aatattcagtgatggatacccccaaataccctggcttaatcactacatattctacacatgtaaaatatcacacgtaccccataaatgtgtaaaatagtatgtataaataaaaaataaaatcttagctcttcttcttatgctgagatgagcttgcaaaaatcactttgagcagaagcatccccacttgtgaagggggcatgacaccttcttcacagaagggtgaagaayatttaaggtgctcattcgtgcttggagtattatgcatggctcaataaacatttgctgtttttctgctttctttctcatcctgaccctgagatttctaagtatctttataaagcaaccagtactcatttcttagaaattttagaaggagcctcaacatttttccagtctgacttttctggaatccttcccacagcttccctttccaagggcctctgagccttggcaaagcccagtccatggcttccttgtgagcaggtggcctattccacggtaggacaggtcttaccatggtaataatgtcacttgctttttatttagctaaaattt

SEQ ID NO: 585537 - DNA, 588 bp, Homo sapiens
  misc_feature 399: n = A,T,C or G
gaaacttatgtaatgtaatacaagtagatcaggtatttatcaggtactagtctgccagtccagtgggaatatttctgtacctctgccctaaggccttggtgctccctagcttccttgcccctttccaggaacaccaccaccctgatctcttcatgatctagtaactacagggttcgtgctagcccagcaggggtctctagaattcctaccttttttcgtamcctatagttctctaccctataggatggactgttaaatattttgactatcacacctgctgagatgataagtgctatggaaaagaaaaatggaacaaggcagtaagtcagaactacaattttaaatagaatggtcagagtcaattagttgaaaaagtggcatttgaataaagagctgaangatgggaaggtatgagccatgcagttataagggaggaaagcagtccagttagagggatagcaaagagaaagggtacaggactaggagatgagaccaggaggtagtgatgagggttctggattctgtggggccttgtggggcattaggaggacttggaaatttactcttctaaaggaaaggagagctctt

SEQ ID NO: 585538 - DNA, 561 bp, Homo sapiens
tgctcataacagcattcataaaagcccaaaagtccattaactgatacatagataaatgtagtatattcatatagtgaaatgttatttggccataaaaaggaatgaagtactaatacatgctacaacattgataaaycttgaaaatattattccaagtgaaagcagacagtcacaaacgaccacatattgtatgactccatttataggaaatgccaagaataggcaaatatatagaaacaaacagaaagtagactcctagttgcttagacctagcagggggaaggggttgatgagaacactgtgaagtgctggctaaggggtagggtgtttctttttgaggtgacgaaaatatttaaaaattcactgtgatgatgctgctgaggctgtggagaaataggaatgcttttacactgttggtgggagtgtaaattagttcaaccattgtggaagacagtgtggtgattcctcaaggatctagaaccagaaataccatttgacccagcaatcctattactgggtatatacccaaaggattataaatcattctactataaagacaca

SEQ ID NO: 585539 - DNA, 465 bp, Homo sapiens
tgtattccagccaccctgggcgacagagcgagactctgtctcaaaaaaaagaaaaaaaaaaaagacttctgtacggtaaagcattctataaagcarggggaaagacaaaccaataataagtgctactgtgtaacagacagacaagctcacctccttcatcctcaaagacctaaagcaactcaggacaaaatgagtaaggaatataaaccagcagttttactgagaaataaaaagggtttttaaaagcttcaacttcactcgtaaaaagagaaatgccaactgaaacagtaagatttgtttctcctatcaaatgggcagagattcacagtttgatagcacccagtgccagggaggggtgttgggaaacagtcaccctcagacactactggttgagagtgaaattggtgcaatttttgggatggtgatttggcaatgtctttcaaactcctttgacccagaactcaa

SEQ ID NO: 585540 - DNA, 465 bp, Homo sapiens
tgtattccagccaccctgggcgacagagcgagactctgtctcaaaaaaaagaaaaaaaaaaaagacttctgtacggtaaagcattctataaagcagggkgaaagacaaaccaataataagtgctactgtgtaacagacagacaagctcacctccttcatcctcaaagacctaaagcaactcaggacaaaatgagtaaggaatataaaccagcagttttactgagaaataaaaagggtttttaaaagcttcaacttcactcgtaaaaagagaaatgccaactgaaacagtaagatttgtttctcctatcaaatgggcagagattcacagtttgatagcacccagtgccagggaggggtgttgggaaacagtcaccctcagacactactggttgagagtgaaattggtgcaatttttgggatggtgatttggcaatgtctttcaaactcctttgacccagaactcaa

SEQ ID NO: 585541 - DNA, 465 bp, Homo sapiens
tgtattccagccaccctgggcgacagagcgagactctgtctcaaaaaaaagaaaaaaaaaaaagacttctgtacggtaaagcattctataaagcagggggaaagacaaaccaataataagtgctactgtgtaacagacagacaagctcacctccttcatcctcaaagacctaaagcaactcargacaaaatgagtaaggaatataaaccagcagttttactgagaaataaaaagggtttttaaaagcttcaacttcactcgtaaaaagagaaatgccaactgaaacagtaagatttgtttctcctatcaaatgggcagagattcacagtttgatagcacccagtgccagggaggggtgttgggaaacagtcaccctcagacactactggttgagagtgaaattggtgcaatttttgggatggtgatttggcaatgtctttcaaactcctttgacccagaactcaa

SEQ ID NO: 585542 - DNA, 616 bp, Homo sapiens
cagggttcccaagggctcctaagacctgatatgcaagggcagaatgaattttacatgtcctgttccccagaaatatacaaarttgagtattttagccagttttgttctgcttcactcaggggtccatttctaaaattaagactacacaggtgtttccttgactcagacaaacgacaggaaactcaaacctcagtgcaacacccttcttgtctctgtaaccctcagggagatagctaagtcacttcacagctccatccagaagctcaggggaacacattaagtctcaattcccacacctaagagcaaacaaaacctagtagtaacagcaactataatagttacaatttaagaagctcctgctctatgttcaatacttgcaaaacactttagaaagtctgatttattacttgcccagccctgcaaggttggtgctattgttcttgtcttttcagatgtggtacctggggctccagtgatataagccactcggcttggaaggggcgaagttggcatttacgtccaggcctattgggttcctgagcttcagctctgaaccccctggggcttgagggctgcggggcctccctgcagacaggctggcactttcagggtggta

SEQ ID NO: 585543 - DNA, 340 bp, Homo sapiens
tttccccatgaataagaagagtttacttgggatcccagagggagatgtttcccatcatcagtaacatctggggaacatctggtgagtccatcccaggacggggagatgcttttctggagaacacacgtcacttgattcttcttattctcctgtatttwcctttgttctctctttctcttccattgggctccccactctaagcgccactccagccctcaccagcaaactccctaccctgatttctgactcgtctggtttccccaatatacaactcaacaggatgcaaacgtaggcagcatgagagaccctcattaattctagtgcccaaccctgcccagtt

SEQ ID NO: 585544 - DNA, 340 bp, Homo sapiens
tttccccatgaataagaagagtttacttgggatcccagagggagatgtttcccatcatcagtaacatctggggaacatctggtgagtccatcccaggacggggagatgcttttctggagaacacacgtcacttgattcttcttattctcctgtattttcctttgwtctctctttctcttccattgggctccccactctaagcgccactccagccctcaccagcaaactccctaccctgatttctgactcgtctggtttccccaatatacaactcaacaggatgcaaacgtaggcagcatgagagaccctcattaattctagtgcccaaccctgcccagtt

SEQ ID NO: 585545 - DNA, 303 bp, Homo sapiens
gccctaaatgtgagtgagggaaggcccgaggctgatgcctccatatgcctmtgcttccccacactgaaccttcaggaagtgtgggccaagcaggagtctccctcagaaccacagccatcccccctacttagaggacctgtgcctgagcttccaccctggcttacttcccacaggaggctaggaagcccttgctaatcagcatccagccttcacctgtcagctcctaaagagagaagagagcagagaagagagctgagaagagagcagctctaggagcttccaacatttgttcctcctgcccgg

SEQ ID NO: 585546 - DNA, 535 bp, Homo sapiens
gcctatatcgtgcatggtactgattctatatatagcaagggattaagtgaatttcaaaacttcagctcaccagaagaaacccagagattttatctacccatgtgtttaaactgcacagtcattaaaaaaaaaatggtactgtagctccaagcctggacgtgatccctgatcatctttgacattttcaaaaacagaaaattatttggctttattttaaatgtcacccctctgcaggtgaggaatgtattcatttaagagagtgcaggagggaacaaactgtgctgatgcttactgtctacagaacgtttaatagattcgaccacattcttgtgaaatagaatttgggtatttgctgaatcatatagaggcaatgatcaaaaggaaagctcttacttactcttcagaagcagtggggtgtagagggaagtttcctggtttaagaggtagaatgtaggatttgagtcccaacttcatcagtcactagctctgagtctttggacaagtmaactactaccataggcctctgttcccactt

SEQ ID NO: 585547 - DNA, 548 bp, Homo sapiens
gatattattaattctaattgtactactaacattagtcccatactgtggaggaagaaacaattcactattgtaatttcaactggatactaatataatattaacatactgtaaaacaagcagtattttgtaactgttagaattaaatgtggaaaagaaaccaaatacatattccaaaaatagctcatacagtaaaattgtccccagtatcttgataacatcaagaaatcatgaattatgtggcatgttagtcttaaatacaactctgttgtatactagacatgcaatcttgaacataactatttaatacttttgcttcccttttcacaaaagagggatgaacatatatatacttcagtacaaagtccaatagttatcattcctcyaccctgctttccttgatctgatgtgtagtagaatgtgaaccattttggtaacctaatttaacatggtactgaaaatgtttattagtatgttaagtgcacagatttggattgataaatgttatttatcttttaaaacctattgaattgggctgggtgtggtggctt

SEQ ID NO: 585548 - DNA, 600 bp, Homo sapiens
agcaacggtaattcttcagtagcagaataccaaaaaaggaaatgcatgaaatgcttgaaaagaaattcaaaataattatcttcagaaaactcagtgaaatgcaaacaaatacagataaacaatacaataaaatcaagaaaacaattcaggatctgaatgaaaaattcaacagaggtacatttcattaaaaaaagagaaaaaaacagaaatatcagccaggcatggtgattcacacctgtaatcccagcctttgggaggctgaggcaggtggatcaygaggtcaggagttcaagactagcctggccaacatggagaaacgctgcctctattaaaaaataaaaatacaaaaattagctgtgcatggtggcatgtgcctgtaatcccagctactcaggaggctgaggaaggagaattgcttgaactgggacccaggaggcagaggtagcagtaagccaagattgtgccattgcatccagcctgggcaacagagtgagactctgtcaaaaaatatatatatattaaaactgaagaacccaatgtatgaaataaacaatacttatatagtttcaaatagctagaaagtgtatgttgaatggtccc

SEQ ID NO: 585549 - DNA, 581 bp, Homo sapiens
tgacaagttactaggcttctaagctttctcagcctytaagttatctcatctgtaaatgagataatgccctcttgcaaagttgatgtgagtaataaatgaagccgccagagcaatgtttgacatacagttaacttggatgaattgagtgatgctgctgttccctagtaagagtatcctccagtaggtatgcaggtagttacatttgtgggtgtgaacagtgtagaattgatagtgtttccctagagcatcagcatgaaggtttcttaggtagcttacagtggtgtggggaggaaatggtttcatccatgtgttggttccttcagcaatggtggtattttctttggcacttcggtttagattcttctggacttttttcctagggcccatttaaactttctcagcaaagcttgaccaatttttagctgtagactccaggatgtttcatgaacactttctgcttgtcactaggaacgtttaaaatgttaatttcctggaatttttggactacttaacattcagtcgtgagttaggattttatccagatcctttggaatttgtttttacatgtttatcacaaatct

SEQ ID NO: 585550 - DNA, 369 bp, Homo sapiens
tgtgactgctgaaggaaaaataaaaaatattatctttttcatgtttcgatagatactacttttgaaaaccaggaagagcctacataagcaattacagattatctgcaattctaaacttgtacttaagttyttactttaccttagaaaacccttatcaaaaaaagataaactcctaccactacttacgttaattattttcctaatccaaccaatccttacacagcactaatatagttcctagaaaagctattatgttctagagctgcactgtccaatcaggtagccactaagccacctgtagttatttaaataaatttaaattaaattaaagtcagtttctccatcacactagccacatttcaagtcata

SEQ ID NO: 585551 - DNA, 583 bp, Homo sapiens
  misc_feature 16: n = A,T,C or G
ccttctatggatgtgnctgtaggagagaatcttcctgcactgtggctttttatagtatttaattaccagagcactccttttaacagaatagtcacaaaggcccagaattccagatttaggtgtgatgaagcaagtcgattgacttctacagccctggcacagatatctttccygtgtctcacattaacatctccatgtattatttgggcctggtggggtggctcacgcctgtaatcccagtactttgggaggccaaggtgggtggattgcttgagctcaggagtttgagattaccctgggcaacatggtgaaataccgtatctacaaaaaaaatgcaaaaattagctggctgtgatggctcacgcctgtagtcccagctacttgggaggttgaggtgggaggatcacttgagcctggaaggtcgaaactgcagtgagcagtgatcatgccactgcactcaagcctgggcaacatagtgagtccctgtctcaaagaaaaaagaaaaaagaaaaagaatttccatgtattatttccattctgttaatgtacaacattttgaaaagatcttctgaaaatataagga

SEQ ID NO: 585552 - DNA, 520 bp, Homo sapiens
agctcaagcgattctcccttctcagcctcccaagtagctaggacaacagatgcatgtcatcatgcctggctaattttttattttttttgtagagacasggtctcactatgttgctcaggctggtctcaaactcctggcctcaagcagccctcccacctcggcctcccaaagtgttgagattacaggcatgagccactgtgcccggcctaattatattttaaacaatggcttaacttgattcatcttatggaactaggaggctaaatagaaaagagagacttaactttcctttctctcctttcttgtcataatccccctttcctttgtcttccctccctctcactcttccttctcccatagctttgaaattttgaggctgggtgcagtcactcatgcctgtaatcccagaactttgggagactgaggcaggtggatcacctgaggtcaggagtttgagaccaacctggccaacatggtgaaacacatctctaccgaaaatacaaaaattagctgagtgtgg

SEQ ID NO: 585553 - DNA, 520 bp, Homo sapiens
agctcaagcgattctcccttctcagcctcccaagtagctaggacaacagatgcatgtcatcatgcctggctaattttttattttttttgtagagacagggtctcactatgttgctcaggctggtctcaaactcctggcctcaagcagccctcccacctyggcctcccaaagtgttgagattacaggcatgagccactgtgcccggcctaattatattttaaacaatggcttaacttgattcatcttatggaactaggaggctaaatagaaaagagagacttaactttcctttctctcctttcttgtcataatccccctttcctttgtcttccctccctctcactcttccttctcccatagctttgaaattttgaggctgggtgcagtcactcatgcctgtaatcccagaactttgggagactgaggcaggtggatcacctgaggtcaggagtttgagaccaacctggccaacatggtgaaacacatctctaccgaaaatacaaaaattagctgagtgtgg

SEQ ID NO: 585554 - DNA, 520 bp, Homo sapiens
agctcaagcgattctcccttctcagcctcccaagtagctaggacaacagatgcatgtcatcatgcctggctaattttttattttttttgtagagacagggtctcactatgttgctcaggctggtctcaaactcctggcctcaagcagccctcccacctcggcctcccaaagtgttgagattacagrcatgagccactgtgcccggcctaattatattttaaacaatggcttaacttgattcatcttatggaactaggaggctaaatagaaaagagagacttaactttcctttctctcctttcttgtcataatccccctttcctttgtcttccctccctctcactcttccttctcccatagctttgaaattttgaggctgggtgcagtcactcatgcctgtaatcccagaactttgggagactgaggcaggtggatcacctgaggtcaggagtttgagaccaacctggccaacatggtgaaacacatctctaccgaaaatacaaaaattagctgagtgtgg

SEQ ID NO: 585555 - DNA, 520 bp, Homo sapiens
agctcaagcgattctcccttctcagcctcccaagtagctaggacaacagatgcatgtcatcatgcctggctaattttttattttttttgtagagacagggtctcactatgttgctcaggctggtctcaaactcctggcctcaagcagccctcccacctcggcctcccaaagtgttgagattacaggcatgagccactgtgcccggcctaattatattttaaacaatggcttaacttgattcatcttatggaactaggaggctaaatagaaaagagagacttaactttcctttctctcctttcttgtcataatccccctttcctttgtcttccctccctctcactcttccttctcccatagctttgaaattttgaggctgggtgcagtcactcaygcctgtaatcccagaactttgggagactgaggcaggtggatcacctgaggtcaggagtttgagaccaacctggccaacatggtgaaacacatctctaccgaaaatacaaaaattagctgagtgtgg

SEQ ID NO: 585556 - DNA, 568 bp, Homo sapiens
tctgttaatgtttgacaatatggtttgtcacataaagcctttttagtagcatccctctctggaaattctctcccatttccgctgttagccaaagctaatcatgaaacataaaaaggtatccagaaaaaggcaagtacagtatcacatattaattgcacacagcaggtttatgatgcagttctctttcacatgatgaaaaggctaagagaaagaaaaaaaaacagaaaaaagagcaaaatagatgagcaattgtctctagtctggtcttctaataggcactgattcattaaatatttctgagggcaacagagtcatctaacccaayagaacctcctaagatgttcttcctgacatgtaaatcagcaatgagcaggagaaacctacaatggagctgaaatttactaccacaggacgtggcccaagctgggttggttctctgccaagtgacaaaccttgccaaacgatttaacacctgctgcagttatcagcacacatatttccttagacaactgagaaacaactcatcggataaaccaataagtaaaacaaagtgcctaacatatcctca

SEQ ID NO: 585557 - DNA, 515 bp, Homo sapiens
tgcaattcatagatttagaaaaaagtattaaattatctgtattttttaatctggcttctttcacttagcataattattttgagattcatccatgttagtatatttatctgtacccattcctctctgttgccaagtactattccattatgtaaatgtaccactgtttgtttatgcatttatctgttaatagrctttttcagcttattgctattacaaataacgctgttaagaacattcatatacaagcctttgaacagacatagacattaatttctcttggttaaaacctaggagtgtaatggctgggtgatatgatagatgtatatttaatattttaagaaaatatcaaatagtttttaagtagttgtaacatttttacattatcacaacatgtgtatgagagttctaatctcttcatatccctgccaaaacttggtatactacatgtgtactggtatatcattgtggttttattttgcatttccctaatgactaatgatgttgagcatcttttc

SEQ ID NO: 585558 - DNA, 520 bp, Homo sapiens
  misc_feature 80: n = A,T,C or G
ttgccgcaacactaaagctgtatacccactaaacactaattcatcctccccactcctcctagtccttggtaaatgctttnctactttctgtttctatcttttgactgctttagctacttcatatgagtggaatcatattattattattatttcaaagacagggtctttgtccttttawgactactcacttagcctaatatcctcaacgtttatccatgttgtagcatcctgtcacatgctacaacatggatataccttgagaatattaggatattaataccacataacattccattttatgtatataccacattttctttattcacttgtctaacaatggacatgtgggatgtgtctagctcttggcaaatataaataatgctgagatgaatgagggtatgtaaatatttcctcagaatctcactttgaattcttatggatatatactcagaagtgggattgctgaatcatatagtagtaattctactttaaagtttttgagaactctttttactgcttt

SEQ ID NO: 585559 - DNA, 520 bp, Homo sapiens
  misc_feature 80: n = A,T,C or G
ttgccgcaacactaaagctgtatacccactaaacactaattcatcctccccactcctcctagtccttggtaaatgctttnctactttctgtttctatcttttgactgctttagctacttcatatgagtggaatcatattattattattatttcaaagacagggtctttgtccttttaagactactcacttagcctaatatcctcaacgtttatccatgttgtagcatcctgtcacatgctacaamatggatataccttgagaatattaggatattaataccacataacattccattttatgtatataccacattttctttattcacttgtctaacaatggacatgtgggatgtgtctagctcttggcaaatataaataatgctgagatgaatgagggtatgtaaatatttcctcagaatctcactttgaattcttatggatatatactcagaagtgggattgctgaatcatatagtagtaattctactttaaagtttttgagaactctttttactgcttt

SEQ ID NO: 585560 - DNA, 428 bp, Homo sapiens
cagaaaatgtaatgccttatgtacttagtggtttgaagtgaaaattgagatttatataatgaagatgctgattcatagcagaattgtgcttcaggatgatcagatgaaacacaaactttccgttgtgcctcattatttagaagacactgatagaaaagtgaagagaagtaaatgatgggcctaaaatakcattatggaacaggcttggcaactgactttaaagtaggtatggtacacttcagtactagcagatttagattgaaattcaatcagccaaaatatactcaggcacttttatatatggcatacagatatatgttatctagtaaaaaataaaaactagaaaacaaatatagacctggatatgttattagaaggcatctaatcaagtactccaagtaaaaatgaggtcattagcccagggaaat

SEQ ID NO: 585561 - DNA, 439 bp, Homo sapiens
cgtgtctttgctattgcgaatagtgctgcaatgagcatatgtatgcatgtatctttatagtaaaatgatttatactcctttgggtatatactcagtaatgggattgctgggtcaaatgctatttctggttctatgtctttgaggaatcaccacactgttttccacaatgtttgaactaattgacattaccaccaacagtgtaaaaacgtccctgtttctccacagccttrccagaaatcataattttaatgtttatgaaagttaattgtttttctctgtagcttcaatttgtgtttttctgatttgcaataagtattcttccatatacacagggccatttttttgcctttgctataaaatgttcattcacacttttacttatttttctattgggttgtcttattttattgattctacatataaatcctatgtcaaaaaa

SEQ ID NO: 585562 - DNA, 602 bp, Homo sapiens
aaattgctttattcactgctttattcccagtgattgatacatagtagatgttcaataaatatttgtcaaatgaacaaatgaatatcggctataagtttaattttatcacatacacataagtctcaaaaatagatggggtcagtcatctatttttgatttgtgaaggtttcaaaagttaattttaccttcttttccttctcagtacattactaaaaataactgtaactgtaactctaagagaatgaatactgcctgaacaactctggtcatttgtctctgatttatgtcactttcaataattcttacagcatagacacaaaagattactagaatatttgacaaaacaagtgcaatatcaactttataacatgtgtttcacaacactggaaggacagtggtgttagttayaaaaacaaacactctctgcccactccctctcaaaacacctgaaatttctttttattttagcaccaaatgtgggatagaatacatatttatataaagcactgtagacatatttactttcatctacctacttccttcacccctaaactggaaagcctcgagtatgacatgtcactaatgcagtatttcaaatttga

SEQ ID NO: 585563 - DNA, 376 bp, Homo sapiens
gtagcctttttgatgtgtatatgtgtgcttttgtgtgtgtgcatgtgtgtgtgtgtgcccgtgcatgtgtgcacacaggaactaaacatttgattgtacttgagtggggagagttgaggtggaggtcaagataaggtgcaataacatcctacttattttcaggaagaactaaaccatccttctaagcctattcaaacagtgctatttttycccctcttgaattaatatcccaattgtctttctgtccttttcatttcacatcagcactttgcatgtcatgcgattatacctttccatcaccatgtctctctgactagtgtaagaggagtttgcacagagtatgtgaagcttcagaattaacatgacattcattctt

SEQ ID NO: 585564 - DNA, 501 bp, Homo sapiens
aaattctttgctggcacaaaaggccctttatgatcaagttcctgccttgtgataagagtcttcccttgctgttctgccatggagctggataacatgctcacagtcccaggactatgccatgttcttttaccttgtcttggtttttcacatgctatttcttgttcttgggacactttcattttccattcactttgggaacttctcttcattctttaaacttcagcataaatatcacgtctcagtaaatgtttctttgattctcaaagatagtctctctgggctcttaaaacactgcttatgtttctgtcttctaatacatagtatattatattaattagtttgaatgccccttttcttgcttaccatgagtttttttgataacaggggcagtttcatatttatctttataagcctagcacagtgcctggaatgtactagttatttcagtacatgtcgagtggcttacatggctrtgccatgtgacatacccagacataaatt

SEQ ID NO: 585565 - DNA, 568 bp, Homo sapiens
tattaataattttaaaggtgtggatggtaatgctaaaagtaaacattaccgtctttatagtattgtccataaaagacctttttggtaaggtataataatttgtaaataagttcagattcaggatccaatttttttctcttaattcatttactttataaaataaatatacaaatcaatttcaaccacctccttccccacccgcttgggtgactcatctacctacctcacttcctggttcactgggaaaatagcttctcagcatcatggtgctcacgcatttacttgaaaggtgcactgtctgctttacctcaagaatacatcttaaattgtccacctgtctcctctacatggccttcacaatggcagtggcctcctgttggkactcctactttcacttttctccccgcagtctgttcacctcctggcccagagaccatatttagaccccttcaatggattcctgtttgtggtttttttttttttgaggaattcttttttgcttttattattatttttagttgacacagaacaattgtacatacttatgggggtacagtgtagtattttg

SEQ ID NO: 585566 - DNA, 200 bp, Homo sapiens
aataaaatcttatcatcaaggagcttcacaatctataaatgaaaagcaaaactgacaaaaatgaaataattgaagaaagagtattttctttagaagttcagagaagaagctgggtgtagtggctcatgtttctagtcccagcactttgggaggccaaagcsggtggattgcttgagctcaggagttcaagaccagcccgg

SEQ ID NO: 585567 - DNA, 619 bp, Homo sapiens
caacataccaaaaacagagcagcacaggctgttttatgtagcactgctgaccatttgccttggcattggaggcgtaagagccatcgtctgtccactgggtgcttttggccttcaggagtatggatcacaaaaaacgatgtctttttttaactggtaagtagcactggctaggagagaaaagaggcttatgaccattctcactgtttactttctgattccatttgrgtagtagttgctcagtctttgtgatgaattgggctaagtgatgatgtgatgaatctgtgatgatgattcagtcagtaatcacaggagcttctaagtctcatgcagaccagtacaactcaccagcaccttcccaacacacgcggacacatttatcctccaggtaaaaagatttgaagtgccttgtcctgcagaatagaatgtggctttggaaccaaagagacctgggtggaagtctggactctgcttaacacaggctgactgaccttgacctagtcatttattctctacctcagtttattcatttctgaagggggataatcctcctcttcttcggttttattagaggtaacaccatgtgtattgctggcaaagacttgggacatagtaagtgatc

SEQ ID NO: 585568 - DNA, 619 bp, Homo sapiens
caacataccaaaaacagagcagcacaggctgttttatgtagcactgctgaccatttgccttggcattggaggcgtaagagccatcgtctgtccactgggtgcttttggccttcaggagtatggatcacaaaaaacgatgtctttttttaactggtaagtagcactggctaggagagaaaagaggcttatgaccattctcactgtttactttctgattccatttgggtagtagttgctcagtctttgtgatgaattgggctaagtgatgatgtgatgaatctgtgatgatgattcagtcagtaatcacaggagcttctaagtctcatgcagaccagtacaactcaccagcaccttcccaacacaygcggacacatttatcctccaggtaaaaagatttgaagtgccttgtcctgcagaatagaatgtggctttggaaccaaagagacctgggtggaagtctggactctgcttaacacaggctgactgaccttgacctagtcatttattctctacctcagtttattcatttctgaagggggataatcctcctcttcttcggttttattagaggtaacaccatgtgtattgctggcaaagacttgggacatagtaagtgatc

SEQ ID NO: 585569 - DNA, 619 bp, Homo sapiens
caacataccaaaaacagagcagcacaggctgttttatgtagcactgctgaccatttgccttggcattggaggcgtaagagccatcgtctgtccactgggtgcttttggccttcaggagtatggatcacaaaaaacgatgtctttttttaactggtaagtagcactggctaggagagaaaagaggcttatgaccattctcactgtttactttctgattccatttgggtagtagttgctcagtctttgtgatgaattgggctaagtgatgatgtgatgaatctgtgatgatgattcagtcagtaatcacaggagcttctaagtctcatgcagaccagtacaactcaccagcaccttcccaacacacgcggacacatttatcctccaggtaaaaagatttgaagtgccttgtcctgcagaatagaatgtggctttggaaccaaagagacctgggtggaagtctggactctgcttaacacargctgactgaccttgacctagtcatttattctctacctcagtttattcatttctgaagggggataatcctcctcttcttcggttttattagaggtaacaccatgtgtattgctggcaaagacttgggacatagtaagtgatc

SEQ ID NO: 585570 - DNA, 619 bp, Homo sapiens
caacataccaaaaacagagcagcacaggctgttttatgtagcactgctgaccatttgccttggcattggaggcgtaagagccatcgtctgtccactgggtgcttttggccttcaggagtatggatcacaaaaaacgatgtctttttttaactggtaagtagcactggctaggagagaaaagaggcttatgaccattctcactgtttactttctgattccatttgggtagtagttgctcagtctttgtgatgaattgggctaagtgatgatgtgatgaatctgtgatgatgattcagtcagtaatcacaggagcttctaagtctcatgcagaccagtacaactcaccagcaccttcccaacacacgcggacacatttatcctccaggtaaaaagatttgaagtgccttgtcctgcagaatagaatgtggctttggaaccaaagagacctgggtggaagtctggactctgcttaacacaggctgactgaycttgacctagtcatttattctctacctcagtttattcatttctgaagggggataatcctcctcttcttcggttttattagaggtaacaccatgtgtattgctggcaaagacttgggacatagtaagtgatc

SEQ ID NO: 585571 - DNA, 610 bp, Homo sapiens
aatgtacatagtatagttgaacacatagcaagctctaataaagctaagtatatatgtatgtggtttttaatcacattcaccagcaacacaaagatggctatatgaccaataawgatacatataaatgtatagattactggtaagatggatagaaagattgcagctgataggtgtcaggctaataaggacacaatgcaggggttgagctttaaaggcaggaatgaacatcatctagaagagacagtactacatgccaagcaggataaatagcctctaagcttgggtctgagaaaagttgtgtgtgttctgtggaagagagagaagtagatagcagggctgataaaagaacaagaggaggttacaaagaataatggcagaggactggaaatgtacattttaagctttaccctaagttcctacctgttttgacttcagtatcaccagtgtgtcttggccttcctcttcagcacattcccaattatacttccaattccagacacagataactacattcctctactcaacggcttttagttgaatgtaactttggaatgtgaaatgactcaaggatcatgtaaagctaattctccttccctattacacccatgaa

SEQ ID NO: 585572 - DNA, 620 bp, Homo sapiens
tgtacatagtatagttgaacacatagcaagctctaataaagctaagtatatatgtatgtggtttttaatcacattcaccagcaacacaaagatggctatatgaccaataaagatacatataaatgtatagattactggtaagatggatagaaagattgcagctgatagrtgtcaggctaataaggacacaatgcaggggttgagctttaaaggcaggaatgaacatcatctagaagagacagtactacatgccaagcaggataaatagcctctaagcttgggtctgagaaaagttgtgtgtgttctgtggaagagagagaagtagatagcagggctgataaaagaacaagaggaggttacaaagaataatggcagaggactggaaatgtacattttaagctttaccctaagttcctacctgttttgacttcagtatcaccagtgtgtcttggccttcctcttcagcacattcccaattatacttccaattccagacacagataactacattcctctactcaacggcttttagttgaatgtaactttggaatgtgaaatgactcaaggatcatgtaaagctaattctccttccctattacacccatgaaagtaccatatat

SEQ ID NO: 585573 - DNA, 620 bp, Homo sapiens
tgtacatagtatagttgaacacatagcaagctctaataaagctaagtatatatgtatgtggtttttaatcacattcaccagcaacacaaagatggctatatgaccaataaagatacatataaatgtatagattactggtaagatggatagaaagattgcagctgataggtgtcaggctaataaggacacaatgcaggggttgagctttaaaggcaggaatgaacatcatctagaagagacagtactacatgccaagcaggataaatagcctctaagcttgggtctgagaaaagttgtgtgtgttctgtggaagagagagaagtagatagcagggctgataaaagaacaagaggaggttacaaagaataatggcagaggactggaaatktacattttaagctttaccctaagttcctacctgttttgacttcagtatcaccagtgtgtcttggccttcctcttcagcacattcccaattatacttccaattccagacacagataactacattcctctactcaacggcttttagttgaatgtaactttggaatgtgaaatgactcaaggatcatgtaaagctaattctccttccctattacacccatgaaagtaccatatat

SEQ ID NO: 585574 - DNA, 610 bp, Homo sapiens
aatgtacatagtatagttgaacacatagcaagctctaataaagctaagtatatatgtatgtggtttttaatcacattcaccagcaacacaaagatggctatatgaccaataaagatacatataaatgtatagattactggtaagatggatagaaagattgcagctgataggtgtcaggctaataaggacacaatgcaggggttgagctttaaaggcaggaatgaacatcatctagaagagacagtactacatgccaagcaggataaatagcctctaagcttgggtctgagaaaagttgtgtgtgttctgtggaagagagagaagtagatagcagggctgataaaagaacaagaggaggttacaaagaataatggcagaggactggaaatgtacattttaagctttaccctaagttcctacctgttttgacttcagtatcaccagtgtgtcttggccttcctcttcagcacattyccaattatacttccaattccagacacagataactacattcctctactcaacggcttttagttgaatgtaactttggaatgtgaaatgactcaaggatcatgtaaagctaattctccttccctattacacccatgaa

SEQ ID NO: 585575 - DNA, 508 bp, Homo sapiens
ttttgttttaagttcagcaggattaagttgcacgtttcagaatcattcaaaaatgcaccgaatgcataattatattcagtttgtgtttgaatttgagctatgtagcatgatccatgtgtaatttataaaatatagtcgagtatttaaaatataaaaatataatattctttgtaatattttacacatgctgttattttccttatatcagcaaaataagaatgtgaactttataaacatacattgagagagttaagataatcatgtgaaatggctatatcaatctgtaaacacctcttttaaatgactatttcatattcyatccaaaaataaacacataaaacccaacttatagcaaaatccatgagacaaaatattctcacaaggaatctgtttatgtattgcctgtcaattaaacatgaagctaagtaatttttgttcaaataatctatgtatgttcccagtgtacctattatatacatgaaattgttcaacctttagagtatttgcc

SEQ ID NO: 585576 - DNA, 408 bp, Homo sapiens
agactgaggcacaagaattgcttgaacccaggaggtggaggttgcagtgagctgagattgccattgcattccagcctgtgtgacagagccagaccctgtttcaaaacaaaacaaaaaaaaaagcttcaattttcagagacgttataaagtraagtatcagtatagtacaaaagtaaagagactagataatcaacttgttttgtccacatgataaaaataatgtgaagaatcagacttttcttgctctttgagcaattagccaagtgttatcacattgacaaaaaattaatctttattcaataaaattcaagttcagaaacatacttttttatgagagtatgttgaaaagcaatggttgatgcaagatttgctttatgtaactataattacccataagaaataatgcaa

SEQ ID NO: 585577 - DNA, 408 bp, Homo sapiens
agactgaggcacaagaattgcttgaacccaggaggtggaggttgcagtgagctgagattgccattgcattccagcctgtgtgacagagccagaccctgtttcaaaacaaaacaaaaaaaaaagcttcaattttcagagacgttataaagtgaagtatcagwatagtacaaaagtaaagagactagataatcaacttgttttgtccacatgataaaaataatgtgaagaatcagacttttcttgctctttgagcaattagccaagtgttatcacattgacaaaaaattaatctttattcaataaaattcaagttcagaaacatacttttttatgagagtatgttgaaaagcaatggttgatgcaagatttgctttatgtaactataattacccataagaaataatgcaa

SEQ ID NO: 585578 - DNA, 633 bp, Homo sapiens
ataaaattatagtatgaataagaattttaattaataagtataaggtaacttacacttcactttgtcactgtgaaaaaatcatttaattctttcaataattttgaagctgtattaagcaatatgattttcatttttcaaatgaagaaccacacatttacaagagtagaagttttatttaaatatctaatgggtgtttacagatgagaatagatatatatgggatttaataaaattttcaaaacacgatatcttttttaayccattatgcaaccacctgttgaaattgttagatatgtcattagacaaataaagcccatacttttattaatcaacctttgtaatcttctgtctggtcctcagaaacaactgttttcaatttataaagaaattcgtatgtacatatatttacttataaatgttatatatatttgttgtatatatacatatgcatgctttctaagatataactttgttttgatttttacatttattcattcagacatggaataaatggccttacttgagcaatatatcttattccaaacattctgacttgtgattaaacagggtcaataatttgtagaccacgtaatccaagctctgatctttatttttcagctgagatatcactaa

SEQ ID NO: 585579 - DNA, 578 bp, Homo sapiens
tatagtatgaataagaattttaattaataagtataaggtaacttacacttcactttgtcactgtgaaaaaatcatttaattctttcaataattttgaagctgtattaagcaatatgattttcatttttcaaatgaagaaccacacatttacaagagtagaagttttatttaaatatctaatgggtgtttacagatgagaatagatatatatgggatttaataaaattttcaaaacacgatatcttttttaacccattatgcaaccacctgttgaaattgttagatatgtcattagacaaataaagcccatacttttattaatcaacctttgtaatcttctgtctggtcctcagaaacaactgttttcaatttataaagaaattcgtatgtacatatatttacttataaatgttatatatatttgttgtatatatacatatgcatgctttctaagatataactttgttttgatttttacatttattcattcagacatggaataaatrgccttacttgagcaatatatcttattccaaacattctgacttgtgattaaacagggtcaataatttgtagac

SEQ ID NO: 585580 - DNA, 597 bp, Homo sapiens
gtgcagtcctaactcacgattacacagcaaagatataatcatgcttgatagaacttttgagctctttgtgagggaaaaggtgccctataagcaagaacaatgacattatttctgagggtggggggctactctgtcagagctgaaggtcctagaatgcataaagcagcagtccaatcaaaaggttatgagaaacataatcagttactaatatgcccattttcattagaacatattgcaacctatattatatgcttatgaagagatgttgaatgttactgaaaaaatagttaagccaagttaagctgttttaaaactcttgtagataactgggcaaggaccaccaccaccacaaagtttcttttctaaaagacccctttaacacatacatatgcatgtgtgcatatacaaggacacacaatgtgtcaggctcattgttttctggctatatttyattgaaaaagttattacttgttatattgggctttctgagtattaatatttatgtacaatcgttgctcagtatccttgggggaattggttccatgaccttcatggatataaaaaatccactgatactctagtttctgcaaaatggca

SEQ ID NO: 585581 - DNA, 577 bp, Homo sapiens
  misc_feature 240: n = A,T,C or G
gggctctcatgacatggttagactttattttctgggcaatagagaggttttgatgaaatggttttaagcagcggaatgacacgttagatttgtaagtgatgggataacattggctaagtaagaattcaaactccttgctaagcaagcaaataacaaaagccactctgggccaagtgtagtggtgtacacctataatcccattgctttgagaggccaaggcaggaggatcacttgaggccnagagtttgaggctacaatgagctatgatcacaccactgcactccagcctgggcaacagaacaagaccctgtctctaaagctacttagacaattctttttttaaaaaaaaccagttttattgaggtgtgtgaaatacataccatagaatgaactcattttaagtgtacaattcaatatktttaatacatttatagagaagtgcaattatcaccacaatttaattttggccatttctattatccaagtgcccaagttcttcctgcttattcacagttaatccccattctaatctcctttcctaccctagccccaggtaactactaaactgctttctgtc

SEQ ID NO: 585582 - DNA, 577 bp, Homo sapiens
gcagcagcagcagcagcagcagcagcagtgatgatagcaacagaaactgcaagctgatgatgcagtagcagtggccagtgcccagcgctggcagagtaccagtgcaaactgtgrcattcagtgtttggtgctgttgcaatggtattacactgtagtgttcttttaaaattgcttttgcttagtttctaagtttaacttgtcttgctatcaattattgcatttattcaaggtcctcccattaaagtccttttcagctaaaatcacagttagttattgtgtggtacatatgaatccaatcgaacaatattcttcataatctccctatgtaacttcaggcatttgatgactttgaaatatagctctccaaccacaggtgcaaagttctaggtctaaatttcttattgtctactgactggctccacttgaatataccatgtgcctttccaatttattatgttgaaaacaaaattcatcatctccccagaccttccttattttctgtctatgtagttgatattccctaaaacagaaacctgggaggtattccttaccccatgatgaattattcaccaagccc

SEQ ID NO: 585583 - DNA, 629 bp, Homo sapiens
gaatcctgtgagtacttgactgattggcaggaacagaaatgaataggaagttaagctctgtgatattttcttatacaacatctggctcttgattattggaaacttaatgactcaagtacaatgttcattgtttatctttcttctcatttcacttgcatacctatagccattacatccatcactatccttggcragagttcactgcagatgtcaaattgttttagtatcttttgcttttttaaaaatgttggcaatgtaataacatggcttaaactgacacttttcggttatatgtggactttatttgctttcttaagttagttaattgaacatattatcaattttaattgaaaaaataaatatcaactttgggtatattcttaggtgatgtttccttataggaaaatttgttacagtacattttagatggaatgaatttccataacattatgtaaaatgaaaatgtgttctaaagaaagaaatgatgaagaagttacagtgtattgtaaggcaatatggccttttctagattgccaaatattgttgcctggtgagcaaactgtgtaaaacactttgtatcagaatgtccataatgcaactataattgctataggtagcttttaccaaag

SEQ ID NO: 585584 - DNA, 459 bp, Homo sapiens
acagatccagagaccagagagaggtctagagttagaggtatgagaatcataccataccatttattattttacgcccagaacaatcaaaaacatcttctgaatttctggttatagaagtataattagatttattgaagtaagccaacatggtggactatattatgaagccattaaaattgttttttaatgatgggacaatgctcaaaagataatattaaatcaaatttaaaaatgcaaaattttgtacaataaaatytctattatttaaataaaatgggccttaaaaagatggaaggaaaataattaaacagttataatgctcacattagggttaagagtttatggtaatttttcttttttttctatgaatcaatattttacaagttttctatgtgcatttcttaaaagtcattttagggtaaggataggctcttggaaagatattgattaaactgagtc

SEQ ID NO: 585585 - DNA, 495 bp, Homo sapiens
  misc_feature 46: n = A,T,C or G
aagatataacaggataattagggattgagaatatttattattatanaattgtcactagataactatttatatttgtgtatatttgaaatccttaactatttatatgtatgtattattcaaataatgaggaacactgctggaatccagagacatttgctcttaatgccgtcattttggttgcatttattaaaattaagtccttcctatcatgctatcactttacagcatttatccgattgcaaagctggaaaatattccagttgaagcagtgatggaatttatgcaatatttkggtacatctgtcactttgacaaaattgtacaatctatgattttctttctattagattcagaggttttatccatttaaatgtacgattacctctgaagccacatgaatttggctggaatgttgttttcccataaatttccagtgcagcaacttggatttgctgactcaggattctgcaaatttttggcatggacttatgcattc

SEQ ID NO: 585586 - DNA, 611 bp, Homo sapiens
atatggacccatcagcaacaggcaaggtgggctctgttctggaagtcagcactaaagacagtttccatcgcggtgaatggggctaatgggcctttctagtaaatacctggttcctggttcgagcatttcttcttcctctgataacaaaaaataaacaggcagcagagcaggagaaaaagaaaagattatgcaggaataagatcagttagagtaagcagatccttcagagtccgtgaacgcygaaatgcaatggcagccagccaaggtcctggggagcctgccaaacagccggcctgtggggagagccaccctcaagcctggaagcttcatgggacttctggaagccacccagccagccttcccatgtggctgccttagctgccctcccagacaccagctgacatgggggcctctttcagtccttgtgaaagagcagcaactgtgtggactggacccattcccatccctgtacctagcttctcttcaacaaaagggactgtttatgcacccatggacaaaagctacctacgaccccataagttatgcccagctgcccacaaaaaggagagaaatacacctttatgtccactggaacaatgtctctggaattc

SEQ ID NO: 585587 - DNA, 548 bp, Homo sapiens
ggtttttgaatttttgagagtccctcaagcatgaatgaacagtgtgccacctataaaagggaaggagcatgaccttttcatgccaactttaattgcccatcacagagcaaaatggccaccaggaccaggccatctgactttctagaaaattactgaaccaccaactataaaatatatttttaaaatcccaacaggtctcagaaggtaaaggataggcaagttttgatttcccatatttgtgagacagtcaccctgtttctaaagatgctggttgtgggattcttgagagctggaatgtgagtctgaagctgaaaggcagcatattagattccacgtcagagaaaagttttccttcagtgtgttctgacattccactccacatcctaaaacctttgatttctacctgcccccttctgttcacccatctatccaagagcrcaggcattttgtttggccaggcctggggagatagtggtacacgagaaaggtaaggtccctgccctcatggaaaagagagacctcaaacggtaaacaaactactaagtaaa

SEQ ID NO: 585588 - DNA, 458 bp, Homo sapiens
gaattccctccagccttcccttcttggtccctgctgcagctggctccctcacacgctcctgactccagttcccacttcttggtgaccagaagccatgtcatcatctcccaggcctctctcctgggttctgtcctgcccaggagaccttcagcccaagctcaaagacctgtatccttagctgctgcaaaacagtatggtctagatgtcccctcatccccgcaaactcaaattatccaaaggtgaactgttcccccatcccttcaattttggtcaatgcgatagtatcttcctgggcttstcaactggatacctaggagttctatttgatactttgtttaatctgtctttctcaatccaatctgttactgggtcctgcctgcaaactttccaattatttgttgtgagtagcaggcaagctggcctcccccacctcccaatatccattcttgcccttccta

SEQ ID NO: 585589 - DNA, 556 bp, Homo sapiens
caatttttcttttctcaaggattcaggacaagctataccgcttgtagtcgagagctgcatccgttacatcaatttatatggtaagctggatcttgggccagtgttttcagcaatctgcagarcaggtgctaggctgttctgataggaaatgagattctaatttgtcctggaagacttcccgtcacagctctgctttggagggggaaagtactgcacacagcagctgctcttctgagtgctgcttttgagcctgtgtgttgagggatggagatcatggtgagaggatccaagacctatgaaaactggagagtagaaagggcatggacaagagaactcaaccctatagctctgtgctttgagcactgaatggagtttgccagtaaatcagctaatacggctagattataagctccatgaaggtattaggttgatgccaaagtaattgtggcttttgctattacttttgaatggcaaaaaccgcaattacttttgcaccaacctaataatgatgtctgggatttgttaaccatggtgtcaccagaacataactggtgct

SEQ ID NO: 585590 - DNA, 559 bp, Homo sapiens
  misc_feature 524: n = A,T,C or G
ggagcttccagaaacctgtatttcttctattaacctttgcaacccagggcacaagagatcactgcatcatattctccctctggaacctcctgactgacatggccttgkgacactgagcattcagtgccagtggctttagctttgccaacaagagaggacatgctctctcatgtgctcacaggagggggtccaaatctatagttctgaggagtggatggactataggcttcattacccttaccctttgcccgggaaagcccactggccagggacttttccatagccaccacagccccacccaaacactttggccaatagtaccattatgcctttctttgagttggagctacgagatgtaaaagggaggcctaacattcttcctgaagctacagcctctatagctctcatgatttaaaggaagtgaagagttcaaggactattatgagccttcagcaaaatgcagctgcctatggaaaaggggcctgatgtttccatacagggccctgacctacactcttactagnggggccttctaactgggtccaaaccagcatcccat

SEQ ID NO: 585591 - DNA, 559 bp, Homo sapiens
  misc_feature 524: n = A,T,C or G
ggagcttccagaaacctgtatttcttctattaacctttgcaacccagggcacaagagatcactgcatcatattctccctctggaacctcctgactgacatggccttgggacactgagcattcagtgccagtggctttagctttgccaacaagagaggacatgctctctcatgtgctcacaggagggggtccaaatctatagttctgaggagtggatggactataggcttcattacccttaccctttgcccgggaaagcccactggccagggacttttccatagccaccacagccccacccaaacactttggccaatagtaccattatgcctttctttgagttggagctacsagatgtaaaagggaggcctaacattcttcctgaagctacagcctctatagctctcatgatttaaaggaagtgaagagttcaaggactattatgagccttcagcaaaatgcagctgcctatggaaaaggggcctgatgtttccatacagggccctgacctacactcttactagnggggccttctaactgggtccaaaccagcatcccat

SEQ ID NO: 585592 - DNA, 675 bp, Homo sapiens
gattaggattgcatcccaaattagaaataaaattgttaacaaaaaagctattatttttgaataataaattaggtaaaaaattttgcaaagaatcaaaatttccatcaaagaagaaaggagaaaatatgtacatgattacaaacttaatcaaaatggacattatttaaagaggatttggcttgaaagcttctaggtattagtttgttttaattctgtatgttcaaaagttgtgaaatacatagtttctaggatagagtgaccaaatatgttttatttaatcattccacatgccttccacctgttgggaatagaccgtctctgtcaggtcctgtctgctttaagtcaacatcactctattcatcaagctgacaatcttaaatggaagtcagtgttctatttgattttctgccatcataatgtgccttcagccacaaccactttcaaattgctttttcctggggaagattgtgagcttatcattaagctcacagccaaaagccttaatacatcaaatggaatggagaataaatgtaaaaaatgcactaacagaggatgtcagatctcatttatttttcattttactctttcagtacrcatatatcttttttatgttgaaatattatctctaaatcatccattcaaaaagggattttcaaattaatttaattttcataa

SEQ ID NO: 585593 - DNA, 534 bp, Homo sapiens
ttgagctcaggagtttgagaccagcctgggcaatatggtgaaaccccatctctacagaaaatacaaaaattagttgggcatggtggtgcacgcctgtaattccagctacctgggaggctgaggcaggagaatcacttcagcctgggaggtaaaggttgcagtgagcagagatcacgccactgcactccagcctgggtgacagagggagaycctgcctcaaaaaaaaaaaaaaaaaaaaagtttttaatctaaataactgagtttggttttctttggatgttaaaattatctccaataggtagctcttaatttattttagaattttcagtggagaggcacatgaataagttagaaaactcctttgtttccatagcatgctgaaatcatggataattccaaaagcaaaatatattagtggtatatttactcttaaatatctggggaggtgctatgttcatattgagttatctcagtagaattagagcagaatattttatattaaaatacttataaattataacatataagtacaaa

SEQ ID NO: 585594 - DNA, 534 bp, Homo sapiens
ttgagctcaggagtttgagaccagcctgggcaatatggtgaaaccccatctctacagaaaatacaaaaattagttgggcatggtggtgcacgcctgtaattccagctacctgggaggctgaggcaggagaatcacttcagcctgggaggtaaaggttgcagtgagcagagatcacgccactgcactccagcctgggtgacagagggagatcctgcctcaaaaaaaaaaaaaaaaaaaaagtttttaatctaaataactgagtttggttttctttggatgttaaaattatctccaataggtagctcttaatttattttagaattttcagtggagaggcacwtgaataagttagaaaactcctttgtttccatagcatgctgaaatcatggataattccaaaagcaaaatatattagtggtatatttactcttaaatatctggggaggtgctatgttcatattgagttatctcagtagaattagagcagaatattttatattaaaatacttataaattataacatataagtacaaa

SEQ ID NO: 585595 - DNA, 534 bp, Homo sapiens
ttgagctcaggagtttgagaccagcctgggcaatatggtgaaaccccatctctacagaaaatacaaaaattagttgggcatggtggtgcacgcctgtaattccagctacctgggaggctgaggcaggagaatcacttcagcctgggaggtaaaggttgcagtgagcagagatcacgccactgcactccagcctgggtgacagagggagatcctgcctcaaaaaaaaaaaaaaaaaaaaagtttttaatctaaataactgagtttggttttctttggatgttaaaattatctccaataggtagctcttaatttattttagaattttcagtggagaggcacatgaataagttagaaaactcctttgtttccatagcatgctgaaatcatggataattccaaaagcaaaatatattagtggtatatttactcttaaatatctggggaggtgctatgttcatattgagttatctcagtagaattagagcagaatattttayattaaaatacttataaattataacatataagtacaaa

SEQ ID NO: 585596 - DNA, 537 bp, Homo sapiens
gtctctactagaaataaaaaaaaattagccaggtgtgatggcatgtgcctgtagtctcatctactcaggaggctgagatggagaactgcttgagccaggaggttgaggcttcagtgagccatggtcacgtcactgtactccagcttgggtgacagagcaagaccctgtctcaaaamcaaaaaaaaaaaaaagaaagaaagaaagaaaaaacccataaagaacagagggatgaacatgtgttcttaaatgctgaagatatttagggtggctttcatagaaaaacatcttgtattccaattcaggtatttaatccatacaaatattacaataaatttaatatgaacagataataattgtgcatgttaaaatatttgaggcctgagttaagaatatattaatttacaaagttattaatacatataagtacgccttatggtcattgaatatagcaaaagacttgtctaagaaaacaaaaaacccttagagtccttggggacaatcttattgtcccttgcctttccattttaattaccatca

SEQ ID NO: 585597 - DNA, 391 bp, Homo sapiens
cccaaaacggctgataaagggaggcagaggtcctcakcgggagggcattttcttgagccaccgggtgggtccacgaagcccccaggtggctttcctgtaggtatgtggggtctccttcaagctctaaggggaaaggaagaggaaaggccttcagatggggaagtggacggtgtgatggagaagaggttctgcacggaacttactggaaggtgcgggatgttaaagggaaaacgtgttttcatggaggcctgggcgggggattagctctccgttagagaggctgggtgggaggcctccaatgggaggattggtggcggtttcatcgggagggcttggggtctccatgagaggattagggtctcttcagggcggctgtgagtggaggtttcca

SEQ ID NO: 585598 - DNA, 391 bp, Homo sapiens
cccaaaacggctgataaagggaggcagaggtcctcagcgggagggcattttcttgagccaccgggtgggtccacgaagcccccaggtggctttcctgtaggtatgtggggtctccttcaagctctaaggggaaaggaagaggaaaggccttcagatggggaagtggacggtgtgatggagaagaggttctgcacggaacttactggaaggtgcgggatgttaaagggaaaacgtgttttcatggaggcctgggcgggggattagctctcygttagagaggctgggtgggaggcctccaatgggaggattggtggcggtttcatcgggagggcttggggtctccatgagaggattagggtctcttcagggcggctgtgagtggaggtttcca

SEQ ID NO: 585599 - DNA, 556 bp, Homo sapiens
ataactctgaaattaatagttctaataactgaaatagggcatagtagcaacagaatattttatttaatagtttctggtcctcaagtaaacccatcttccctagagaaaactattaagggtgctgttattatgatagcataattgaatggtcagaaaggatcagcttctattaataggcctgggtagaaatagtcataggctaagatgaaaaacttcatctacactgatcattaattgaagtaaatgacagataattctaattttaaaagatggagagtaaaaataataaagcctaatctaatctagagcaattgcttatgttgatcagtttcattacataattactgagttctctattttcttttgtttgcatagatcaggcttagtttataaagaaatcatagcctatcagctgggcacagtggctcatacctgtaatctcagccctttgggaggctgaggtgggtagatcacctgaggtcaggagttcaataccagcctggycaaaatagtgaaatgctatccctactaaaatacaaaaattaggcatagtggc

SEQ ID NO: 585600 - DNA, 500 bp, Homo sapiens
  misc_feature 1, 2, 3, 4, 5, 6, 7, 8, 9, 10, 11, 12, 13, 14, 15, 16, 17,18, 19, 20, 21, 22, 23, 24, 25, 26, 27, 28, 29, 30, 31,32, 33, 34, 35, 36, 37, 38, 39, 40, 41, 42, 43, 44: n = A,T,C or G
nnnnnnnnnnnnnnnnnnnnnnnnnnnnnnnnnnnnnnnnnnnntacctcatcattaccctaagcatttggtcacttgtgtgacagaacacaataggttttcmgtaaatgtgcgttgaattaataaatgaaatatcaaacatcaagacaaacattacctccagagtggaaccccataaattttcaataaactccttctatagtatctcaatgggatgatgtaaagtgataaaactctcttcttctgagccacacaaacctgtagaaatagaacaaacacataattgggagaagcagcaaagaatctgtggtcatctctaatttaccacacccagcttttatttatttattttttttttagaaacaaggtctcactctgctgctcaggctggtgtagagtggtgtcttcatagctcactgtaaccttgaactcctgggcccaagggaccctcccacctcagcctcccaagtagccaggactacaggcacatgccatcacac

SEQ ID NO: 585601 - DNA, 590 bp, Homo sapiens
tgtcttccaaacacaaagaaatactagacaacataaakgtataaagtaaacacaaagctgagtttgaaggtaaggcaaggcaattctcggtgccagaaatgaagaagaggaacaaagccagatttctgggcagaagctattgatgaccagatcataaagctataagatctaattattagccctcagacctggagagctggtgctttaaccaatgcctaccttcatgtaaaacaagagaagaggctttgggccttgcggttaagcccctccatagatatggaagttaccctgattagagaatgaagaaaggaacctggcaaagaaagcatcatgaaagctggtcatatatgggagtacttaacatagttctgatttatactatctgaatacgcaaaggcccaaatcaagataacaatatataaaacatgtatcctagaacttatggcttccttaaggtcttggcagaagcaaacataaaacccatgcattagggacacctccaaaccctgagcacccagactcacaagaaatacaattcctgctgaagatgatctcacagacaaaatgacaaaacaccagggaataagcca

SEQ ID NO: 585602 - DNA, 554 bp, Homo sapiens
atagaattagttaagcactttactgggtatctagtacatattaggcaatacagaatgtcataaaatccagcataggcaaaacaccgttgactatcaatttggaatctygtagcctgccaaatgaggtagtataataaagaaaaactagccacggtttgttaggccagcattttcatatttgtagagaggaatataagggatttaaggaaagatttagctgccatcagcaaggacatacctgttttattttaataaatgtacaaattaatgtttgtttttaaaatgataaaacaatatgtgattattaatgaagttttatttattatttatttatttgagatagagttttgctctgtcacccaggctggaatgcagtggtgtgatctcagctcacttcacactctgcctcctgggttcaagcgattctcctgcctcagcctcccaagtagttgggaccacaggtgtgtgccaccatgcccggctaatttttgtatttttagtacagacaggcttttgccatgttggtcaggctggtctcgaactcctgatctcaa

SEQ ID NO: 585603 - DNA, 554 bp, Homo sapiens
atagaattagttaagcactttactgggtatctagtacatattaggcaatacagaatgtcataaaatccagcataggcaaaacaccgttgactatcaatttggaatctcgtagcctgccaaatgaggtagtataataaagaaaaactagccacggtttgttaggccagcattttcatatttgtagagaggaatataagggatttaaggaaagatttagctgccatcagcaaggacatacctgttttattttaataaatgtacaaattaatgtttgtttttaaaatgataaaacaatatgtgattattaatgaagttttatttattatttatttatttgagatagagttttgctctgtcacccaggctggaatgcagtggtgtgatctcagctcacttcacactctgcctcctgggttcaagcgattctcctgcctcagcctcccaagtagttgggaccacaggtgtgtgccaccatgcccggctaatttttgtatttttagtacagacaggctttkgccatgttggtcaggctggtctcgaactcctgatctcaa

SEQ ID NO: 585604 - DNA, 583 bp, Homo sapiens
ttttgtgtactgcctttccttccttttttgatgctccgatgttcttttatcatttcctttctatttaaagaactttgtctcaccattcttttagggtaggtttgctggtgacaatttttttttagttttctctcatttgagaatgttttgatttctctttcatccctgaaggatattttcactgggtataggattctgagttgatagttcttttcttttagaactggaaaaatattatgccccttccttctttcttctatgtcttttgatgagaartctgctgtcattcaaattgtttttaccctataggcaaaatgtcatttttctttacctggttttagatttttttctttgtccttagttttcagaagattaattatgatgtatcttggcatggatttccttaggtttaccctgcttgaagtttcactcatcttgttgaagctgtaggtttacatcttgtcaaattttgtaagttttctgccattgttcttcaagtacttttttagttctgccttatttatcccttccttcttggactatgacaacacgaatattccatcttatagttccacaggtttct

SEQ ID NO: 585605 - DNA, 621 bp, Homo sapiens
tgctggtgacaatttttttttagttttctctcatttgagaatgttttgatttctctttcatccctgaaggatattttcactgggtataggattctgagttgatagttcttttcttttagaactggaaaaatattatgccccttccttctttcttctatgtcttttgatgagaaatctgctgtcattcaaattgtttttaccctataggcaaaatgtcatttttctttacctggttttagatttttttctttgtccttagttttcagaagattaattatgatgtatcttggcatggatttccttaggtttaccctgcttgaagtttcactcatcttgttgaagctgtaggtttacatcttgtcaaattttgtaagttttctgccattgttcttcaagtacttttttagttctgccttatttatcccttccttcttggactatgacaacacgaatattccatcttatagttccacaggtttctgaagtgttattcattkttttcaatctatttttttctcagttgatcagattaggtatttctattgttctatcttccaatgtactgattctttcctctatctcttccattctattgttgaacatatccatgagctttttaat

SEQ ID NO: 585606 - DNA, 605 bp, Homo sapiens
aaacaaagaagtataagaaaaaaaagagattgctcttttaaaaggtgatgacaagatcacaattatatatttatgtaaaatggtgtgtgtgtgtgtgactaccatgtattcgaaaaacatttaaaagttaaaaatataccttaagtcacataccaaatatagatatactatctctcaataagtccaaaacaactaacttttccccctgtgttggaatagattctgattctttgtatgtatgtggataagttgaattaggtgatayacatttagggaccatgttgtattaaaaatgtgtaacactgaacctgagaatagcttccaacagcaaaagagtatagttgaagttgtataaatcaggtgctcctgtgccacgaagctatgggtcatggctccaaactgggtaaaccaaggcacccctgggcaccacagtgaactcagggataacatcagatgttttcaagagaaacacagaggtattttgtatttgatgaataccctgttaaatactatctttaagtaatttatgttttcaatgttaagttactctactatattcttttcaatgtcatgatgtctctgtgaaactagagttttggcagttt

SEQ ID NO: 585607 - DNA, 508 bp, Homo sapiens
cccattttgtggatgaagaaactgagggtcatagtgattaacttaccaagtgttattcatttgcttgttcatccattgattctctcaatatctatttatggagtgcctactgtataccgcatatcattctcattgctgaagatagaacagtgaatgtragagaaaaaaaacgtagattcatggaatttatatctgactgagctgaaaaagggtaaccagaataggagagagctgacatctgagcaatattaagtaagaattctataactgccccttgaaatagaaaggtttgctatgtaaaatttcactgctttctgcaggaagcctggatagcaacataaaagaatatcattacttttacagatatcatcattattttatagatagcatcattattttacggatatcatgatatttttatgaatatcatgagtgtcagcaaaggtttattatggttttttttccaatattgcaattaaagcttatacatgctacgacagaaaaaaaa

SEQ ID NO: 585608 - DNA, 508 bp, Homo sapiens
cccattttgtggatgaagaaactgagggtcatagtgattaacttaccaagtgttattcatttgcttgttcatccattgattctctcaatatctatttatggagtgcctactgtataccgcatatcattctcattgctgaagatagaacagtgaatgtgagagaaaaaaaacgtagattcatggwatttatatctgactgagctgaaaaagggtaaccagaataggagagagctgacatctgagcaatattaagtaagaattctataactgccccttgaaatagaaaggtttgctatgtaaaatttcactgctttctgcaggaagcctggatagcaacataaaagaatatcattacttttacagatatcatcattattttatagatagcatcattattttacggatatcatgatatttttatgaatatcatgagtgtcagcaaaggtttattatggttttttttccaatattgcaattaaagcttatacatgctacgacagaaaaaaaa

SEQ ID NO: 585609 - DNA, 508 bp, Homo sapiens
cccattttgtggatgaagaaactgagggtcatagtgattaacttaccaagtgttattcatttgcttgttcatccattgattctctcaatatctatttatggagtgcctactgtataccgcatatcattctcattgctgaagatagaacagtgaatgtgagagaaaaaaaacgtagattcatggaatttatatctgactgagctgaaaaagggtaaccagaataggagagagctgacatctgagcaatattaagtaagaattctataactgccccttgaaatagaaaggtttgctatgtaaaatttcactgctttctgcaggaagcctggatagcaacataaaagaatatcattacttttacagatatcatcattattttatagatagcatcattattttayggatatcatgatatttttatgaatatcatgagtgtcagcaaaggtttattatggttttttttccaatattgcaattaaagcttatacatgctacgacagaaaaaaaa

SEQ ID NO: 585610 - DNA, 602 bp, Homo sapiens
ttgcccatttacagaagaatttattgtattgaaagggatttttgtaaacggtaaactaagcactgtaatataagctagtaattttccagaagatacttcacccaaaagcatcagaatggacggaacatgtatctttggtaaaagtagcctgtggtttttctaatgatacagaacatctctttggagagtgtagacatatatgcttgtgtaagtgcgtgcatgtgtgcgggtacacctgtgaatatgttagttacatagcaaaggggaactaaagttgcagrtggaaattaggctgctaatcagctgaacttaatatagggagattatcttaaattatcctggtgggtccaatgtaatcactagttctaaaaagtagaagagagaagctgaagagtaggtcagagtgatgtgatatgagaacaacccaacccatcattactggtttaaggatgaggcaatagagttataaaccaagacatgcaggtgacctctaagaaatggaaaagatgagaagatgaattctcccttagatcctccagagggaacacagctctgttacaccttgatttagccagtgagatctgtcagacttaaaacacaca

SEQ ID NO: 585611 - DNA, 544 bp, Homo sapiens
tgactcacacctataatcccagcactttaggaggctcagctggtagagaggatccttgagcccaggagtttgagacctgcccgagcaacacaaggagaccctgtctgtataaaaattaaaaattagctgtgcgtggtagcagatgcctgtggtcccaggtactcagaaagattgtctgaacccgggaagtcaaggctgcagtgagatgtgattccaccactgcactccagcctgggcaacagagtaagacccacctcattttaaaaaaaaaaaaaaaaagggagacattacagccattagtataaatattacatttcagtgaaatatgtcaaaatataaatgtccaacgatagtaaataagaataaagaaaattaagaattcatatcaaaaaatagsataagggccaggcatgctggctcacacctgtaatcccagcactctgggaggctgaggcaagaggattacttgagcccaggagttcaagaccagcctgggccacatagggagacccccatctctccaaaaataaaaagtttctttaat

SEQ ID NO: 585612 - DNA, 466 bp, Homo sapiens
cttaagtataatattctgtttagcaaatccaggagaatagtgtgttgaataaaatagractaatgcaagacttcagccaactcacttgcttcagaataaacatataattgattagtttcctatatagtattaacaagaatcaatcaaaaatgtattattcaaaaggaatccaattaaagtagcaacagaatatatttctgaaaaactcattgtagtacatctaaaaagaaagatctaataaggatataaatctcaattgaaggacattagaaaggcacaaaataatggagatacagaacatgactaggaaaaatacacaatattttaaagagatcaattttttctccatgaaaactcaacaataattcaaacatcttttaaaacaaaacttatcaaattgatgtccaactttaaaaaaaattcaatctgagccagaaaagatttgaagagaaaaatgagaaagaat

SEQ ID NO: 585613 - DNA, 466 bp, Homo sapiens
cttaagtataatattctgtttagcaaatccaggagaatagtgtgttgaataaaataggactaatgcaagacttcagccaactcacttgcttcagaataaacatataattgattagtttcctatatagtattaacaagaatcaatcaaaaatgtattattcaaaaggaatccaattaaagtagcaacagaatatatttctgaaaaactcattgtagtacatctaaaaagaaagatctaataaggatataaatctcaattgaaggacattagaaaggcacaaaataatggagatacagaacatgactaggaaaaatacacaatattttaaagagatcaattttttctccatgaaaactcaacaataattcaaacatcttttaaaacaaaacttatcaaattgatgtccarctttaaaaaaaattcaatctgagccagaaaagatttgaagagaaaaatgagaaagaat

SEQ ID NO: 585614 - DNA, 628 bp, Homo sapiens
attgaataaataatgtgcatctatttttggtattactatgaagctattaaagagaatgagttacgtctgttatcactggtctgtagggatgcccacgatatgcagtttagtaaaaaacacaagctgcagagtaatatacatagtaggtgccatcattgctctgaatgtccttgcttcattgcctttgacgattcttttctcatgaaacttgctaacagtctcttaccatctatatgtctaattcttctttcacattcatattcaccaggagcctcagtttatcagggaagctaaattgaccaacccagattggatacatgtccactacctgtgccttcagtttatcctgagcaggtctcagtcatagacatttattcaactcttggtttcttttagacagcaaactctttgaagccagggatgattgatctcctctcagcatttccaatatamtatgtatatgtagtgattgacataagggggtaatttatcaaacttttttgaatgaatgaaaaaaagtgcggcccaaccacattccaaaagcaaatgtataaataaataatggtagagtattagaactggatggaaacatcaccaaatactgaagagtgtcatttgctaagagttt

SEQ ID NO: 585615 - DNA, 628 bp, Homo sapiens
attgaataaataatgtgcatctatttttggtattactatgaagctattaaagagaatgagttacgtctgttatcactggtctgtagggatgcccacgatatgcagtttagtaaaaaacacaagctgcagagtaatatacatagtaggtgccatcattgctctgaatgtccttgcttcattgcctttgacgattcttttctcatgaaacttgctaacagtctcttaccatctatatgtctaattcttctttcacattcatattcaccaggagcctcagtttatcagggaagctaaattgaccaacccagattggatacatgtccactacctgtgccttcagtttatcctgagcaggtctcagtcatagacatttattcaactcttggtttcttttagacagcaaactctttgaagccagggatgattgatctcctctcagcatttccaatataatatgtatatgtagtgattgacataagggggtaatttatcaaacttttttgaatgaatgaaaaaaagtgcggyccaaccacattccaaaagcaaatgtataaataaataatggtagagtattagaactggatggaaacatcaccaaatactgaagagtgtcatttgctaagagttt

SEQ ID NO: 585616 - DNA, 600 bp, Homo sapiens
aagcttataaatgctgcattgacctttataaaggcatttacttctcatgaaaagtacttgtgatttttagagctataacctctggtaaattgagaataaagttgcttgttattctgaaatggcgctatgcctgcttggttcaagtgccactagttctgtgtatttcttcgcattggtttatgctgtttttttgtttccttaccccttgttgtaacatatgtgacaacttaggaagcaggaagagaaaataaatagtcctaaaggacaagcaaaaaaatctagctatcaaatttcacattctataaatttacaatctttacgaagaaacaaattaacttcaataataaggaaactccttaagaaaatctgagcatatgcttaattctcatatggagagagaaaagtcaaacataaaaagacctagtctgccaaggtttaaatagcaacttgtgcctctgcagaaatgattttccttgagaaaatttcccatatgctgggtatgaagtccatctgcaaatgtaatacccagatgctcaccctccccttccaaaaaagctgcattctgactgcacatcttstgtgccctagagaactgataaa

SEQ ID NO: 585617 - DNA, 384 bp, Homo sapiens
ctatcacaagaacagcaccaaagcaggaaatctgcccccatggtccaatcacctttgaattataattggagattataattcaacatgagatttgggtggagacacagattcgaaccatatcaaycactttgttaatcactgtcccttcaccccgagggcccagcacagtaactgacactgcttagtcactgtctgttgaataaatgaattaatataaaagactccatagaggaggtagcatttgaactaagaccctgaaggatgggtttgaacttgtcaagaaaagaagagtgtgggagtgagaaacaggacctatgtccaaggaatgcaaagctcttgcatgctactaacagcataagaagtttgtgtacatatacacccagg

SEQ ID NO: 585618 - DNA, 556 bp, Homo sapiens
tacatgacttaatctagaatgttctttatcccagtgataaagaatgtcatgcattcaggatctcctacagccatggtaccacttttattgttctaacattagatctgtctaagacatctcttcaaaatccatcatgtcatgaagccacctcaggtggctcttcccaatgggtccccacttcttaccactgtcaaggacattcatgacaacagagatcagtacttgtgctgaattacccaccccactctcacttaggattttcaagacagttgtttgacattaggcatggagactgtagctatgatcaaacttatttgtatgctcacagcagcagcctacgcccacagagctctcatctgcttccttcagctttggttcagaaggcattcacattaatcatgtatgtaagttccttgctactaatctaatctctctctctctctgtgtgtgtgtgtgtgtttgtgtgcrtgtgttcttagtgtttattgtaaatgaagaattatctctgtattattttattttattttattttatttatttattttgagatggagtc

SEQ ID NO: 585619 - DNA, 434 bp, Homo sapiens
ttcatagtaaccagggaacccactttactggccacatggacttcttattatgcttaccatcttataggacttatattgttcttaccatccccaatcttctgacctggtagaataaacaaatggaaccataaagactcagttggcaaaatgtatggaaaacttgcacctyccttagtttaaagttcttctcttggtattattactgagaaccactgcttttagagcccacaaattttcatcttttgaaataatcactggtcatcctatgcatttaatgcccactgcctttgaccctcaattgttaaaaggagagatactataatactgtaagggaattattacagtagtagacaaatattatattttggtagaaaaatctttccacagtgtgctcctggaggacaaagacctaaagcaccaagacctaaagctac

SEQ ID NO: 585620 - DNA, 564 bp, Homo sapiens
ttctccaaagaagatatacaaatggccaataagcacataaaagatgcccaacatattagttattagggacacacagatcaatattataatattactttatacctacaacagtggttattaaaaaaagaatacaataagtgttrgcaaagatgtagggaactgaaaaccttgtgtattgctagtgggaacgtgaaatattgcagcctctgtgaaaaacagttcagcagttcctcaaaaattaaattaaatgattaccttttaaaggtagtgcttaacaacatgatgaagcctcagagtcctatgccacagtaataattatagccaaagattttaagttattaagtatatttgataatagctggtaatattacgtatgttaaagtagtgaaaaaattccacataaaatattatttttgagccagttcacatcagtatcttgggaatatgaacctaaaatctatatatttgccttataattgatgtaagaacaataaaagatgatatgcagcagagatttctcaaatgatccaagagtattagaagtgcaatcttcacataaatata

SEQ ID NO: 585621 - DNA, 631 bp, Homo sapiens
tggttcatgtacaccatggaatactccacagctataaggaagaataaaatcatctacttggcagcaacatggatgcaactggaggccatcaccctaagtgaatgcagaaacagaaaaccaaatactacatgttttcacttgtaagtgggagctaaaccttgggtacacatggacataagacaggataaagaaacactggagactcaaataggagggaagaagggagggtggcaaggtatgaaaaactttctgaaggtactctgttcactatttgggtgacaggatcaacaraagcccaaacctcagcataatgtaatattcccttgtaacaaacctgcacaaataccccggaagctaaaataaaaactgaatttttttttaaaaaaagcaagaaagattttcctttacctttagaataatcatggctcttcttccagcttgattttggacttctaaattccaaaattatgagaaaataaatttctcttgtttgaaaccacctagttttaagtactttgttcagcagccctcagaaattaatacagatacgaacagatgataatctactgaacgaaatgcaaaatcatgacttcatgatgatatgagcaaataaacatatacactgaaattt

SEQ ID NO: 585622 - DNA, 402 bp, Homo sapiens
aaaataaatgaccttatgcactgcacagaatattatgctggaataattcaattccttcagacctttaaggaaacattgttagcatcaggccacaaccaatagaacttgaggaaaaaaaaaaacataattagctgaaaatcagttgaaggaaagcattactatttcaagccctttaaaaggggagagaaaaccaaaaacagcaagatgcaataaaagttaaacttcgggttaaaaaatcaaaatatcttataatttattaaaacaaaaattaatccctacaaaatttcattrttccaaacaaaaaactcaaactcgtcttccctgctggcagtgagctcaaactctataaaggagttgcctgccttccatcatcatcgaaacaggaaatcttgccttcatcgt

SEQ ID NO: 585623 - DNA, 579 bp, Homo sapiens
agtaagtaacactttgtcgatgcacatagttggttatagagggtctgttaattacatatacatggaatttactatgaaataaatctcattttatgtatatattggctgaaaagcaggtcatttgtagtaacagtagtttaaaaaacccaatgagttaattaaattaatgtttacatttttattctgaaaattaatgtgtaatattgaataatatattctgctttcagtaaatccagttctgctctaagtaaatgccacaaagtttgaaaaatgcaagttcattttaatttcataaaatttatctttgacaggactaaggcccaatcaacatttttctacattgatttgttaaaccaccggattataataaagctaaccattaatgatcctttatagcaaaaacttaaaaactgataattgtctttttttttttttttttgagtctcgctctgtcacccaggctggagtgcagtggcgcagtctcggctcactgcaasctccgcctcccaggttcacgccattctcctgcctcagcctctccgagtagctgggactacaggctcccgccaccatgcccgg

SEQ ID NO: 585624 - DNA, 619 bp, Homo sapiens
tcaaagagtgaaaataaaacatatataatatataatataatatatttattcacacatcagaatgggggcataaagcatgggagagaggtattgatctttaacatacaagttgaagaaagtctaggcttagctctgcttgcattaattttcgttaaggaaagactccactgggtcttcaccctcctaatcttcacctcctctcttgattacctcttccaaagaagaataaattacctcttccaaagaagaataaatcagatctaaaattatcagccagcattgattatgyaatacctgaaagcaggttgatatcagttctggcaaaatggtattgaaccagctattttgaaaagccttcctgattaaaataatcttccaaagcaaatcaggattttaaaacacaaatatccacaaagaaaccaaaaaagaaagtactattggcacagaaattataaactaagaataattaaaagaaaaacaaatacaatgtccaaatcatgagagagatgaaaaggctgtatttttcagctctgaagatagtgagagaaatagagagggaaatttgtctcacacacacacaaacacacacacacaaggaatattcctttgggaatacatc

SEQ ID NO: 585625 - DNA, 294 bp, Homo sapiens
tatctgacgcatatactttctgctycccggctccttcagctgtactcactctttgttaagtcccacaattaccattgttcctggccgggacttcaatctggcctcccacattattcctgataccacacctgacccccatgactgtatctctctgatccacctgatattcaccccatttccccatatttccttcttttcctgttcctcaccctgatcacgcttgatttattgatggcagttccaccaggcctaatcgccacataccagcaaaggcaggctatgctatagtacaag

SEQ ID NO: 585626 - DNA, 294 bp, Homo sapiens
tatctgacgcatatactttctgcttcccggctccttcagctgtactcactctttgttaagtcccacaattaccattgttcctggccgggacttcaatctggcctcccacattattcctgataccacacctgacccccatgactgtatctctctgatccacctgayattcaccccatttccccatatttccttcttttcctgttcctcaccctgatcacgcttgatttattgatggcagttccaccaggcctaatcgccacataccagcaaaggcaggctatgctatagtacaag

SEQ ID NO: 585627 - DNA, 546 bp, Homo sapiens
agtgaatgaatagaagcaaagtttctaaataaggacaggcactaacatctgtacctctttatacgtatcaggttgagaggtattttttacaaaaagaggctgaggtatagaataatgggactagaccatcaactctgaaaatttctactccaccagatagatttacaacatgatcctaccaggaagtgtgaggtcctagaaagaaggcttcttacttccttcaacatcagagtattttcctgttgctakagttgtactgtatgccaaaatggtaggccaaagaaatattgttccttatgggtgatttacatttgggaaaattaatgcctttattgtttaaaaattgatcatgagatacttatctacagaaaacattccactgtatctgatggggcttatgccatcattcaacttgatgagttcaagaaacatttgtaaaatcattattaccaaattaaaatacaagtaaaagagaagccattggacaaatccttaatgtctcacggtctcatgaaatttttttctttaattcctgtatattatttt

SEQ ID NO: 585628 - DNA, 534 bp, Homo sapiens
ggtcactgcaaactccgcctcccaggttcacgccattctcctgcctcagcctcccgagtagctgggaccacaggggcccaccaccgcgcccggctaattttttgtatttttagtagagacggggtttcaccgtgttagccaggatgttctcgatctcctgacctcatgatccgcccgcctcggcctcccaaagtgctgggattacaggcgtgagccaccgtgcccggccctaaaatgaaattattaatgttggttctgaaacarcctcttagcattcagattgtattttaaatacttaaacacaccaattgtagaaagcaaccctttatttttagcaagtttggtttactcttctcccatgagattttgtctttctacattaactagtaagacataaagatttgaaactggaactatattatactttttaaccaatctctgtggcttcactcatgaaatttacttcagttaatatgagactgggggttaagttgtaactaatatgcaaaattgctttgtatatttggtgatttt

SEQ ID NO: 585629 - DNA, 544 bp, Homo sapiens
ggcgacagagcaagactttgtctcaaaaaaaaaaaaaaaaaaaaaattaaaaagaaagaaagaagtggttctgaatcctcaggtgcccaggagctctcattgccctgctagrtaggcctgaaacctggcagtcaccatgctcttctccgtgtcccagagaacaagccaccaggaaatagaagggagttgtttgctgccatttcactgcctctgcgctgagtagggatgcagatagatgttccagctacagggcagctttgagagagtgcccagagggctgcagacatcagcagcaccccatgaccacaccaaagaggcctcaggagagaaagcagttccactgtccctaatcctaggacacagccatttctctaggccttgacctgtgacctcccagactcccaagaggcccacagtctgtgactgatcaagaggtagtttcacatttgtcctttgtggcaaataatacatcctcatattaaaagaaagctagcttactagggatacagctcatttgtccctggtctggcccttggggaaagag

SEQ ID NO: 585630 - DNA, 514 bp, Homo sapiens
ttcaccatgttggtcaggctggtctcaaactcctgatctcaaatgattcactcacctcagcctaccaaagtgctgggattacaggcgtgagccactgcacccagccccagctaatttttaaatttcttgtagggacagagtgagaccttgtctcaacaacaacaatacaatgacttaaaaaacacacagtataacaactatttacatagcatttacgttatattagatactataagcaatctagagatgatttaaagtatccaggacgttgcgcacaagttttgtgcaaatactacgccatttttaataaggaacttgagcagtcctggattttggtacctgagggggagcstagaacccatccccaatggatatggagggatgacagtgacagcaacagggggcagcctaggcagacaggggcaggtccccggtgaaaccccacctaaagccaaaaacagcctgaaggctgaaagattggactgctggtcctggatgaaactgcaacccagaa

SEQ ID NO: 585631 - DNA, 604 bp, Homo sapiens
agatttgacatataaattaaaatgccaagttataagtttgaggaatatgggtggaggaaagagaatagaaaagaagagatgagagaaagagataaagagaaaggtcaagagagggaaggagattttactgtaatttaagtaagtrgaatatggaaacatatgatatttcaacataaatataggagtaatagaaaacaagggataataagtaatcttggtgtgttataaagtggacctctgtgatttctgtctttcctgtatctgttcttttttgtgtgtgataatatcaccgacctatcttttagaaaatttctccttctctttgttacatctactaattatggaagccccttctacccagaaaacttaaatcatgacaaactatttccttctcagttataaagcaaaacatatattatttttcctcaataattttgaaatataaagatattatatcagagctaagtatagcaatcatctctggtacacagtaaaagcccgcaagaatgacaacaaaaatattattaacatgtttttcctttctatcatcatcattattataataaaacataactataaaattaatttgtattattactggcac

SEQ ID NO: 585632 - DNA, 608 bp, Homo sapiens
cacccagtctatggcattttgtcacagcagcyttaaatgaaccaaaataatggattagagagtaaaattgtaaaccagatccccaagaccagctgaagtggaagatggcttcactattgaggattatgcattggatattctagtgacccaggattgtctttgtaattaaaaaaaaaggaattatatttttctgatgctgccttagcctaaaaagtacaagtgataccttctctcacgtacaacttttgcccctcaaactgacagactccaagaatcccactcatcttaaagcaatacccgatttttaaaattatattttaaatttcaaggttttccttaaaaaaacttcctacccaaattttagaagtcgggagacgtttaaaaatagtctatttccccattacacattagtaaattatggaaaacagtgcctaaaaaataattgaagagcaattttgaaatcaaatcataaagtggcccataatgtcaattttcactgtttaccctctttactagatactatttttcctctctaaatcttgaatggcctttagaaattttctcttcacccactattccacaatttatttaattaaaattgcacacat

SEQ ID NO: 585633 - DNA, 579 bp, Homo sapiens
tcagtaatgcaagtcaaaactacattgagatatcactttgcatctgctataatggtaataatcaaaaactctaaagataagtgttggtaaggatgtgcacaaaagagaactcttttatatttttgcttggaatgtaaattagtacagccattataaaaaacagcatggaggttcctcaaaaaattaacaatcgaactaacatttgatccagtattccgacttctgtgtatatatatccaaagaaatgaaatcattatgtcaaagaaatacctacacccccatgttcattgcataattcacaatagccaacatatggaatcaatttaagtgtctgtattagtytgtttttgcattgctaaaatgtatgaaagtgggtatttataagaaaagaggattaattgactcatggttcctcgggctgtacaggaagcatagtggcttttgcttctgaggagtcatcaggaaccttacaatcatggtggaaggcaaaggataagcaaaatgtctcacatggccagagcagaaggaagagagagaggaaggaggtgctacatacttttaaacaaccagatctcatga

SEQ ID NO: 585634 - DNA, 579 bp, Homo sapiens
tcagtaatgcaagtcaaaactacattgagatatcactttgcatctgctataatggtaataatcaaaaactctaaagataagtgttggtaaggatgtgcacaaaagagaactcttttatatttttgcttggaatgtaaattagtacagccattataaaaaacagcatggaggttcctcaaaaaattaacaatcgaactaacatttgatccagtattccgacttctgtgtatatatatccaaagaaatgaaatcattatgtcaaagaaatacctacacccccatgttcattgcataattcacaatagccaacatatggaatcaatttaagtgtctgtattagtctgtttttgcattgctaaaatgtatgaaagtgggtatttataagaaaagaggattaattgactcatggttcctcgggctgtacaggaagcatagtggcttttgcttctgaggagtcatcaggaaycttacaatcatggtggaaggcaaaggataagcaaaatgtctcacatggccagagcagaaggaagagagagaggaaggaggtgctacatacttttaaacaaccagatctcatga

SEQ ID NO: 585635 - DNA, 505 bp, Homo sapiens
gaatcaatttaagtgtctgtattagtctgtttttgcattgctaaaatgtatgaaagtgggtatttataagaaaagaggattaattgactcatggttcctcgggctgtacaggaagcatagtggcttttgcttctgaggagtcatcaggaaccttacaatcatggtggaaggcaaaggataagcaaaatgtctcacatggccagagcagaaggaagagagagaggaaggaggtgctacatacttttaaacaaccagatctcatgataactcactcattcactcactatcatgagaacagcatcaagaggatggggctaaatcattcataagaattcttcccccttgaatcaatcaccttccaccatgccccacttccacamtggggattacaactgaatgtgaaatttgggtggatatacagattcaagtgatatgattctgcccatggaccttcccaaaactcatgtccttttcacattgcaaaatccaatcataccttcctgac

SEQ ID NO: 585636 - DNA, 527 bp, Homo sapiens
aaaaacaaaacaaaccaaaaaaaatgtctaacagttctctgcttgagtgtacaactcctcctactgattttggaaaccatttttaagttagatagtccccagtggtattgaacacatgaggaaaacctgggcctcagagaagcagttttcctctctmtatagataagaccaattttgctcaatattggatatcagctccaccatccaataccaatctcatagttaagtatttttgaccacactattgcaaacttaacccagagtttctattccctttgccaccataaagtcaccctctgttggtatggatatgtgtgatggttaatattaggtgtcaacttgattggaccgagagatgcctagatgactggtaaagtattgtttctggatgtgtctgtgacaatgttgacagaggagattgatattttcatcagtgaattgggagaggaagacccatcctcaatgagggtgggcaccatccaatctgcagccagcatggctaaaacaaagcaggcagaagaagggga

SEQ ID NO: 585637 - DNA, 612 bp, Homo sapiens
aaaactagacaaactcacaaagatgagaaagaatcaatgaaaaaaatgttgaaaacccgaaaggccagagtaccacttctcctccaaatgarcacaatgtctctccatcaaggccataggactggacagaggatcagatggatgaatggacagaagtaggcttcagaagatgggtaataaaaactatgctgagctaaaggagcatattctaacccaaatgccaagaagctaagaacagtgataaaaggttagaggaattgctaactagaataaccagtttagagaggaacataaacgacctgttggagctgaaaaacacagtatgagaacttcatgaaacatacacaaatatcagtagccaaatcaaccaagcagaagaaaggttatcagaatttgaagaccaccttgttaaaataaggcatgcagacaagaccagagaaataagatgaataagaataaacaaagccaccaagaaatatgggacttcataaaaaggccaaacctatgattaattggtgtaccagaaggagacaaagagaatggaaacaagctggaaaacacacttcaggatattatacgggagaacttccccaacctagtgatacaggtcaa

SEQ ID NO: 585638 - DNA, 577 bp, Homo sapiens
ggtagaaaaaccaagtggcggagaactaaggatcagactttagtgtgagctgttttggcattctagaccaactaatttccatggtgactgcagcccctattgctttcacactggcaagagaacttcccaaatgaagtccacgcacagttttgagaaggaataaaatggtcgtattaagccatcatatttcagtatggtttttaacatagcaagttaagttgcttgtattttcattctttcattctagagacatagaaatcctttatatatgttcgatataaatctttgctcacatacattcattacaaatattttctccctgtagtggcttgcttttttattaktcgtttttactagggcagttcaatgaggacattttcaacattgatgaaacagagtttatcattttaaacaaatggtagcacattatctttctgaaaaaaaccttacttacctacctatgaaaataaaataaaaataatccacattcttttttattctttttcttttttttcttttttcttttttctttttttttttttttttggagacggagtcttgctctgtcacccgggca

SEQ ID NO: 585639 - DNA, 546 bp, Homo sapiens
tcacccaggctggagtgcagtggcacaatcttggttcactgcaacctctgccttgtcaggagactttctaatcactgcttcaattttattacacattattgatctgttcagggtttctatttctttttggttcaattttgagaggttgtacatttccaggaatttatttattgatgctaggtttttagtttgtgtgcatagagatactcatagtagtctgtgatggtctttcttatttctgtagtatcagttgtaatatcacattgattcaaaatttttgaatttccttttgtttttgtgtgagaattttttctctcttgagagtgtgacatgtgtatgttgggtgtggtcctttagctttgtgtctttgtgcttttggggagccaagtctctatatatgttccttggttatagatagccttagtgtagtgggtttttttttttttttcaaatgctggttgtttgtaagttgtagtaccagtagctgtgcttgctascagtcacaatctcctccacaaaaaaagaggctgaggccttggagattta

SEQ ID NO: 585640 - DNA, 546 bp, Homo sapiens
tcacccaggctggagtgcagtggcacaatcttggttcactgcaacctctgccttgtcaggagactttctaatcactgcttcaattttattacacattattgatctgttcagggtttctatttctttttggttcaattttgagaggttgtacatttccaggaatttatttattgatgctaggtttttagtttgtgtgcatagagatactcatagtagtctgtgatggtctttcttatttctgtagtatcagttgtaatatcacattgattcaaaatttttgaatttccttttgtttttgtgtgagaattttttctctcttgagagtgtgacatgtgtatgttgggtgtggtcctttagctttgtgtctttgtgcttttggggagccaagtctctatatatgttccttggttatagatagccttagtgtagtgggtttttttttttttttcaaatgctggttgtttgtaagttgtagtaccagtagctgtgcttgctaccagtcacaatctcctccacaaaraaagaggctgaggccttggagattta

SEQ ID NO: 585641 - DNA, 487 bp, Homo sapiens
atcttgctaagttccatgaaaaaaaattatgccgaaattttaattttatccaaactttaagtcgagattataattgatatttaaaaaactatattgagtctttctaaaaagatggcgtatcactctacttatttaggtattttaagatatctttcaataaacttttgtaatttttctacaaagtgcttacatattttaatggtttttacttagttgctactataaacactaaaattacattttcttccttttttttttttttttttttttttttgaaacaaagtctcactttgctgcccaggctggagtgcagtggtgcaatcttggctcactggaacctctgtctcctgkgttcaagggattggcatgcctcaacctttcaagtagctgggaccacacatgtgcatcaacatgccctgctaactttctgtatttttagtaaaaatggggtttcaccatgttgcgcaggctggtcttgaactcctga

SEQ ID NO: 585642 - DNA, 567 bp, Homo sapiens
ttcaaaattagtaacaacataaaaatgtcttggctatagaagaacatattaatcactgttgtcaaagctttgtagcaccttgtctaagtgttaataatctgttgaccaaattcagcaaaatacaattttgaggttattsaaaagctttatttttattcatgataccaacatgttccttatttctatgccaaaaaaatccaaaattagcaatactggttggtaatactctgaatttgtgtcaaaaattgtcacttgaaatttttcttggaagtagtgcttgataatttgtaattccaatgaagttatacataaaacccttgcagcatttatttatttcttgtagtagcttattttatagacttgctattttgtcaatcaaaggacaacaggctgtaatataataacttacagacaagtagatatattgaaactactcatattactcaaaaagaaacgaatacattacaattaaatttggagatgaaaactaacataaaatacataaaacaaaataaacatataggtcattactaaattgttactttttttttataccagaattacaat

SEQ ID NO: 585643 - DNA, 567 bp, Homo sapiens
ttcaaaattagtaacaacataaaaatgtcttggctatagaagaacatattaatcactgttgtcaaagctttgtagcaccttgtctaagtgttaataatctgttgaccaaattcagcaaaatacaattttgaggttattcaaaagctttatttttattcatgataccaacatgttccttatttctatgccaaaaaaatccaaaattagcaatactggttggtaatactctgaatttgtgtcaaaaattgtcacttgaaatttttcttggaagtagtgcttgataatttgtaattccaatgaagttatacataaaacccttgcagcatttatttatttcttgtagtagcttattttatagacttgctattttgtcaatcaaaggacaacaggctstaatataataacttacagacaagtagatatattgaaactactcatattactcaaaaagaaacgaatacattacaattaaatttggagatgaaaactaacataaaatacataaaacaaaataaacatataggtcattactaaattgttactttttttttataccagaattacaat

SEQ ID NO: 585644 - DNA, 589 bp, Homo sapiens
ttcaatatcttcctgggctgtcyctctgtctcctgtttctacaactttacacctgttttctcctctcctgcagggttatttcaaatgccactaaatataatagctcttctatcaccagtgactgtattttctggaggactaaattcctaatcttaaagtaatgacacatttcatgatgaagtgtgacctgtctttcctcaatcttagcaccaccaccaacccactgcctgctgccttgcacaccccacatatcacactctgtgactgtacttagaataacacttcatttcatgcccatctctttgctgtcctcttttgtgcacattttaaaaatctagaatgctctttttcattagtccaactggaaatcttgtattaagttttgcagtctgaagtcacaccaccatatagccttcagttacatctccaacacaagtacctgttttttcctctgaaatctgaaaagtaatagcaaattagttcagtgtgttatctagaaaacactgtcactttcagagcctttcattgtgcatctcattttattcctatgaataattttgctaaaattcatccaatcctaggtcatcca

SEQ ID NO: 585645 - DNA, 589 bp, Homo sapiens
ttcaatatcttcctgggctgtccctctgtctcctgtttctacaaytttacacctgttttctcctctcctgcagggttatttcaaatgccactaaatataatagctcttctatcaccagtgactgtattttctggaggactaaattcctaatcttaaagtaatgacacatttcatgatgaagtgtgacctgtctttcctcaatcttagcaccaccaccaacccactgcctgctgccttgcacaccccacatatcacactctgtgactgtacttagaataacacttcatttcatgcccatctctttgctgtcctcttttgtgcacattttaaaaatctagaatgctctttttcattagtccaactggaaatcttgtattaagttttgcagtctgaagtcacaccaccatatagccttcagttacatctccaacacaagtacctgttttttcctctgaaatctgaaaagtaatagcaaattagttcagtgtgttatctagaaaacactgtcactttcagagcctttcattgtgcatctcattttattcctatgaataattttgctaaaattcatccaatcctaggtcatcca

SEQ ID NO: 585646 - DNA, 589 bp, Homo sapiens
ttcaatatcttcctgggctgtccctctgtctcctgtttctacaactttacacctgttttctcctctcctgcagggttatttcaaatgccastaaatataatagctcttctatcaccagtgactgtattttctggaggactaaattcctaatcttaaagtaatgacacatttcatgatgaagtgtgacctgtctttcctcaatcttagcaccaccaccaacccactgcctgctgccttgcacaccccacatatcacactctgtgactgtacttagaataacacttcatttcatgcccatctctttgctgtcctcttttgtgcacattttaaaaatctagaatgctctttttcattagtccaactggaaatcttgtattaagttttgcagtctgaagtcacaccaccatatagccttcagttacatctccaacacaagtacctgttttttcctctgaaatctgaaaagtaatagcaaattagttcagtgtgttatctagaaaacactgtcactttcagagcctttcattgtgcatctcattttattcctatgaataattttgctaaaattcatccaatcctaggtcatcca

SEQ ID NO: 585647 - DNA, 602 bp, Homo sapiens
gtctttcctcaatcttagcaccaccaccaacccactgcctgctgccttgcacaccccacatatcacactctgtgactgtacttagaataacacttcatttcatgcccatctctttgctgtcctcttttgtgcacattttaaaaatctagaatgctctttttcattagtccaactggaaatcttgtattaagttttgcagtctgaagtcacaccaccatatagccttcagttacatctccaacacaagtacctgttttttcctctgaaatctgaaaagtaatagcaaattagttcartgtgttatctagaaaacactgtcactttcagagcctttcattgtgcatctcattttattcctatgaataattttgctaaaattcatccaatcctaggtcatccaaaaaccagagcttttataactcatggtggagccaatggcatctatgaggcaatctaccatgggatccctatggtgggcattccattgttttttgatcaacctgataatattgctcacatgaaggccaagggagcagctgttagagtggacttcaacacaatgtcgagtacagacctgctgaatgcactgaagacagtaatta

SEQ ID NO: 585648 - DNA, 602 bp, Homo sapiens
gtctttcctcaatcttagcaccaccaccaacccactgcctgctgccttgcacaccccacatatcacactctgtgactgtacttagaataacacttcatttcatgcccatctctttgctgtcctcttttgtgcacattttaaaaatctagaatgctctttttcattagtccaactggaaatcttgtattaagttttgcagtctgaagtcacaccaccatatagccttcagttacatctccaacacaagtacctgttttttcctctgaaatctgaaaagtaatagcaaattagttcagtgtgttatctagaaaacactgtcactttcagagcctttcattgtgcatctcattttattcctatgaataattttgctaamattcatccaatcctaggtcatccaaaaaccagagcttttataactcatggtggagccaatggcatctatgaggcaatctaccatgggatccctatggtgggcattccattgttttttgatcaacctgataatattgctcacatgaaggccaagggagcagctgttagagtggacttcaacacaatgtcgagtacagacctgctgaatgcactgaagacagtaatta

SEQ ID NO: 585649 - DNA, 602 bp, Homo sapiens
gtctttcctcaatcttagcaccaccaccaacccactgcctgctgccttgcacaccccacatatcacactctgtgactgtacttagaataacacttcatttcatgcccatctctttgctgtcctcttttgtgcacattttaaaaatctagaatgctctttttcattagtccaactggaaatcttgtattaagttttgcagtctgaagtcacaccaccatatagccttcagttacatctccaacacaagtacctgttttttcctctgaaatctgaaaagtaatagcaaattagttcagtgtgttatctagaaaacactgtcactttcagagcctttcattgtgcatctcattttattcctatgaataattttgctaaaattcatccaatcctaggtcatccaaaaaccagagcttttataactcatggtggagccaatggcatctatgagrcaatctaccatgggatccctatggtgggcattccattgttttttgatcaacctgataatattgctcacatgaaggccaagggagcagctgttagagtggacttcaacacaatgtcgagtacagacctgctgaatgcactgaagacagtaatta

SEQ ID NO: 585650 - DNA, 544 bp, Homo sapiens
aatactttcactcaacctaaacagacttttttaaaaaaacaagcaaataatgagtaaggacataaaacgtttgaagaacacaattaacaaatggaatcttataatgtaaaatgatatacacacatgtacatatacaatacacatatakgtatcgtatatatcaactggaagacacattttcctagagcatgttgaatagttaatagtcatttgaagtggcatgtggtgggaaataaatcaagacttaggaaatataaaaagattcaatatcataaagactatatgatccagccatagtggaagtaagggaggttataaatactattactaaaatatctttaaattttggaaattaacaaaatacacttcaaatatttaaagtcaagaagtaaatcataattatgcatgcactgttatctcagcaattctactctcaattatatacccaacagatatgtataaatatataaatctaatggtatatagaagagtggtcatgacagaattatcaacagtgtccaaaaagcgttagcaacagaaatat

SEQ ID NO: 585651 - DNA, 544 bp, Homo sapiens
aatactttcactcaacctaaacagacttttttaaaaaaacaagcaaataatgagtaaggacataaaacgtttgaagaacacaattaacaaatggaatcttataatgtaaaatgatatacacacatgtacatatacaatacacatatatgtatcgtatatatcaactggaagacacattttcctagagcatgttgaatagttaatagtcatttgaagtggcatgtggtgggaaataaatcaagacttaggaaatataaaaagattcaatatcataaagactatatgatccagccatagtggaagtaagggakgttataaatactattactaaaatatctttaaattttggaaattaacaaaatacacttcaaatatttaaagtcaagaagtaaatcataattatgcatgcactgttatctcagcaattctactctcaattatatacccaacagatatgtataaatatataaatctaatggtatatagaagagtggtcatgacagaattatcaacagtgtccaaaaagcgttagcaacagaaatat

SEQ ID NO: 585652 - DNA, 544 bp, Homo sapiens
aatactttcactcaacctaaacagacttttttaaaaaaacaagcaaataatgagtaaggacataaaacgtttgaagaacacaattaacaaatggaatcttataatgtaaaatgatatacacacatgtacatatacaatacacatatatgtatcgtatatatcaactggaagacacattttcctagagcatgttgaatagttaatagtcatttgaagtggcatgtggtgggaaataaatcaagacttaggaaatataaaaagattcaatatcataaagactatatgatccagccatagtggaagtaagggaggttataaatactattactaaaatatctttaaattttggaaattaacaaaatacacttcaaatatttaaagtcaagaagtaaatcataattatgcatgcactgttatctcagcaattctactctcaattatatacccaacagatatgtataaatatataaatctaatggtatatrgaagagtggtcatgacagaattatcaacagtgtccaaaaagcgttagcaacagaaatat

SEQ ID NO: 585653 - DNA, 544 bp, Homo sapiens
aatactttcactcaacctaaacagacttttttaaaaaaacaagcaaataatgagtaaggacataaaacgtttgaagaacacaattaacaaatggaatcttataatgtaaaatgatatacacacatgtacatatacaatacacatatatgtatcgtatatatcaactggaagacacattttcctagagcatgttgaatagttaatagtcatttgaagtggcatgtggtgggaaataaatcaagacttaggaaatataaaaagattcaatatcataaagactatatgatccagccatagtggaagtaagggaggttataaatactattactaaaatatctttaaattttggaaattaacaaaatacacttcaaatatttaaagtcaagaagtaaatcataattatgcatgcactgttatctcagcaattctactctcaattatatacccaacagatatgtataaatatataaatctaatggtatatagaagagtgktcatgacagaattatcaacagtgtccaaaaagcgttagcaacagaaatat

SEQ ID NO: 585654 - DNA, 415 bp, Homo sapiens
gaattccctgatcccttgtgcttcctgggtgaggagatgcctggmcttgctttggctcacactccatgggttggttgcactcactgtcctgcacccactgtctgacaagccccagtgagatgaacccagtacctcagttggaaatgcagaaatcaaccatcttctgtgccgctcatgctgggagccatagactggagctgttcctattgggccatcttggaactgccccccatattagtccttcttgaacttgcttaattcacttagcataataccctctaggttcatccacattgtcacaaatggtaccttttgtcaaaccttggcaactgaattgacatttctactgcttccatatacagagaaattatactaactgaacttgtgaaaataatttattgatattaaattaaaa

SEQ ID NO: 585655 - DNA, 611 bp, Homo sapiens
gctttctaaaataattttatataataggaatttatgcacttaaaattaaatacaacggaaaggatttctggttgagtctaagaaagttttccatgagatcttaattgttctaataagaagatttggattctcttctttagatttattggaatgttcatttggacatcttatttattttcactttgtttatcttaatgttgggataatagaaagcatagatattgagaatgcatactctactattggtattttttttgtcaaaatgtataatttattttgaaatgttaaatagtgcttatgggctgartcatggctcattactcagaattcatttgtttgtgttctaaccccaagtacctcagaataggactacatttggagacagggccattatggaaaaaactaatataaaatgagggcatatagagaatatcttatatggacataaggacaaacacagagaaggaagtccatgtaaaaacactgaaggaaggcaaccatctacaaaccaatcataatggctttagaagaaaccaactctgttaatcacactttgattacacacttctagcctcctgaatgtgagaaagcatgttccttggagagaagca

SEQ ID NO: 585656 - DNA, 517 bp, Homo sapiens
ggatacaggcattgggtaaataacactcctaaatggcagaaactggccgaaacataggggctacaggtcccatgcaagtccgaaatccaggtaaggcagtaaaatccaaggggcagtcacctccaaaatgatattctctgactccatgtctcacatacaggtcacactgatgtaagaggtaggctcccatggccttgggcagctcaacccctgtggctttgcagggtacagccctcctcttgggtgctttcatgggctggcattgagtgtctgtggcttttccagttgggtggtccaaactgtttgtggatatatcattctagggtctggaggatggtggccatcttctcccagctccactaggcagtgctctggtggggactctgtttgtgtgtgtgttggggtggggggctgcagggggttgctcacaccacacattttcctttcatactgccctagcagagtttctctgtgatggtctcrtccctactgcaaacttctacctgaacatccaggc

SEQ ID NO: 585657 - DNA, 669 bp, Homo sapiens
ttatacttaccaaaacctgagctctcaagcatgtaaagcaaacattaacagacctaaaggcaaaactagcatgcaacacagcaatagtaggagactttaacaccccattctctgtaatggaaagattatccaggaagaaaatcaacacagaaacatcagagttaaagtacacactagatatgaagggcctaactgacatatacagaaagtttcacataattgctgtagaatagacattctttttattagcacaaaaaatgtctcccttaattctatgataggctaccaaacaagcctgtacaaattcaaaaacacaagtatcatatgaagtatattttctgaccacaatgaaataaaacaaaaaataaattaaaagaagaatctggaaaacagacatgaacacatggaaattaaacatactgctaaatgacaaacatgtcaatgaagttattaagaagaaaatttaaaaattttgtgagacaaatgaaaatggaagtacagcataccaacatctatggaagatggccaaaaaaactgtaagaagaaagtttcttgtaacaaacatctgtatcaaaaaagttgaaagacttcaaataacctaatmctatacatcaaagaactaaaaaagcaggaacaaaccaaacccaaagctaatagaaagaaagaaat

SEQ ID NO: 585658 - DNA, 354 bp, Homo sapiens
agaatacagcacagaaccagacaaagttgcctgttgaaaggttttaaattctagttgctatagactgaaagtgtgtgtccttcaaaatttctatgttgaaatcctagcctccaatatgatggtattaggaagtggggcctttggaggatgcttaagtcatgaagggagagcccttatgtataagattagtgcccttataaaagaaatccagaaccatctcacctattccaccatgtgagggcmcaatgagaaaatggccatctatgaaccaggaaagaggccctcaccaggcagtgaatctgccagtgccttgatcttgaactttccatcctccagaattgtgagaaataaatt

SEQ ID NO: 585659 - DNA, 578 bp, Homo sapiens
tgtctctactaaaaatacaaaattagccaagcatagtggcacatgcctgtaatcccagctacttgggaggctgaggcaggagaatcatgtgaacctgggaggtggaggaagttgggtgagctgaratcgcaccactgcactcctgcctgggcatcaagagcaaaactccatctcaaaaaaaagacaataaatagtgtgcttttctataagtactttctctttgtttgaagaaatgcgaccaatgctgaacacggaatcaagcttgggataagaatagctagaggacaaaatgctggtgtgtgggttattatgcaagtaagatgccttggatctccgtctcatataaggtggaaactctccctccccaccctacatcttgccactctcatgaattccaggatagttggtagtttcctaatcaagagcttacttatcgaaaatactccatggcttttgtagaagcttctgtttgacaattcctcactacacattggttctttaccattacaaagcaccgcggaggtaagttcattatgcacagcagatgtgtagggcacatttgggataatggagagggg

SEQ ID NO: 585660 - DNA, 547 bp, Homo sapiens
atactaaattaattacatattatcaaatkttgataaatgtgtgtgtgtctgtgtgtctgtgtgtgtgtgtgttcctattcactacacaaataagacttaggccttcagggcataagtaatgtaaatgtaactataatggcaaagcttatttgctaaaaaagaaaaatgggcctagaacttacatatgctgaattccatccagtattcctacaacacatttcaactggtgaaaatagtaagtccaagacagagtaactgaaacagagttattttgtgagataaacagcaaaatctacaaacctcaaataactttaaaagctaaattaaaaaaaaaatttaaggacattatagagatctttatatttggtgctgtttaggacatataaaataatatcatcccgaccaccaataatacagatgaaagctatcagtcagggtcctcatacttcagcaactgagagacactaatgaaaaatgtatgttttattggttactaacctgggtgacacagtggccttgttgtagagccctacaaatattcaaatca

SEQ ID NO: 585661 - DNA, 583 bp, Homo sapiens
cccaagctgactctttaattcatcactgatccaaaccaggggtttattctctagatccaaagggaaaagaaaacttcagtatggtgtgtgtgtgtgtgtgtrtatatatatatatatatatagtctaatctggactaggcacttttccagttactgagtgggtgagaagagaaaggatccaaaaatgaagatcgtatttttgctatgattattatacttataacctatgtagacagactgcttggagagggcttaacatttattttgctcttgtaggtgtcaggccctgttttagagtgtacacgtataaatggtttagatccttatatcctcatcgtgtgggtgagtattgtcatcattccacaaatacagggactgaggctcatgcagcaattgtcagagcatgtggataatggatttaacgtccatctgactccaaagcctttgttctttctactcattgtcagattctctcaaatttgtgtagaagactgatacatctcccacattcattagaaacaaggtaatgcgacttgaatattacacatgaaagtaaaaaagtaaaccgaatacttgttactca

SEQ ID NO: 585662 - DNA, 583 bp, Homo sapiens
cccaagctgactctttaattcatcactgatccaaaccaggggtttattctctagatccaaagggaaaagaaaacttcagtatggtgtgtgtgtgtgtgtgtgtatatatatatatatatatagtctaatctggactaggcacttttccagttactgagtgggtgagaagagaaaggatccaaaaatgaagatcgtatttttgctatgattattatacttataacctatgtagacagactgcttggagagggcttaacatttattttgctcttgtaggtgtcaggccctgttttagagtgtacacgtataaatggtttagatccttatatcctcatcgtgtgggtgagtattgtcatcattccacaaatacagggactgaggctcatgcagcaattgtcagagcatgtggataatggatttaacgtccatctgactccaaagcctttgttctttctactcwttgtcagattctctcaaatttgtgtagaagactgatacatctcccacattcattagaaacaaggtaatgcgacttgaatattacacatgaaagtaaaaaagtaaaccgaatacttgttactca

SEQ ID NO: 585663 - DNA, 583 bp, Homo sapiens
cccaagctgactctttaattcatcactgatccaaaccaggggtttattctctagatccaaagggaaaagaaaacttcagtatggtgtgtgtgtgtgtgtgtgtatatatatatatatatatagtctaatctggactaggcacttttccagttactgagtgggtgagaagagaaaggatccaaaaatgaagatcgtatttttgctatgattattatacttataacctatgtagacagactgcttggagagggcttaacatttattttgctcttgtaggtgtcaggccctgttttagagtgtacacgtataaatggtttagatccttatatcctcatcgtgtgggtgagtattgtcatcattccacaaatacagggactgaggctcatgcagcaattgtcagagcatgtggataatggatttaacgtccatctgactccaaagcctttgttctttctactcattgtcagattctctcaaatttgtgtagaagactgatacatctcccacattcattagaaacaaggtaatgcgacttgaatattacacatgaaartaaaaaagtaaaccgaatacttgttactca

SEQ ID NO: 585664 - DNA, 631 bp, Homo sapiens
aagttcaaatctacatttaataatagttcgtgtgacttttttaatcttctgagaaaaagtaaattaaacacagaagctgaaaagtaactggccgaataatcaaatttcatttgcctcttaactcagagtgagctagattagagagtaatgaaaagcctcccttatataatttagtgccttatggctttgatttttcccaaattacagctttattgaagagcaagcatctgtagatgtcatgcttaatcatggttgtttttagaactaaagtctgtaatttcagaatgaattttgagggaatctctggggcttcacaagatcctcctaaatgaggccttatatttaattctatgatgaaatcaggagactggatatgtagaagcctccagtctgcttggttttgttttctgatgaccttgaaaagacccagaatttcatgagaaatcatgtaagctgcttggaataaaatactttcgtatgttttgcttgtgtrtttttcttgaaaaatgttttaaattttagtttgatgataaattgatgtaatttagaccttatagacaacacatttgcattgatgctgatgactccagctggctgtcctgctggctggaagagaagattggatattacc

SEQ ID NO: 585665 - DNA, 517 bp, Homo sapiens
cacacaatttctttcttctgtcctctgtcatctgaataatatcctcccatcaccataagcaaaggccttcatcagttaccccagctggagtatagagcctgcctaggtgcatgtccttgactcctgctcctccttgatctcccatctaactccacccacacattcaatcagttacaaagaccaaccacaatgccccaagaacctkccaccaacacccttctctaactataccttcctacttaatgcctcgacaactttgatgacttctcaatgacctttccacctggaaactctcccttctttaatctttcatttacatcagacaagaggactcttcctaaagcatcactttgattatgccattattgtcctcagaaaccttaaatgcctacccactacataaaatccacgtttcttagactctccaatctcatgtcacagcctcatcacttctcaggtcaccacctatgccatccaaactgctgtccctacacatttattcatgcctccccactaa

SEQ ID NO: 585666 - DNA, 523 bp, Homo sapiens
acctaaaaaaaatatttagcaaataaaatccacaaagaatacattcagtatgactcaactgtacataattcaactataagcaaaactaaaaatatatggcttatgggtaccaacacaggtggtaaaagtataagaaaaaacagggcaaaattaagccaaaattcaggaacctctttgggtggactggttgtgagactggcaaggggcacaccacccctaaattacctgcaatgttttattttttcagctgggaagtgggtgcattgttttcacttaggttcttaagtttaagtggtagatcattgggtcttacatattccataacaaaatttttttaaattacaaagagaaataaacaagaaggactcagctgcacttcttgatgacatgccctttctttagacaccctgggaaaactcaattattgtacatcaacagcttttgcctgaaagtagaaagcctagaaaggagataattgcctctccactatctgtgaytgggaaactatagcccgctgggaaaa

SEQ ID NO: 585667 - DNA, 618 bp, Homo sapiens
agactgggtaatttataaaggaaaggaagtttaatgactcacagttccacatggctggggaggcctcacaatcatggcagaagacaaaggaggagcaaaggcacatcttacatggtggcaggcaagacagtgtatgcaggggaactgccctttataaaactatcagatctcatgagacttattcactatcacgagaacagcacaggaaaatcccatccccatgattcaattacctcccactggatccctctcacaacacttgtggattaggggagctacaattcaagatgagattygggtggggacacagccaagccatatcaccagtcttgaaggagaatgacaaagttcagagagactggggcatggtggcaagtggagggagatagtgacagggatgaaggcataggccacttttcagctgcttaatatgccaggttgagaaattgggaatttttccacaggaaagtggggaaatgagataagttattgcaaccaggattaacacaatcagacattaatttttcctgaaaaataacagacttttgccacactacttaatttgaagcaatgactgactctactagtcctaaagcataagtttatgcaaagccctca

SEQ ID NO: 585668 - DNA, 622 bp, Homo sapiens
catttaaaaaataaattgcatatttcatgatagcctattatctttccttctgttgattttgtaagatttctataatttactctatattaaaaaagaataataaatgagtttaataatgttcttaagcctcttagcacttactttttctcttttcacrccactatttgaaacaatcagtgcctgtagtcttcctaaattaatttaaaatagccatttctgtttaagctttgaaagaccaattaatattgaagtgacttcattcagtcttttctgcactaatcttattggtagcagaattagtgtagcaattaaagtgggttttccatatggttaataatattatatcatcagattttctttttggcttcagattgacttgaatttcagttatttgttatttatcattcctattcctggtctattcaaagaaaaaagaaggcttccttctgtgacctgcattatccatgtcaaaaaaatatctcaaattgagaggaagatggcttcagaaggaataaagaaataaactatcattctatacttctatcaaatttaaacatactgtacatgttgtagacacaatcagagattagagacactgaatttcattttattagcagtttgc

SEQ ID NO: 585669 - DNA, 611 bp, Homo sapiens
tattttgaggaagaatggttaatacacatacacacacatataaaacctatataaacacatatataaaaacacatttaaatataaagtgcctcaaaaaaaaaagcaatttggtaaaacattagcctgaaaataaaataccaatacagaacaatttctagtttacttaatgaggacatggtgatacctctctacctatttcatgaagcttttatttggtacatttactttaattttttaatgcataatatctcgttaacaattttgacatgggctttctaaacactgaagttataattatataaacatttytgggccgggcatggtggctcacgcctgtaatcccagcactttgggaggccaaggcaggcggatcacgaggtcaggagatcgagaccatcctggctaacatggtgaaaccccatctttactaaaaatacaaaaaatcagccaggcatggtggcgggcgcctgtagtcccagttactcgggagactgaggcaggagaaaggtgtgaccccaggaggcggagcttgcagtgagctgagatcgcaccactgcactccagcctgggtgacagagcaagactccgtttcaaaaaaaaaaaaaaaaaaa

SEQ ID NO: 585670 - DNA, 611 bp, Homo sapiens
tattttgaggaagaatggttaatacacatacacacacatataaaacctatataaacacatatataaaaacacatttaaatataaagtgcctcaaaaaaaaaagcaatttggtaaaacattagcctgaaaataaaataccaatacagaacaatttctagtttacttaatgaggacatggtgatacctctctacctatttcatgaagcttttatttggtacatttactttaattttttaatgcataatatctcgttaacaattttgacatgggctttctaaacactgaagttataattatataaacatttttgggccgggcatggtggctcacgcctgtaatcccagcactttgggaggccaaggcaggcggatcacgaggtcaggagatcgagaccatcctggctaacatggtgaaaccccatctytactaaaaatacaaaaaatcagccaggcatggtggcgggcgcctgtagtcccagttactcgggagactgaggcaggagaaaggtgtgaccccaggaggcggagcttgcagtgagctgagatcgcaccactgcactccagcctgggtgacagagcaagactccgtttcaaaaaaaaaaaaaaaaaaa

SEQ ID NO: 585671 - DNA, 611 bp, Homo sapiens
tattttgaggaagaatggttaatacacatacacacacatataaaacctatataaacacatatataaaaacacatttaaatataaagtgcctcaaaaaaaaaagcaatttggtaaaacattagcctgaaaataaaataccaatacagaacaatttctagtttacttaatgaggacatggtgatacctctctacctatttcatgaagcttttatttggtacatttactttaattttttaatgcataatatctcgttaacaattttgacatgggctttctaaacactgaagttataattatataaacatttttgggccgggcatggtggctcacgcctgtaatcccagcactttgggaggccaaggcaggcggatcacgaggtcaggagatcgagaccatcctggctaacatggtgaaaccccatctttactaaaaatacaaaaaatcagccaggcatgrtggcgggcgcctgtagtcccagttactcgggagactgaggcaggagaaaggtgtgaccccaggaggcggagcttgcagtgagctgagatcgcaccactgcactccagcctgggtgacagagcaagactccgtttcaaaaaaaaaaaaaaaaaaa

SEQ ID NO: 585672 - DNA, 496 bp, Homo sapiens
aagatattttttataaaatcatttataaggataaatactgtgagaaaactaaaaatacaattgcaagtttaagcaaaagttgtgatatacccacatgacacaatattaagcatccattatgaagacatgaatggaaaatacwttataatattaatattaaaatataaatacttgcattttatacttatatcttataaatacaagtatttgtatctgatacttataagaatatttatatgaatataaattatgaaaatacaagtatttatatctgataaatattttcaagtatttatattttaacagaatgtaaatgaaatatataacatataaataatataattgttttaataatttatattcatatgtttgtaaataaaaatataacatatttgtaagtttatcagtacaaacataatttatatttatataatacaatttaaataattataaaatataaaaatatccatacaatattattatatataatataaac

SEQ ID NO: 585673 - DNA, 439 bp, Homo sapiens
ggtgcctgtagtcccagctactcgggaggctgaggcaggagaatggcgtgaacccgggaggcggagcttgcagtgagccaagatcacgccactgcactccagcctgggcaacagagcgagactccgtctccaaaaaaaaaagaagyatatgggaaaatacaaattccaggaaaacagcaaacagtgaaaaggatctccctgaggtcaagatgagggagatccctcccacatctgcttcccaatttctcaaaatacacgtgtatatgtatatgtgtgtgtctatatatatatagaatattatacatattgtgtgacacatatttattcatatactttatatgtgcacatatataaagtgattcttgttgctatgccacaaatgttttgcacattactttgcaccttccttttttttaattttattttttcattaaacatt

SEQ ID NO: 585674 - DNA, 644 bp, Homo sapiens
ttttacactgcaaaatgaatgtgcaaatcacagagtgttttctcaggtatattccttcctttttcccaactgcagaatccaaagaaaggtttatctctgtgagattaatgcaaatatcataaagcagtttctcagaaagcttctttctagtatttaatcagaagatatttccttttttaccataggccttaatgcgctcccaatatcccttcacagactctacaaaaaccgtgtttcccaactgctgtatgaaaagaaaggtttaactctgtgagataaattcccacatcacaaaccattttctctgatacattccttctagtttttatcctgggatattttctttctccccatgggctttgctgatctcccaatgtccattagtagggatggaaaaaacagtgttaccaaactgctgaatccaaagaaaggtttaactgtgagatgaatgcaaaatcacaaagcagtttctcaaaagcttctttctaatttttataggaatatatttcctttgtcaccataggcctcaatgygctcccacattttcttcacagattctacaagaacagtgtttccaaactgctgaatgaaaagaaaggtttcactctgtgagatgaatgcacacatcacaaagccgtttctca

SEQ ID NO: 585675 - DNA, 568 bp, Homo sapiens
aatatcccaggatgaaagctagattgaagatatctgagaaacttctttgtgatgcatgaattcatcttgcagaattaaagctttcttttcactcagcagttttgtaacactgtttttctagaatctgtgaagggatatttgggagcactttgtgacccatggtgaaaaaggaaatatcttcatayaaaaatttgaagttttctgaggaagtgctttgtgatgcgtgcattcatctcacagagttaaaactttcctaggattcagcaggtttgaaacactgtttttgtccctgctccaaatggacatttgggagctcattgaggccaatggcaaagaagtgaatatctcaggatacaaactagaaggaagctgtctgcgaaaatgctttatgatgtgtccattcatctcgcagatataaaccttccttttcattcagcagcagaatctgcaaagggatatttgggagcgcattgaggcctgtggtgaaaaatgaaatatcttcagataaaaactagaaacaagatttctgaggaactgctttgtgatgtgtgcattcttctcacagagt

SEQ ID NO: 585676 - DNA, 518 bp, Homo sapiens
acactccttttgtagaatctgtgaagaaatatttggaagcttattgaggcctaaagtgaaaaacaaaatatcccgagaaaaaactaggaagagggtatctgtgaaactgctttgtgatgtgtgcattcatcacaaagagttaaacctttcattcaattcagcatgttggaaacactctttttgtagaatctgtgaagggacatttgggagccctttgaggactatagtgaataactgaatatcctcagataagatccagaaacaagctatctgtgaaaccactttgtgatgtttgcattcatctcatakagttaaacctttcatttcattcagcaggttggagaaactctttttgtagaatttgcgaagggacattttggagcctattgaggcctgtagtaaaaaactgaatatccgcttataaaaactagaaagaagaaatctgtcaaactgctttgtgatgtgtgcattactctcacagatttaaactgttcttttgattcaacagtaggaaacac

SEQ ID NO: 585677 - DNA, 351 bp, Homo sapiens
tgcccggatttcaacaatttctaaagtaaatattaatttacttttgttatttctcataattaagagtaaaaatgtagcctgtaaggcagctgacttctgtcacttcctggttcattttaatctaatcttatggttaaggaaaatcaatttagagtagcaatatrgtacatttagtaatccattctgagcacactttctttcttctacttctgaagtgttcttctctaacatgttgttttttcagaaattattgttactgacttatttcaacagctctgagaaacaaaaaattcagtatttcataaaatttctctaccatataaagtttataacagatgatatcacagggga

SEQ ID NO: 585678 - DNA, 351 bp, Homo sapiens
tgcccggatttcaacaatttctaaagtaaatattaatttacttttgttatttctcataattaagagtaaaaatgtagcctgtaaggcagctgacttctgtcacttcctggttcattttaatctaatcttatggttaaggaaaatcaatttagagtagcaatatggtacatttagtaatccattctgagcacactttctttcttctacttctgaagtgttcttctctaacatgttgttttttcagaaattattgttactgacttatttcaacagctctgagaaacaaaaaattcagtatttcataaaatttctctaccatataaagtttrtaacagatgatatcacagggga

SEQ ID NO: 585679 - DNA, 522 bp, Homo sapiens
ctattgctgtatctgccatatgaacattacactaaatgaagatgtccaaatatcataggaaagcttgcctaaagaccacggaattatctgtatagtgaaggcctaatcttgcccaaagagaggtctggcttttatcctcagctactggaagatgrtcgctaggctcctggaatagcacaactgataggagtgtctttgactactagacaatctaccaatgtaatttatgatacatgtaatttatttgagtcatactatgttttgcctctggaaaggactggagactaaagctatcagcccaacatttgggaagggctggagactaaagacagtcacacaggcagtaagtaattgaggccaccctaaaaaaactataaaaactaaaggcttaggtgggcttccctggctggcaatactcggtaagcactatcatatatgtatgctgggctgtcctaattccaccaagaaagaatgatgtaagctccacatgtggtattttttttttaactctaccctatatat

SEQ ID NO: 585680 - DNA, 522 bp, Homo sapiens
ctattgctgtatctgccatatgaacattacactaaatgaagatgtccaaatatcataggaaagcttgcctaaagaccacggaattatctgtatagtgaaggcctaatcttgcccaaagagaggtctggcttttatcctcagctactggaagatggtcgctaggctcctggaatagcacaactgataggagtgtctttgactactagacaatctaccaatgtaatttatgatacatgtaatttatttgagtcatactatgttttgcctctggaaaggactggagactaaagctatcagcccaacatttgggaagggctggagactaaagacagtcacacaggcagtaagtaattgaggccaccctaaaaaaactataaaaacyaaaggcttaggtgggcttccctggctggcaatactcggtaagcactatcatatatgtatgctgggctgtcctaattccaccaagaaagaatgatgtaagctccacatgtggtattttttttttaactctaccctatatat

SEQ ID NO: 585681 - DNA, 598 bp, Homo sapiens
atataaaaaaataaagaaaaaaaccctgaaagaagccagaggaaaaaaacaccttatgcatagaggaacaaagataagaattatatctgattccttaaaaatcatgcaagtaagaagagagtgaagtgaaatatttaaaagaaaaaaaaagcctcaccaacctatgayttcatatactgcagaattatccttcaaaagtgaaagagaaatacattctcagacaaacaaaaactgaggggatttgttgccaggaaaactatatttcaggaaaaattgaaaagttcttcaaaaagaagaaaaatgatacaaatcagaaacagaactatgtaaagagaggaacagcatcagagaatgaataagtgaaggtaaaataaaaacttttaccttttatttttaattagtctaaaagataacagtttgatcaaaagaatgccaacaatgtactcaaatatgaattattacttatgcatgaaataaatgacagcaatgatacaagggacaagaacaaggaattaggattattctgttattacaaggtacttcactacctatgaagcagtaccatgtcatttcaaagtgggctgagattagttgtaaa

SEQ ID NO: 585682 - DNA, 285 bp, Homo sapiens
ggttcccttttggcccagagtgtgtctagaaatatcattggggagctagggcctggaatgggggcctcatggctctgcctggtgctctrttctagtgtggctgagctagtatccaagatgcaagacaatgtcggggctgggcatggtggcttacgcctgtaatctcagcactttgggaggccaaggtgggcagatcacctgaggtcaggagtttgagaccagcctggccaacatggtgaaaccctgtctctactacaaatacaaaaattagctgggtgaggtggc

SEQ ID NO: 585683 - DNA, 499 bp, Homo sapiens
gaattcttgtaattggaagcccccttacccccaacccctctcctataatatgaggccagagataaggtatgctctgtatccaactggagccagtttagcaaatgctcctccaagccctatatgaagagacctccgcttggttctgatgatgcaacccaggcaactttacacaatcaaaattttttgcacagctctgagacacagkctttgtcctttctgatgccaccaggtccaactgcagaacacctgatttggcgatgaagccaatttaaatgtagaacacgattctgcttagaggccagggtcagatgtcatagtattggggagcagaagcaagagtctgaagaaaacccctaagctattgccagcatcacccccgactgtgtgaagtaagcaacctgccttctctgcacctccaaaatcctccacccaccaccaccaccattccagtgttccatccacaagagaaaggtcatgcccctgagatgaaggtgctttg

SEQ ID NO: 585684 - DNA, 544 bp, Homo sapiens
cccagtgctttgggaggctaatgtaggagaatcgcttggggccaggatttccagaccaccctgggcaacattgtgagaccctatctctactaacagtaaaaaagcctggcgtggtggcacatgcctgcagtccttgctactcaggaggctgaggcaagagactctcttgagcttaggagtttgaggtaacagtgagctataattgtgccattgcactccagcctgggtgacagagtgagaccgtgtctctaataaaaaatgttatcttttaatttctatggagaaccaaacgcctgtgactctgacttgcttgggtgactattgtttaaattattatcttcttaatttatttacttctcaggcctagctaagggcctagartttcccttgaagggactcaatattttttttttattgctatccttgagggggtggggagagtgcaggccccaaagagaggaccctgctccgtctcaaagtcagtcttcatagaatactcttttctctttttttcctctatccatttgttctaagagaaaaagtg

SEQ ID NO: 585685 - DNA, 550 bp, Homo sapiens
tatattgttaaatttcttcctaaatacttcatttttgtttttgctgttttgaatggaattgttttctaatctcaatttttttcattgatagtttttggaaattcaattaattttaaatactaattatatattttgccttgttgaattcatgcataaggtctaacagtttttagtgtcctgcatgggaatttctrtgtacaatattaggcttttcacaaatagaaatgcatttattttttattttttccaatctgaatagcttctctatatttttatttaacttaattatcctgattagaacctcaagagatattggacagaagtggcaagagtggtcatctttgttttcttttgactcataaagaaaaaaaaaatttttttttgagacagagtctcactctgttgctcaggctggagtgcattggtatgatctcagctcactgcaacctctgcctcctggggtcaaacaattctcctgcctcagcctcccgagtagctggaattacaggtgcctaccaccatgcctggctaatttttgtatttttagtaa

SEQ ID NO: 585686 - DNA, 550 bp, Homo sapiens
tatattgttaaatttcttcctaaatacttcatttttgtttttgctgttttgaatggaattgttttctaatctcaatttttttcattgatagtttttggaaattcaattaattttaaatactaattatatattttgccttgttgaattcatgcataaggtctaacagtttttagtgtcctgcatgggaatttctatgtacaatattaggcttttcacaaatagaaatgcatttattttttattttttccaatctgaatagcttctctatatttttatttaacttaattatcctgattagaacctcaagagatrttggacagaagtggcaagagtggtcatctttgttttcttttgactcataaagaaaaaaaaaatttttttttgagacagagtctcactctgttgctcaggctggagtgcattggtatgatctcagctcactgcaacctctgcctcctggggtcaaacaattctcctgcctcagcctcccgagtagctggaattacaggtgcctaccaccatgcctggctaatttttgtatttttagtaa

SEQ ID NO: 585687 - DNA, 580 bp, Homo sapiens
gagaaagttttattttctatagcctgaatatactctgatgcctatacttccacaaagtaaccaatttaagtttagcttagttattagctaaacttctcaaagctcttaggatagctgagttaaagccttcctagaagcagcaaatatgatttcaatgatatttccaacctgagagatgaactgggtatattcatccagggttctcagataattagcattctcaaacactagtaaggaaggttagaatgataatctgaaattctgttttacatgtaagtgtaaacataaagggaagaaagatgcactattatatatctcattccaaaattatttcagatcaaattaatcactttttatatgttggaaatatgtatataaaaattaaaatgtaatatgccataaaataatagaatttacraagtaattggcaggtataaaagtacaaactgcttttaaaaaatatttgggcttggccgggtgtggtggctcacgtctctaatcccagcactttgggaggccaaggtgggtggatcgcttgaggtcaggagttcaggaccagccgggctgacatggtgaaacc

SEQ ID NO: 585688 - DNA, 574 bp, Homo sapiens
agccttacgggagactctgccctcatgactgggattagcaccttattaaaggcacaagggagcttgtttgttcctctcaccatgcgaagacacagcaagaaggaagcctctatgagaaagcaggccttcaccagacaccaagactgccggcaccttgatcttgcayttctcagcctccaggactgtgagaaacaaagttctgttatttataagctacctggtctaatgcatttccttgtagcagcctgtatggattaggacagtgggctcatgtggatgatgacggtgtctccattcaggactaagtaagcacatgagtccttaacagtggaagagaagggggaaggaaagagccacagagacatgtggccatagaagaagggcccatgggatgcaaggttgctaatggtgagagtggagaagagcccaaagccaaaaaatgcaggcagactccagaatgtggaaaaggcgagaaaaaagatcccctagagcctctagagatgaaggtagcctttccaccacctagattttagcccagtgagatccacatcacactctgacatacgggagtgta

SEQ ID NO: 585689 - DNA, 574 bp, Homo sapiens
agccttacgggagactctgccctcatgactgggattagcaccttattaaaggcacaagggagcttgtttgttcctctcaccatgcgaagacacagcaagaaggaagcctctatgagaaagcaggccttcaccagacaccaagactgccggcaccttgatcttgcacttctcagcctccaggactgtgagaaacaaagttctgttatttataagctacctggtctaatgcatttccttgtagcagcctgtatggattaggacagtgggctcatgtggatgatgacggtgtstccattcaggactaagtaagcacatgagtccttaacagtggaagagaagggggaaggaaagagccacagagacatgtggccatagaagaagggcccatgggatgcaaggttgctaatggtgagagtggagaagagcccaaagccaaaaaatgcaggcagactccagaatgtggaaaaggcgagaaaaaagatcccctagagcctctagagatgaaggtagcctttccaccacctagattttagcccagtgagatccacatcacactctgacatacgggagtgta

SEQ ID NO: 585690 - DNA, 574 bp, Homo sapiens
agccttacgggagactctgccctcatgactgggattagcaccttattaaaggcacaagggagcttgtttgttcctctcaccatgcgaagacacagcaagaaggaagcctctatgagaaagcaggccttcaccagacaccaagactgccggcaccttgatcttgcacttctcagcctccaggactgtgagaaacaaagttctgttatttataagctacctggtctaatgcatttccttgtagcagcctgtatggattaggacagtgggctcatgtggatgatgacggtgtctccattcaggactaagtaagcacatgagtccttaacagtggaagagaagggggaaggaaagagccacagagacatgtggccayagaagaagggcccatgggatgcaaggttgctaatggtgagagtggagaagagcccaaagccaaaaaatgcaggcagactccagaatgtggaaaaggcgagaaaaaagatcccctagagcctctagagatgaaggtagcctttccaccacctagattttagcccagtgagatccacatcacactctgacatacgggagtgta

SEQ ID NO: 585691 - DNA, 574 bp, Homo sapiens
agccttacgggagactctgccctcatgactgggattagcaccttattaaaggcacaagggagcttgtttgttcctctcaccatgcgaagacacagcaagaaggaagcctctatgagaaagcaggccttcaccagacaccaagactgccggcaccttgatcttgcacttctcagcctccaggactgtgagaaacaaagttctgttatttataagctacctggtctaatgcatttccttgtagcagcctgtatggattaggacagtgggctcatgtggatgatgacggtgtctccattcaggactaagtaagcacatgagtccttaacagtggaagagaagggggaaggaaagagccacagagacatgtggccatagaagaagggyccatgggatgcaaggttgctaatggtgagagtggagaagagcccaaagccaaaaaatgcaggcagactccagaatgtggaaaaggcgagaaaaaagatcccctagagcctctagagatgaaggtagcctttccaccacctagattttagcccagtgagatccacatcacactctgacatacgggagtgta

SEQ ID NO: 585692 - DNA, 419 bp, Homo sapiens
tctactgtaggcttggcagcttttcaatacttaaaggcgtgttaaagtaagattggtggttaaactaaaagtgatttttgacacaataaaacataagccaatatattccaagtaactaatgcatgatattataaatgcaagtatggagcaaaagatccatttactgtgcaagaaagatcaatgagtactgatggaataaatttattaatatgtaaaatgccaccgtaactaatttaagaaaccaccacttgtgaagttttgatttagtgttttaacaaatacccacaactgtctgaaaactttaaaaatacaccttctaccaactacatatttgcatgaggttmggtcatcttattgcttctttttctctttttttgagacagagtctctctctgtcacccaggctggggtgcaatggc

SEQ ID NO: 585693 - DNA, 525 bp, Homo sapiens
tgtctcaaaaaacaaaaaaatgaaaaaaaaaaagaacagccgagctgaatcatcttacaattaattccactgtcagtaaagccctccactcacctactaccaccagcaccatgcagagcagactataaacagatttttggtgcaccactcttaaactataaacagtataggcaagaatcccaagataacttgagaagcatttaccctgtttcattgatcctaagatgcatgtgtccgaatgaacatctctgaaatccgccttacaaatcaatagtattgcaaaatcatggtcagtcaggaggcagccgtgatacggccatgcaaaataatttcgtggacactttctcgtaagattaagagcaccagcatcgaaggttctcaaagtcgataaaatacggtaatctgaaagccagagaccaaagcaaagtggaaaaaggaggtaaaaacagagaaaatagcccccaaacccttattaatatcctgagagagataayggaatacaatatactcatttttaaaaaatat

SEQ ID NO: 585694 - DNA, 438 bp, Homo sapiens
ttgggttttggaatattccaacattgagaggacagacattgaggggggatactgaccaggagcagctggtgaggtagcaggacaaccagaagcatgggatgccatgaaayggcatggaatgggatggaatggcatggaatgggatgggatggcatggaatgggatgggatggcatggaatgggatgggatgagatgaaatagaatggaatggaatggaatgaaatgaaagctccaaaaaaatgcttccaaaaggaaggagtggtcagtcatgccaaatgtcactgcaagactcaataaagaggctagcagatggaccatgggacttggcagggtggaggtcttcattgtgaagacagtttcagctgaaagcctgactgaagaagactcaggagagaaggaaatgtggaaaagcaaacagacagcaagacaccctctct

SEQ ID NO: 585695 - DNA, 425 bp, Homo sapiens
tgggttttggaatattccaacattgagaggacagacattgaggggggatactgaccaggagcagctggtgaggtagcaggacaaccagaagcatgggatgccatgaaatggcatggaatgggatggratggcatggaatgggatgggatggcatggaatgggatgggatggcatggaatgggatgggatgagatgaaatagaatggaatggaatggaatgaaatgaaagctccaaaaaaatgcttccaaaaggaaggagtggtcagtcatgccaaatgtcactgcaagactcaataaagaggctagcagatggaccatgggacttggcagggtggaggtcttcattgtgaagacagtttcagctgaaagcctgactgaagaagactcaggagagaaggaaatgtggaaaagcaaacagacagcaa

SEQ ID NO: 585696 - DNA, 544 bp, Homo sapiens
gtgaaaggaagggaggagaataagaatctctgcatggtaatccarggaactcttccagatcttacccaaaaccaccaaggtgatacctcttcaagtctgcaagaagcacagcattactgggcttgggatgcccactaatgaatatatggctccattgagcaaacatgaagatgataacactcaagtcccttcaaatatctggaaagccttctcaagaaggatgggtacaaacaaagttacattgcaaagactacatacaataaatacctaactcaccaatccccagacaccaataaacatccacaagcattaagaccatccaggaaaacttgacctcaccaaatgaactaaataaataaggcactggtgatcaatcccagagacagagatatgtgacctttcagaaaattctaaatagcagtttgaggaaattcagcaaaatgtaagataacacacagaaggaattcagaatcctatcagataaatttaacaaaaaggttgaaataattaaaaagaatcaaacagaaattctggagctgaaaaa

SEQ ID NO: 585697 - DNA, 544 bp, Homo sapiens
gtgaaaggaagggaggagaataagaatctctgcatggtaatccagggaactcttccagatcttacccaaaaccaccaaggtgatacctcttcaagtctgcaagaagcacagcattactgggcttgggatgcccactaatgaatatatggctccattgagcaaacatgaagatgataacactcaagtcccttcaaatatctggaaagccttctcaagaaggatgggtacaaacaaagttasattgcaaagactacatacaataaatacctaactcaccaatccccagacaccaataaacatccacaagcattaagaccatccaggaaaacttgacctcaccaaatgaactaaataaataaggcactggtgatcaatcccagagacagagatatgtgacctttcagaaaattctaaatagcagtttgaggaaattcagcaaaatgtaagataacacacagaaggaattcagaatcctatcagataaatttaacaaaaaggttgaaataattaaaaagaatcaaacagaaattctggagctgaaaaa

SEQ ID NO: 585698 - DNA, 518 bp, Homo sapiens
gctcactgtagcctcaacctcacagggtcaagtgatcctcctgcctcagcctctcaattagctgggactacaggtatgcaccactgcacccagctaattttggttttgttttgttttgttttgtttttgtaatgatggggtcttgctgtcttgtcctagtgatcctcccatgtcagcttcccaaagtgttgggattacaggcatgagccaccattcccagccttctattttctagagagctttcgtggtaattttgcgctggaatctacagttgcctgtctgtctagaggcttgattttggccttcaaggtctttcctctggctctgccccacttacctacatcctgtctccccgctgtttcttctggaagtggagctgtctgctcccrccctccccacaggtcagaacgtccacctgtgcacccaggttctatgtccaatccaaaatgccaccctccctggttctcttccgcctttttgacttttcttctctttgaaatactagaaatcttgattta

SEQ ID NO: 585699 - DNA, 574 bp, Homo sapiens
aaggatggccataaccagaaaatgaaaaaataatagatgttggcatggatgtggtgaacagggaacacttcactgctggtgggaatgtaaactagcaaaaccactacggaaaacaatgtggagattccataaagaactaaaagtagaaataccatttggtccagcaatcccactactgggtatctacccagaggaaaagaagtcattatacgaaaaagacacttgcacacgcatgtttatagcagcacaatttgcaactgcaaatgtggaaccaacccaaatgcccatcaatcaatgagtggataaagaaactgtgagatatatatatatgtgtgtgtgtgtgtgtgtgtgtgtatgtatgtatatatgatgaacgactactcagccataaaaatgaatgaattaatgaattaatggcattcccagygacctggatgagactggagactattattctaagtgaagtaactcaggaatgaaaaaccaaacattatatgttctccctcataagtaagagctaagctatgaggatacaaaagcatgagaatgacacaatggactttggggactcaga

SEQ ID NO: 585700 - DNA, 658 bp, Homo sapiens
tcagacttctgatctacagaactgtaagataataaatttgtgttttttaagtctatattacagtaacatattacagcagcagtagaaaactaatacatgagggttagcaattgccgataggtgttgcgggaagtcagggaccccgaacagagggacyggctggagctgtggcagaggaccataaattgtgaagatttcatggacatttagcagttcccaaaattaatacttttataatttcttacacctgtctttactgcaatctctgaatataaattgtgaagatttcatggacatttatcagttcccaaaattaatactcataatttcttatgcctgtctttactctaatttcttaatcctgttatcttcataagctgagaatgtacatcacttgaggaccactattgtacaaattgattgtaaaacatgtgtttgaacaatatgaaatcagtgcactttgaaaacgaacaaaataacagcaattttagggaacaagggaagacaaccaaaggtctgactgcctgcagggttgggaagaatacagccatatttttctttttacagaggcctataaatggacgtgcaagtaggagagatattgctgaattcttttcccagcgaggaatattaataattaataccctggggaaggaat

SEQ ID NO: 585701 - DNA, 542 bp, Homo sapiens
cacacgcggacgccagacacacagttacacaggggctgtctgtactatctttgcaagttttctgtaagtctaaaatkatcaaaataattttttttcaagtgtttagctttgatgaacataagggttatactcagcaccttgaagtggaagggtgtcaaaccctggtgactgaagttgaaaataaaaacaatttagccgtaaccacttactacttattactattcaccagggtaatttgagtgtccaagtttcccaaactaaaatctactgcgaaattggctaggggagctttcaatccacccagctgcaggccctggagtggattaggaagattcagcctcctgttcaacccctttctcctgctatccctgcattggggatgtagtttagctctagtgggtgatttggatgtttgagatggctgagctgaaacaacggagatgggagttggtgatgattggtactttgtagaaaggtgagaaaagcattttaaaaagtcagatttatgaaagacaggcttgaggaaatcatgttaagtgaaa

SEQ ID NO: 585702 - DNA, 542 bp, Homo sapiens
cacacgcggacgccagacacacagttacacaggggctgtctgtactatctttgcaagttttctgtaagtctaaaatgatcaaaataattttttttcaagtgtttagctttgatgaacataagggttatactcagcaccttgaagtggaagggtgtcaaaccctggtgactgaagttgaaaataaaaacaatttagccrtaaccacttactacttattactattcaccagggtaatttgagtgtccaagtttcccaaactaaaatctactgcgaaattggctaggggagctttcaatccacccagctgcaggccctggagtggattaggaagattcagcctcctgttcaacccctttctcctgctatccctgcattggggatgtagtttagctctagtgggtgatttggatgtttgagatggctgagctgaaacaacggagatgggagttggtgatgattggtactttgtagaaaggtgagaaaagcattttaaaaagtcagatttatgaaagacaggcttgaggaaatcatgttaagtgaaa

SEQ ID NO: 585703 - DNA, 542 bp, Homo sapiens
cacacgcggacgccagacacacagttacacaggggctgtctgtactatctttgcaagttttctgtaagtctaaaatgatcaaaataattttttttcaagtgtttagctttgatgaacataagggttatactcagcaccttgaagtggaagggtgtcaaaccctggtgactgaagttgaaaataaaaacaatttagccgtaaccacttactacttattactattcaccagggtaatttgagtgtccaagtttcccaaactaaaatctactgcgaaattggctaggggagctttcaatccacccagctgcaggccctggagtggattaggaagattcagcctcctgttcaacccctttctcctgctatccctgcaytggggatgtagtttagctctagtgggtgatttggatgtttgagatggctgagctgaaacaacggagatgggagttggtgatgattggtactttgtagaaaggtgagaaaagcattttaaaaagtcagatttatgaaagacaggcttgaggaaatcatgttaagtgaaa

SEQ ID NO: 585704 - DNA, 563 bp, Homo sapiens
aaattgaattaagagaattttgttgtggaaaaaaaaaatctcacttgaagtcatgccatttataagtcaataccagtaatagttgaaaatatgacaggggtgcaaagaggttagtttaggatgaaatgagttaggacatatctctacatccatttcaagagattcaaaatgcaacaaaattgaaattatgtcagaagactatggcaaggagaagaytgagacaagtaggaacaggagggaaaaaaagaaaaagaaattgagatcacacgagaggggcatggtttggaacagatacttatgaattctaaagggaagcttttaaagacagggcagaaattcaggcatatgaaagctacatatcaaagagcattaacattagtatgatacaagggtttcaaatcattttcccatgataagcaataggatgctttcatttaaaatgagcagaggtatgccaaagtggtgagatatttaaaagacacctcattttctagcagaatatagtaaacatattaagagaagagtatggcaatcagaaatttagcaagaaataaagctgcaca

SEQ ID NO: 585705 - DNA, 592 bp, Homo sapiens
cacacattagatattgtgaaagtgtaaattctcctcagactaatttactagcagttytaaaacaagtctaatgaaaacaatgtatatatgaactaaaaagcagaataattgaatccaaaatctatctggaaaaaaaaactaacgtagggaagagacaagacattttgaaaaaagatttaataaaggagaacttgtactagatatgacgtaaggctatgataattaaaccagtatagcactgacataagaatagataaatggaacacacacacaaaaaaaaaacaggaaaaaagatcatagtaaacttaaggaatgagaatatgataaagacgacattcaaatcagtgggggaaaaagaaaacaaagagaaaaaggagtactggtgttctgtttgagaaaaacaagagtgacctcaacagtttcttttacagacatgttagggtgcctgccaccccatatacccttttggaagctccacattaatttcctgggaaaggtgtgggcctggagattctttttttttttttttaattttactttaagttctaggatacatgggcagaaagtgaagatttgttacacaggtatacat

SEQ ID NO: 585706 - DNA, 518 bp, Homo sapiens
agagatcgagaccatcctggccaacatggtgaaaccccatatctactaaaaatacaaaaattagctgggcgtggtggcacacacctgtagtcccagctacttgggaggctgaggcaggagatttgcttgaacccgggagacggaggttgcagtgagctgagatcgcgctactgtactccagcctrgcaacagagcgagagtctgtcaaaaaaaaaacaacaaaaaaacaagcaaacaaaaaaacctactgtcggaatgcggaagttcatcctaagtatgaaaatactggaaaagtgtcctggtaggtcagagtattgattacatgcaactcaaagtaacagtcttctgaatgagaagaaagtaaaatagggaaagaagcactctggagattgttcattaaagaaaaggaggcatagaagtggggagtagtggcatcctgtaagacgaaagaggaccaaaaaaatcagaggacacataactacttcctcatcatcatcatcaccatcatatccattaat

SEQ ID NO: 585707 - DNA, 563 bp, Homo sapiens
atgctttcactcattcctgagtgcccatccacagatctgtgtgtggaggaagccacgtgggyaggaatcacagcctatgggctcttacagttgggaagtgtgtgaggagtagcaaagtcatgcctttcccccagtaatccccttgatggcatctctggcaggatcctcattacaatgcagcctcttcactaatgttagaaagtgacttccacttaagccataatctacctacttattgcatgcatgccctggccacagccctactttctagtgcttcccagattgttccttggaagcctgccagcatgtaaaggaaagaaaggccacacccgggcccaggggtggtggggatggtggaatgcacggaatacaagcctctaaccaagttcatagaagtctaagtgttcttcccccgtctctactaaaaatacaaaaaattagcccggcacggtggccggtgcctgtagtcccagctacttgggaggctgaggcaggagaatggcgtgaacctgggaggtggagcttgcagtgagccaagatcgcgccactgcactccagcctga

SEQ ID NO: 585708 - DNA, 431 bp, Homo sapiens
ataactaattccatccctgctggcatctactgctgaaggatgcacctggtagtccttagggtctccattttttcttggattagtcagaactcttgtatatttgacaccatctggcactccctggtgccatggatacacctgagagacagtgacaactcctacacatcaggcccaaacatctgctttgtggtctttagctatagcagacccttaactgacatccaggtgcccctcaracccatgtagagacatctgagtcccatccgtgcctgtgagaatcaagtttgactcaggagaaataactttgactctccgtctggttaagctagcctataccagcaagactactttcacgtggctgactccacattgatgagccagaagactcagcccagggtactaaatgtgaattaggatgaaggccccttgat

SEQ ID NO: 585709 - DNA, 576 bp, Homo sapiens
agaaaacagagttgaattgcatgaattgcttccctgtgatccctggggaaggaaacagttcgtggtcatttgaaatctctagttaagcatagaaaaagggcaaacctgaagggtcttgctacatcatagaaaaaaagaatttcaaattttgtgaaatgttagccaaccatttgagagatgataatgggataagggtggggggttaagtaaatactaattcacccccatttttttaagtactgtatttcatttctgtcaaatttaatgaagataaaaaagtttttgcttatacaaatttcatccattccagtaaacatgtcaggtgcgtggaagttaagatggaaaatcttatagatttgcatttggctgctctcttatagctcaatatttaattactttcgtttgttcttttttttttttttttttttttttgagacggagtcttgctctgtcrcccaggctggagtgcagtggcatgatcttggctcactgcaaggtctgcctcctggtttcacgccattctcctgcctcagcctccagagtagctgggactacaggcgcccaccatcacgccct

SEQ ID NO: 585710 - DNA, 559 bp, Homo sapiens
catgcctgtagtcccagctactcaggaggctgaggcacaagaatcgcttgaactccggaggcagaggttgcagtgagccaagattgtgccactgaactccggcctgggtgacagagcaagactctgctaaaaaaaaaaaaaaaaagtacatttataaactttaaaatgtggtaraaattatatttggtattcaccttttttccttctgtgaatgaagaagtccagtgccagttacatagtacttctgttaagagttagcagcaaaagaggtcatgaatgaatttgtgggacttgttgagattatacagggtgagatcctacacagatggagaagaaaatgtggcaagaataagattttggaaacttgcctaaacttgcctagagctttcaggattcaagaatcagaaatcataatcaaagaggtaggaaaattaagagtttagtgtcaaactaagaagagcaaattctaagaaaaaaggaagaaaaatattgtctgctattataaagaggtagagctgaatgaagactaagcctttagatactaaattgagggcgtagt

SEQ ID NO: 585711 - DNA, 559 bp, Homo sapiens
catgcctgtagtcccagctactcaggaggctgaggcacaagaatcgcttgaactccggaggcagaggttgcagtgagccaagattgtgccactgaactccggcctgggtgacagagcaagactctgctaaaaaaaaaaaaaaaaagtacatttataaactttaaaatgtggtagaaattatatttggtattcaccttttttccttctgtgaatgaagaagtccagtgccagtyacatagtacttctgttaagagttagcagcaaaagaggtcatgaatgaatttgtgggacttgttgagattatacagggtgagatcctacacagatggagaagaaaatgtggcaagaataagattttggaaacttgcctaaacttgcctagagctttcaggattcaagaatcagaaatcataatcaaagaggtaggaaaattaagagtttagtgtcaaactaagaagagcaaattctaagaaaaaaggaagaaaaatattgtctgctattataaagaggtagagctgaatgaagactaagcctttagatactaaattgagggcgtagt

SEQ ID NO: 585712 - DNA, 559 bp, Homo sapiens
catgcctgtagtcccagctactcaggaggctgaggcacaagaatcgcttgaactccggaggcagaggttgcagtgagccaagattgtgccactgaactccggcctgggtgacagagcaagactctgctaaaaaaaaaaaaaaaaagtacatttataaactttaaaatgtggtagaaattatatttggtattcaccttttttccttctgtgaatgaagaagtccagtgccagttacatagtacttctgttaagagttagcagcaaaagaggtcatgaatgaatttgtgggacttgttgarattatacagggtgagatcctacacagatggagaagaaaatgtggcaagaataagattttggaaacttgcctaaacttgcctagagctttcaggattcaagaatcagaaatcataatcaaagaggtaggaaaattaagagtttagtgtcaaactaagaagagcaaattctaagaaaaaaggaagaaaaatattgtctgctattataaagaggtagagctgaatgaagactaagcctttagatactaaattgagggcgtagt

SEQ ID NO: 585713 - DNA, 559 bp, Homo sapiens
catgcctgtagtcccagctactcaggaggctgaggcacaagaatcgcttgaactccggaggcagaggttgcagtgagccaagattgtgccactgaactccggcctgggtgacagagcaagactctgctaaaaaaaaaaaaaaaaagtacatttataaactttaaaatgtggtagaaattatatttggtattcaccttttttccttctgtgaatgaagaagtccagtgccagttacatagtacttctgttaagagttagcagcaaaagaggtcatgaatgaatttgtgggacttgttgagattatacagggtgagatcctacacagatggagaagaaaatgtggcaagaataagattttggaaacttgcctaaacttgcctagagctttcaggattcaagaatcagaaatcatamtcaaagaggtaggaaaattaagagtttagtgtcaaactaagaagagcaaattctaagaaaaaaggaagaaaaatattgtctgctattataaagaggtagagctgaatgaagactaagcctttagatactaaattgagggcgtagt

SEQ ID NO: 585714 - DNA, 486 bp, Homo sapiens
tagattcagcccaagatgattgctgtataatcagtccatgaattccaattacaactcaacactcaatacaactcaacactgcttgattgaaagcagtggctggttgataagataggagaaagaggtagtgtttgtagtgctacagagaacagcatatggaaaataaatgtaggggcaggacagaaggaaataagactgaggcacattttgaaggccagtaatctaagattagagtaacagcaaaacrtctttttttttttttttcagaggaagatatacacaatggaaaaaaatcaaggataaggctaaagtaatagaattagatgtaactattttattcattagagtcttccagagaaaagaaaaccaatagtgtgtaagatatgagagagatttattttagggaattgattcatgcaattatgagccttcaaattctgcaggatacggaagcagcctgcaaacccagggaaaaaatcaatgttg

SEQ ID NO: 585715 - DNA, 486 bp, Homo sapiens
tagattcagcccaagatgattgctgtataatcagtccatgaattccaattacaactcaacactcaatacaactcaacactgcttgattgaaagcagtggctggttgataagataggagaaagaggtagtgtttgtagtgctacagagaacagcatatggaaaataaatgtaggggcaggacagaaggaaataagactgaggcacattttgaaggccagtaatctaagattagagtaacagcaaaacatctttttttttttttttcagaggaagatatacacaatggaaaaaaatcaaggataaggctaaagtaatagaattagatgtaactattttattcattagagtcttccagagaaaagaaaaccaatagtgtgtaagatatgagagagatttattttagggaattgattcatgcaattatgagccttcaaattctgcaggatacggaagcagsctgcaaacccagggaaaaaatcaatgttg

SEQ ID NO: 585716 - DNA, 524 bp, Homo sapiens
tgatttttagcaagaaaaatttgcaaccttcggcataaatgggttaattaaactctcataacaatttttgttgatacataatgtttgtacatatttatgaggtacatgtgatattttattaaatgcattggctgtgtaatgatcaagtcaaggtatttgacttgatcacctcaagtatttatcatttctatgtgttgggaacatttcaagtcctttcttctagctgttttgaaatacacaatacttgttaactrtagtcatcctactctgctatcaatcattagaatgtattccttctttctaactgtatgtttgtactcattaacacctctctttatctcccttatactcacactcataacacttttaagtaggtggctgaaggcctgagagctcctggaaaatccaggggtccaagagtgggtctggtgtaagaccaagggtccaaaagctgaagaacttgaagtctgatgttcaagggcaggaagcatccagaatgggagagaggtggagggcagaagact

SEQ ID NO: 585717 - DNA, 475 bp, Homo sapiens
caggcagacattttcattccattggcatgtgattctttttccaagactacataataagggtggcatttttcctttccatgccgcagcagccctgcaagacagagagaaagaaatttggtctttgattgatgaagtttggtgacctaaccagatgactgtctttctcttccagactgcttaactctcaaatcaactggaaacaaatttgtttttcagacatatttcaagcacattgaatagctgaatatcatatacataggtgtcattttttatttatttttttgagayggagtttcactctgttgctaggctggagtgcagtggcatgatctcggctcactgcaacctctgcctcccgggttcaagcaattctcctgcctcagccttgcgagtagctgggactataggcgtgcaccatcacgcccagctaatttttttgtatttttattagagacagggttccaccatgttagcc

SEQ ID NO: 585718 - DNA, 475 bp, Homo sapiens
caggcagacattttcattccattggcatgtgattctttttccaagactacataataagggtggcatttttcctttccatgccgcagcagccctgcaagacagagagaaagaaatttggtctttgattgatgaagtttggtgacctaaccagatgactgtctttctcttccagactgcttaactctcaaatcaactggaaacaaatttgtttttcagacatatttcaagcacattgaatagctgaatatcatatacataggtgtcattttttatttatttttttgagatggagtttcactctgttgctaggctggagtgcagtggcrtgatctcggctcactgcaacctctgcctcccgggttcaagcaattctcctgcctcagccttgcgagtagctgggactataggcgtgcaccatcacgcccagctaatttttttgtatttttattagagacagggttccaccatgttagcc

SEQ ID NO: 585719 - DNA, 475 bp, Homo sapiens
caggcagacattttcattccattggcatgtgattctttttccaagactacataataagggtggcatttttcctttccatgccgcagcagccctgcaagacagagagaaagaaatttggtctttgattgatgaagtttggtgacctaaccagatgactgtctttctcttccagactgcttaactctcaaatcaactggaaacaaatttgtttttcagacatatttcaagcacattgaatagctgaatatcatatacataggtgtcattttttatttatttttttgagatggagtttcactctgttgctaggctggagtgcagtggcatgatctcggctcactgcaacctctgcctcccgggttcaagcaattctyctgcctcagccttgcgagtagctgggactataggcgtgcaccatcacgcccagctaatttttttgtatttttattagagacagggttccaccatgttagcc

SEQ ID NO: 585720 - DNA, 475 bp, Homo sapiens
caggcagacattttcattccattggcatgtgattctttttccaagactacataataagggtggcatttttcctttccatgccgcagcagccctgcaagacagagagaaagaaatttggtctttgattgatgaagtttggtgacctaaccagatgactgtctttctcttccagactgcttaactctcaaatcaactggaaacaaatttgtttttcagacatatttcaagcacattgaatagctgaatatcatatacataggtgtcattttttatttatttttttgagatggagtttcactctgttgctaggctggagtgcagtggcatgatctcggctcactgcaacctctgcctcccgggttcaagcaattctcctgcctcagccttgcgagtagctgggactataggcrtgcaccatcacgcccagctaatttttttgtatttttattagagacagggttccaccatgttagcc

SEQ ID NO: 585721 - DNA, 549 bp, Homo sapiens
taccacagtggccttcccgggcaatctcctaaattcccagcagagaggcagagtcatctagcttgctgaygtgggagccaagaaattgaaaacagtggggaagaacaggaggacctgtacctgctacctcagccaaattacctgtattgactttgagtgaagccccttaggtttgaaagaatagttgtttttgtaattgtcaagggacaactcggtttttctaaaaactctgaaggtgagcagtctcaactcccatttacacatggaacactaaaaagctatatgtaattgaggcttccctatgaatcacacagattatgccaatcagataatcaggtatgcatttaaagaaaaagcagaagactgttaagtcagacacatggaggcagcagagaggaagacatcattccaaaaagagatggtaatcagttggaaaaactgagtcccaagtcctctgtagcgactcttctggaagaccccagaatcaacattaaggattgatatggtttggctctgtgtccccacccaaatctcatcttgtagctccca

SEQ ID NO: 585722 - DNA, 554 bp, Homo sapiens
tacagggctgggtgcagtggctcatgcctgtaatcccagcactttgggaggccgaggagggcggatcacctgaggtcaggagttcaagaccagcctggccaacatggtgaaaccctgtctctacyaaaaatacaaaaaataaaaataaaaaaaaattagccaggcatggtggcgtgtgcctgtagtcccagctacttgggaggctgaggcaggagaattgcttgaacctgggaggtagaggttgcagtgagctgagatcatgccactgcactccagcctgagcgacagagcaagacttcatctcaaaagagaaacaaaaaaagaagaggtatgggacatgcaataatgaatgaatgaaaataagaagcagcttttttttctcccttgtaataagtctatcacagggaaatcactatttccacaagagtccagtttaggagagtgtgtttacttctttctccatcctgctcccctaccatttctctctcttttgtcccaaccttaccaaagtacaggaaagcaaaatataaagcctgaggtagagatggaaatga

SEQ ID NO: 585723 - DNA, 426 bp, Homo sapiens
tttctgcttctattcttgtgttccacattcttttgggcacatgggatacttttgggcagaagggactttgtggaagtcatttccttggtttaaaatattcaaatggaatcytttgaagtttgttgatcatccatcaaaagatacatttttaaaaaatagatattctggagaaaataacaattgcaatcttttaccaaacacttaatgtctatcccatgaggtactgtgtttattgtttttccaggattctcaattttttttgctcaaacagctttatgaagtatgtactgttatcattttcattttacatataaaacaagtgggcttagtcacattaagtaactcctccaagtcaccattagctgacttcagaaccaggaggtaaaccagcagtctgattttagtgctcacaataaccagagtatc

SEQ ID NO: 585724 - DNA, 445 bp, Homo sapiens
gtgggttctctattaagtaatgctgcacagtggttttgaagacagatactactgagtttatattctgactccattatttaccagcctgggagcattgttttttctacataagattcaccttccttatctagtggaaagctgggataataatacctgtcttataagattgttktaggactaaatgaaggcaaaggaacaaagtgtataaagcagtaacaaaattcctgacacctagtaagcatatcatatgaaagaagccatgattaataacaatggtaacatctgctgtagtttctaaatacaatgttgatgatgtctgttctcagggacccaatcatagtattgacagtcctcacttctttcttacagatagcagaatttactgataagttgccttggatggttaattcaacatccttggaactactatttctctgtgctctta

SEQ ID NO: 585725 - DNA, 445 bp, Homo sapiens
gtgggttctctattaagtaatgctgcacagtggttttgaagacagatactactgagtttatattctgactccattatttaccagcctgggagcattgttttttctacataagattcaccttccttatctagtggaaagctgggataataatacctgtcttataagattgttttaggactaaatgaaggcaaaggaacaaagtgtataaagcagtaacaaaattcctgacacctagtaagcatatcatatgaaagaagccatrattaataacaatggtaacatctgctgtagtttctaaatacaatgttgatgatgtctgttctcagggacccaatcatagtattgacagtcctcacttctttcttacagatagcagaatttactgataagttgccttggatggttaattcaacatccttggaactactatttctctgtgctctta

SEQ ID NO: 585726 - DNA, 563 bp, Homo sapiens
catagaaaaacaatctagtgatcattaattcatgtttttttttttaacaaaagaggaagatgtactgaaaagaagtcttgttagtcaccctaggctggcatgaaatgagcagaactagagctcaggactcctcatgtagtccataatcctatccaccacatttcctggacttttgtgttaattactgccttcatgcattgtttgtttaactaaatattcatctacagtatcacaaacttcattcatgttcacaataacttataagacatatattttatgatctaaataaaattgccatattttcaagcattattggatgacttcaagtgattgatttagatttatttgcaggttcattccaatgcatgcttttaaatcatacacacttgaagaagattggaaaatgtgtacaccacagctctgcagttcattcrctctctttcctggtgggacaccccagggaaagaaagaagatagattgatcaaatctccctatatgtcttcttttgagaagtgtcgtttatatcatttgcccactttttaatgaggtttttttttttagc

SEQ ID NO: 585727 - DNA, 634 bp, Homo sapiens
ctactttgtgatatctgcattcaagtcacagagttgaacattcgctttcttagagcacgtttgaaacactctttttgtagtgtctggaagtggacatttggagcgctttgatgcctttggtgaaaaagggaatgtcttcccataaaaactagacagaagcattctcagaaacttgtttgtgaygtgtgtacccagctaaaggagttgaacatttctattgatagaacagttttgaaacactctttttgtggaaattgcaagtggatatttggatagcttggaggatttcgttggaagcgggaattcaaataaaaggtagacagcagcattctcagaaatttctttctgatgtctgcattcaactcatagagttgaagattccctttcatagagcaggtttgaaacactctttctggagtatctggatgtggacatttggagcgctttgatgcctatggtgaaaaagtaaatatcttcccataaaaacgagacagaaggattctcggaaacaagtttgtgatgtgtgtactcagctaacagagcggaacctttctttttacagagcagctttgaaactctatttttgtggattctgcaaattgatatttagattgctttatcgatatcgttggaa

SEQ ID NO: 585728 - DNA, 634 bp, Homo sapiens
ctactttgtgatatctgcattcaagtcacagagttgaacattcgctttcttagagcacgtttgaaacactctttttgtagtgtctggaagtggacatttggagcgctttgatgcctttggtgaaaaagggaatgtcttcccataaaaactagacagaagcattctcagaaacttgtttgtgacgtgtgtacccagcyaaaggagttgaacatttctattgatagaacagttttgaaacactctttttgtggaaattgcaagtggatatttggatagcttggaggatttcgttggaagcgggaattcaaataaaaggtagacagcagcattctcagaaatttctttctgatgtctgcattcaactcatagagttgaagattccctttcatagagcaggtttgaaacactctttctggagtatctggatgtggacatttggagcgctttgatgcctatggtgaaaaagtaaatatcttcccataaaaacgagacagaaggattctcggaaacaagtttgtgatgtgtgtactcagctaacagagcggaacctttctttttacagagcagctttgaaactctatttttgtggattctgcaaattgatatttagattgctttatcgatatcgttggaa

SEQ ID NO: 585729 - DNA, 634 bp, Homo sapiens
ctactttgtgatatctgcattcaagtcacagagttgaacattcgctttcttagagcacgtttgaaacactctttttgtagtgtctggaagtggacatttggagcgctttgatgcctttggtgaaaaagggaatgtcttcccataaaaactagacagaagcattctcagaaacttgtttgtgacgtgtgtacccagctaaaggagttgaacatttctattgatagaacagttttgaaacactctttttgtggaaawtgcaagtggatatttggatagcttggaggatttcgttggaagcgggaattcaaataaaaggtagacagcagcattctcagaaatttctttctgatgtctgcattcaactcatagagttgaagattccctttcatagagcaggtttgaaacactctttctggagtatctggatgtggacatttggagcgctttgatgcctatggtgaaaaagtaaatatcttcccataaaaacgagacagaaggattctcggaaacaagtttgtgatgtgtgtactcagctaacagagcggaacctttctttttacagagcagctttgaaactctatttttgtggattctgcaaattgatatttagattgctttatcgatatcgttggaa

SEQ ID NO: 585730 - DNA, 384 bp, Homo sapiens
aggaaatatcatcacacaaaaactagacagaagcattctcagaaacttctttgtgattygtgattcaactcacagagttcaccattcctcttgacagaacaattttgaaacacactttttgtagaatctgcaactggatatttggagtgctttgaggccttcaggggaaacgggaataccttcacataaacactagacagaagcattctcagaaacttctttgtgatgtgtgcattcaattcacagagttgaaccttctttttgatagagcagttttgagacactgtttttgtataatctgcaagtggacattttgatcgctctgaggcctacggtggaaatggaaatattttcacataaaaaccagacagaagaattctcgga

SEQ ID NO: 585731 - DNA, 384 bp, Homo sapiens
aggaaatatcatcacacaaaaactagacagaagcattctcagaaacttctttgtgatttgtgattcaactcacagagttcaccattcctcttgacagaacaattttgaaacacactttttgtagaatctgcaastggatatttggagtgctttgaggccttcaggggaaacgggaataccttcacataaacactagacagaagcattctcagaaacttctttgtgatgtgtgcattcaattcacagagttgaaccttctttttgatagagcagttttgagacactgtttttgtataatctgcaagtggacattttgatcgctctgaggcctacggtggaaatggaaatattttcacataaaaaccagacagaagaattctcgga

SEQ ID NO: 585732 - DNA, 384 bp, Homo sapiens
aggaaatatcatcacacaaaaactagacagaagcattctcagaaacttctttgtgatttgtgattcaactcacagagttcaccattcctcttgacagaacaattttgaaacacactttttgtagaatctgcaactggatatttggagtgctttgaggccttcaggggaaaygggaataccttcacataaacactagacagaagcattctcagaaacttctttgtgatgtgtgcattcaattcacagagttgaaccttctttttgatagagcagttttgagacactgtttttgtataatctgcaagtggacattttgatcgctctgaggcctacggtggaaatggaaatattttcacataaaaaccagacagaagaattctcgga

SEQ ID NO: 585733 - DNA, 384 bp, Homo sapiens
aggaaatatcatcacacaaaaactagacagaagcattctcagaaacttctttgtgatttgtgattcaactcacagagttcaccattcctcttgacagaacaattttgaaacacactttttgtagaatctgcaactggatatttggagtgctttgaggccttcaggggaaacgggaataccttcacataaacactagacagaagcattctcagaaacttctttgtgatgtgtgcattcaattcacagagttgaaccttctttttgatagagcagttttgagacactgtttttgtataatctgcaagtggacattttgatcgctctgaggcctayggtggaaatggaaatattttcacataaaaaccagacagaagaattctcgga

SEQ ID NO: 585734 - DNA, 560 bp, Homo sapiens
cagtaaaatagaaaacaggaaaacaatagagaaaatcaatgaaacagaaagctgtttctttgaaacgatctataagcttgctaacatttagacaaactaataaagaaaaaaagagagaatgcayaactaacaaatattggaagtgaaacaggggtatgcgttatgactactgattttgtggacattaaaaggatgatatatttactatattaaaaactctatactcacaagttcaataacctatataaaatggacaaataccttgaaagacacaatatgccaatactcacaaaagaaaaaatagataacatgagtactcttatatctataaaaggaattgaataaatagttaataacccgcccacccctccaatggttccaggcccaaatggctttagtggtgaattctatcaagcatttaatggcaaaattataccaattttccacagacttttcaagaaaatggaattagagagaacacttcctaattaattctatgaggtaaatattaccctcttaccaaatccaatagacataaaattaaataaaatcaatatatc

SEQ ID NO: 585735 - DNA, 560 bp, Homo sapiens
cagtaaaatagaaaacaggaaaacaatagagaaaatcaatgaaacagaaagctgtttctttgaaacgatctataagcttgctaacatttagacaaactaataaagaaaaaaagagagaatgcataactaacaaatattggaagtgaaacaggggtatgsgttatgactactgattttgtggacattaaaaggatgatatatttactatattaaaaactctatactcacaagttcaataacctatataaaatggacaaataccttgaaagacacaatatgccaatactcacaaaagaaaaaatagataacatgagtactcttatatctataaaaggaattgaataaatagttaataacccgcccacccctccaatggttccaggcccaaatggctttagtggtgaattctatcaagcatttaatggcaaaattataccaattttccacagacttttcaagaaaatggaattagagagaacacttcctaattaattctatgaggtaaatattaccctcttaccaaatccaatagacataaaattaaataaaatcaatatatc

SEQ ID NO: 585736 - DNA, 560 bp, Homo sapiens
cagtaaaatagaaaacaggaaaacaatagagaaaatcaatgaaacagaaagctgtttctttgaaacgatctataagcttgctaacatttagacaaactaataaagaaaaaaagagagaatgcataactaacaaatattggaagtgaaacaggggtatgcgttatgactactgattttgtggacattaaaaggatgatatatttactatattaaaaactctatactcacaagttcaataacctatataaaatggacaaataccttgaaagacacaatatgccaatactcacaaaagaaaaaatagataacatgagtactcttatatctataaaaggaattgaataaatagttaataacccrcccacccctccaatggttccaggcccaaatggctttagtggtgaattctatcaagcatttaatggcaaaattataccaattttccacagacttttcaagaaaatggaattagagagaacacttcctaattaattctatgaggtaaatattaccctcttaccaaatccaatagacataaaattaaataaaatcaatatatc

SEQ ID NO: 585737 - DNA, 560 bp, Homo sapiens
cagtaaaatagaaaacaggaaaacaatagagaaaatcaatgaaacagaaagctgtttctttgaaacgatctataagcttgctaacatttagacaaactaataaagaaaaaaagagagaatgcataactaacaaatattggaagtgaaacaggggtatgcgttatgactactgattttgtggacattaaaaggatgatatatttactatattaaaaactctatactcacaagttcaataacctatataaaatggacaaataccttgaaagacacaatatgccaatactcacaaaagaaaaaatagataacatgagtactcttatatctataaaaggaattgaataaatagttaataacccgcccacccctccaatggttccaggcccaaatggctttagtggtgaattctatcaagcatttaatggcaaaattataccaattttccacagacttttcaagaaaatggaattagagagaacacttcctaattmattctatgaggtaaatattaccctcttaccaaatccaatagacataaaattaaataaaatcaatatatc

SEQ ID NO: 585738 - DNA, 477 bp, Homo sapiens
agaaacttgtttgtgatgtgtgcattcatctcacagagttaaacctttctactgattgaggaattttgaaactctctttttgtagaatctgcaagtggacatttggaggaatttgasgcctatgtaggaaaaggaaatatcttcacaaagaaaacgagatagaagcattctcagaaacttctttgtgatgctttcattcatgtcccagagttgaaactttctttgatggacaagttttgaaatactctttttgtagaatctgcaagtggacatttcgagtgccttgaggcctatggtggaaaatgaaatatcttcacataaaaaccagacagaagaattctgagaaacttctttgtgatgtgtgtgttcatctcacagagttgaacctttcttttaattgagcagtttggaaacactctttttgtagaatcttcaagtggacatttggaatgctttgcagcctatggtagaaaagga

SEQ ID NO: 585739 - DNA, 477 bp, Homo sapiens
agaaacttgtttgtgatgtgtgcattcatctcacagagttaaacctttctactgattgaggaattttgaaactctctttttgtagaatctgcaagtggacatttggaggaatttgaggcctatgtwggaaaaggaaatatcttcacaaagaaaacgagatagaagcattctcagaaacttctttgtgatgctttcattcatgtcccagagttgaaactttctttgatggacaagttttgaaatactctttttgtagaatctgcaagtggacatttcgagtgccttgaggcctatggtggaaaatgaaatatcttcacataaaaaccagacagaagaattctgagaaacttctttgtgatgtgtgtgttcatctcacagagttgaacctttcttttaattgagcagtttggaaacactctttttgtagaatcttcaagtggacatttggaatgctttgcagcctatggtagaaaagga

SEQ ID NO: 585740 - DNA, 477 bp, Homo sapiens
agaaacttgtttgtgatgtgtgcattcatctcacagagttaaacctttctactgattgaggaattttgaaactctctttttgtagaatctgcaagtggacatttggaggaatttgaggcctatgtaggaaaaggaaatatcttcacaaagaaaacgagatagaagcattctcagaaacttctttgtgatgcttkcattcatgtcccagagttgaaactttctttgatggacaagttttgaaatactctttttgtagaatctgcaagtggacatttcgagtgccttgaggcctatggtggaaaatgaaatatcttcacataaaaaccagacagaagaattctgagaaacttctttgtgatgtgtgtgttcatctcacagagttgaacctttcttttaattgagcagtttggaaacactctttttgtagaatcttcaagtggacatttggaatgctttgcagcctatggtagaaaagga

SEQ ID NO: 585741 - DNA, 477 bp, Homo sapiens
agaaacttgtttgtgatgtgtgcattcatctcacagagttaaacctttctactgattgaggaattttgaaactctctttttgtagaatctgcaagtggacatttggaggaatttgaggcctatgtaggaaaaggaaatatcttcacaaagaaaacgagatagaagcattctcagaaacttctttgtgatgctttcattcatgtcccagagttgaaactttctttgrtggacaagttttgaaatactctttttgtagaatctgcaagtggacatttcgagtgccttgaggcctatggtggaaaatgaaatatcttcacataaaaaccagacagaagaattctgagaaacttctttgtgatgtgtgtgttcatctcacagagttgaacctttcttttaattgagcagtttggaaacactctttttgtagaatcttcaagtggacatttggaatgctttgcagcctatggtagaaaagga

SEQ ID NO: 585742 - DNA, 567 bp, Homo sapiens
gctctgtaaaaagaaaggttccactctgttagctgagtacacacatcacaaacttgtttctgagaatccttgtgtctcgtttttatgggaagatatttactttttcaccgtaggcatcaaagcgctccaaatgtccacatccagatactccagaaagagtgtttcaaacctgctctatgaaagggaatcttcaactctatgagttgaatgcagacatcagaaagaaatttctgagaatgctgctgtctaccttttatttgaattcmcgctaccaacgaaatcctccaagctatccaaatatccacttgcattttgcacaaaaagagtgtttcaaaactgctctatcaatagaaatgttcaactcctttagctgggtacacacatcacaaacaagtttctgagaatgcttctgtctagtttttatgggaagacattccctttttcaccaaaggcatcaaagcgctccaaatgtccacttccagacactacaaaaagagtgtttcaaacgtgctctaagaaagcgaatgttcaactctgtgacttgaatgcagatatcacaaagtagtt

SEQ ID NO: 585743 - DNA, 567 bp, Homo sapiens
gctctgtaaaaagaaaggttccactctgttagctgagtacacacatcacaaacttgtttctgagaatccttgtgtctcgtttttatgggaagatatttactttttcaccgtaggcatcaaagcgctccaaatgtccacatccagatactccagaaagagtgtttcaaacctgctctatgaaagggaatcttcaactctatgagttgaatgcagacatcagaaagaaatttctgagaatgctgctgtctaccttttatttgaattcacgctwccaacgaaatcctccaagctatccaaatatccacttgcattttgcacaaaaagagtgtttcaaaactgctctatcaatagaaatgttcaactcctttagctgggtacacacatcacaaacaagtttctgagaatgcttctgtctagtttttatgggaagacattccctttttcaccaaaggcatcaaagcgctccaaatgtccacttccagacactacaaaaagagtgtttcaaacgtgctctaagaaagcgaatgttcaactctgtgacttgaatgcagatatcacaaagtagtt

SEQ ID NO: 585744 - DNA, 418 bp, Homo sapiens
atcctttcttttaccattaagttgcatgtttgctgttggcttttcacaggtgccatgtatctggygtagaaagttctctattcctggttcattgagtttttatttttatttttaatcattaaagaatttggattttgttaaatgtcttttctgaatctatcgagatgatcatgcaattctcgtttcttattctatggataagatatattaccttaatggattttgggctgtttaaccaacctgggattacttgtataaatttcactttgtcatagtttataattcttttatatgttgctagatatgatttgttagtattttttaaggaattttgcatttatacttatagtagttttatttttctatgctatttggactaatttttgtatcaaggtaacactggccccacagaataaat

SEQ ID NO: 585745 - DNA, 418 bp, Homo sapiens
atcctttcttttaccattaagttgcatgtttgctgttggcttttcacaggtgccatgtatctggcgtagaaagttctctattcctggttcattgagtttttatttttatttttaatcattaaagaatttggattttgttaaatgtcttttctgaatctatcgagatgatcatgcaattctcgtttcttattctatggataagatrtattaccttaatggattttgggctgtttaaccaacctgggattacttgtataaatttcactttgtcatagtttataattcttttatatgttgctagatatgatttgttagtattttttaaggaattttgcatttatacttatagtagttttatttttctatgctatttggactaatttttgtatcaaggtaacactggccccacagaataaat

SEQ ID NO: 585746 - DNA, 418 bp, Homo sapiens
atcctttcttttaccattaagttgcatgtttgctgttggcttttcacaggtgccatgtatctggcgtagaaagttctctattcctggttcattgagtttttatttttatttttaatcattaaagaatttggattttgttaaatgtcttttctgaatctatcgagatgatcatgcaattctcgtttcttattctatggataagatatattaccttaatggattttgggctgttwaaccaacctgggattacttgtataaatttcactttgtcatagtttataattcttttatatgttgctagatatgatttgttagtattttttaaggaattttgcatttatacttatagtagttttatttttctatgctatttggactaatttttgtatcaaggtaacactggccccacagaataaat

SEQ ID NO: 585747 - DNA, 570 bp, Homo sapiens
taactaaatggaatggaaaaggagttcctgttcattttaccactttcagaatagaaaattctggatctggtgaaaattgatcattttccttttgttttaattcaaggtatagactcgtgtctaaagacatggttaactgtttaaggagaatagaagatgaagaagggttaaatgacaagcaagttttaaaagtctsatatcaactaatttttaggcaaggaagatttaaaaatttcactttgatttgagtgagaggccccttactttttatatcacattgtaagtttaaagaagaagagaataaaaacatcatggctaaatcacctgaaatgacttcaaattttctacaaatgataaacatatccaatgtgataattataattcaaggcccattttaatctgaccctaaattttgtttcccattctaataatcaataagctaatcaataagctcataacatcctacagattcagcacacacacatgcacacatacacagagaaacacagtcacttcttcaaacacattgttttttcatttttcttcacctttcatctatttatttatgag

SEQ ID NO: 585748 - DNA, 570 bp, Homo sapiens
taactaaatggaatggaaaaggagttcctgttcattttaccactttcagaatagaaaattctggatctggtgaaaattgatcattttccttttgttttaattcaaggtatagactcgtgtctaaagacatggttaactgtttaaggagaatagaagatgaagaagggttaaatgacaagcaagttttaaaagtctcatatcaactaatttttaggcaaggaagatttaaaaatttcactktgatttgagtgagaggccccttactttttatatcacattgtaagtttaaagaagaagagaataaaaacatcatggctaaatcacctgaaatgacttcaaattttctacaaatgataaacatatccaatgtgataattataattcaaggcccattttaatctgaccctaaattttgtttcccattctaataatcaataagctaatcaataagctcataacatcctacagattcagcacacacacatgcacacatacacagagaaacacagtcacttcttcaaacacattgttttttcatttttcttcacctttcatctatttatttatgag

SEQ ID NO: 585749 - DNA, 623 bp, Homo sapiens
aagaagaagagaataaaaacatcatggctaaatcacctgaaatgacttcaaattttctacaaatgataaacatatccaatgtgataattataattcaaggcccattttaatctgaccctaaattttstttcccattctaataatcaataagctaatcaataagctcataacatcctacagattcagcacacacacatgcacacatacacagagaaacacagtcacttcttcaaacacattgttttttcatttttcttcacctttcatctatttatttatgagagtgcccacctccgaggtaagagggttattgagataattttataaatgtcatggggcttgccctcataaagtctacattccagaaaggaagttgacaagaaactaccaatggttcaattacttattaaaattagttttgatcattatctctctatccactgttaatctacctataatcttctttgctcttttccatgtttaatgaactcttagacttttcttttaacttttattttaagttcacgagtacaagtgcaggtttgatacattggtaaatttgtgtcttgggggtttattgtacagattatttcatcaccctggtattaagcctaatacccatt

SEQ ID NO: 585750 - DNA, 570 bp, Homo sapiens
taactaaatggaatggaaaaggagttcctgttcattttaccactttcagaatagaaaattctggatctggtgaaaattgatcattttccttttgttttaattcaaggtatagactcgtgtctaaagacatggttaactgtttaaggagaatagaagatgaagaagggttaaatgacaagcaagttttaaaagtctcatatcaactaatttttaggcaaggaagatttaaaaatttcactttgatttgagtgagaggccccttactttttatatcacattgtaagtttaaagaagaagagaataaaaacatcatggctaaatcacctgaaatgacttcaaattttctacaaatgataaacatatccaatgtgataattataattcaaggcccattttaatctgaccctaaattttgtttcccattctaataatcaataagctaatcaataagctcataacatcctacagattcagcacacacacatgcacacayacacagagaaacacagtcacttcttcaaacacattgttttttcatttttcttcacctttcatctatttatttatgag

SEQ ID NO: 585751 - DNA, 623 bp, Homo sapiens
aagaagaagagaataaaaacatcatggctaaatcacctgaaatgacttcaaattttctacaaatgataaacatatccaatgtgataattataattcaaggcccattttaatctgaccctaaattttgtttcccattctaataatcaataagctaatcaataagctcataacatcctacagattcagcacacacacatgcacacatacacagagaaacacagtcacttcttcaaacacattgttttttcatttttcttcacctttcatctatttatttatgagagtgcccacctccraggtaagagggttattgagataattttataaatgtcatggggcttgccctcataaagtctacattccagaaaggaagttgacaagaaactaccaatggttcaattacttattaaaattagttttgatcattatctctctatccactgttaatctacctataatcttctttgctcttttccatgtttaatgaactcttagacttttcttttaacttttattttaagttcacgagtacaagtgcaggtttgatacattggtaaatttgtgtcttgggggtttattgtacagattatttcatcaccctggtattaagcctaatacccatt

SEQ ID NO: 585752 - DNA, 529 bp, Homo sapiens
gcatgtgtctttataatagagtaatttatattcctttgggtattgataaggtttggctgttaccccacccaaayctcatcttgaattatagctcccgtaattcccatgtgtcatgagagggacccagtgggagataattgaatcatgggggcaggtctttcccatgctgttctcctgatagtgaatagatctcatgagatccgatggttttataaatgggagttgccctgcacaagttaacaagttctctcttgcctgcctccatgtaagatgtgactttgatcctcattctctttctgccatgattgtgaggcctccccagccatgtggaactgtgagtccattaaacctcttttctttataatttacccagtctcagatacatctttattaacagcataagaacagactagtacaggtaatgggattactgggttgagtggtattcctttctttaggtctttgaagaatcaccaccctgtcttccacaatggatgaactaatttacaatcccaccaactgtgtataa

SEQ ID NO: 585753 - DNA, 529 bp, Homo sapiens
gcatgtgtctttataatagagtaatttatattcctttgggtattgataaggtttggctgttaccccacccaaatctcatcttgaattatagctcccgtaattcccatgtgtcatgagagggacccagtgggagataattgaaycatgggggcaggtctttcccatgctgttctcctgatagtgaatagatctcatgagatccgatggttttataaatgggagttgccctgcacaagttaacaagttctctcttgcctgcctccatgtaagatgtgactttgatcctcattctctttctgccatgattgtgaggcctccccagccatgtggaactgtgagtccattaaacctcttttctttataatttacccagtctcagatacatctttattaacagcataagaacagactagtacaggtaatgggattactgggttgagtggtattcctttctttaggtctttgaagaatcaccaccctgtcttccacaatggatgaactaatttacaatcccaccaactgtgtataa

SEQ ID NO: 585754 - DNA, 529 bp, Homo sapiens
gcatgtgtctttataatagagtaatttatattcctttgggtattgataaggtttggctgttaccccacccaaatctcatcttgaattatagctcccgtaattcccatgtgtcatgagagggacccagtgggagataattgaatcatgggggcaggtctttcccatgctgttctcctgatagtgaatagatctcatgagatccgatggttttataaatgggagttgccctgcacaagttaacaagttctctcttgcctgcctccatgtaagatgtgactttgatcctcattctctttctgccatgattgtgaggcctccccagccatgtggaactgtgagtccattaaacctcttttctttataatttacccagtctcagatacatctttattaacagcataagaacagactagtacaggtaatgggattactgggttgagtggtattccwttctttaggtctttgaagaatcaccaccctgtcttccacaatggatgaactaatttacaatcccaccaactgtgtataa

SEQ ID NO: 585755 - DNA, 298 bp, Homo sapiens
tttatggctgtgtagtgttccatcatgtatatttgccatgttttctttatccrttccaccattaatgggcacctaggttgatttcatggctgctattgtgaataggactgcgaggcacatatgagagcctatgtattcttgctaaaacaatttgttttcttttagatacataaccagtaatgggattgctgggtcaaattgtagttcccttttaaagtctttaaaaaatctccaaaccactttccatagtggctgaactaatttagatttccattgaaagtgtgcaagcattcccttt

SEQ ID NO: 585756 - DNA, 298 bp, Homo sapiens
tttatggctgtgtagtgttccatcatgtatatttgccatgttttctttatccgttccaccattaatgggcacctaggttgatttcatggctgctattgtgaataggactgcgaggcacatatgagagcctatgtattcttgctaaaacaatttgttttcttttagatacataaccagtaatgggattgctgggtcaaattgtagttcccttttaaagtctttaaaaaatctccaaacyactttccatagtggctgaactaatttagatttccattgaaagtgtgcaagcattcccttt

SEQ ID NO: 585757 - DNA, 298 bp, Homo sapiens
tttatggctgtgtagtgttccatcatgtatatttgccatgttttctttatccgttccaccattaatgggcacctaggttgatttcatggctgctattgtgaataggactgcgaggcacatatgagagcctatgtattcttgctaaaacaatttgttttcttttagatacataaccagtaatgggattgctgggtcaaattgtagttcccttttaaagtctttaaaaaatctccaaaccactttccatagtggctgaactaatttagatttccaytgaaagtgtgcaagcattcccttt

SEQ ID NO: 585758 - DNA, 605 bp, Homo sapiens
ttgcagtgatttgcatttctctgatgattagtgatgtggagaattttttatatgtttgtaaaccacttttatgtcttcttctgagaggtgtctattcatgtcttttgttcatttgtattcatgttattwgttttatgcttattaatttgtttaattttcttatagatttggggtattgggacctttgttggaagtgtagtttgtgagtattttatctcattctgtaggttgcctgttttctctgttgataatttcttttgctgtgtagagctctttaatttaattagatcccacttgtcaatttttgttttggttgcaattgcttttgaggacttagtcataaattatttcccaaggccaatgtccagaatggagtttcctaggattcttgtagtttgaggtcttgtgtttaaatctttaatccaacctcagttaatttttttatatggtgaaaggtggggttgagtttcattcttctacatacggctacccaactagcccacaccatttattgaatacagagtagtcttttccctgttggttatttttcttaactttgttaaagatcagatatctgtaggtgtgcagctttatttctgggtttt

SEQ ID NO: 585759 - DNA, 605 bp, Homo sapiens
ttgcagtgatttgcatttctctgatgattagtgatgtggagaattttttatatgtttgtaaaccacttttatgtcttcttctgagaggtgtctattcatgtcttttgttcatttgtattcatgttattagttttatgcttattaatttgtttaattttcttatagatttggggtattgggacctttgttggaagtgtagtttgtgagtattttatctcattctgtaggttgcctgttttctctgttgataatttcttttgctgtgtagagctctttaatttaattagaycccacttgtcaatttttgttttggttgcaattgcttttgaggacttagtcataaattatttcccaaggccaatgtccagaatggagtttcctaggattcttgtagtttgaggtcttgtgtttaaatctttaatccaacctcagttaatttttttatatggtgaaaggtggggttgagtttcattcttctacatacggctacccaactagcccacaccatttattgaatacagagtagtcttttccctgttggttatttttcttaactttgttaaagatcagatatctgtaggtgtgcagctttatttctgggtttt

SEQ ID NO: 585760 - DNA, 605 bp, Homo sapiens
ttgcagtgatttgcatttctctgatgattagtgatgtggagaattttttatatgtttgtaaaccacttttatgtcttcttctgagaggtgtctattcatgtcttttgttcatttgtattcatgttattagttttatgcttattaatttgtttaattttcttatagatttggggtattgggacctttgttggaagtgtagtttgtgagtattttatctcattctgtaggttgcctgttttctctgttgataatttcttttgctgtgtagagctctttaatttaattagatcccacttgtcaatttttgttttggttgcaattgcttttgaggacttagtcataaattatttcccaaggccaatgtccagaatggagtttcctaggattcttgtagtttgaggtcttgtgtttmaatctttaatccaacctcagttaatttttttatatggtgaaaggtggggttgagtttcattcttctacatacggctacccaactagcccacaccatttattgaatacagagtagtcttttccctgttggttatttttcttaactttgttaaagatcagatatctgtaggtgtgcagctttatttctgggtttt

SEQ ID NO: 585761 - DNA, 605 bp, Homo sapiens
ttgcagtgatttgcatttctctgatgattagtgatgtggagaattttttatatgtttgtaaaccacttttatgtcttcttctgagaggtgtctattcatgtcttttgttcatttgtattcatgttattagttttatgcttattaatttgtttaattttcttatagatttggggtattgggacctttgttggaagtgtagtttgtgagtattttatctcattctgtaggttgcctgttttctctgttgataatttcttttgctgtgtagagctctttaatttaattagatcccacttgtcaatttttgttttggttgcaattgcttttgaggacttagtcataaattatttcccaaggccaatgtccagaatggagtttcctaggattcttgtagtttgaggtcttgtgtttaaatctttaatccaacctcagttaatttttttatatggtgaaaggtggggttgagtttcattcttctacatacrgctacccaactagcccacaccatttattgaatacagagtagtcttttccctgttggttatttttcttaactttgttaaagatcagatatctgtaggtgtgcagctttatttctgggtttt

SEQ ID NO: 585762 - DNA, 590 bp, Homo sapiens
tgctgttctggcaccagtaccrtgctattttggttaccatcacctgatagtatatttggaagtcagcaaacatgatgcctctggctttgttctttgtgattaagattactttggctattttggctgtttggagtttcatacgaattatttaatagtttttttctggttttatagaaaaaaaatgacatggtagtttggaacttcctagagacttattgaatggctctgaccaaaatactgatagtgatatggacaataaagtccaggctgaagtggtctcagatggagatgaggaacttgttgggaactgaagcaaaggtgactctagttatactttagcaaagagactggcagcatttttcccctgccctaaagatttgtggaactttgaacttgagagagatgatttagggcgtctgatgcagtaaatttctaaggagcaaagcattcaagaagtgacttgggtactgttaaaaacattcagttttatttattcagaaaggtatggtttggagttgaaatttatgtttaaaagggaagcagatcatagaagtttggtaaatttgtagcctgatgatgtgatagaaaag

SEQ ID NO: 585763 - DNA, 590 bp, Homo sapiens
tgctgttctggcaccagtaccgtgctattttggttaccatcacctgatagtatatttggaagtcagcaaacatgatgcctctggctttgttctttgtgattaagattactttggctattttggctgtttggagtttcataygaattatttaatagtttttttctggttttatagaaaaaaaatgacatggtagtttggaacttcctagagacttattgaatggctctgaccaaaatactgatagtgatatggacaataaagtccaggctgaagtggtctcagatggagatgaggaacttgttgggaactgaagcaaaggtgactctagttatactttagcaaagagactggcagcatttttcccctgccctaaagatttgtggaactttgaacttgagagagatgatttagggcgtctgatgcagtaaatttctaaggagcaaagcattcaagaagtgacttgggtactgttaaaaacattcagttttatttattcagaaaggtatggtttggagttgaaatttatgtttaaaagggaagcagatcatagaagtttggtaaatttgtagcctgatgatgtgatagaaaag

SEQ ID NO: 585764 - DNA, 590 bp, Homo sapiens
tgctgttctggcaccagtaccgtgctattttggttaccatcacctgatagtatatttggaagtcagcaaacatgatgcctctggctttgttctttgtgattaagattactttggctattttggctgtttggagtttcatacgaattatttaatagtttttttctggttttatagaaaaaaaatgacatggtagtttggaacttcctagagacttattgaatggctctgaccaaaatactgatagtgatatggacaataaagtccaggctgaagtggtctcagatggagatgaggaacttgttgggaactgaagcaaaggtgactctwgttatactttagcaaagagactggcagcatttttcccctgccctaaagatttgtggaactttgaacttgagagagatgatttagggcgtctgatgcagtaaatttctaaggagcaaagcattcaagaagtgacttgggtactgttaaaaacattcagttttatttattcagaaaggtatggtttggagttgaaatttatgtttaaaagggaagcagatcatagaagtttggtaaatttgtagcctgatgatgtgatagaaaag

SEQ ID NO: 585765 - DNA, 590 bp, Homo sapiens
tgctgttctggcaccagtaccgtgctattttggttaccatcacctgatagtatatttggaagtcagcaaacatgatgcctctggctttgttctttgtgattaagattactttggctattttggctgtttggagtttcatacgaattatttaatagtttttttctggttttatagaaaaaaaatgacatggtagtttggaacttcctagagacttattgaatggctctgaccaaaatactgatagtgatatggacaataaagtccaggctgaagtggtctcagatggagatgaggaacttgttgggaactgaagcaaaggtgactctagttatactttagcaaagagactggcagcatttttcccctgccctaaagatttgtggaactttgaacttgagagagatgatttagggcgtctgatgcartaaatttctaaggagcaaagcattcaagaagtgacttgggtactgttaaaaacattcagttttatttattcagaaaggtatggtttggagttgaaatttatgtttaaaagggaagcagatcatagaagtttggtaaatttgtagcctgatgatgtgatagaaaag

SEQ ID NO: 585766 - DNA, 477 bp, Homo sapiens
attaactgagggtctgaggtctgcaaaggtctgaaagaaacattttctgtctattatctctgaggactgctcccagtgaggtttcacctacgtaataagtccactgttgctagccagggtcsttttctcacataacttttttttttttcctctgtgatccaagaccccattctttctgtaaacttcatgtggtagttaaacttctgcacccatcgtgtgtctgggtcttcattctaagggctccagtgtacacacattgcagaaacctgtatgccttttctactatttatctgcctcctgttagtgattttcagggaaacttcagaaggcaaaagggacattctcctttagcccatactcagacaaaatcccccaacatttaactgattcctaatagcttaaaatcactttgaaaactccacatatttataacttttcttccctctatgatttctgttcagcttgggttttgttttt

SEQ ID NO: 585767 - DNA, 477 bp, Homo sapiens
attaactgagggtctgaggtctgcaaaggtctgaaagaaacattttctgtctattatctctgaggactgctcccagtgaggtttcacctacgtaataagtccactgttgctagccagggtccttttctcacataacttttttttttttcctctgtgatccaagaccccattctttctgtaaacttcatgtggtagttaaacttctgcacccatcgtgtgtctgggtcttcattctaagggctccagtgtacacacattgcagaaacctgtatgccttttctactatttatctgmctcctgttagtgattttcagggaaacttcagaaggcaaaagggacattctcctttagcccatactcagacaaaatcccccaacatttaactgattcctaatagcttaaaatcactttgaaaactccacatatttataacttttcttccctctatgatttctgttcagcttgggttttgttttt

SEQ ID NO: 585768 - DNA, 477 bp, Homo sapiens
attaactgagggtctgaggtctgcaaaggtctgaaagaaacattttctgtctattatctctgaggactgctcccagtgaggtttcacctacgtaataagtccactgttgctagccagggtccttttctcacataacttttttttttttcctctgtgatccaagaccccattctttctgtaaacttcatgtggtagttaaacttctgcacccatcgtgtgtctgggtcttcattctaagggctccagtgtacacacattgcagaaacctgtatgccttttctactatttatctgcctcctrttagtgattttcagggaaacttcagaaggcaaaagggacattctcctttagcccatactcagacaaaatcccccaacatttaactgattcctaatagcttaaaatcactttgaaaactccacatatttataacttttcttccctctatgatttctgttcagcttgggttttgttttt

SEQ ID NO: 585769 - DNA, 477 bp, Homo sapiens
attaactgagggtctgaggtctgcaaaggtctgaaagaaacattttctgtctattatctctgaggactgctcccagtgaggtttcacctacgtaataagtccactgttgctagccagggtccttttctcacataacttttttttttttcctctgtgatccaagaccccattctttctgtaaacttcatgtggtagttaaacttctgcacccatcgtgtgtctgggtcttcattctaagggctccagtgtacacacattgcagaaacctgtatgccttttctactatttatctgcctcctgttagtgattttcagggaaacttcagaaggcaaaagggacattctcctttagcccatactcagacaaaatcccccaacatttaactgattcctaatagcttaaaatcactttgaaaactccayatatttataacttttcttccctctatgatttctgttcagcttgggttttgttttt

SEQ ID NO: 585770 - DNA, 622 bp, Homo sapiens
ttttctcacataacttttttttttttcctctgtgatccaagaccccattctttctgtaaacttcatgtggtagttaaacttctgcacccatcgtgtgtctgggtcttcattctaagggctccagtgtacacacattgcagaaacctgtatgccttttctactatttatctgcctcctgttagtgattttcagggaaacttcagaaggcaaaagggacattctcctttagcccatactcagacaaaatcccccaacatttaactgattcctaatagcttaaaatcactttgaaaactccacatatttataacttttcttccctctatgatttctgttcagcttgggttttgttttttattccatttacttcatcctcgaaagacctattttatgtctatttattctcatttattgacattgagaaaagaaaataactttcatgtgagaaaygcaagtccttttaaataatcaggcccagagagatattcagatgagacagcagttctgttctgctcctctttgagctgtgtgttcatctaggctgccgctgttgccacagtagctataaattaaccaataacgccacaccagacactataatccacacccaataatagtgtaa

SEQ ID NO: 585771 - DNA, 237 bp, Homo sapiens
accatgttggtcaggctggtctcgaactcctgacttcaggtgatctacccacttcagcctcccaaagtgctgggattacaggcatgcgccyggccaactttttgacatatttcaagatggctactcggaagactggaaatagcttcttctacaagaatagctgaaaagctgtgtttgttggggagatttgcatttgtagagaaaatctgcattgatatagacaggctttccctgaga

SEQ ID NO: 585772 - DNA, 237 bp, Homo sapiens
accatgttggtcaggctggtctcgaactcctgacttcaggtgatctacccacttcagcctcccaaagtgctgggattacaggcatgcgcccggccaactttttgacatatttcaagatggctactcggaagactggaratagcttcttctacaagaatagctgaaaagctgtgtttgttggggagatttgcatttgtagagaaaatctgcattgatatagacaggctttccctgaga

SEQ ID NO: 585773 - DNA, 583 bp, Homo sapiens
ggaacttcatgaatggataataccctcccttaggaatctcaagctatcctccctcctcggtgccctcaggaatgaatgtaccattctttattcaactataattcccccacccatcccttttgagatattaattaaatgtatgttacactgctgcatattgtctcacgtatcagtgagtttctggctttcttattttagtttaccctttgtcctttagtttgtaaagcttctaatttttctatatattttctgatgttagggtaaaatacatgacttattctatctcatggaattttttatttaaaatatttatttttcatctatacgtgtcacatttttcattttataacttccatttttctcctatgttcaattttcatttaagtactttgacatatatatgtatttatctatatgtatttataaaatatatttactttaaggaccttgaaaattccttcttctgtcatttataaatggcttatttttatcctgttaatatatatcttaataatatatatcttcyggcttctttgcatgtcagagttttttttgggggggtattttgatgttatgctattga

SEQ ID NO: 585774 - DNA, 583 bp, Homo sapiens
ggaacttcatgaatggataataccctcccttaggaatctcaagctatcctccctcctcggtgccctcaggaatgaatgtaccattctttattcaactataattcccccacccatcccttttgagatattaattaaatgtatgttacactgctgcatattgtctcacgtatcagtgagtttctggctttcttattttagtttaccctttgtcctttagtttgtaaagcttctaatttttctatatattttctgatgttagggtaaaatacatgacttattctatctcatggaattttttatttaaaatatttatttttcatctatacgtgtcacatttttcattttataacttccatttttctcctatgttcaattttcatttaagtactttgacatatatatgtatttatctatatgtatttataaaatatatttactttaaggaccttgaaaattccttcttctgtcatttataaatggcttatttttatcctgttaatatatatcttaataatatatatcttctggcttctttgyatgtcagagttttttttgggggggtattttgatgttatgctattga

SEQ ID NO: 585775 - DNA, 563 bp, Homo sapiens
gttcctttttctgtaaacgttctcttctactacacattccagctgcttaacattttggtttttatctggttcctcagtgcaatgacaatgtctgctctctctgggattcstctctactgctgtcacggagaacctgggaataaagcaggactcattctggctccttcttttctcttgcggagcacagtcctgtgctgcctgatgttcagtatttcaaaaaaagtttcatatattttgtccagtttactattctttaactctaaaagagtaactccagtcccagttacagcatcatgttctgtaactctactccttgttgcttcattctgccattgtctggtatgattgcccctttcccttctgtaatcaggccaagagcataacataatactagttataactgcacagcttgcctccgttgtgtaaaaaaatcactgagacttaactgtgtccaactttttaaatgtgaatataagtacaactaaagctatattttgtttaatatttgcattgcatgcttttccattatttagtttcaaaatatgtgaaatataaatataaat

SEQ ID NO: 585776 - DNA, 563 bp, Homo sapiens
gttcctttttctgtaaacgttctcttctactacacattccagctgcttaacattttggtttttatctggttcctcagtgcaatgacaatgtctgctctctctgggattcctctctactgctgtcacggagaacctgggaataaagcaggactcattctggctccttcttttctcttgcggagcacwgtcctgtgctgcctgatgttcagtatttcaaaaaaagtttcatatattttgtccagtttactattctttaactctaaaagagtaactccagtcccagttacagcatcatgttctgtaactctactccttgttgcttcattctgccattgtctggtatgattgcccctttcccttctgtaatcaggccaagagcataacataatactagttataactgcacagcttgcctccgttgtgtaaaaaaatcactgagacttaactgtgtccaactttttaaatgtgaatataagtacaactaaagctatattttgtttaatatttgcattgcatgcttttccattatttagtttcaaaatatgtgaaatataaatataaat

SEQ ID NO: 585777 - DNA, 563 bp, Homo sapiens
gttcctttttctgtaaacgttctcttctactacacattccagctgcttaacattttggtttttatctggttcctcagtgcaatgacaatgtctgctctctctgggattcctctctactgctgtcacggagaacctgggaataaagcaggactcattctggctccttcttttctcttgcggagcacagtcctgtgctgcctgatgttcagtatttcaaaaaaagtttcatatattttgtccagtttactattctttaactctaaaagagtaactccagtcccagttacagcatcatgttctgtaactctactccttgttgcttcattctgccattgtctggtatgattgcccctttcccttctgtaatcaggccaagagcataacataatactagttataactgcacagcttgcctccgttgtgtaaaaaaatcactgagacttaactgtgtccaactttttaaatgtgaatataagtacaactaaagctatattttgtttaatatttgcattgcatgcttttccattatttagtttyaaaatatgtgaaatataaatataaat

SEQ ID NO: 585778 - DNA, 500 bp, Homo sapiens
atgtagaattctagaactctgctgctgggttctgagcatttctctatcacatgagattctggaacactgctaaaatgtaggaatgtttgtccctcacaaagagtccagagcaccgcttgtgggttctgagtgtttgtccctcacataggattgcagaacacagctgctaggttctgagtgtttctcccaaacataggattccaaaacaccgctcagagggtctgaaagtttcttcctcaccaaggattccagaacactgctgctgggttctgaaagtttgtccctcacatacgattccagaacactgctatgaggstctgaatgtttgtccctcaaagggattccagaacactgcttttgagttctgagtgtttgtccgacacaaaggattccagaacactgctgctggcttctgagtgtttgtccctcacataggatttcagaacactgctatgagggtctgcatgtttttccctcagaaagcattctgtatcactgct

SEQ ID NO: 585779 - DNA, 500 bp, Homo sapiens
atgtagaattctagaactctgctgctgggttctgagcatttctctatcacatgagattctggaacactgctaaaatgtaggaatgtttgtccctcacaaagagtccagagcaccgcttgtgggttctgagtgtttgtccctcacataggattgcagaacacagctgctaggttctgagtgtttctcccaaacataggattccaaaacaccgctcagagggtctgaaagtttcttcctcaccaaggattccagaacactgctgctgggttctgaaagtttgtccctcacatacgattccagaacactgctatgaggctctgartgtttgtccctcaaagggattccagaacactgcttttgagttctgagtgtttgtccgacacaaaggattccagaacactgctgctggcttctgagtgtttgtccctcacataggatttcagaacactgctatgagggtctgcatgtttttccctcagaaagcattctgtatcactgct

SEQ ID NO: 585780 - DNA, 273 bp, Homo sapiens
tttgctgctggtttgtgagtgtttgtccctcatatgggattccagaacacttctgctgggttctgtttgtccctcatataggataccagaacactgctattggcttcagagtgtttgtccctcacataggattccagaaaacttctaagaggttccgaatgttttccttcagataggattccagaacactgctgctgggttctgagwgtttgtccctcacataggattccagaacactgctaagagggtctgaatgtttgttcctcagatagg

SEQ ID NO: 585781 - DNA, 404 bp, Homo sapiens
atttgtccctcacaaaagattgcagacaactgctgctgagttctgagagtttgtccttcacttaggaatccactgattctgggttctgaatatttgtccttcacataggattccagaacagtgctgctggcttctgagtgattgtcccgcacgtaggattccagaacactgytacgagggtctgaatgttcttccctcacaaaggcttccagaacactgctgctggtttctgtttgtttgtccctcacaaaggattccagagcactgctgctggttatttagtgtttgttgcccacataggattccagatcacttctgcgaaggtctgaatgtttagccctgagataggattccagtacacactggctcggttctgagtgtttgtaccacacactggattccag

SEQ ID NO: 585782 - DNA, 325 bp, Homo sapiens
attccagaactctcctgctgggttctgtttgtttacccctcacaaaggaatccacagcactgttgctggtttctgagtgtttgtccctcactcaggataccagaacactgctacgatggtctgaatgtttgtccgtcacaaaggattcataacactgctatgggttctgactgtttgtccctcacaatggattccagaaaactgctttgagagtctcaatgtttgtccctcacaaagtattccagagcactgctgcggggttctgtgtgtttgtccctcacatgggattcaaaaacactcctgytgggttcagagtgttttccct

SEQ ID NO: 585783 - DNA, 212 bp, Homo sapiens
tccctgtaaaccatactttgcccmtatgaagaaaagcaataaggattatttagtaaatagacatggaaactcacccagggttggctgatgagaagctggttagcaagggggtctgcctttagttaggacaaggtctgtgcttcccacgggttctctccacagcaggagggatgcaaacttccctttccttccctgcacctaccctcaaatgg

SEQ ID NO: 585784 - DNA, 491 bp, Homo sapiens
agtgtttgtcactcacataggattccagaacactgctgctgggttctgagtgtttgtcctcacatacgattccagaacactgctaygaggttctgaatgtttgtccctcacaaaggattccagaacactgcttctgagttctgagtgtttgtctgtcaaataggattccagaacactgctgctgggctctgtttgtttgtccatcacaaaggattccagaacactgctataggtttctgagtgtttgtccctcacataggattccagaacaattctacgaggctccgaatgtttgtccttcagataggatttcagaacacagtggctgggttctgagtgtttgtccctcacatagggtatcagaacactgctgctgggatctgagcgtttgtctttcacagaggattccagaacactgctgctttgttctgagtgtttgtccctcacataggattccagaacactgccgctcggtactgagggtttgtccc

SEQ ID NO: 585785 - DNA, 491 bp, Homo sapiens
agtgtttgtcactcacataggattccagaacactgctgctgggttctgagtgtttgtcctcacatacgattccagaacactgctatgaggttctgaatgtttstccctcacaaaggattccagaacactgcttctgagttctgagtgtttgtctgtcaaataggattccagaacactgctgctgggctctgtttgtttgtccatcacaaaggattccagaacactgctataggtttctgagtgtttgtccctcacataggattccagaacaattctacgaggctccgaatgtttgtccttcagataggatttcagaacacagtggctgggttctgagtgtttgtccctcacatagggtatcagaacactgctgctgggatctgagcgtttgtctttcacagaggattccagaacactgctgctttgttctgagtgtttgtccctcacataggattccagaacactgccgctcggtactgagggtttgtccc

SEQ ID NO: 585786 - DNA, 247 bp, Homo sapiens
tgtttgtccctcacataggattccagracaattctacgaggctccgaatgtttgtccttcagataggatttcagaacacagtggctgggttctgagtgtttgtccctcacatagggtatcagaacactgctgctgggatctgagcgtttgtctttcacagaggattccagaacactgctgctttgttctgagtgtttgtccctcacataggattccagaacactgccgctcggtactgagggtttgt

SEQ ID NO: 585787 - DNA, 491 bp, Homo sapiens
agtgtttgtcactcacataggattccagaacactgctgctgggttctgagtgtttgtcctcacatacgattccagaacactgctatgaggttctgaatgtttgtccctcacaaaggattccagaacactgcttctgagttctgagtgtttgtctgtcaaataggattccagaacactgctgctgggctctgtttgtttgtccatcacaaaggattccagaacactgctataggtttctgagtgtttgtccctcacataggattccagaacaattctacgaggctccgaatgtttgtccttcagataggatttcagaacacagtggctgggttctgagtgtttgtccctcacatagggtatcagaacwctgctgctgggatctgagcgtttgtctttcacagaggattccagaacactgctgctttgttctgagtgtttgtccctcacataggattccagaacactgccgctcggtactgagggtttgtccc

SEQ ID NO: 585788 - DNA, 491 bp, Homo sapiens
agtgtttgtcactcacataggattccagaacactgctgctgggttctgagtgtttgtcctcacatacgattccagaacactgctatgaggttctgaatgtttgtccctcacaaaggattccagaacactgcttctgagttctgagtgtttgtctgtcaaataggattccagaacactgctgctgggctctgtttgtttgtccatcacaaaggattccagaacactgctataggtttctgagtgtttgtccctcacataggattccagaacaattctacgaggctccgaatgtttgtccttcagataggatttcagaacacagtggctgggttctgagtgtttgtccctcacatagggtatcagaacactgctgctgggatctgagygtttgtctttcacagaggattccagaacactgctgctttgttctgagtgtttgtccctcacataggattccagaacactgccgctcggtactgagggtttgtccc

SEQ ID NO: 585789 - DNA, 595 bp, Homo sapiens
aaatcacagaagtagttttattactcacagatccagagagaagagggtagctgagaagagggtttagctgtgtccccagccaaatctcatcttgaattcccacatgttgtgggagggaacaggtgggaggaaattgaatcatggggacaggtctttcccatgctgttcttctgatagtgaataagtctcacaagatctgatggttttataaaggggagtttccctgcacaagctctcttgtcttgtctgctgccacgtgagacctgcctttcaccttccaccatgattgtgaggcctacccagccatgtggaactgtgcacctattaaacctctttcttctggaaatyacccagtcttgggcatgtatttaccggcagtgtgaaaatggactaatacagtagcacacctcatagggctgaacaaaatgaggaagataagtggggagcaagagagaaaaaagtggtctgtgggactccagcctttattgagcccagaacattacccaaataagttttccacggggctctggtcagtggggtgagagccagtaggcacatttcttggctgcagctgcaactgagcaggtcactctgg

SEQ ID NO: 585790 - DNA, 595 bp, Homo sapiens
aaatcacagaagtagttttattactcacagatccagagagaagagggtagctgagaagagggtttagctgtgtccccagccaaatctcatcttgaattcccacatgttgtgggagggaacaggtgggaggaaattgaatcatggggacaggtctttcccatgctgttcttctgatagtgaataagtctcacaagatctgatggttttataaaggggagtttccctgcacaagctctcttgtcttgtctgctgccacgtgagacctgcctttcaccttccaccatgattgtgaggcctacccagccatgtggaactgtgcacctattaaacctctttcttctggaaatcacccagtcttgggcatgtmtttaccggcagtgtgaaaatggactaatacagtagcacacctcatagggctgaacaaaatgaggaagataagtggggagcaagagagaaaaaagtggtctgtgggactccagcctttattgagcccagaacattacccaaataagttttccacggggctctggtcagtggggtgagagccagtaggcacatttcttggctgcagctgcaactgagcaggtcactctgg

SEQ ID NO: 585791 - DNA, 595 bp, Homo sapiens
aaatcacagaagtagttttattactcacagatccagagagaagagggtagctgagaagagggtttagctgtgtccccagccaaatctcatcttgaattcccacatgttgtgggagggaacaggtgggaggaaattgaatcatggggacaggtctttcccatgctgttcttctgatagtgaataagtctcacaagatctgatggttttataaaggggagtttccctgcacaagctctcttgtcttgtctgctgccacgtgagacctgcctttcaccttccaccatgattgtgaggcctacccagccatgtggaactgtgcacctattaaacctctttcttctggaaatcacccagtcttgggcatgtatttaccggcagtgtgaaaatggactaatacagtagcacacctcatagggctgaacaaaatgaggaagatragtggggagcaagagagaaaaaagtggtctgtgggactccagcctttattgagcccagaacattacccaaataagttttccacggggctctggtcagtggggtgagagccagtaggcacatttcttggctgcagctgcaactgagcaggtcactctgg

SEQ ID NO: 585792 - DNA, 437 bp, Homo sapiens
ctgaacccagctaccatatgagagagttcaacttacgttcaatgtgaatgccatggcaatattaaaaggtaagaattcgctccatacgtgyttgaggtaaataggagaaacctagaatttatgtaaacagtgagaagattggatgcgttttccgtcacatattttaatactagcagcatattatatatgtcaatccatcaggcattcagaagtacttgcttatgaaaactttttgcaccatcagacaaaagacaagggtagaagacatttttaaccctacaaacactagtaaattaaaaacagaaggacctttatgtcctaatatgtgctaatgtgtgaaagctgccctgtgaaatcaggatttcttaaacatattttaaaaatcatagctgtcaatattttttagaaatccatttaaattttctcttgctttttta

SEQ ID NO: 585793 - DNA, 437 bp, Homo sapiens
ctgaacccagctaccatatgagagagttcaacttacgttcaatgtgaatgccatggcaatattaaaaggtaagaattcgctccatacgtgtttgaggtaaataggagaaacctagaatttatgtaaacagtgagaagattggatgcgttttccgtcayatattttaatactagcagcatattatatatgtcaatccatcaggcattcagaagtacttgcttatgaaaactttttgcaccatcagacaaaagacaagggtagaagacatttttaaccctacaaacactagtaaattaaaaacagaaggacctttatgtcctaatatgtgctaatgtgtgaaagctgccctgtgaaatcaggatttcttaaacatattttaaaaatcatagctgtcaatattttttagaaatccatttaaattttctcttgctttttta

SEQ ID NO: 585794 - DNA, 437 bp, Homo sapiens
ctgaacccagctaccatatgagagagttcaacttacgttcaatgtgaatgccatggcaatattaaaaggtaagaattcgctccatacgtgtttgaggtaaataggagaaacctagaatttatgtaaacagtgagaagattggatgcgttttccgtcacatattttaatactagcagcatattatatatgtcaatccatcaggcattcaraagtacttgcttatgaaaactttttgcaccatcagacaaaagacaagggtagaagacatttttaaccctacaaacactagtaaattaaaaacagaaggacctttatgtcctaatatgtgctaatgtgtgaaagctgccctgtgaaatcaggatttcttaaacatattttaaaaatcatagctgtcaatattttttagaaatccatttaaattttctcttgctttttta

SEQ ID NO: 585795 - DNA, 437 bp, Homo sapiens
ctgaacccagctaccatatgagagagttcaacttacgttcaatgtgaatgccatggcaatattaaaaggtaagaattcgctccatacgtgtttgaggtaaataggagaaacctagaatttatgtaaacagtgagaagattggatgcgttttccgtcacatattttaatactagcagcatattatatatgtcaatccatcaggcattcagaagtacwtgcttatgaaaactttttgcaccatcagacaaaagacaagggtagaagacatttttaaccctacaaacactagtaaattaaaaacagaaggacctttatgtcctaatatgtgctaatgtgtgaaagctgccctgtgaaatcaggatttcttaaacatattttaaaaatcatagctgtcaatattttttagaaatccatttaaattttctcttgctttttta

SEQ ID NO: 585796 - DNA, 535 bp, Homo sapiens
tctcaaaaaaaaaaaaaaaaagtgagctgttgttattgaactttttattattacttaattacaagaaaaaaaacaaagtaaacaaccaaaaaaattatagtgttgagaaaatgccaaggctgctcacccacttctttaaccattcttcaaaaaagtgagctgttgttattgaactttttattattacttaattacaagaaaaaacaaagtaaacaaccaaaaaaattatagtgttgagaaaatgccaaggctgttcacccacttctttaaccattcttcaaatttaccatatatatwtttttttgactaagtgagataaatcacattgaaatgcatgaaataatgtctggcatccagtagatgctcagtgacatttgtcccctttaatggtttcaactggctaggatttcacacgaagagcagtagcattttggtatcactaggctaatgtccattttctgtattggagagtagagaaaccccttgggtgatagcttattttacctactatggaatttttacagaacaaagttaa

SEQ ID NO: 585797 - DNA, 535 bp, Homo sapiens
tctcaaaaaaaaaaaaaaaaagtgagctgttgttattgaactttttattattacttaattacaagaaaaaaaacaaagtaaacaaccaaaaaaattatagtgttgagaaaatgccaaggctgctcacccacttctttaaccattcttcaaaaaagtgagctgttgttattgaactttttattattacttaattacaagaaaaaacaaagtaaacaaccaaaaaaattatagtgttgagaaaatgccaaggctgttcacccacttctttaaccattcttcaaatttaccatatatatttttttttgactaagtgagataaatcacattgaaatgcatgaaataatgtctggcatccagtagatgctcagtgacatttgtcccctttaatggtttcaactggctaggatttcmcacgaagagcagtagcattttggtatcactaggctaatgtccattttctgtattggagagtagagaaaccccttgggtgatagcttattttacctactatggaatttttacagaacaaagttaa

SEQ ID NO: 585798 - DNA, 604 bp, Homo sapiens
cgaggacttagtcataaattctttcccaaggctgattttcagaatggtgtttcctagcattacttctaggattcttatagtttgaggtcttacattgcaggattataggttgctgggttttagtatcatggtaatgctggcttcagaattgcaatattttaaaactatatagcaggtattataaatattatttgaaggttgagtgttttaagttaaaaaaaatgtacagatggtactctttatgcacatcagtgcggggccttagtaaccactgtgcaagttgaaactgggcaaagttatcttaataattactggaaaaacataaacttgttcctgcaatcattaaaaacacttgtcagtcaggtgcagtggctcgcactggtaattccagcactttgggaggccaaggtgggcagatcacttgagcccaggagtttgagaccagtttgggcaacatgacagaaccctgtctctacaaaaactacaacaaattagccaggagtggtgatacgtacctatagtcccagctatccaggaagctgaggtgsgaggatcacctcagcctggtggtcgaggctacagtgagcctttttgataccactgc

SEQ ID NO: 585799 - DNA, 462 bp, Homo sapiens
cacccctaactccttctttgttcctatgtgtggttgagaagcactggttagcctcaagaagcttgcaggcaggtccamaaatcagaaagacaggcatgatgtggggagctctcagttagctggaaacaggtgaatttcaggtgaacacattgagtccaggacatagaagacaagtcatcaacaatatctgctatagccagttttctttttctataacacatatactttttattgggggtccccaagtccccctttggtttaatgattcacataactcaagaaagctgattttttttgtggttatagtttctaacagtgaaagaaaccagattaaaataatcagaagcataaaagcacataaagttgagtccaggacaaaccagatatgagcttacaggtgtcctttcatagtggggacttcacactgactaattttctttacaatcatgtgagacaacatgt

SEQ ID NO: 585800 - DNA, 462 bp, Homo sapiens
cacccctaactccttctttgttcctatgtgtggttgagaagcactggttagcctcaagaagcttgcaggcaggtccacaaatcagaaagacaggcatgatgtggggagctctcagttagctggaaacaggtgaatttcaggtgaacacattgagtccaggacatagaagacaagtcatcaacaatatctgctatagccagttttctttttctataacacatatactttttattggrggtccccaagtccccctttggtttaatgattcacataactcaagaaagctgattttttttgtggttatagtttctaacagtgaaagaaaccagattaaaataatcagaagcataaaagcacataaagttgagtccaggacaaaccagatatgagcttacaggtgtcctttcatagtggggacttcacactgactaattttctttacaatcatgtgagacaacatgt

SEQ ID NO: 585801 - DNA, 462 bp, Homo sapiens
cacccctaactccttctttgttcctatgtgtggttgagaagcactggttagcctcaagaagcttgcaggcaggtccacaaatcagaaagacaggcatgatgtggggagctctcagttagctggaaacaggtgaatttcaggtgaacacattgagtccaggacatagaagacaagtcatcaacaatatctgctatagccagttttctttttctataacacatatactttttattgggggtccccaagtccccctttggtttaatgattcacataactcaagaaagctgattttttttgtggttatagtttctaacagtgaaagaaaccagattaaaataatcagaagcataaragcacataaagttgagtccaggacaaaccagatatgagcttacaggtgtcctttcatagtggggacttcacactgactaattttctttacaatcatgtgagacaacatgt

SEQ ID NO: 585802 - DNA, 462 bp, Homo sapiens
cacccctaactccttctttgttcctatgtgtggttgagaagcactggttagcctcaagaagcttgcaggcaggtccacaaatcagaaagacaggcatgatgtggggagctctcagttagctggaaacaggtgaatttcaggtgaacacattgagtccaggacatagaagacaagtcatcaacaatatctgctatagccagttttctttttctataacacatatactttttattgggggtccccaagtccccctttggtttaatgattcacataactcaagaaagctgattttttttgtggttatagtttctaacagtgaaagaaaccagattaaaataatcagaagcataaaagcacataaagttgagtccaggacaaaccagatrtgagcttacaggtgtcctttcatagtggggacttcacactgactaattttctttacaatcatgtgagacaacatgt

SEQ ID NO: 585803 - DNA, 425 bp, Homo sapiens
aactctgaaaattatattttactcccttcaaattttgttgagtttgctatttgtttttgtcacttgtttctttagtgacttttctgaactaattgtgtaaagtttttgtttktcatcatgtttgaacactgaagtctctgtttgcttaacttagtagtcagtgaaagaatagacagaaatttcattaaagacctggaacccgtaactcttccggtctctgctgagtggctctgtgtgcatttcagggcacacttttaacacccagccggttggttgacaactctgccttagtcttcacattctgctttcccatagcttcatggtcatctggaggtgaaagcttagggccttctcatatttttcttgagaataagcattgtgcttagaatgtgcacaatcatacgtgtgtgagtgaccttttatag

SEQ ID NO: 585804 - DNA, 264 bp, Homo sapiens
aaaccaatttcaacaacacattaaaaagatcttacaccataatcaactgggattcattccagggatgcaaggatggctcaacatatataaatcaataattacattastaagcaagagcaaaaaacatacgatcatttaaataaatgctaaaaaaaccactcagtgaaattccacatctctttaagataaaatccctccacaaactgggtatagaatgagcatacttaagaataataagagccaaatatggcaaatgacaactag

SEQ ID NO: 585805 - DNA, 264 bp, Homo sapiens
aaaccaatttcaacaacacattaaaaagatcttacaccataatcaactgggattcattccagggatgcaaggatggctcaacatatataaatcaataattacattactaagcaagagcaaaaaacatacgatcatttaaataaatgctaaaaaaaccaytcagtgaaattccacatctctttaagataaaatccctccacaaactgggtatagaatgagcatacttaagaataataagagccaaatatggcaaatgacaactag

SEQ ID NO: 585806 - DNA, 264 bp, Homo sapiens
aaaccaatttcaacaacacattaaaaagatcttacaccataatcaactgggattcattccagggatgcaaggatggctcaacatatataaatcaataattacattactaagcaagagcaaaaaacatacgatcatttaaataaatgctaaaaaaaccactcartgaaattccacatctctttaagataaaatccctccacaaactgggtatagaatgagcatacttaagaataataagagccaaatatggcaaatgacaactag

SEQ ID NO: 585807 - DNA, 264 bp, Homo sapiens
aaaccaatttcaacaacacattaaaaagatcttacaccataatcaactgggattcattccagggatgcaaggatggctcaacatatataaatcaataattacattactaagcaagagcaaaaaacatacgatcatttaaataaatgctaaaaaaaccactcagtgaaattccacatctctttaagataaaatccctccacaaactgggtatagaatgagcatacttaagaataataagagccawatatggcaaatgacaactag

SEQ ID NO: 585808 - DNA, 249 bp, Homo sapiens
actgaattcctcaaactcttgcatatttaaaattacatttttgaaccttgatgcttgaagtgtagcttgggtaacrggtgggctttaagccgattttggcatgcaaggggttgagtttattaggcatcagcacctctgaaaatcgtggggatgcaggcttaatttcaacactattctaaatacttgaaagatatataattccttaataaactcctttgtctacaaatggttcacattaactcaatatcc

SEQ ID NO: 585809 - DNA, 392 bp, Homo sapiens
ctgaattcctcaaactcttgcatatttaaaattacatttttgaaccttgatgcttgaagtgtagcttgggtaacaggtgggctttaagccgattttggcatgcaaggggttgagtttattaggcatcagcacctctgaaaatcgtggggatgcaggcttaatttcaacactattctaaatacttgaaagatatataattccttaataaactcctktgtctacaaatggttcacattaactcaatatccatgattaaacatctataaaatcaaggcactgttatttagtggagacttgctggctattctatgagaggaggtattgttattttaatctcatcctctcataaaagtgtatcatattactcataaccagcccttcatattctattc

SEQ ID NO: 585810 - DNA, 382 bp, Homo sapiens
ggtagggatggctgcacaatgttatgactatatttagtaccactgaactgtacacttaaaatcgttaacagagtacattttattttatgtgtattttaccacaataaaaaaataaaataccttaggaacattttcctgaaagagtccacataaaattcattttaatgcatgtgtttatgcatagctttctatttttctcttttctatttatattccaaattagaatataatgctaatcaagcatagtggctgtgtttcttgcttcgtctagtctgcaggtagcatacaaatgtaataaactactyattcatgtcacatctatttattttctgccttataccaagcttgtgggattctcttaaatacaacatttttatactta

SEQ ID NO: 585811 - DNA, 382 bp, Homo sapiens
ggtagggatggctgcacaatgttatgactatatttagtaccactgaactgtacacttaaaatcgttaacagagtacattttattttatgtgtattttaccacaataaaaaaataaaataccttaggaacattttcctgaaagagtccacataaaattcattttaatgcatgtgtttatgcatagctttctatttttctcttttctatttatattccaaattagaatataatgctaatcaagcatagtggctgtgtttcttgcttcgtctagtctgcaggtagcatacaaatgtaataaactacttattmatgtcacatctatttattttctgccttataccaagcttgtgggattctcttaaatacaacatttttatactta

SEQ ID NO: 585812 - DNA, 376 bp, Homo sapiens
ataccaagcttgtgggattctcttaaatacaacatttttatacttacacctaggcaatacccattagcatcgccttcctaaatcaggggaaattgagcctctgtaaggtggagtaacttactaagatacaaaactcagcattaaagtctgtatacttcaatatcctgccctcttctcatktgtctttactgccttttatgtatgtgttagatgttcaataaattctcttttttaaactgaatttaagccgtggagcagtgttttgttgaacaataaatatgatataggacactcttcctccctttcatttatgatccagttcatgaaaaagagaaattctttcattgtgctagaagcttaaaataatgaaaatgcc

SEQ ID NO: 585813 - DNA, 376 bp, Homo sapiens
ataccaagcttgtgggattctcttaaatacaacatttttatacttacacctaggcaatacccattagcatcgccttcctaaatcaggggaaattgagcctctgtaaggtggagtaacttactaagatacaaaactcagcattaaagtctgtatacttcaatatcctgccctcttctcatttgtctttactgccttttatgtatgtgttagatgttcaataaattctcttttttaaactgaatttaagccgtggagcagtgttttgttgaacaataaatatgatataggacactcttcctccctttcatttatgatccwgttcatgaaaaagagaaattctttcattgtgctagaagcttaaaataatgaaaatgcc

SEQ ID NO: 585814 - DNA, 409 bp, Homo sapiens
tgattctcccccaaataatctggactcaatataattctccgagaaaatccaacaggcttcactgtagaaattaataaactaatagttagtaagtacaaagttggaggacacacactatctgatctcaacacttcatgaaattatagcaatcaagataaatataccaatagaaaaaaagacaatcgatagaacagagtccagaaatagaccaatacatagaaatttaattgattttttatgaagatacgaaaatggattaatgcaaaaaggaaacaccagtggtgctggcacaaatggctatcaagwtgttaaaaaaaaaaaaaagtaaatcttgaaaccaaactcacaccatgcgaaaaattaatttgagattaatgacagatttaatgtaaaaactaaaactatgaga

SEQ ID NO: 585815 - DNA, 446 bp, Homo sapiens
actcttaaggctattgtgaggattaagaggtaatatgtatcttcacgcattgctggtggaaatgtaaagtggtgcagcatctacaggaaacagtttggggttcctcaaaaagttaaagagttaccatatgacccagcaattttactcctaagtatgtatacccaagggaaatgaaaacatacacccacaaaaatacttacataagaatattcacactagcattagtcacaatagtcaaaaaggggaaacaacctaaatgttcatcaactgatgaatggatgaacaaaatgttacatccatacaatggaatactacacagccataaaaaggaacaagygctacaacaatgatggacctcaagaatgttataagtgaaagaagccagatacaaaaggtcacatgttgcatgatttcttaggaaatattcagaataggcaatttcacat

SEQ ID NO: 585816 - DNA, 446 bp, Homo sapiens
actcttaaggctattgtgaggattaagaggtaatatgtatcttcacgcattgctggtggaaatgtaaagtggtgcagcatctacaggaaacagtttggggttcctcaaaaagttaaagagttaccatatgacccagcaattttactcctaagtatgtatacccaagggaaatgaaaacatacacccacaaaaatacttacataagaatattcacactagcattagtcacaatagtcaaaaaggggaaacaacctaaatgttcatcaactgatgaatggatgaacaaaatgttacatccatacaatggaatactacacagccataaaaaggaacaagcgctacaacaatgatggacctcaagaatgttataagtgaaagaagccagatacaaaaggycacatgttgcatgatttcttaggaaatattcagaataggcaatttcacat

SEQ ID NO: 585817 - DNA, 410 bp, Homo sapiens
gaaccgcctcccgctagagctgcgggctggcgacggtccccgcggaggcgggaagcggctcaggttgccctcgccggcctgtggcggcgagtctggaagcgcgggccactcgtgcgcgggtcactcggggctgtgcctcacgcgactgtgtgtgcaggaaacaagcaggaaataccctaaaatagaatgaagctccatgtttagggccgcggatgtcgcgagtgctgtgggaatgtgggctaaggtggagagttatggtggcgcgtgttacaggctcaggggtcaggaagaagcctaatcgtggaggcggcatctgaggagggtcttgaacgctgggcaggcttttgcccsatagagatggaggaagctagtcctgtctgctggaggaaacagggcagaggcgagaaggg

SEQ ID NO: 585818 - DNA, 534 bp, Homo sapiens
ggtgggtattaataatcgcgtatgtgacaccaaaacggtgggtattattgatagcgtatgtgacaccaaaaccaccccactcaagttgtggctctttccctaaagtagaaaacagaaaccagttgggttccaagcatccatgaagatcttactaaattcctgatccctgrtggcaccatggagtcaggattggctcatctcaaacctgactcagaaacaaaaccatctcaatgtgctgagatgagcgtccttacctgctatcatattttctggtgttttcacagtgctgcgcttcctaatccccattccaccgcaatccacatgccatgatgctcagaggcattaacaaaggagacacacaggggctcctcacgttggctttccatggttttgatgaaaatctcagtttcctcatctcatacaatgtggttagtaatagtatcatttagggttgaagaattaaatggtacgaattatatagggtgcttattataacctacatggaaaatgcctaggatatgttagctatgctca

SEQ ID NO: 585819 - DNA, 534 bp, Homo sapiens
ggtgggtattaataatcgcgtatgtgacaccaaaacggtgggtattattgatagcgtatgtgacaccaaaaccaccccactcaagttgtggctctttccctaaagtagaaaacagaaaccagttgggttccaagcatccatgaagatcttactaaattcctgatccctgatggcaccatggagtcaggattggctcatctcaaacctgactcagaaacaaaaccatctcaatgtgctgagatgarcgtccttacctgctatcatattttctggtgttttcacagtgctgcgcttcctaatccccattccaccgcaatccacatgccatgatgctcagaggcattaacaaaggagacacacaggggctcctcacgttggctttccatggttttgatgaaaatctcagtttcctcatctcatacaatgtggttagtaatagtatcatttagggttgaagaattaaatggtacgaattatatagggtgcttattataacctacatggaaaatgcctaggatatgttagctatgctca

SEQ ID NO: 585820 - DNA, 534 bp, Homo sapiens
ggtgggtattaataatcgcgtatgtgacaccaaaacggtgggtattattgatagcgtatgtgacaccaaaaccaccccactcaagttgtggctctttccctaaagtagaaaacagaaaccagttgggttccaagcatccatgaagatcttactaaattcctgatccctgatggcaccatggagtcaggattggctcatctcaaacctgactcagaaacaaaaccatctcaatgtgctgagatgagcgtccttacctgctatcatattttctggtgttttcacagtgctgcgcttcctaatccccattccaccgcaatccacatgccatgatgctcagaggcattaacaaaggagacacacaggggctcctcacgttggctttccatggttttgatgaaaatctcagtttcctcatctcatacaatgtggttagtaatagtatcatttagggttgaagaattaaatggtacgaattatatagggtgcttatwataacctacatggaaaatgcctaggatatgttagctatgctca

SEQ ID NO: 585821 - DNA, 544 bp, Homo sapiens
tgttcaacttaatgaaaatatgtcaactatataaaacaaaaatgtttaccctcatgcaagttatattccagtgagaaaagacagatcattaataaaataaatatgtaaaatatatgatatgccagaaggtaataagtggcacagagaaaaattaagtttggaagagagctcaggaatgctgggagcaggtagatgtgaaggtagttagaatgctcaaggagggagtaataggcagaagaatggcctttctacatgtccatatccctatatggcaaaaaggacttatggatgtgatgaagttatggatcaggagatgaggagattattctggattacccatgttggcccaatgtcatcacaagaggacttaaaagcaaaagagggaggcaggagagtctgaggcaagaagcgtgacagctagggtcagaatgatgtggttgttgcctggaagggggccagggtccaagggatgcaggcrtcctttcaaagctggagaaggtaagaaagtgttctctctcccctagagagagtgtgtgttctttta

SEQ ID NO: 585822 - DNA, 556 bp, Homo sapiens
tcagatcttgtgagaactcactatcatgagaacagcatgggggtaactgcctccatgattcaattacctcccactgggtccccatcatgatatgtgaggattatgggaactacaattcaagatgagatttggttggagacacagccaaaccatatcatggggtctcaatttattgccccggctgatttcaaactcctgggctcaagtgatcctcctgacttggcctcccaaagtgctgggaatacaggcatgagccaccatgcycagtcctaaagtctaaattattaacatctaaaatccagaaaatcacaatcacaggagagttgtaccaagttagttgcatcgtgttaggtacaactgttgctttgttttctttttatttggaaattatgtatggtttaaggaggtccatatgggtgtcaaatctgcaagggatggacttgcaggcttaatttcaggtgtcaacttgactggattaaggaatccctggaaagctgggaaagcattattttgggtatgtctgtgatggatttctcagaagagatcagtgtgtggg

SEQ ID NO: 585823 - DNA, 408 bp, Homo sapiens
aaatctttagaggaaatattcaagtatgtttgatttctagcaaatccagatagacagttttggcaacaaaaaagtcataattttaagtcttgttataggagctakaattttattcaagggacaactgatttgattagattagatgctgtgcactgcatgtttccttcaacaaatgcacaagttgaaactctaacaatagaatggcattagaaggaggacctttgggaagtaatttggttttgatgaggatggagttcccacaatggggttagcatcctaataagaagagtaggagactagagccctcttctctcagccatgtgaagatacaacaagaacacctgcaaaccagtaagagggccttcaccagacactggctctgctggcccagattttaatctttgaatt

SEQ ID NO: 585824 - DNA, 408 bp, Homo sapiens
aaatctttagaggaaatattcaagtatgtttgatttctagcaaatccagatagacagttttggcaacaaaaaagtcataattttaagtcttgttataggagctataattttattcaagggacaactgatttgattagattagatgctgtgcactgcatrtttccttcaacaaatgcacaagttgaaactctaacaatagaatggcattagaaggaggacctttgggaagtaatttggttttgatgaggatggagttcccacaatggggttagcatcctaataagaagagtaggagactagagccctcttctctcagccatgtgaagatacaacaagaacacctgcaaaccagtaagagggccttcaccagacactggctctgctggcccagattttaatctttgaatt

SEQ ID NO: 585825 - DNA, 408 bp, Homo sapiens
aaatctttagaggaaatattcaagtatgtttgatttctagcaaatccagatagacagttttggcaacaaaaaagtcataattttaagtcttgttataggagctataattttattcaagggacaactgatttgattagattagatgctgtgcactgcatgtttccttcaacaaatgcacaagttgaaactctaacaatagaatggcattagaaggaggacctttgggaagtaatttggtttygatgaggatggagttcccacaatggggttagcatcctaataagaagagtaggagactagagccctcttctctcagccatgtgaagatacaacaagaacacctgcaaaccagtaagagggccttcaccagacactggctctgctggcccagattttaatctttgaatt

SEQ ID NO: 585826 - DNA, 408 bp, Homo sapiens
aaatctttagaggaaatattcaagtatgtttgatttctagcaaatccagatagacagttttggcaacaaaaaagtcataattttaagtcttgttataggagctataattttattcaagggacaactgatttgattagattagatgctgtgcactgcatgtttccttcaacaaatgcacaagttgaaactctaacaatagaatggcattagaaggaggacctttgggaagtaatttggttttratgaggatggagttcccacaatggggttagcatcctaataagaagagtaggagactagagccctcttctctcagccatgtgaagatacaacaagaacacctgcaaaccagtaagagggccttcaccagacactggctctgctggcccagattttaatctttgaatt

SEQ ID NO: 585827 - DNA, 422 bp, Homo sapiens
ggtaggaatgagaaaatctttagaggaaatattcaagtatgtttgatttctagcaaatccagatagacagttttggcaacaaaaaagtcataattttaagtcttgttataggagctataattttattcaagggacaactgatttgattagattagatgctgtgcactgcatgtttccttcaacaaatgcacaagttgaaactctaacaatagaatggcattagaaggaggacctttgggaagtaatttggttttgatgaggatggagttcycacaatggggttagcatcctaataagaagagtaggagactagagccctcttctctcagccatgtgaagatacaacaagaacacctgcaaaccagtaagagggccttcaccagacactggctctgctggcccagattttaatctttgaattc

SEQ ID NO: 585828 - DNA, 353 bp, Homo sapiens
atcaaatcatatcacgtgttttttaaccatatggaataaagctagaaataaacaacagcaggaacttcagaaattgtgcaaatacatacaaattaaacaacatatccttaaacaaccaatgggtcaatgaaaaatatttaatttaaaaaatgtctkaagacaaataaaaatgaaatcagaacatatgaaaacttatgaaatacagtaaaacagtccttagagggaagtttatagcaatacatttctacatcaataaagaagaaagataatgaataaaccatctaacaatgtatttcaaggaactataaaatcaagaacaaactaagacccaaattagcaaaagaatataaaga

SEQ ID NO: 585829 - DNA, 353 bp, Homo sapiens
atcaaatcatatcacgtgttttttaaccatatggaataaagctagaaataaacaacagcaggaacttcagaaattgtgcaaatacatacaaattaaacaacatatccttaaacaaccaatgggtcaatgaaaaatatttaatttaaaaaatgtctgaagacraataaaaatgaaatcagaacatatgaaaacttatgaaatacagtaaaacagtccttagagggaagtttatagcaatacatttctacatcaataaagaagaaagataatgaataaaccatctaacaatgtatttcaaggaactataaaatcaagaacaaactaagacccaaattagcaaaagaatataaaga

SEQ ID NO: 585830 - DNA, 588 bp, Homo sapiens
aagaacagcaaataaaagaaaactccaggccaatatcattgataaacatagatgcaaacattcaaaaccagcagttctagcaatgatatttcaaaagcacattaaaaagattatccaccataatcaaatggtatttacccggggaggtaaggatagtctaatacatgtaaatcaataaaatctgatacatcacattaaacaatgaaggataaaawacatataattgtttcaatagatgcagaaaaagcatttgacaaaattagacatccttttatgatcaaaccttttaacaaattagttataaaagaacataataaaataaagaccatatgtgataacccacagacaacattttactgaatggtgaaaacttgaaagctttgcctctaggatctggaacaagacaaggatgttcactttaatcacttttttcaacatagtaatggaagtcctagtcagaacaattaggtaagagaaagaaataaaaggcatccatattgtaaaaaaaaaagtcaaattgtccctctttgcagatgacatgatcatatatgtaaaaaaaccctaaatacgccactgagaatcagaaat

SEQ ID NO: 585831 - DNA, 588 bp, Homo sapiens
aagaacagcaaataaaagaaaactccaggccaatatcattgataaacatagatgcaaacattcaaaaccagcagttctagcaatgatatttcaaaagcacattaaaaagattatccaccataatcaaatggtatttacccggggaggtaaggatagtctaatacatgtaaatcaataaaatctgatacatcacattaaacaatgaaggataaaaaacatatmattgtttcaatagatgcagaaaaagcatttgacaaaattagacatccttttatgatcaaaccttttaacaaattagttataaaagaacataataaaataaagaccatatgtgataacccacagacaacattttactgaatggtgaaaacttgaaagctttgcctctaggatctggaacaagacaaggatgttcactttaatcacttttttcaacatagtaatggaagtcctagtcagaacaattaggtaagagaaagaaataaaaggcatccatattgtaaaaaaaaaagtcaaattgtccctctttgcagatgacatgatcatatatgtaaaaaaaccctaaatacgccactgagaatcagaaat

SEQ ID NO: 585832 - DNA, 588 bp, Homo sapiens
aagaacagcaaataaaagaaaactccaggccaatatcattgataaacatagatgcaaacattcaaaaccagcagttctagcaatgatatttcaaaagcacattaaaaagattatccaccataatcaaatggtatttacccggggaggtaaggatagtctaatacatgtaaatcaataaaatctgatacatcacattaaacaatgaaggataaaaaacatataatygtttcaatagatgcagaaaaagcatttgacaaaattagacatccttttatgatcaaaccttttaacaaattagttataaaagaacataataaaataaagaccatatgtgataacccacagacaacattttactgaatggtgaaaacttgaaagctttgcctctaggatctggaacaagacaaggatgttcactttaatcacttttttcaacatagtaatggaagtcctagtcagaacaattaggtaagagaaagaaataaaaggcatccatattgtaaaaaaaaaagtcaaattgtccctctttgcagatgacatgatcatatatgtaaaaaaaccctaaatacgccactgagaatcagaaat

SEQ ID NO: 585833 - DNA, 588 bp, Homo sapiens
aagaacagcaaataaaagaaaactccaggccaatatcattgataaacatagatgcaaacattcaaaaccagcagttctagcaatgatatttcaaaagcacattaaaaagattatccaccataatcaaatggtatttacccggggaggtaaggatagtctaatacatgtaaatcaataaaatctgatacatcacattaaacaatgaaggataaaaaacatataattgtttcaatagatgcagaaaaagcatttgacaaaattagacatccttttatgatcaaaccttttaacaaattagttataaaagaacataataaaataaagaccatatgtgataacccacagacaacattttactgaatggtgaaaacttgaaagctttgcctctaggatctggaacaagacaaggatgttcactttaatcacttttttcaacatagtaatggaagtcctagtcagaacaattargtaagagaaagaaataaaaggcatccatattgtaaaaaaaaaagtcaaattgtccctctttgcagatgacatgatcatatatgtaaaaaaaccctaaatacgccactgagaatcagaaat

SEQ ID NO: 585834 - DNA, 507 bp, Homo sapiens
aaaacaccccaaatagccatataaatcttaagcaaaaagagcaatgctagaggtattacactatctaatttcaaaatatattacaaagctatcttaactaaaacagcatggtattggcataaaaacaggcatgtagaccagtggaacaaaaatagagagcccaggcataaaaccacgtatttacatgcaacttatttttgacaaaggtgcaaacattcaattgggaaaagaaagtcttttcaacaaatggtactgggaaagtgcatatccacatacaaaagaatgaaagtagacccctatctctcatcatatacaaaaatcaactcaaaataaattaaatatttaaatgtaagaccccaaactatgaaactaktagaagcaaacttaggtgaaatgttatatgtcattggtctgggcaaggactttttagaaaagacatcgaaagacatgcacaacaaaagtaaaaataaacaaatgggattacaccaaataaaaacttctgcactg

SEQ ID NO: 585835 - DNA, 391 bp, Homo sapiens
aaccatactctgctaatttgaggtaagaatgtaaatggaagcagcattttctggaaaacagtttgatgacataaagttttagtaatttattattgaagtttataactaaagaggtataattgaagaatgatgaattttgaaaatatttgttatgtaatatayaaggtataatgtttttattaaaaaagcaaaatataaaactaaatgtaaaactgtaccatccaatatggcaacaactagtcacatgtagctttttttttttttttgaagacacagagtctcaatctgtcacccaggctggagggcagtggtgtgatcatagctcaatataacctcaaatttctgggctcaagcactcctcctgcatcagcctcctaagtagccagtatta

SEQ ID NO: 585836 - DNA, 507 bp, Homo sapiens
aaaacaccccaaatagccatataaatcttaagcaaaaagagcaatgctagaggtattacactatctaatttcaaaatatattacaaagctatcttaactaaaacagcatggtattggcataaaaacaggcatgtagaccagtggaacaaaaatagagagcccaggcataaaaccacgtatttacatgcaacttatttttgacaaaggtgcaaacattcaattgggaaaagaaagtcttttcaacaaatggtactgggaaagtgcatatccacatacaaaagaatgaaagtagacccctatctctcatcatatacaaaaatcaactcaaaataaattaaatatttaaatgtaagaccccaaactatgaaactagtagaagcaaacttaggtgaaatgttatatgtcattggtctgggcaaggactttttagaaaagacatcgaaagacatgcacaacaaaagyaaaaataaacaaatgggattacaccaaataaaaacttctgcactg

SEQ ID NO: 585837 - DNA, 391 bp, Homo sapiens
aaccatactctgctaatttgaggtaagaatgtaaatggaagcagcattttctggaaaacagtttgatgacataaagttttagtaatttattattgaagtttataactaaagaggtataattgaagaatgatgaattttgaaaatatttgttatgtaatatacaaggtataatgtttwtattaaaaaagcaaaatataaaactaaatgtaaaactgtaccatccaatatggcaacaactagtcacatgtagctttttttttttttttgaagacacagagtctcaatctgtcacccaggctggagggcagtggtgtgatcatagctcaatataacctcaaatttctgggctcaagcactcctcctgcatcagcctcctaagtagccagtatta

SEQ ID NO: 585838 - DNA, 391 bp, Homo sapiens
aaccatactctgctaatttgaggtaagaatgtaaatggaagcagcattttctggaaaacagtttgatgacataaagttttagtaatttattattgaagtttataactaaagaggtataattgaagaatgatgaattttgaaaatatttgttatgtaatatacaaggtataatgtttttattaaaaaagcaaaatataaaactaaatktaaaactgtaccatccaatatggcaacaactagtcacatgtagctttttttttttttttgaagacacagagtctcaatctgtcacccaggctggagggcagtggtgtgatcatagctcaatataacctcaaatttctgggctcaagcactcctcctgcatcagcctcctaagtagccagtatta

SEQ ID NO: 585839 - DNA, 391 bp, Homo sapiens
aaccatactctgctaatttgaggtaagaatgtaaatggaagcagcattttctggaaaacagtttgatgacataaagttttagtaatttattattgaagtttataactaaagaggtataattgaagaatgatgaattttgaaaatatttgttatgtaatatacaaggtataatgtttttattaaaaaagcaaaatataaaactaaatgtaaaactgtaccatccaatatggcaacaactagtcayatgtagctttttttttttttttgaagacacagagtctcaatctgtcacccaggctggagggcagtggtgtgatcatagctcaatataacctcaaatttctgggctcaagcactcctcctgcatcagcctcctaagtagccagtatta

SEQ ID NO: 585840 - DNA, 580 bp, Homo sapiens
atcatgtatccacttaataaaagaaaagaaaaaagaaaatggaagagtcaagatactggggcactggaagaaatagaagagaaggtgagttggcagtaaggaagagagagtctgaaagagcatgtcacagagtggaacattaaagtttataacattagaaatcaatttttaagttattgaaaagttaagtttatagccatgaaagtgagtagctcaattgaagtgaaagtaaaagtcaatgaagattaaattagaaaatatattgcttggcatttagtaattacttcagaaatattaataaatcttaagaaaattaagaacaccaaagcattcatagtgggccattatcataacacgaatttatgtggtaatattttattctttccagtgaagggagtaattcaacagtcttsattgcaggttagaaaatgatttctccaggtgtgacccactgaccacattcattgtatttgaattgcttgagcaatttgtttcaggagaaaatggaaagattttaagatggaccaacaaaattaccactgagtgtctttaatggaaatctcatccttgtctagaataa

SEQ ID NO: 585841 - DNA, 591 bp, Homo sapiens
agtaattacttcagaaatattaataaatcttaagaaaattaagaacaccaaagcattcatagtgggccattatcataacacgaatttatgtggtaatattttattctttccagtgaagggagtaattcaacagtcttgattgcaggttagaaaatgatttctccaggtgtgacccactgaccacattcattgtatttgaattgcttgagcaatttgtttcaggagaaaatggaaagattttaagatggaccaacraaattaccactgagtgtctttaatggaaatctcatccttgtctagaataacctgggttatctgtttctatggggtctctgtgtcttttgttttctttgttatttgcaattctgttagttgtagattactgatagtaatgcaaatattcttgtctatagacaggcaaatgattgattttggtggaagtataattaattttcctttttccaccttccatcaagaagtcagttttgaacttatcaagcaaatttatttcagtgttccttagtgcctagatatgtgtggctcttaattttccataaaacttagtataacatcttactggctccctcatta

SEQ ID NO: 585842 - DNA, 442 bp, Homo sapiens
ctgggaaaacaagtccacatttaaaccagtaaagttgaatctttatcacattccaagtacaaaaattaaataaaaatagattaaagacataagtgttcaactttartggtttctaatggttgtttttatttatgtggggtcagtattaacatgaacacctttatacacacaaactagaaaactttaaagaaatagatacattactagatatacacactctcccaagattaagccaggaagacaattatttcctgaatggaccaataaaaagctctgatattatataggtaataagtagcttgccaatcaaaaaaataaaagccctggactttatggatttacagccaaattctacaaaatgtacaaagaagagcttgtacaattcctacagaaactatccccaaaaattgaggaggatggtctcctcccaaactcattctat

SEQ ID NO: 585843 - DNA, 568 bp, Homo sapiens
atcatgaggtcaggagatcgaaaccatcctggccaacatggtgaaactccttctcaactaaaaatacaaaaaatagctgggcctagtggcaagcgcttgtaatcccagctactcgggaggctgaggcaggagaatccattgaaccagggagtcagaggttgcagtgagctgagattgcaccactgcactgaarcctgatgatagagtgatattccatcaaaaaaaattatatatatgaaaccaaaaaggagcacacatagccaaggcaatcctaagcaaaaaagaacaaagctgcaggcatcaggttgcctggcttcaaattacactacagggctatagtaatgaaaacagcataatactgatacaaaaacagacacatagacaaatggagcagaatagagagcccagaaacaaggctgcacatctatgcccatgtgataattgacaaggccgacaaaaacaagcaatgagaaaaagattatttattcaataagtggtgctggaataattggctggcaatatgtggcagattgaagctggaccctttatttacatcatatacaaaaag

SEQ ID NO: 585844 - DNA, 545 bp, Homo sapiens
cactagttcactcaattgagaatcctcagtatacaaacatataaatcaagggaacttaaccaatcattgtgttcaaaatgggaagattattccaaattttttctacatattttagaataatttcacagttaaacaccctgtagcttataaaatcattatccagtatttaataaagtatatctataacaatatcaacattttaatttaagagtttacaaagcacttttgatacatcacatttaaatraaggcggcaacgagttcagtacattcatgcagattagaaaacagtagtttttgaagattgtattttttcatgtaagtcagaaggtttgaactatttcctactcctgctatgggtttaagcctaagaaacgttattcattatgatttggtctttaaataaatcacgaaggtagagagtagagcacaccccatgaatgcactgaggtgccgtaagtctccaacgccagaggtggcaggttggaatttagttcaatcacgaatttgttatgagaactctgacaaccttcagctctaaagtaa

SEQ ID NO: 585845 - DNA, 595 bp, Homo sapiens
aaatgctcaatcaatagaatggttcaactctgtgagatgaatgcacacatcacaaaaaagtttctcagaaagattctgtttagttttcatgtgaagattggagtgcagtggaatggaatggaatygaatgggatggaatggaaggaaatggaatggagtgaagtggaatggaatggaacggaatggagtggagtggagtgatgtggattggactagagtggagtggagaggaatggaatggagtagaatggaaaggagtggagtggaatggaatggagtggagtggagtggaatagagtggagtggaatggaatggagtggaatagaatggagtggaatagaatggagtggagtggaatggattggagtggagtgaagtggagtggattggagtggagtggagatgaaaggagtggaatggtatggaatggaattgaatggaatggagtggaatggaatagagtggagtggagaagagtggaatggagtggaatgtagtggaatggagtggagtgcagtggagttgagtatagtggattggaatgcagtggaatgtaatggaatggaatggagtggaatggagtggattggagtg

SEQ ID NO: 585846 - DNA, 452 bp, Homo sapiens
tcacagtgttaaccgtttcttttgattgagcactttggaaactctctttttgcagaacctgtaagtggacatttggagcactttgaggcctatggtggaaaaggaagaatcttcacataaaacctagatagaagcattctgagaagcttctttttgatgtgtgcattcatctcytagtgttgaacctttgttttgatggaccagttttgaattcctctttttgtggaatctgcaagggcacattttgattgccttgaggcttctggtgcaaaaggaaatatcttcacattaaaactggacagaagaattctgagaaacttctttgtgatgtgtgccttcatctcagagagttaacctttcttctgattgagcagtttggaaactctctttttgaagaatctacaactggacattttgagcggtttgtgacgcatggtagaaaaggaaatatc

SEQ ID NO: 585847 - DNA, 452 bp, Homo sapiens
tcacagtgttaaccgtttcttttgattgagcactttggaaactctctttttgcagaacctgtaagtggacatttggagcactttgaggcctatggtggaaaaggaagaatcttcacataaaacctagatagaagcattctgagaagcttctttttgatgtgtgcattcatctcttagtgttgaacctttgttttgatggaccagttttgaattcctctttttgtggaatctgcaagggcacattttgattgccttgaggcttctggtgcaaaaggaaatatcttcacattaaaactggacagaagaattctgagaaacttctttgtgatgtgtgccttcatctcagagagttaacctttcttctgattgagcagtttggaaactctctttttgaagaatctacaactggacattttgagcggtttgtgacgyatggtagaaaaggaaatatc

SEQ ID NO: 585848 - DNA, 620 bp, Homo sapiens
aaaaatgaaaaaaagaactaccacataatccaacaatttcacttctggatatatgtccagtgaaattgacataagagtcttagagaggtgtctgtcatcctctgttcattgcggcatgacacacaatgaccaaaataggaaaataaccaaaaggtcctttggcagaggaacagatgaatgggtaaagaaaatgtgacgtgtatacataaaatgaaatattatacaaccttaaaaaagaaagaaatacttstatttgtgaaaacattgatggagctggaagatattgcgccaagcaaaaatgcaagagacagagacaaatacttcatgatctcacttacatgtggaatctacaacagtcaaattcatgaaaacagagaataggacagaggttgccaggggctcagggaggggaaatggggtgatgttaattaaattgtgcaatgttcaagttataatttctggagatataatgtacaacgtggaacaacactgtatcatattcttgtgttctgctaaaggactagatcataaattaattactgtcaacacacacacaatggtaaatatatagagataatatgctaatttgcttgattgtggtgatcgtttcaaaaagtata

SEQ ID NO: 585849 - DNA, 620 bp, Homo sapiens
aaaaatgaaaaaaagaactaccacataatccaacaatttcacttctggatatatgtccagtgaaattgacataagagtcttagagaggtgtctgtcatcctctgttcattgcggcatgacacacaatgaccaaaataggaaaataaccaaaaggtcctttggcagaggaacagatgaatgggtaaagaaaatgtgacgtgtatacataaaatgaaatattatacaaccttaaaaaagaaagaaatacttgtatttgtgaaaacattgatggagctggaagatattgcgccaagcaaaaatgcaagasacagagacaaatacttcatgatctcacttacatgtggaatctacaacagtcaaattcatgaaaacagagaataggacagaggttgccaggggctcagggaggggaaatggggtgatgttaattaaattgtgcaatgttcaagttataatttctggagatataatgtacaacgtggaacaacactgtatcatattcttgtgttctgctaaaggactagatcataaattaattactgtcaacacacacacaatggtaaatatatagagataatatgctaatttgcttgattgtggtgatcgtttcaaaaagtata

SEQ ID NO: 585850 - DNA, 513 bp, Homo sapiens
tgactgtattatttctaaccattttctgtggagtctttagagttttcaatgtataataatcakgtcttctgttaacagaggtaactacatctttcctttcaattttgatgccttttatttctcttgcctgattgctctggctaggacttccagtactatgttgaataggagtgatgagaatagacatctttgtcttgttccagatattaaataaaaagctctcagtttttccccattgattataatattagatataggtttttcatatacagcctttatagtgttgaagtaagtttcttgtatacttattttgctgagttttatcatgaaagtatattgaattttgtcaaatgtgttttctgcatctattggaatgttattttggctttcgttctgttaatggggtataccacattattaatttttacacattgaaacatccttgtatcccatagataaattccaattggtcatggtgtatgaccttttcaatatgcttttgaattcagtttg

SEQ ID NO: 585851 - DNA, 513 bp, Homo sapiens
tgactgtattatttctaaccattttctgtggagtctttagagttttcaatgtataataatcaggtcttctgttaacagaggtaactacatctttcctttcaattttgatgccttttatttctcttgcctgattgctctggctaggacttccagtactatgttgaataggagtgatgagaatagacatctttgtcttgttccagatattaaataaaaagctctcagyttttccccattgattataatattagatataggtttttcatatacagcctttatagtgttgaagtaagtttcttgtatacttattttgctgagttttatcatgaaagtatattgaattttgtcaaatgtgttttctgcatctattggaatgttattttggctttcgttctgttaatggggtataccacattattaatttttacacattgaaacatccttgtatcccatagataaattccaattggtcatggtgtatgaccttttcaatatgcttttgaattcagtttg

SEQ ID NO: 585852 - DNA, 513 bp, Homo sapiens
tgactgtattatttctaaccattttctgtggagtctttagagttttcaatgtataataatcaggtcttctgttaacagaggtaactacatctttcctttcaattttgatgccttttatttctcttgcctgattgctctggctaggacttccagtactatgttgaataggagtgatgagaatagacatctttgtcttgttccagatattaaataaaaagctctcagtttttccccattgattataatattagatataggtttttcatatacagcctttatagtgttgaagtaagtttcttgtatacttattttgctgagttttatcatgaaagtatattgaattttgtcaaatgtgttttctgcatctattggaatgttattttggctttcgttctgttaatggggtataycacattattaatttttacacattgaaacatccttgtatcccatagataaattccaattggtcatggtgtatgaccttttcaatatgcttttgaattcagtttg

SEQ ID NO: 585853 - DNA, 366 bp, Homo sapiens
agtggaaaccctgtatgagctcgtgacacaggcctgcccaatgaatagacttctaatcctggcacagatgaaactagagatggacatgaaatccaagcctcacacccaaagtcaatctctagtctcttattgaaactattagaagtgtttctgtttttgctttattctgrggctatggaactaaggaaatgtaaactggaggagtgatgatggccccattgcagcacaaagggaaaacttttctgagagtaaaatcaatggggaagaaaaaagcaaggaagaggagaagagccaagccctgagttcctactttcagccattctgaagctataccctggatttttccattatacgagtccacaaatt

SEQ ID NO: 585854 - DNA, 366 bp, Homo sapiens
agtggaaaccctgtatgagctcgtgacacaggcctgcccaatgaatagacttctaatcctggcacagatgaaactagagatggacatgaaatccaagcctcacacccaaagtcaatctctagtctcttattgaaactattagaagtgtttctgtttttgctttattctggggctatggaactaaggaaatgtaaactggaggagtgatgatggccmcattgcagcacaaagggaaaacttttctgagagtaaaatcaatggggaagaaaaaagcaaggaagaggagaagagccaagccctgagttcctactttcagccattctgaagctataccctggatttttccattatacgagtccacaaatt

SEQ ID NO: 585855 - DNA, 380 bp, Homo sapiens
ttcctttttcaccattggcctcaaagcattcacaaatatccctttgcagattttacaaaaagactctttacacrttgctcaatcaaaagaatgtttcaactttgtgaggtgaatgctcacatcaccaggatgtttctcagaaagcttttgtgtagtttttatgtgaagatatgtcttttttcaccatacacctcaaagggctcacaaatatccctttgcagatcttacaagaaaagagtttccaatcttctcaatgaaaagaaacagacacatctgggagatgactgcacatatcacaaagcggtttctgagaaacattctgtctagtttttctgtgaaggtatctccttttccaccacaggatgcaaagcactcaaaat

SEQ ID NO: 585856 - DNA, 380 bp, Homo sapiens
ttcctttttcaccattggcctcaaagcattcacaaatatccctttgcagattttacaaaaagactctttacacattgctcaatcaaaagaatgtttcaactttgtgaggtgaatgctcacatcaccaggatgtttctcagaaagcttttgtgtagtttttrtgtgaagatatgtcttttttcaccatacacctcaaagggctcacaaatatccctttgcagatcttacaagaaaagagtttccaatcttctcaatgaaaagaaacagacacatctgggagatgactgcacatatcacaaagcggtttctgagaaacattctgtctagtttttctgtgaaggtatctccttttccaccacaggatgcaaagcactcaaaat

SEQ ID NO: 585857 - DNA, 601 bp, Homo sapiens
attttgaagctatatattttggagtgaacttgttttttttttttccatgtcaggcttgagcaggatagcaaatatataaattgagctctctaattataatctcaatatatgaattcttgctaattaaaatactttgcacaagcaaaaacaattgccacgtatgtgtttaggaggtagttaagtaactctatataaaaataagtgcactttcccctcctttcttcagtgactagagaacttccatacttttaaaataatcaaataataatttagagagaaacagccctcaactctttgctggtgcttatcacactgcctttcttcactccattcttagctctgctagtttcttcttgwctgtaatgataataagggaatgtgggtgggtcagcacttctgtgtaggtcccctttccaaatttgccttccaaaaagccaaccaaataaacaaccaaaaaattgtgcaacaaaacacaaatagcattccaacagcttggtaagtgatgcattcacctgagattgagtggttttaggcggtcagtaacaaaatgtttctttgctgtcttagtagaaaggcaacaaattcttcaaagaaaccaaga

SEQ ID NO: 585858 - DNA, 609 bp, Homo sapiens
cagtactgcgatggaatgccaagacacagaaaaaccatgtgtcaagaaggggggagttattctttagacacatcctggtatatgtatatcattaaagatcagtggcttttgtgagtctaaaaaattaatccttaaatgttttcatcaagttccagttaactaccttaattttctaggttatattaacagtattayttggattttcaccttgatatgaagatgtctgtgtaacttttacaatgatgtaaaacaaagagtaggattagggagagcacaggccactggtgcaatggataacgcatctgactatggatgagggaatttagcctggaataaggaacttttatttccaggttagtgttgcacacaaattttaaaaataaaataaaaatcatgttttacgtgattcatgtttctcctaatgcaaagaagacaggtactattaataaaaatatttttaaaatgtaagggctaaggccccagaagttctgctatgattttttatgtttcatagagtgattatcatcacagaagctcaagcattatgtaaatacaaacacgtatgccctgacctggtatttctgttcctggaaatttatcttcaggtcc

SEQ ID NO: 585859 - DNA, 609 bp, Homo sapiens
cagtactgcgatggaatgccaagacacagaaaaaccatgtgtcaagaaggggggagttattctttagacacatcctggtatatgtatatcattaaagatcagtggcttttgtgagtctaaaaaattaatccttaaatgttttcatcaagttccagttaactaccttaattttctaggttatattaacagtattacttggattttcaccttgatatgaagatgtctgtgtaacttttacaatgatgtaaaacaaagagtaggattagggagagcacaggccactggtgcaatggataacgcatctgactatggatgagggaatttagcctggaataaggaacttttatttccaggttagtgwtgcacacaaattttaaaaataaaataaaaatcatgttttacgtgattcatgtttctcctaatgcaaagaagacaggtactattaataaaaatatttttaaaatgtaagggctaaggccccagaagttctgctatgattttttatgtttcatagagtgattatcatcacagaagctcaagcattatgtaaatacaaacacgtatgccctgacctggtatttctgttcctggaaatttatcttcaggtcc

SEQ ID NO: 585860 - DNA, 470 bp, Homo sapiens
agaaacctttctacattcaaactaatagtagaaaactctccaagatacaattttaaggaaaaaaaaaatcaaagtcgagaagactatagaggaggttgyctttagtgtaaaacagttgaaaattataaatatattcatatgtttataaagaaactttaggaggctataaaaaaacaaaacaaagggaaagaggaacaggagctgggacacaggtgagtaagatgcatggcaggcatatatcttcatctttatatgcttttatttaaaaatgttggaccacatgtacatgttatctatttaaaaaatcagattttaaaatacaaacaagaaaacaagaaaatgaaagcttaaaaagagcatgtggaactaccagaaaaaagatactaatccatggagataatggcaaggtagctcctagatgcactgatttctctaccacattgtataaacaagccatcaactatgggatt

SEQ ID NO: 585861 - DNA, 470 bp, Homo sapiens
agaaacctttctacattcaaactaatagtagaaaactctccaagatacaattttaaggaaaaaaaaaatcaaagtcgagaagactatagaggaggttgcctttagtgtaaaacagttgaaaattataaatatattcatatgtttataaagaaactttaggaggctataaaaaaacaaaacaaagggaawgaggaacaggagctgggacacaggtgagtaagatgcatggcaggcatatatcttcatctttatatgcttttatttaaaaatgttggaccacatgtacatgttatctatttaaaaaatcagattttaaaatacaaacaagaaaacaagaaaatgaaagcttaaaaagagcatgtggaactaccagaaaaaagatactaatccatggagataatggcaaggtagctcctagatgcactgatttctctaccacattgtataaacaagccatcaactatgggatt

SEQ ID NO: 585862 - DNA, 470 bp, Homo sapiens
agaaacctttctacattcaaactaatagtagaaaactctccaagatacaattttaaggaaaaaaaaaatcaaagtcgagaagactatagaggaggttgcctttagtgtaaaacagttgaaaattataaatatattcatatgtttataaagaaactttaggaggctataaaaaaacaaaacaaagggaaagaggaacaggagctgggacacaggtgagtaagatgcatggcaggcatrtatcttcatctttatatgcttttatttaaaaatgttggaccacatgtacatgttatctatttaaaaaatcagattttaaaatacaaacaagaaaacaagaaaatgaaagcttaaaaagagcatgtggaactaccagaaaaaagatactaatccatggagataatggcaaggtagctcctagatgcactgatttctctaccacattgtataaacaagccatcaactatgggatt

SEQ ID NO: 585863 - DNA, 470 bp, Homo sapiens
agaaacctttctacattcaaactaatagtagaaaactctccaagatacaattttaaggaaaaaaaaaatcaaagtcgagaagactatagaggaggttgcctttagtgtaaaacagttgaaaattataaatatattcatatgtttataaagaaactttaggaggctataaaaaaacaaaacaaagggaaagaggaacaggagctgggacacaggtgagtaagatgcatggcaggcatatatcttcatctttatatgcttttatttaaaaatgttggaccacatgtacatgttatctatttaaaaaatcagattttaaaatacaarcaagaaaacaagaaaatgaaagcttaaaaagagcatgtggaactaccagaaaaaagatactaatccatggagataatggcaaggtagctcctagatgcactgatttctctaccacattgtataaacaagccatcaactatgggatt

SEQ ID NO: 585864 - DNA, 508 bp, Homo sapiens
tccccaccatcacacccggctaatttttgaatttttagtagagacagggtttcaccatgttggccaggctggtctcgaactgtagacctcaggtgatctgcccgcatcagcctcccaaagtactgggattacaggcatgagccactgcacctggctagcattcattctttattgaaaaattcgttttttccctttaatcttcttcttttttttcttttcytttctttttttttttttttttttttttttttttttttttttgagacagaggctcgctccaggctggagtgcagtggagcgatctcagctcactgcaatctctgcctccagggttcaagtgattctcctgcctcagcctcccgaatagctggggttacaggcacacaccaccatgcctggctagtttttgtatttttagtagagatgaggtttcaccttgttggccaggctggtctaatgttctttaaaagtggcatagtaattatagttgtctcaagtaaatggtgag

SEQ ID NO: 585865 - DNA, 507 bp, Homo sapiens
tccccaccatcacacccggctaatttttgaatttttagtagagacagggtttcaccatgttggccaggctggtctcgaactgtagacctcaggtgatctgcccgcatcagcctcccaaagtactgggattacaggcatgagccactgcacctggctagcattcattctttattgaaaaattcgttttttccctttaatcttcttcttttttttcttttcctttctttttttttttttttttttttttttttttttttttttgagacagaggctcgctccaggctggagtgcagtggagcgatctcagctcactgcaatctctgcctccagggttcaagtgattctcctgcctcagcctcccraatagctggggttacaggcacacaccaccatgcctggctagtttttgtatttttagtagagatgaggtttcaccttgttggccaggctggtctaatgttctttaaaagtggcatagtaattatagttgtctcaagtaaatggtga

SEQ ID NO: 585866 - DNA, 565 bp, Homo sapiens
acaaactactcaatgcattaaaaataacattaaaataaccagtgatatctaactgaagataaggctcagggactcctatcttagaaatttttcccaaaacccccaaacaagctatctgttttcttctttatctctctcccattgcacccttagcccccattccaaaaaatggggaaacttattgtccacacaacaaaagaaattataattttatgttataatggaaattaggcagcattaagcctgtgagtgtaggaggccattcacatttaaaactggtatatagttgagcttttatatgaactctccaataaatacaagagaactggggtgacagagagtcaggcagcttgattcactagattttttgtatagtctcggagtagtgaaaatactacaccataatacttacaaagtaaccctaatgaagaatatcaatctgayagaaaactcctacaattacatcatgtttggctatggttacgtccaaacatagtttcgaacagaatttataaaattgtagggctatttccatattggaaaatgtatgtctgtctagtaaaat

SEQ ID NO: 585867 - DNA, 533 bp, Homo sapiens
ggaaaggaacggaatacaatttaatggaatggaatggaatcaacccgagtggaatggaatggaatggaatggaatacaatgcaatggaatggaaccaataagagtggaatggattggaatggaatggagtggaatgaaacggaatggaatcaaccagagtrgaatggaatggaatggaaaggaatggaatggaatgaaatgaaattgaaacaatccgcgtggaatggaatagaatggaatggaaacaaactgagtggaatggaatggaatggaatggaatggaatggaatggaatggaatggaatggaatcaactcgaaaggaattgaatggaatggattggaatggaaacaaaccgtttggaatggaatggaatgtattggaatggaatggaattgattggaatggaatggaatggaatggaatcaacttgagtggaatggaatggattggaatggaatggaatggaatggaatgaaatgaacccgattggaatgggatggaatggaatggaaaggaatggaatggcatgga

SEQ ID NO: 585868 - DNA, 533 bp, Homo sapiens
ggaaaggaacggaatacaatttaatggaatggaatggaatcaacccgagtggaatggaatggaatggaatggaatacaatgcaatggaatggaaccaataagagtggaatggattggaatggaatggagtggaatgaaacggaatggaatcaaccagagtagaatggaatggaatggaaaggaatggaatggaatgaaatgaaattgaaacaatccgcrtggaatggaatagaatggaatggaaacaaactgagtggaatggaatggaatggaatggaatggaatggaatggaatggaatggaatggaatcaactcgaaaggaattgaatggaatggattggaatggaaacaaaccgtttggaatggaatggaatgtattggaatggaatggaattgattggaatggaatggaatggaatggaatcaacttgagtggaatggaatggattggaatggaatggaatggaatggaatgaaatgaacccgattggaatgggatggaatggaatggaaaggaatggaatggcatgga

SEQ ID NO: 585869 - DNA, 533 bp, Homo sapiens
ggaaaggaacggaatacaatttaatggaatggaatggaatcaacccgagtggaatggaatggaatggaatggaatacaatgcaatggaatggaaccaataagagtggaatggattggaatggaatggagtggaatgaaacggaatggaatcaaccagagtagaatggaatggaatggaaaggaatggaatggaatgaaatgaaattgaaacaatccgcgtggaatggaatagaatggaatggaaacaaactgagtggaatggaatggaatggaatggaatggaatggaatggaatggaatggaatggaatcaactcgaaaggaattgaatggaatggattggaatggaaacaaaccgtttggaatggaatggaatgkattggaatggaatggaattgattggaatggaatggaatggaatggaatcaacttgagtggaatggaatggattggaatggaatggaatggaatggaatgaaatgaacccgattggaatgggatggaatggaatggaaaggaatggaatggcatgga

SEQ ID NO: 585870 - DNA, 533 bp, Homo sapiens
ggaaaggaacggaatacaatttaatggaatggaatggaatcaacccgagtggaatggaatggaatggaatggaatacaatgcaatggaatggaaccaataagagtggaatggattggaatggaatggagtggaatgaaacggaatggaatcaaccagagtagaatggaatggaatggaaaggaatggaatggaatgaaatgaaattgaaacaatccgcgtggaatggaatagaatggaatggaaacaaactgagtggaatggaatggaatggaatggaatggaatggaatggaatggaatggaatggaatcaactcgaaaggaattgaatggaatggattggaatggaaacaaaccgtttggaatggaatggaatgtattggaatggaatggaattgattggaatggaatggaatggaatggaatcaacttgagtggaatggaawggattggaatggaatggaatggaatggaatgaaatgaacccgattggaatgggatggaatggaatggaaaggaatggaatggcatgga

SEQ ID NO: 585871 - DNA, 309 bp, Homo sapiens
attggaatggaatggaatggaatggaatggaatggaatggaatggaatggattcaaatggactggaatggaatgcagtcaacacgagtggaatggtatggaatctaatggaatggaatgcaatcaaccaaactggaattgaatgcaaaggaatgtaatggaatggagtggawtcaacatgagtggaatgcaatggaatggaatggaatggaatggaatggaatgaaatgtaatcaaactgtgtggaacggaatggaatggaatggaatggagtcaacccgagtagaatggaatggaatggaatggattg

SEQ ID NO: 585872 - DNA, 309 bp, Homo sapiens
attggaatggaatggaatggaatggaatggaatggaatggaatggaatggattcaaatggactggaatggaatgcagtcaacacgagtggaatggtatggaatctaatggaatggaatgcaatcaaccaaactggaattgaatgcaaaggaatgtaatggaatggagtggaatcaacatgagtggaatgcaatggaatggaatggaatggaatggaatggaatgaaatgtaatcaaactgtgtkgaacggaatggaatggaatggaatggagtcaacccgagtagaatggaatggaatggaatggattg

SEQ ID NO: 585873 - DNA, 287 bp, Homo sapiens
ggaaagcaatggaatggaatggaatggaatggaatggattygaatggaattgaatggaatgcagtcaacccgagtggaatggtatggaatctaatggaatggaatgcaatcaacccaactggaattgaatgcaaaggaatttaatggaatggaatggaatcaacacgagtggaatgcaatggaatggaatagaatggaatggaatggaatgaaatgtaatcaaactgtgtggaacggaatggaatggaatggaatggagtcaacccaagtagaatggaatggaatgg

SEQ ID NO: 585874 - DNA, 287 bp, Homo sapiens
ggaaagcaatggaatggaatggaatggaatggaatggatttgaatggaatkgaatggaatgcagtcaacccgagtggaatggtatggaatctaatggaatggaatgcaatcaacccaactggaattgaatgcaaaggaatttaatggaatggaatggaatcaacacgagtggaatgcaatggaatggaatagaatggaatggaatggaatgaaatgtaatcaaactgtgtggaacggaatggaatggaatggaatggagtcaacccaagtagaatggaatggaatgg

SEQ ID NO: 585875 - DNA, 287 bp, Homo sapiens
ggaaagcaatggaatggaatggaatggaatggaatggatttgaatggaattgaatggaatgcagtcaacccgagtggaatggtatggaatctaatggaatggaatgcaatcaacccaactggaattgaatgcaaaggaatktaatggaatggaatggaatcaacacgagtggaatgcaatggaatggaatagaatggaatggaatggaatgaaatgtaatcaaactgtgtggaacggaatggaatggaatggaatggagtcaacccaagtagaatggaatggaatgg

SEQ ID NO: 585876 - DNA, 609 bp, Homo sapiens
aagggtgaagattaactgatttctcaggtaaataatctattcctatgatttattaattcaacaaatactgaagtgctgtgtgcttgctggccacgaccctgggtataaagacagatacacccacccccactgccttgggtcccaggggtcttatatccaactgggaagacaataaacacaccaataaaatgttatcaatgacaacagcagcatattaagtgccaaatttgtggtgcgggcaataattgctacagaagttcatgggaaggaaagatcaatgcttggatatcactgtgggctccagtagtgaggggaggtcacctgargatgcaggactaacactggtcttaaaggaaagggtgatttggattaaacacagggaaagacagaacttgaagctgagtcagccataatggtgagtcctagcagtgaacaggtagggactggggaggcaggatgcaggcagattgttgagactttcaactgtctatttgaggaacttgggcttcatctggtaggtgctatggaaaaaaaatgtaagataatgagttggttaaaacaatgttttaggccaggcacagtggcgcactcctgtaatcccagcacttt

SEQ ID NO: 585877 - DNA, 609 bp, Homo sapiens
aagggtgaagattaactgatttctcaggtaaataatctattcctatgatttattaattcaacaaatactgaagtgctgtgtgcttgctggccacgaccctgggtataaagacagatacacccacccccactgccttgggtcccaggggtcttatatccaactgggaagacaataaacacaccaataaaatgttatcaatgacaacagcagcatattaagtgccaaatttgtggtgcgggcaataattgctacagaagttcatgggaaggaaagatcaatgcttggatatcactgtgggctccagtagtgaggggaggtcacctgaggatgcaggactaacwctggtcttaaaggaaagggtgatttggattaaacacagggaaagacagaacttgaagctgagtcagccataatggtgagtcctagcagtgaacaggtagggactggggaggcaggatgcaggcagattgttgagactttcaactgtctatttgaggaacttgggcttcatctggtaggtgctatggaaaaaaaatgtaagataatgagttggttaaaacaatgttttaggccaggcacagtggcgcactcctgtaatcccagcacttt

SEQ ID NO: 585878 - DNA, 652 bp, Homo sapiens
ttttttaatagtatcatggtgacagttaaattgaggtgccatttagagatcaatcattcagaatttaagaaaaccaaatattctaaatgaatgcacaatgagctccttatgccaacaattgtctgttacagtttttcaaactaacatgaaaaagccgagccaggtgcagtgatgtgtgcctgtaktcccacctctctacctggaaggatccacttaagcccaggagatcaagaccagtctggcaacacagcaagacctcatctcagaaacagacaaacaaacaaacaaagctactgaagcatcttataggataaattatatattgcattggctaaaggaggacactcaataactaagagcttaataaaaccatgtagagttgacattttcaaaatgcctgctgaatgaaaagtcagtaaaataaatcacagcaccaccactttcacaagttacagtaacttgtgaaattaaacatgtagctgcaaatatgaaaactgagttagtccaggagtggtggctcacacctgtaatcccagccctttggaatgccaaggcgggcagatcacctgaggtcaggggtttgagaccagcctggccaacatggtgaaaccctgcctctactaaaaatacaaaaattagtcaggcatggtgg

SEQ ID NO: 585879 - DNA, 544 bp, Homo sapiens
ttggggagtagggctgaaagtcctaaccgtctaatcacatggttgattttcctggcaatcaatccccatccaaagctgtctagggcctcccaccatgagttatcttgttagcatacaaaagacattcttatctcagttttttttttaatactttaagttctgggatatatgtgcagaatgtgcatgtttgttacatagatatacatgtgccacagtggtttgctgcatccatcaacccattagctaggttttaagccctgcatgcattaggtatttttcctaatgctaccctccccttgccccaaccccctgacaggacccggtgtgtgatgttctcctcccygtgtcaatgtgttctcattattcaactcccacttatgagtgagaacatgaggtgtttggtttcctattcctgtgttagtttgctgagaatgatggttttcagtttcatccatgtccctgcaaaggacatgaactaatccttttttatggctgcatagtattccatggtgtataaagatttcatatgcttgttggctgcata

SEQ ID NO: 585880 - DNA, 575 bp, Homo sapiens
aataataataataataataataataataataataatacaaaattagatgggcatggtggcacatgcctataatcccagctactcggcggggctgaggcaggagaattgcttgaactcaggaggccaaggttgcggtgagccgagattgcgccattgcactcaagcctgggcaacaagagtgaaactccgtctcaaaaaaaaaaaaaaaagtttcaaatgtcaattttttttaaaggaatagcctatgtttattaagtactcaattgtgactgattcaaatgcccaaaaaactttcattagaccagacccattcctatgggcatgctttccttgaggctgagtgttttgctaagcagacaggaaagtttaatagaaagtggggcttgcagacaaccagactttgaaactcggctccatcacatacttctrtgaagtcctgggcacatccctgaacttctcttaatttcagtttcctgatctctgaagtagagatagttaggattacctttcaagttattgtcactaaatgaaatgacttaggaaaaatgttatctgattcaagcagcacaactgga

SEQ ID NO: 585881 - DNA, 534 bp, Homo sapiens
tgagttgtgatcccaacatcctctataaaattctagcatatttagcacacagtatggtaaaataatacactactatcaggtatatatttaacaatagttcatgacmcagaaaacaaacttttagtaaacaaggaatagaataaattttccttaatataatttactctaaccaaatatttcccttaaaatcaaacaggagataaatcataataccttcattagtatgtgcatttgctcttaatgttcttcactaggagagcttaagtgattttcacagggttactcaataggcaggtgaaagagttgatatcccacagagcaagctctggctctgaagcctgaaatttctgtattattcttagccctcagaggtggatatcctcagttttttcttagtcagcatccttcccattttctggcaagatttttgggaaattatctctcacctgtcagatagaatcttgatggcctaacaatcaagccatcccgccctctggccagggagtaggcatacaaccaataaatgggacttcc

SEQ ID NO: 585882 - DNA, 481 bp, Homo sapiens
aaacatgaattactagacaaagaaggcctataaaaaataagcctaattttttattagcttcaacagacagaaaataattctactgaatttctataaaggtttctataagtctattctcattgcatatggttaaactgtatgcgacccatgctttgggtagcactgcaaaaaaaaacaaaaacaaaaacaaaaacaaaaacmaaaacaaaacgtgatatgccagtgctcaaatacatgttttgtgtttgggtcagtattcttctactttacatcatcgtcttttcaatctaaatgttctgagccccaatttatatatatatgaaatgcacatattaactcgactcttgtggaattcacaggattttaaatacatttagaagatatacagtggaactttgaaagctataaagagcaaaaatatattaatagttttggcctgaaaattttatcttgaaacagatataagctgatataagcaatg

SEQ ID NO: 585883 - DNA, 481 bp, Homo sapiens
aaacatgaattactagacaaagaaggcctataaaaaataagcctaattttttattagcttcaacagacagaaaataattctactgaatttctataaaggtttctataagtctattctcattgcatatggttaaactgtatgcgacccatgctttgggtagcactgcaaaaaaaaacaaaaacaaaaacaaaaacaaaaacaaaaacaaaacgtgatatgccagtgctcaaatacatgttttgtgtttgggtcagtattcttctactttacatcatcgtcttttcaatctaaatgttctgagccccaatttatatatatatgaaatgcacatattaactckactcttgtggaattcacaggattttaaatacatttagaagatatacagtggaactttgaaagctataaagagcaaaaatatattaatagttttggcctgaaaattttatcttgaaacagatataagctgatataagcaatg

SEQ ID NO: 585884 - DNA, 373 bp, Homo sapiens
cagcagccccagtcagagacctatagataaaacccccatctccctggaacagagcacctaggggaaagggcgcctgtgggcacagcttcagcagacttaaagcatctttgaaaagcctgatggctctgaagagagcagcagatctcccagcacagtattcgagctctgataagggtcagactgcctcctcaagtgggtccctracccccgtgtatcctgactgggagacacctccccagtaggtgccaacaggcacctcatacaggagagctctggctggcatctggtgggtgcccctcttggacaaaacttccagaggaagaaacaggcagcaatctttgctgttctccagcctccgctggtgatgcccagg

SEQ ID NO: 585885 - DNA, 612 bp, Homo sapiens
tcagtgcacttcatcaaggaaatatacaaagatattcacaccaagacacactacgtttcaaattgtcaaaaggcaaagcgaatgtttgaaagcagcaagagaaaggcaacgcgtcatttacaaaggatcctcaataagtttgacagcagatagtgcattataatccatggatgccagaagagcttaggaaaaaggcaatgcatcatttacaaaggatyctcagtaagtttgacagcagagagctcattataaaccatgggtgccagaagagcttagaatgacattttaaagttctgaaagaaaaaaacactgtcaaccaaaaattctgtaacttggaagatgccccttcaagtattaaggataaattacacattcccagattaaaaaaaaaagagagagagaaagagaaagaaagaaagaagagagagaaagaaagggagagaaagaaaaagaaagaaagaaagaaagaaagaaaaggaaagaaagaaagaaagaaagaaagaaagaaagaaagaaagaaagaaagaaagaaagaaaaagaaagaaaagaaagaaagaaaagcaagcaagctttaaaagttcatgtttggtaggctgtacttcaagatacac

SEQ ID NO: 585886 - DNA, 612 bp, Homo sapiens
tcagtgcacttcatcaaggaaatatacaaagatattcacaccaagacacactacgtttcaaattgtcaaaaggcaaagcgaatgtttgaaagcagcaagagaaaggcaacgcgtcatttacaaaggatcctcaataagtttgacagcagatagtgcattataatccatggatgccagaagagcttaggaaaaaggcaatgcatcatttacaaaggatcctcagtaagtttgacagcagagagctcattataaaccatgggtgccagaagagcttagaatgacattttaaagttctgaaagaaaaaaacactgtcaaccaaaaattctgtaacttggaagatgccccttcaagtattaaggataaattacacattcccagattaaaaaaaaaagagagagagaaagagaaagaaagaaagaagagagagaaagaaagggagagaaagaaaaagaaagaaagaaagaaagaaagaaarggaaagaaagaaagaaagaaagaaagaaagaaagaaagaaagaaagaaagaaagaaagaaaaagaaagaaaagaaagaaagaaaagcaagcaagctttaaaagttcatgtttggtaggctgtacttcaagatacac

SEQ ID NO: 585887 - DNA, 612 bp, Homo sapiens
tcagtgcacttcatcaaggaaatatacaaagatattcacaccaagacacactacgtttcaaattgtcaaaaggcaaagcgaatgtttgaaagcagcaagagaaaggcaacgcgtcatttacaaaggatcctcaataagtttgacagcagatagtgcattataatccatggatgccagaagagcttaggaaaaaggcaatgcatcatttacaaaggatcctcagtaagtttgacagcagagagctcattataaaccatgggtgccagaagagcttagaatgacattttaaagttctgaaagaaaaaaacactgtcaaccaaaaattctgtaacttggaagatgccccttcaagtattaaggataaattacacattcccagattaaaaaaaaaagagagagagaaagagaaagaaagaaagaagagagagaaagaaagggagagaaagaaaaagaaagaaagaaagaaagaaagaaaargaaagaaagaaagaaagaaagaaagaaagaaagaaagaaagaaagaaagaaagaaagaaaaagaaagaaaagaaagaaagaaaagcaagcaagctttaaaagttcatgtttggtaggctgtacttcaagatacac

SEQ ID NO: 585888 - DNA, 405 bp, Homo sapiens
gggaacaacacacaccagggcctctcagggggacagggggtaggagaccatcaggacaaacacgtgggtacatggaggggaacaacacacaccagggcctctcagggggacagggggtaggagaccatcaagacaaacacgtggatacatggaggggaacaacacacaccagggcctctcagggggacrgggggtaggagaccatcaggacagacacgtggatacatggaggggaacaacacacaccagggcctctcagggggacagggggtaggagaccatcaggacaaacacgtgggtacatggaggggaacaacacacaccagggcctctcagggggacagggggtaggagaccatcaggacaaacacgtgggtacatggaggggaacaacacacaccaggg

SEQ ID NO: 585889 - DNA, 405 bp, Homo sapiens
gggaacaacacacaccagggcctctcagggggacagggggtaggagaccatcaggacaaacacgtgggtacatggaggggaacaacacacaccagggcctctcagggggacagggggtaggagaccatcaagacaaacacgtggatacatggaggggaacaacacacaccagggcctctcagggggacggggggtaggagaccatcargacagacacgtggatacatggaggggaacaacacacaccagggcctctcagggggacagggggtaggagaccatcaggacaaacacgtgggtacatggaggggaacaacacacaccagggcctctcagggggacagggggtaggagaccatcaggacaaacacgtgggtacatggaggggaacaacacacaccaggg

SEQ ID NO: 585890 - DNA, 405 bp, Homo sapiens
gggaacaacacacaccagggcctctcagggggacagggggtaggagaccatcaggacaaacacgtgggtacatggaggggaacaacacacaccagggcctctcagggggacagggggtaggagaccatcaagacaaacacgtggatacatggaggggaacaacacacaccagggcctctcagggggacggggggtaggagaccatcaggacaracacgtggatacatggaggggaacaacacacaccagggcctctcagggggacagggggtaggagaccatcaggacaaacacgtgggtacatggaggggaacaacacacaccagggcctctcagggggacagggggtaggagaccatcaggacaaacacgtgggtacatggaggggaacaacacacaccaggg

SEQ ID NO: 585891 - DNA, 419 bp, Homo sapiens
acatcaactcagtataaattttgacttgaatggaaatgttatgtctgagggttcccagttttgctaatgacacacttaattgacaatataattgtgacactgaagagtgtgaaattaaaatcttargaagtatgcaaactaatagcatgattctctgtgtgaacaaagcggtttaactgaatagtaccttatttatgattggcttttcatacctagataattctgtctggtatctaatggaaaaactgatctaaaaatgattaacgaccatttgccactttaataaaaattgtcaaaaacagatattgatgatatttctaaaaattattaaggggaatagagcagcatttcacaactagattccaaggattgtggtctggacagcacaaaccacatattttcatccattgtctagatct

SEQ ID NO: 585892 - DNA, 419 bp, Homo sapiens
acatcaactcagtataaattttgacttgaatggaaatgttatgtctgagggttcccagttttgctaatgacacacttaattgacaatataattgtgacactgaagagtgtgaaattaaaatcttaagaagtatgcaaactaatagcatgattctytgtgtgaacaaagcggtttaactgaatagtaccttatttatgattggcttttcatacctagataattctgtctggtatctaatggaaaaactgatctaaaaatgattaacgaccatttgccactttaataaaaattgtcaaaaacagatattgatgatatttctaaaaattattaaggggaatagagcagcatttcacaactagattccaaggattgtggtctggacagcacaaaccacatattttcatccattgtctagatct

SEQ ID NO: 585893 - DNA, 419 bp, Homo sapiens
acatcaactcagtataaattttgacttgaatggaaatgttatgtctgagggttcccagttttgctaatgacacacttaattgacaatataattgtgacactgaagagtgtgaaattaaaatcttaagaagtatgcaaactaatagcatgattctctgtgtgaacaaagcrgtttaactgaatagtaccttatttatgattggcttttcatacctagataattctgtctggtatctaatggaaaaactgatctaaaaatgattaacgaccatttgccactttaataaaaattgtcaaaaacagatattgatgatatttctaaaaattattaaggggaatagagcagcatttcacaactagattccaaggattgtggtctggacagcacaaaccacatattttcatccattgtctagatct

SEQ ID NO: 585894 - DNA, 419 bp, Homo sapiens
acatcaactcagtataaattttgacttgaatggaaatgttatgtctgagggttcccagttttgctaatgacacacttaattgacaatataattgtgacactgaagagtgtgaaattaaaatcttaagaagtatgcaaactaatagcatgattctctgtgtgaacaaagcggtttaactgaatagtaccttatttatgattggcttttcatacctagataattctgtctggtatctaatggaaaaactgatctaaaaatgattaacgaccatttgccactttaataaaaattgtcaaaaacagatattgatgatatttctaaaaattattaaggggaatagagcagcatttcacaactagattccaasgattgtggtctggacagcacaaaccacatattttcatccattgtctagatct

SEQ ID NO: 585895 - DNA, 597 bp, Homo sapiens
ttgcttctattatcgcccttttggactcacagagtttctttgaaaagcacagatgataataaatggaaatattgccttttatactatacaataatatacacatgcaattcactggaaaaagtatacttgttactatgatttgaggatactaccatatactaatcaagagaaacacatgtacagaacaaagaaggcacatgaaatttttactagtgtgtgttttccttgtgttctaccaccccaggagcagcttctgctactgaagrtcacagtagagttatttccaaaagttgtgggtctgcagggtggacttatcacatagctgtttgccaaaattcaaagtccagaaaccatttccaaattttcacctcttttatcttcaaatcctaaaactatgaaaattcacaaacttagctccatacattatggtagaaaggttaataatttggactttgaggttgaccaggcctgatttttgaataaattcacaaacttacctccatacattatggtagaaaggtcaataatctggactttgaggtctaccaggcctgatttttggatccaggctgcaacactcacttgctgtgttaacgt

SEQ ID NO: 585896 - DNA, 597 bp, Homo sapiens
ttgcttctattatcgcccttttggactcacagagtttctttgaaaagcacagatgataataaatggaaatattgccttttatactatacaataatatacacatgcaattcactggaaaaagtatacttgttactatgatttgaggatactaccatatactaatcaagagaaacacatgtacagaacaaagaaggcacatgaaatttttactagtgtgtgttttccttgtgttctaccaccccaggagcagcttctgctactgaaggtcacagtagagttatttccaaaagttgtgggtctgcagggtggacttatcacatagctgtttgccaaaattcaaagtccagaaaccatttccaaattttcacctcttttatcttcaaatcctaaaactatgaaaattcacaaacttagctccatacattatggtagaaaggttaataatttggactttgaggttgaccaggcctgatttttgaataaattcacaaacttacctccatacattatggtagaaaggtcaataatctggactttgaggtckaccaggcctgatttttggatccaggctgcaacactcacttgctgtgttaacgt

SEQ ID NO: 585897 - DNA, 567 bp, Homo sapiens
atacttactacccccagctcctcctccacaatatccttacacaagtatctagaatattcaaagactaataatattatataattatttataataattgtattacaaaaataaaacatgatgacctttataaaaatactagaagaaaaagggaaaattacataaggtacagaacatacaaattataccatgaagcagtaaaaaayaggatcaaattttctatgttttttaaaaatatgccttctctaaaatgttttctctctgaaatgatatttagaagacataattgaaaataaatacaaaataaagtgataaaaaataatctggcaaaattcaggatgtaatgagtaaagacaaccatgaaagaaatgaagatcaataaaagcaggaaaaaaagtgggaagtggagagaataatgctgctaaaaacacagataagaatataaatgacaggcttaaatatatcctgagcaaaacaaaatagaaaacacaagaaggtgaaatgtaacattaaagtcaggtccaacaaatgagaaattagtgtgaaagagctcacaatatctggttaaaa

SEQ ID NO: 585898 - DNA, 603 bp, Homo sapiens
ggatttgatgtgagtcagagaagtttcccctaagaaagcaacactggagctgagatctaaagggtaaacagcagttaactgagtggagaacaaaggttttcctgcagggggaacaatctgctccgcgaggccagagtggggccttgggagttgtgcctgaaaccacattgtgaggaagtgaggggaagcattgtgcagataatgctgaaataagtagtggaagatgcttcctaagagaatgagaaatccaagactactaagcagaagaatgatttgaccagatttcacatttgyaaatatcactatggttacaatgtatagaatggattttaaggaattcaaattggatacaggtgagtcaattacaaagcaacatgcttgccaaggcaagaaatttgattacttaaactagatatgggagttttggaaataagtagataaatttgtcatatatttgagataataaatcaccatgacttgatggtagacttagttggagatgccctcactagtgcaccatctaatgcttcaagtctaataattattcaattcctccagagccaccaatccaatggttctaccatatttatgctgtcattcact

SEQ ID NO: 585899 - DNA, 444 bp, Homo sapiens
  misc_feature 426, 427, 428, 429, 430, 431, 432, 433, 434, 435, 436, 437,438, 439, 440, 441, 442, 443, 444: n = A,T,C or G
catcagctcttgtgagacttattcaagaccacgagaacagtatgggggaaatactcctgtgattcagttatctcccgttggatccctcccacaagacacggaaattatgggagctacaattcaagatgagatttgggtggggacacagccaaaccatattgctgctgaatagatcatgtagacaggctctcaaactacacggagagcaagagaggcccaccttaccacaacatttcatccaatccactaataaaacaggcacatcactgaagccaccttcaactctccagactacccagctgccagctgaataccacagatggctacagttaataccacayggagcagaatcacgtagctaagccctgcttgcgctaatacaagtccacaatttttttaagtttgttgttttaagctgctaagttnnnnnnnnnnnnnnnnnnn

SEQ ID NO: 585900 - DNA, 444 bp, Homo sapiens
  misc_feature 426, 427, 428, 429, 430, 431, 432, 433, 434, 435, 436, 437,438, 439, 440, 441, 442, 443, 444: n = A,T,C or G
catcagctcttgtgagacttattcaagaccacgagaacagtatgggggaaatactcctgtgattcagttatctcccgttggatccctcccacaagacacggaaattatgggagctacaattcaagatgagatttgggtggggacacagccaaaccatattgctgctgaatagatcatgtagacaggctctcaaactacacggagagcaagagaggcccaccttaccacaacatttcatccaatccactaataaaacaggcacatcactgaagccaccttcaactctccagactacccagctgccagctgaataccacagatggctacagttaataccacacggagcagaatcacgtagctaagccctgcttgcrctaatacaagtccacaatttttttaagtttgttgttttaagctgctaagttnnnnnnnnnnnnnnnnnnn

SEQ ID NO: 585901 - DNA, 469 bp, Homo sapiens
tgatgtaaacattttttatttattttattttattgtttttttcagacagagtctcactctgtcacccaggttggagtgcagtggcatgatctcagcttacttgcaacctctgcctcctgggttcaagcaattctcatrgctcagcctccctagtagctgggattgcaggcacacaccaccatgcctggctaaaaatttttgtatttttagtagagacagggtttcaccatgttggccagggtggtcttgaactgctgacctcaggtgatccacctgccttggcctcccaaagtgctgggattaccggtgtgaaccaccacgcctggtcatatatattgtttatgaacataattttaaaagacttcagaaatcatcttgtgttccatattttagttaacctttccccagtgttttgatatttgcattgctctctgcccccatattaaagtggtgacctgagccttccctg

SEQ ID NO: 585902 - DNA, 565 bp, Homo sapiens
ccagctatttactgcttggaatgaatcccaggtcaaataaaaaaaaaaggtccaaatgaatataaatgttatgactaagagcatatgagttcttaagatataaaactactgaatatctgtagtgtaagagaaaatgtccttgattggttccaaacagaagggtaataaaatacggaatgtagaagaggcatttgagacttaggttcaacacaaatgcactagtaagacttaatcagatattgagcacagagtcaaatattcactctcaaaattgggcaattatcaaatttggggaagctaagggagtagataaatatcagaaaaattgatctgtgtttttaggatcatggaattcttcagatgggaatatctgaataaaccactcactcaatgcttgctgtcagaattgttctattaaaagtctccagcataaaaacatttttaaaaggccatcttctctgcccaacctacattctgcctcctccttctcccaccattcacttttcacaatggacattgaaatatgacctccgaaatctgaacyagaagcaaacaaaaaggaaac

SEQ ID NO: 585903 - DNA, 453 bp, Homo sapiens
attccattccattacattcgtattgattctattcaattcccttacactccattacattccattccattcgggttgtttccattccattccattccattccactccattccattgcaatcgggttgattccawtccattccattccattccattccgttccattccattccattccattctgttcaggttaattccattccattccattcccttccattcccttccattccattccattccattccatcccattgcaatcgagttgattccattgcattcgattccattccattccattccattgcattccattccattacattccattccattgaattccattccattccattcccctgcactcagattgattccattccatcccattacattccattccgttccattccattccattccattctattcgagttaattccattccattccatt

SEQ ID NO: 585904 - DNA, 453 bp, Homo sapiens
attccattccattacattcgtattgattctattcaattcccttacactccattacattccattccattcgggttgtttccattccattccattccattccactccattccattgcaatcgggttgattccaatccattccattccattccattccgttccattccattccattccattctgttcaggttaattccattccattccattccmttccattcccttccattccattccattccattccatcccattgcaatcgagttgattccattgcattcgattccattccattccattccattgcattccattccattacattccattccattgaattccattccattccattcccctgcactcagattgattccattccatcccattacattccattccgttccattccattccattccattctattcgagttaattccattccattccatt

SEQ ID NO: 585905 - DNA, 453 bp, Homo sapiens
attccattccattacattcgtattgattctattcaattcccttacactccattacattccattccattcgggttgtttccattccattccattccattccactccattccattgcaatcgggttgattccaatccattccattccattccattccgttccattccattccattccattctgttcaggttaattccattccattccattcccttccattcccttccattccattccattccattccatcccattgcawtcgagttgattccattgcattcgattccattccattccattccattgcattccattccattacattccattccattgaattccattccattccattcccctgcactcagattgattccattccatcccattacattccattccgttccattccattccattccattctattcgagttaattccattccattccatt

SEQ ID NO: 585906 - DNA, 453 bp, Homo sapiens
attccattccattacattcgtattgattctattcaattcccttacactccattacattccattccattcgggttgtttccattccattccattccattccactccattccattgcaatcgggttgattccaatccattccattccattccattccgttccattccattccattccattctgttcaggttaattccattccattccattcccttccattcccttccattccattccattccattccatcccattgcaatcgagttgattccattgcattcgattccattccattccattccattgcattccattccattacattccattccattgmattccattccattccattcccctgcactcagattgattccattccatcccattacattccattccgttccattccattccattccattctattcgagttaattccattccattccatt

SEQ ID NO: 585907 - DNA, 468 bp, Homo sapiens
aatccacattcagaaattgcaggttatattctgagttagacaatgtgaacctctaatgggaatgacttgttttcaataaaatttcaaaagggggttgtgtctgtatgtgtgcctgaaattaagtccaagactgggtttttgttgctgtgttttctgatatagccctaatggccaacacagcatttcacctatagcatgtgccaaataaacatatgcagaacaacctaataaaatgaaatggagaaaatgggaagaaacataagttyatttgaaatctgacatctcatgttccaactaaactctacatccatcctatttccacctatgtagtatcatgagttccctgtgtgggctgttacggcagctctgcccacaccgtccttatctttctggagtgcttcgtctgttccttttcaagcttcctattgttccttttaagtgtgcttaactaagtgggccacccatcat

SEQ ID NO: 585908 - DNA, 526 bp, Homo sapiens
tccttctcaggttcctttcttcaggtctaatgtcccctgctacattttcagatgggttccttctctatcactaatctwcatggggtcattaaagtgagtgccccagataatattctctttgctttcatcaagagcttcattatgcttttgggaacattacatataagcaattataagtgcatatatttcctatgctttagttaagactgatttgtaaccttccttttcagatgttacagaggtgtaattgttgtcttagactttggtttgtagatctaatatggtcatttgaatgcctgaatcattttgtaaccttttaataagcccagacctcgcatttattcaaatatgtctaaacttgtaaaagtactttctcctcttccttcttatgcttattgattcttacttccttcatcctttgcttactttttctagcttgtggttttattttcctctttctcccccttttcccttgttttcagatgtatctctccttcttcatttcttgctttcctttttcagtctt

SEQ ID NO: 585909 - DNA, 533 bp, Homo sapiens
tctgttctatttccaacttctcttcttccctcacaatcttgaaaccattcccatcaagctttcatccccgtcactccaccaacactgccactcttgaggccattaataatttccacaataccaaacgcatctgctcacccttggcctatctgcagcatttgacacggttaaccattctcttctccttcactttgacttcccactcytagttttcctttcaccttactgggttctcatgttcagtttcatatcctggcttttcttcttctgcatatctctaaataatagagtggcccggggataatctttagatctctttttgtgtctgcctactcctctctccctgggtgatcttcttccacttcacatgctggcaattttctttctttttttttttttgagacggagtctctctctgtcacgcaggctggagtgcagtggcgtgatctcggctcactgcaagctccgcctcccgggttcacgccattctcctgcctcagcctcctgagtagctgggactacaggcgcctgcc

SEQ ID NO: 585910 - DNA, 489 bp, Homo sapiens
tgtgcacgaaagctacatgcacatastgcaggcagtgcatgagtgtggtatgacattgtgcctctggactcctggagcccctctttcagttgcagccccttcaacctgcccttgaacaatgatcggcagaaagatgagaatgaaagagaagaaagagaatttcttccatacctttcaaaacttcaaagaagttgtccccagtctggttctgatgattcatgtctcagtgcaaagcacatataaatatctgaaatctgcacactgatcggaaatagtttttgggaagttggatttaatcccatgagccaaatgatcactaccaacagcaatcagggaaaaccaaagtccacagcaaattttaatttggcaaatgcataaaatgttcaaaagagcagaggtctcatttacattcctccctcttatatgggattttcttctatattagtaattaaagggtgcaggctatcgagcgcaactatatcacataat

SEQ ID NO: 585911 - DNA, 555 bp, Homo sapiens
gctggggggagctggggaaggttaatgagtacaaaaaaggtggttagaatgaataagacctactatttgatagcacaacagggttactatagtcaataataactgcacatcttaaaataatttaaagaatgtaattgaattgtttgtaactcaaaggataaatgcttgagcggatggataccccattctccatggtgtgtttatttcacattgcatgcctgtattaaacatctcatgtaccccgtaaatatatacacctactatgtactcacaaaaataaaaaataaaataagatttaaaaagtgtaataaggtgtcctggatgggatctcggaacagaacaaggacataaggtaaaaawctaaggaaatatggataaaatatagactttagttaatgataataatactgattcattaatctgaacaaagatgttaataatagggaaaactaggtagggagtatatggaaactctgtgttctcatctcaatttttttgtaaatctaaaaccatttttaaaaattgtctgttaaaaaacaggccaaactctactag

SEQ ID NO: 585912 - DNA, 497 bp, Homo sapiens
ctactcgggacgctgaggcaggagaattgcttgaacccaggaggcagtggttgcagtaagccgagatctgggtgacagagtgagaccttgtctcaaaaaaaaaaaaaaattattgtgaactccaaagaaattttgtgtatatgggttatatrtatccatatttaccatattagaaattaaaactgaaaataagttaaaatattaattcacttagaaataatagtaataaacccattacatgttaacatgaataatacatttttgaaaattaaaaacattttattttctgaaaaaattagtaggaagagtggcgttgttttatatttttgtaaacttctttaatgtctggtttattagaagatgactggattcttatagctgcttctgcatctaatttgttgggatgtgttgttttggttgaaattcatgaaaaaaaatctagcttgacacagatatgtagttggaaaagggaggaggagccttttcagataatcatg

SEQ ID NO: 585913 - DNA, 570 bp, Homo sapiens
ccacctctgcctcccaaagtgctggaattagaggcatgagccactgcgcctggcctgcaattttcatcttttggctgcaaataagttatgtcactattctcagctgggggagtgtttaactcacatgttgcttcctctctgttacacaggttttaagatttatgaataggtactgaattgtatcaattgcttttttctttcttgattgagcagtgttttttcttatctttttatgttgataaggtaacttaacagtgattggcttttgaatgttgaacattgcattttggaattaaatcaactttgttgtgataaatgattaataccatattatatatggttgagatgggtttgctcctagttcatttggtagttttgtacttacgttcacaagagaaagtggagtctaagtttttctgtgtgttttttttttttttttttttttttttgccacggagtctcgccctgttgtcyaggctggaatgcagtggcatgatctcggctcattgcaagctccgccttccgggttcacgccattctcctgcttcagcctcccgagtagttgggact

SEQ ID NO: 585914 - DNA, 520 bp, Homo sapiens
atatagactgaggtacagtgtctccagacacatcttcaattgctgctggaagattaagggaagctagcactctgaaaaaatgagatactatgttatattgaagtctaaaacaatttaactcatcaatatttaytttatttaatttaatcttctataaccaaatcaacagcaatggagttagcacccagaaaaactggataagccctatcaatgaaaaacaaagcaaagattaacagaaaaacaaaaaaatcagtgattgatacaattaaaccaaaatcattaaaaaattaagttcacaattcagaattaaaagccaaaaaataggctggtgcagtggctcacacctgtaatcccagcacttgggaggccaaggcaggcggatcacctgaggtcaggaattcaaggccagcctggccaacacggtgaaaccccatctctactaaaaatacaaaaattagtcaggcgtagtggtgagcacctataatcccagctacttgggaggctgaggcacaagaatcac

SEQ ID NO: 585915 - DNA, 520 bp, Homo sapiens
atatagactgaggtacagtgtctccagacacatcttcaattgctgctggaagattaagggaagctagcactctgaaaaaatgagatactatgttatattgaagtctaaaacaatttaactcatcaatatttactttatttaatttaatcttctataaccaaatcaacagcaatggagttagcacccagaaaaactggataagccctatcaatgaaaaacaaagcaaagattaacagaaaaacaaaaaaatcagtgattgatacaattaaaccaaaatcattaaaaaattaagttcacaattcagaattaaaagccaaaaaataggctggtgcagtggctcacacctgtaatcccagcacttgggaggccaaggcrggcggatcacctgaggtcaggaattcaaggccagcctggccaacacggtgaaaccccatctctactaaaaatacaaaaattagtcaggcgtagtggtgagcacctataatcccagctacttgggaggctgaggcacaagaatcac

SEQ ID NO: 585916 - DNA, 520 bp, Homo sapiens
atatagactgaggtacagtgtctccagacacatcttcaattgctgctggaagattaagggaagctagcactctgaaaaaatgagatactatgttatattgaagtctaaaacaatttaactcatcaatatttactttatttaatttaatcttctataaccaaatcaacagcaatggagttagcacccagaaaaactggataagccctatcaatgaaaaacaaagcaaagattaacagaaaaacaaaaaaatcagtgattgatacaattaaaccaaaatcattaaaaaattaagttcacaattcagaattaaaagccaaaaaataggctggtgcagtggctcacacctgtaatcccagcacttgggaggccaaggcaggcggatcacctgaggtcaggaattcaaggccagcctggccaacayggtgaaaccccatctctactaaaaatacaaaaattagtcaggcgtagtggtgagcacctataatcccagctacttgggaggctgaggcacaagaatcac

SEQ ID NO: 585917 - DNA, 530 bp, Homo sapiens
ctctgtagcccaagctggagtgcagtggtgcgatcttggctcactgcaacctctgcctcccaggctgaagtgattcttgtgcctcagcttcccatgtagctgggastacaggcatgcaccaccacacccagctaatttttgtatttttttttttttttagtagagatggggtttcaccatgttgaccagggtggtcttgaactcctgagctcaggtgatccacctacctcggcctcccaaagtgctgcgattacaggtgagagccactgtgcctggcctcaacttttgattattaaatttgtggaagaatttcaattatctttaacaattaacttttctatggactctttgattgaaatacatgttaatagtttaaggttaagcttacactaacaggaagaattttcctaaatcttaagaattatgttggaaatcatgcttatactgccccctgcagtttctctcaccttgaataattgtgattcattaccttaaaacaggataggttttcagatggacttcagttgggg

SEQ ID NO: 585918 - DNA, 570 bp, Homo sapiens
ccacctctgcctcccaaagtgctggaattagaggcatgagccacygcgcctggcctgcaattttcatcttttggctgcaaataagttatgtcactattctcagctgggggagtgtttaactcacatgttgcttcctctctgttacacaggttttaagatttatgaataggtactgaattgtatcaattgcttttttctttcttgattgagcagtgttttttcttatctttttatgttgataaggtaacttaacagtgattggcttttgaatgttgaacattgcattttggaattaaatcaactttgttgtgataaatgattaataccatattatatatggttgagatgggtttgctcctagttcatttggtagttttgtacttacgttcacaagagaaagtggagtctaagtttttctgtgtgttttttttttttttttttttttttttgccacggagtctcgccctgttgtccaggctggaatgcagtggcatgatctcggctcattgcaagctccgccttccgggttcacgccattctcctgcttcagcctcccgagtagttgggact

SEQ ID NO: 585919 - DNA, 545 bp, Homo sapiens
aattccttaaatactaattgtggattgaaatgactgaaatgttttaatggtctttattgcctagaaagagtatctggctgtatattttaaaaatgtgataatttgtattttcccaaatagtgaaaagtatactgatcttaactccatgcagtgaaggaggaagagacaaggcaaaagaaatatgtgtgtgtgtgtgtgtgtgtgtgtgtagtagtgtgttccacacacactaaagggaaytatgcagacatatcattttttagcttttcttagagactgataattttgtgtcgttttatttttctttaccaccgctacagacaagtgatgtcatcttaagactgtcacttctggacaacagaatgaggtgttttcttcatttaagtaaaggaggagcaggtgcaaaagttcctatctattaaattgaccaccttctccctttagagttttgggagggaaggtggctgcttctgtatgagaggttttctgcagtgtggaaatgcaaatgatattactccaaagtatattttgtttatcttcaaaat

SEQ ID NO: 585920 - DNA, 545 bp, Homo sapiens
aattccttaaatactaattgtggattgaaatgactgaaatgttttaatggtctttattgcctagaaagagtatctggctgtatattttaaaaatgtgataatttgtattttcccaaatagtgaaaagtatactgatcttaactccatgcagtgaaggaggaagagacaaggcaaaagaaatatgtgtgtgtgtgtgtgtgtgtgtgtgtagtagtgtgttccacacacactaaagggaattatgcagacatatcattttttagcttttcttagagactgataattttgtgtcgttttatttttctttaccaccrctacagacaagtgatgtcatcttaagactgtcacttctggacaacagaatgaggtgttttcttcatttaagtaaaggaggagcaggtgcaaaagttcctatctattaaattgaccaccttctccctttagagttttgggagggaaggtggctgcttctgtatgagaggttttctgcagtgtggaaatgcaaatgatattactccaaagtatattttgtttatcttcaaaat

SEQ ID NO: 585921 - DNA, 545 bp, Homo sapiens
aattccttaaatactaattgtggattgaaatgactgaaatgttttaatggtctttattgcctagaaagagtatctggctgtatattttaaaaatgtgataatttgtattttcccaaatagtgaaaagtatactgatcttaactccatgcagtgaaggaggaagagacaaggcaaaagaaatatgtgtgtgtgtgtgtgtgtgtgtgtgtagtagtgtgttccacacacactaaagggaattatgcagacatatcattttttagcttttcttagagactgataattttgtgtcgttttatttttctttaccaccgctacagacaagtgatgtcatcttaagactgtcacttctggacaacagaatgaggtgttttcttcatttaagtaaaggaggagcaggtgcaaaagttcctatctattaaattgaccaccttctccctttagagttttgggagggaaggtggctgcttctgtatgagasgttttctgcagtgtggaaatgcaaatgatattactccaaagtatattttgtttatcttcaaaat

SEQ ID NO: 585922 - DNA, 545 bp, Homo sapiens
aattccttaaatactaattgtggattgaaatgactgaaatgttttaatggtctttattgcctagaaagagtatctggctgtatattttaaaaatgtgataatttgtattttcccaaatagtgaaaagtatactgatcttaactccatgcagtgaaggaggaagagacaaggcaaaagaaatatgtgtgtgtgtgtgtgtgtgtgtgtgtagtagtgtgttccacacacactaaagggaattatgcagacatatcattttttagcttttcttagagactgataattttgtgtcgttttatttttctttaccaccgctacagacaagtgatgtcatcttaagactgtcacttctggacaacagaatgaggtgttttcttcatttaagtaaaggaggagcaggtgcaaaagttcctatctattaaattgaccaccttctccctttagagttttgggagggaaggtggctgcttctgtatgagaggttttctgcartgtggaaatgcaaatgatattactccaaagtatattttgtttatcttcaaaat

SEQ ID NO: 585923 - DNA, 570 bp, Homo sapiens
ccacctctgcctcccaaagtgctggaattagaggcatgagccactgcgcctggcctgcaattttcatcttttggctgcaaataagttatgtcactattctcagctgggggagtgtttaactcacatgttgcttcctctctgttasacaggttttaagatttatgaataggtactgaattgtatcaattgcttttttctttcttgattgagcagtgttttttcttatctttttatgttgataaggtaacttaacagtgattggcttttgaatgttgaacattgcattttggaattaaatcaactttgttgtgataaatgattaataccatattatatatggttgagatgggtttgctcctagttcatttggtagttttgtacttacgttcacaagagaaagtggagtctaagtttttctgtgtgttttttttttttttttttttttttttgccacggagtctcgccctgttgtccaggctggaatgcagtggcatgatctcggctcattgcaagctccgccttccgggttcacgccattctcctgcttcagcctcccgagtagttgggact

SEQ ID NO: 585924 - DNA, 570 bp, Homo sapiens
ccacctctgcctcccaaagtgctggaattagaggcatgagccactgcgcctggcctgcaattttcatcttttggctgcaaataagttatgtcactattctcagctgggggagtgtttaactcacatgttgcttcctctctgttacacaggttttaagatttatgaataggtactgaattgtatcaattgcttttttctttcttgattgagcagtgttttttcttatctttttatgttgataaggtaacttaacagtgattggcttttgaatgttgaacattgcattttggaattaaatcaactttgttgtgataaatgattaataccatattatatatggttgagatgggyttgctcctagttcatttggtagttttgtacttacgttcacaagagaaagtggagtctaagtttttctgtgtgttttttttttttttttttttttttttgccacggagtctcgccctgttgtccaggctggaatgcagtggcatgatctcggctcattgcaagctccgccttccgggttcacgccattctcctgcttcagcctcccgagtagttgggact

SEQ ID NO: 585925 - DNA, 524 bp, Homo sapiens
tttgagaccagcctgggcaatgtagtgagaccttgtctctacaaataatttttttttaaattagccaggcatggtggagcacctgtggttccagctactcaggatgctgagtgggaggatcgcttgagccctggcagtcaaggctgcagtgagccatgattgtaccattgcactcyagcctgtgagacagagcaagactccgtccaaaaaaaaaaaaagctaatgaaatacttaatcacttacaaggatacagaaaaggagggaggaaaaaaatagatgggatacatagaaaaccaaaatcaagatggtagaactaaatccaatcatattaataatcatattaaatgtaaataaactgttctaatttaaaagcagagattatctggctgtatacagaaacaaaacccaactataaccatttataagaaagatactttaaacataaagatgcagaagagattaaaaaaaaaggatggaaaaaatataccacacaaatgctaaacataatgtgactatactgataa

SEQ ID NO: 585926 - DNA, 524 bp, Homo sapiens
tttgagaccagcctgggcaatgtagtgagaccttgtctctacaaataatttttttttaaattagccaggcatggtggagcacctgtggttccagctactcaggatgctgagtgggaggatcgcttgagccctggcagtcaaggctgcagtgagccatgattgtaccattgcactccagcctgtgagacagagcaagactccgtccaaaaaaaaaaaaagctaatgaaatacttaatcacttacaaggatacagaaaagragggaggaaaaaaatagatgggatacatagaaaaccaaaatcaagatggtagaactaaatccaatcatattaataatcatattaaatgtaaataaactgttctaatttaaaagcagagattatctggctgtatacagaaacaaaacccaactataaccatttataagaaagatactttaaacataaagatgcagaagagattaaaaaaaaaggatggaaaaaatataccacacaaatgctaaacataatgtgactatactgataa

SEQ ID NO: 585927 - DNA, 371 bp, Homo sapiens
cccatttcatcacatagaatattgaaaagatgtgtatttaagagtggaggttcaataaaagtaatagattttgctattttgtcaaggatattctttagtgacgctttttgtttttcattctttttttactattattattctttaagttctgggatacatgtgcagaacgtgcaggtttgttacataggtatacatgtgtcatggtggtttgctgcacccatcaacccatcatctacattaggtatttmtcctaatgctatccctcccctagccctccactccctgacaggccccagtgtgtgatgtttccatccctgtgtccatgtgttcccattgctcagctcccacttacgagtgagaatatgtggtgt

SEQ ID NO: 585928 - DNA, 690 bp, Homo sapiens
tttcgaaatgcgcttcattgttcccccacccccttcatccccttctaaacaaacacccaatgacaaaaccaaagtgaccattgtagaggttaaaratctaaagcaaactctaccaattgaaacggtaccgagatgcaaatgcatggctggaatggattaaacattctgtccgctcgctaaacaaagcgattgttatgcttacgcacgtggtaagccagagccccagattgttccctttccactcggatcgtcctccagccaatcaggcattaagttgtatggcagctctcttccaagaccccacaacctggggcaataagctatgccaaactctctcgctgctgtttcctgaagtcccctgaagtccgacaccctgcgggtcagcccccgagggccatcaagcatccgtcttccaatgccaattttacctcgtgtctctcacagggggagaacttgaatttgcttggagacctaacgagatgcagtgagcttaagcccttccaggagcttaccaatcagtcgtcccttattcatccccaagcaaacgtatggtggtgttgtggtggaccattactgaatactctgccaagttacttggcgtggcacttgagctctaatccaattggctatctccctttcaccctggtatttcatccagaaaacatacataaaaacagaacatcatagaac

SEQ ID NO: 585929 - DNA, 690 bp, Homo sapiens
tttcgaaatgcgcttcattgttcccccacccccttcatccccttctaaacaaacacccaatgacaaaaccaaagtgaccattgtagaggttaaaaatctaaagcaaactctaccaattgaaacggtaccgagatgcaaatgcatggctggaatggattaaacattctgtccgctcgctaaacaaagcgattgttatgcttacgcacgtggtaagccagagccccagattgttccctttccactcggatcgtcctccagccratcaggcattaagttgtatggcagctctcttccaagaccccacaacctggggcaataagctatgccaaactctctcgctgctgtttcctgaagtcccctgaagtccgacaccctgcgggtcagcccccgagggccatcaagcatccgtcttccaatgccaattttacctcgtgtctctcacagggggagaacttgaatttgcttggagacctaacgagatgcagtgagcttaagcccttccaggagcttaccaatcagtcgtcccttattcatccccaagcaaacgtatggtggtgttgtggtggaccattactgaatactctgccaagttacttggcgtggcacttgagctctaatccaattggctatctccctttcaccctggtatttcatccagaaaacatacataaaaacagaacatcatagaac

SEQ ID NO: 585930 - DNA, 341 bp, Homo sapiens
tgacttcaccactcattcctcacccaacagttattgaagaaataaatataccagtgttttttcttttttataacaaaactcctgaaaagaggggtctttacttatagtctctgattttttttcatctcaaccccatggttaaggtttggytgtgttcccacccaaatttcatcttcaattgcagctcccatatttcccacgttttgtgggagggacccagtgggagataattgaattgtgggggtgatttctcttacactgttctcatggtagtgaacaagtctcacaagagctgatgattttataagggatttccccttttgcttggctctttcattcct

SEQ ID NO: 585931 - DNA, 531 bp, Homo sapiens
gcaggagaagagagtcatattatctaggtgattggtgaataaaatatttcaaaaccacctctgagagattggcctgggcaggagagtcccatcacctatgtgcttggcctaggtatatgtcacaatcccacatttagactggaccaaggcagaaaagtaaaatcaatccggtgctgggcacctcttgtgagttctgtccaagtacctaagtcacagtctcaacaatggacaggatctgtgcatgacagccccaacctcatttgcaagcagtgtcctaataggggacacacagcctcacaagggtgtttgatcttgattcaaaaatcaccgtcttacccrtgatctggatccatgtatgagaatcacacatccaactttcaattgcctccagctgtaagattcagaacattttgtaaattttgtttatcttttcaaaaaaactaacttttcattatgtttatcttttcatattttgttttatattcatttatttctgtgataatttttattttcttctaattttgggtttgg

SEQ ID NO: 585932 - DNA, 560 bp, Homo sapiens
tgcctgtgtaaaatgttgcccctattttatgacttgtatatttgctttttgttgttgttgttattagtcaatgattgttttattgttaattgtaaaaaatacaagggccaggcatggtggctcacacctgtaatccctgtactttggtaggtcaaggtgggcagatcacccgaggtcagaagttcaagaccagcctggccaacatggtgaaaccccatctctagtaaaaatacaaaattagccaggtgtggtggtgcgtgcctgtaatcccagctactctggaggccgaggcaggagaatcgcctgaacccgggaggcagaggttgcagttagccgagattgtgccactgtactccagcctaggcatcaaaagtaaaacttaatcttttaaaacaaacaaacaaamaaaaaatatatatatatatataaaatatagcaacatttataatctttaatgttttcaattatatagttcagctttgttaagtatattgagatggttagcaacatatctttagaacatttttatttttataaaagaaatgtggtatacacatgaa

SEQ ID NO: 585933 - DNA, 562 bp, Homo sapiens
aggagatagacagacacatatctatatagatagcaaaactaaaataaaatgttgagtgctgtagaggagatatgggggtgctcagagcagasagtgaacaactgctctgaggactgacaacacccacaatgagaaatggcacatggcctctcagcccatcacttgacagagccgtctatgtgccctactcccatcagtccatctgaaatacccaagactcattgttccattgctccctaaagatctctaggcaagatcatcacctcttacttgttgaatccagtatctatcaaccccggctatataatagaattacctaggggagccttaagctcatactaagccgggcacgatggcttacacctgtaatgccagcacttagccaaagtgggcagatcacctgaggttgggagttcaagaccagcctgaccaacatggagaaaccccatgtctactaaaaatacaaaattagccagatgtggtggcgcatgcctgtaattccagctactcgggagcctgaggcaggagaattgcttgaacccgggaggcagaggttgcagtg

SEQ ID NO: 585934 - DNA, 562 bp, Homo sapiens
aggagatagacagacacatatctatatagatagcaaaactaaaataaaatgttgagtgctgtagaggagatatgggggtgctcagagcagacagtgaacaactgctctgaggactgacaacacccacaatgagaaatggcacatggcctctcagcccatcacttgacagagccgtctatgtgccctactcccatcagtccatctgaaatacccaagactcattgttccattgctccctaaagatctctaggcaagatcatcacctcttacttgttgaatccagtatctatcaaccccggctatataatagaattacctaggggagccttaagctcatactaagccgggcaygatggcttacacctgtaatgccagcacttagccaaagtgggcagatcacctgaggttgggagttcaagaccagcctgaccaacatggagaaaccccatgtctactaaaaatacaaaattagccagatgtggtggcgcatgcctgtaattccagctactcgggagcctgaggcaggagaattgcttgaacccgggaggcagaggttgcagtg

SEQ ID NO: 585935 - DNA, 555 bp, Homo sapiens
caattctaagataccaggctctatttggcttccccatccccgctctgtagcctgaaaagcagctccagataataaattggggaaacagagctcagtaagtttgtttcccacctttcagtgaccacagtcttgcattgcctgttacctaattcctacaaattggtatttcgtatattgtccagttttctagttgcttaaaatagcaaggtaaatccagtccttgttattccatcactgctggacagaatatatactgtaaatcaagtaacagtttctcaattttgtatcttattgttatcactgttttgagacagggtctcactctcrcccaggctggagtgcagtggctcataactcactgcagcctcaaactcctgggctcaaggcatcctcccacataggcctcccaaagcgctgagattacaggcatttgccagccactacgccctcaatttagtatctaaaggcttagtcttcattcagctctacctctttataatagcagacaatatttttcttccttttttcttagaatttgctcttcttagtttgaca

SEQ ID NO: 585936 - DNA, 555 bp, Homo sapiens
caattctaagataccaggctctatttggcttccccatccccgctctgtagcctgaaaagcagctccagataataaattggggaaacagagctcagtaagtttgtttcccacctttcagtgaccacagtcttgcattgcctgttacctaattcctacaaattggtatttcgtatattgtccagttttctagttgcttaaaatagcaaggtaaatccagtccttgttattccatcactgctggacagaatatatactgtaaatcaagtaacagtttctcaattttgtatcttattgttatcactgttttgagacagggtctcactctcacccaggctggagtgcagtggctcatamctcactgcagcctcaaactcctgggctcaaggcatcctcccacataggcctcccaaagcgctgagattacaggcatttgccagccactacgccctcaatttagtatctaaaggcttagtcttcattcagctctacctctttataatagcagacaatatttttcttccttttttcttagaatttgctcttcttagtttgaca

SEQ ID NO: 585937 - DNA, 624 bp, Homo sapiens
atcttttcttcctcctttttcttacactggacaatttctattaatttatcttgaagttgactgatttcttctgctatctctaatatggtcttgggcccattgggtaatttttctatttgagttattttacgttttaactttagatttcccatttggttattttttatagtttatatttctctggtgagagtttctgctttttcactcattattaacatatttttaattaattatttccaaatattttctttttttatttgaacatatttatcatagcttcactgaagtcttggtcagctaacatgcaacatcggtgcccacctggagtcagyttccagtgactttttccctgcatatatgtttgatgtggttaggctctgtgtcaccacccaaaactcatcttgaattataatccccataatacccacttgtcaatagagagaccagatggtggtaattggataacatggtttccctcatgctgttctcatgatattgagtgagttgtcacgtgatctgatggttttataagtgtttagtagttccacctgtgttcattttccttcctgtgacctaaagaagaaggtgcctttcttcccctttcccttctgccatgattgtaag

SEQ ID NO: 585938 - DNA, 624 bp, Homo sapiens
atcttttcttcctcctttttcttacactggacaatttctattaatttatcttgaagttgactgatttcttctgctatctctaatatggtcttgggcccattgggtaatttttctatttgagttattttacgttttaactttagatttcccatttggttattttttatagtttatatttctctggtgagagtttctgctttttcactcattattaacatatttttaattaattatttccaaatattttctttttttatttgaacatatttatcatagcttcactgaagtcttggtcagctaacatgcaacatcggtgcccacctggagtcagtttccagtgactttttccctgcatatatgtttgatgtggttaggctctgtgtcaccayccaaaactcatcttgaattataatccccataatacccacttgtcaatagagagaccagatggtggtaattggataacatggtttccctcatgctgttctcatgatattgagtgagttgtcacgtgatctgatggttttataagtgtttagtagttccacctgtgttcattttccttcctgtgacctaaagaagaaggtgcctttcttcccctttcccttctgccatgattgtaag

SEQ ID NO: 585939 - DNA, 556 bp, Homo sapiens
ctacaaacgtgtgtggcatgttacagtactgaataccgataccaaatgtacacaatgttgtattgcacgaagatacaaaccattacaactatarcacaatggtatttgtgtatctaaacatagagaaggtacagtaaaaatacgatataaaagatttttttaaaacctctgtataggaaacttaccgtgaatggagcttgcaggactggaaattgctctgggtgagtcaatgagtgagcggtgagtgaatgtgaagtccttggatataactgggcactactgtagactttacgaacactatacactaaggctactctaaatattttaaaaataaatttttcttcttttgataaattaatcttagcttaccgtaacgtttttgcttaaaaaattaaacattaaaaaacatttttatttgtttttatttttttggagatgtagtctcgctgttgcccaggctggagtgcagtggtgcgatctaggctcactgcaacctctgcctcccgggttcaagcatttctacctcagcctcctaagtagctgggattacaggcgc

SEQ ID NO: 585940 - DNA, 556 bp, Homo sapiens
ctacaaacgtgtgtggcatgttacagtactgaataccgataccaaatgtacacaatgttgtattgcacgaagatacaaaccattacaactataacacaatggtatttgtgtatctaaacatagagaaggtacagtaaaaatacgatataaaagatttttttaaaacctctgtataggaaacttaccgtgaatggagcttgcaggactggaarttgctctgggtgagtcaatgagtgagcggtgagtgaatgtgaagtccttggatataactgggcactactgtagactttacgaacactatacactaaggctactctaaatattttaaaaataaatttttcttcttttgataaattaatcttagcttaccgtaacgtttttgcttaaaaaattaaacattaaaaaacatttttatttgtttttatttttttggagatgtagtctcgctgttgcccaggctggagtgcagtggtgcgatctaggctcactgcaacctctgcctcccgggttcaagcatttctacctcagcctcctaagtagctgggattacaggcgc

SEQ ID NO: 585941 - DNA, 556 bp, Homo sapiens
ctacaaacgtgtgtggcatgttacagtactgaataccgataccaaatgtacacaatgttgtattgcacgaagatacaaaccattacaactataacacaatggtatttgtgtatctaaacatagagaaggtacagtaaaaatacgatataaaagatttttttaaaacctctgtataggaaacttaccgtgaatggagcttgcaggactggaaattgctctgggtgagtcaatgagtgagcggtgagtgaatgtgaagtccttggatataactgggcactactgtagactttacgaacactatacactaaggctactctaaatattttaaaaataaatttttcttctwttgataaattaatcttagcttaccgtaacgtttttgcttaaaaaattaaacattaaaaaacatttttatttgtttttatttttttggagatgtagtctcgctgttgcccaggctggagtgcagtggtgcgatctaggctcactgcaacctctgcctcccgggttcaagcatttctacctcagcctcctaagtagctgggattacaggcgc

SEQ ID NO: 585942 - DNA, 572 bp, Homo sapiens
actggcatactgaagaatgcattaatctcttaatgggagaactgatctagcagaggaaagaattagtgaccctgaagacagactatctaaaaatacacacttgaaagatgagaaatgaaaaagaataaaagacaatgaatcatgcctacaagatctaaaaaaattatctgactcataatagactaatattagaatttatagaaaagtctatatatagactaatatatataaatatatattagatacatttatatctaatatagataatagactcataataatagactcataaccaaagcaacatggtgctagtacaaaagcagacacatagtccaatgagacagaatagagaacccagaaataaggccacacacatacaatcatctaatatacgacaaaattgaaaaaaacaagcaatgggggaaatgcctgcctwtttaatacatggtgttgtgataactggctagccatatgcacaagatgaaactagacccctctcaccatacacaagaattaactgaagatgggttaaagatttaaatgtagacataaaactataaaaattctagaag

SEQ ID NO: 585943 - DNA, 501 bp, Homo sapiens
taatgtgccatcataacctttgaatgctgagaaacctctgccatcctgtctcatatgctagctattaactagaaagtattttttctggacattttcattttatctttgaccaatttccccatataataagcaaattactatgtaggaaactgccaacatggcttagaagttaacaaacattcattaggtttaaggtcctaaaaaattgaataatattgtacatttaaaaagtaataaaataataaataaatgtrcatcaagaaatgatgggttttaaaataaccagtagaaaaatttggaaagaaaatatatcaaaaaatcaaatgaatccaggagctagttttttgaaaagattagcaaaataggcagactgctagcttaggctaataagaaaacagagaagaatcaaatagacacaataaaaaatgataaaggggatatcaccaccgatcccgcagaaatacaaattaccaccagagaatactgtaaacacctctatgc

SEQ ID NO: 585944 - DNA, 636 bp, Homo sapiens
ttttctttctttttcttttttttttctttttgagatggaatttcactcttgtcacccaggctagagtgcaatggcatgacctcagcwcactgcaacctccgcctccctggttcaagcgattctcctgcctcaacttcccaagtagctgggattacaggcacgcaccagcacacccggctaatttttgtatttttagtagagatgggatttcaacacgttggccaggctggtcttgaatttctgacctccggtaatccacccttctcggcctcccaaagtgctgggattacaggcatgagccaccatgcctggccaaatatttttatttctgaagtctttcaggattgacttccccccactctttagggatactttatgtcattttgttattgttaacactattttaattatttgaaatctatgtgtgaaacactgaactgataactaggagacttgtgtttttggaactactaaataaaaattttagtttatgattactataaaaattatgggctttatctttgcctctggtgttaggtgaaatgaatcagtcataccacatacatcatctttaagattgcatctactgaacatatttcgaaaaatttgagcaagtcattctcattcttttctata

SEQ ID NO: 585945 - DNA, 632 bp, Homo sapiens
atttattgtatatttacatatttctttctttttttttttttttttttgagatggagtctcgctctgtcacccaggctggagtgtagtggcacgatcttgactcactgaaacctccacctccygggttcaagcgattctcctgcctcagcctcctgagtagctgggattacaggcacacactaccacgcctggctaatttttgtatttttagtagagacagggtttcaccatgttggccaggctagtctcaaactcctgacattgagatccacccatctcagcctcccaatgtatttcaaaacagctagaagaattgtaatgttcccaacacaaagaaaagaaaatgtttgaggtgatgaatatcccaattaccctgatttggtgactacacattgtatatagaggtatcaagatagcatgtgtacatcaaaaatatgtaaactattaccaattttaaaagtttttaaaatattaaacaaatttatagtggcaggaagcagatcagtggcagcctaggatgggtggggagtcaagaaaaggaggctacaaggaaggggttataaagtagcatgagaagagctttgagggtgatgaatatgtccacgaacttgattgtggaaatggtttcatgt

SEQ ID NO: 585946 - DNA, 632 bp, Homo sapiens
atttattgtatatttacatatttctttctttttttttttttttttttgagatggagtctcgctctgtcacccaggctggagtgtagtggcacgatcttgactcactgaaacctccacctcctgggttcaagcgattctcctgcctcagcctcctgagtagctgggattacaggcacacactaccacgcctggctaatttttgtatttttagtagagacagggtttcaccatgttggccaggctagtctcaaactcctgacattgagatccacccatctcagcctcccaatgtatttcaaaacagctagaagaattgtaatgttcccaacacaaagaaaagaaaatgtttgaggtgatgaatatcccaattaccctgatttggtgactacacattgtatatagaggtatcaagatagcatgtgtacakcaaaaatatgtaaactattaccaattttaaaagtttttaaaatattaaacaaatttatagtggcaggaagcagatcagtggcagcctaggatgggtggggagtcaagaaaaggaggctacaaggaaggggttataaagtagcatgagaagagctttgagggtgatgaatatgtccacgaacttgattgtggaaatggtttcatgt

SEQ ID NO: 585947 - DNA, 622 bp, Homo sapiens
gggaaaaggcagcaccaaagatgccaggggygcctcacggatccccccgggggggcctccttgagggggagcaggaggaggggccaggctgagggctcaggctgtgtgaaagacaccctggttttgaaaagggagaggggctagagaggtggggcccgagggcctggtggggcttccagcaggggctggcttatgttttcaagcttactctggggtctggagaccactgccgaacatacgccctccaagcagtggccacaagaagaccatgaggagctcgggcggggtctggggaaagggtgggggctgccacagacagaagtgggttcgtcgaggctgcagaaggctgggtgggagtggaggaggtgacgtgaccaggatggggtcggtgacccctgcacaggggctacaggggatgaaaggggagggagcagcagactgctgagattggggtggcattggccctggtgggactgactgtccccggctcagtctccctcctccttggctggcttttctggcagacagtggcatggtccagagctgcctccctggggagggaaagggcatccccaagtcactcctgaggctgtgtccccagagtgtccaccgggctgtgcca

SEQ ID NO: 585948 - DNA, 518 bp, Homo sapiens
  misc_feature 61, 196: n = A,T,C or G
agcgcctgtggtcccagctgctcgggaggctgagatgggagaattgcttgaacccaggacncagaggttgcagtgagccaaggttgctccactgcrctccagccgaggcaacagagtgagactctgtctccccccacaaaaaaaaaagttgttggtatctttgtcaggattccattacacttatacattaatttanggagaattgatgtctttatgatattgatcattccttccaagaacaagggatgtttttccatttgttcaagtttactttcaggtcattcaggaatattttaaattttctcttaaatatttttcacatttcttactgagtgtatttctcagcatttaatcaccattgtttttaatttaaatgggatcttctccaccattatattttataattctgaactatccaatacagtagccattagttatatgtcattatcgagcacttgaaatgtggccagtccaaattgagaagtgttataagtgtaaaatatatactggattttgaa

SEQ ID NO: 585949 - DNA, 620 bp, Homo sapiens
caggagttcaagaccagcctggccaacatggtgaaaccccgtttctactaaaaatacaaaaattagctgggcatggtggcaggtacctgtaatcccagctgctcgggaggctgaggcgggagaatcacctgaacccgggaggcagaggttgtagtgagctgagatcgtgccattgcactacagcctaggcgatagagcaagactctgtctcaaaacaaaacatggccaggcacagtggctcatgcctgtaatcccagyattttgggaggccatggtgggcggatcacctgaagtcaggagttcaagaccagcctggccaacatagtaaaaccttgtctctactaaaaatataaaaatcagccgtgtgtgatggcacactcctgtaatcccagctactcaggaggctgaggcaggagaattgcatgaacctgggagacagaggtttcagtgagccgagattgtaccactgcactccagcctgggtgacagagtgatactctgtctcaaaaaaacaaaacgaaaacaaaaaaaacctgtgacttttggttactccccttctgtagaaaagatgagcaggtattgagagaagtaaactgtaaacttgcagaggagttaaaaac

SEQ ID NO: 585950 - DNA, 620 bp, Homo sapiens
caggagttcaagaccagcctggccaacatggtgaaaccccgtttctactaaaaatacaaaaattagctgggcatggtggcaggtacctgtaatcccagctgctcgggaggctgaggcgggagaatcacctgaacccgggaggcagaggttgtagtgagctgagatcgtgccattgcactacagcctaggcgatagagcaagactctgtctcaaaacaaaacatggccaggcacagtggctcatgcctgtaatcccagcattttgggargccatggtgggcggatcacctgaagtcaggagttcaagaccagcctggccaacatagtaaaaccttgtctctactaaaaatataaaaatcagccgtgtgtgatggcacactcctgtaatcccagctactcaggaggctgaggcaggagaattgcatgaacctgggagacagaggtttcagtgagccgagattgtaccactgcactccagcctgggtgacagagtgatactctgtctcaaaaaaacaaaacgaaaacaaaaaaaacctgtgacttttggttactccccttctgtagaaaagatgagcaggtattgagagaagtaaactgtaaacttgcagaggagttaaaaac

SEQ ID NO: 585951 - DNA, 575 bp, Homo sapiens
gaattcattctcgtcaatcaaccacagctggggatacttagtaaataagcaactctaactacatcattttggtgctagcatgaagatccagatctgatattcctgctatttacccgacagaaactaggtgccctagttctgataactaagcctctctctccctggctccctccccgcaccttttttttctttttgcccttacatgcccccaaggatcttggttatattactgttttgctgccttgggttttattctcagttatatctgtaatagcttaccattatgcctacaagtgaatggagttggttttgctatttcatcttccagctgaaatgtcatcaccttaaacctacagtttaaatgtgctcctttgtgataacgataaagtggaaaaaacgagtgtagttgtgtgtttttatttaatttttattattctaactgacatgtattattcctatgtgtaccagtcactatactcatatgtgcactatttcatttaatcatcctaataaccctaagaaaatgtaactagggaytagcatcatcatcagcagcagcagcagctcatctccac

SEQ ID NO: 585952 - DNA, 469 bp, Homo sapiens
gagagaacatagttttatggtacaaaattatctcaagagggctggtaattgtagtcttcctgtgtgcataggaaacagggggaaaaaaacacaaaatgataaatagtatcaatctctgccatacccagtcccttcagtttgaagctttgatgcctcatttggcagagccaatattgtatgcccatcaaattatttcctttttgtccttaacaaataagaagactacatttctcagaactcttacmttttcttgggataatatgatgaagtctggccaatgaacatggacaggcatcatgtacaccacaaaactctccagagagatcactgatatctctctctctctcccccaactccctgagttacggtaaaggcagtctgaagatttaagccactataagtaaatttctcaaggctctttctaaaatgctacagatggcccttcatagtgagtggatttggcattgaa

SEQ ID NO: 585953 - DNA, 605 bp, Homo sapiens
  misc_feature 595, 596, 597, 598, 599, 600, 601, 602, 603, 604, 605: n = A,T,C or G
atctagcagtgctttttctgttcaataccatatggattggcattagaggtataatatagtaaatgtcttgagttcaccttgaactttgaggatttcatttgctgacaataactaggtcttactgacttctcctctagaatattgctgtttttccacaaaagaatttttcatgcaaagtgccctcagagtacctaaaagaatagtgagttgagattttttttcaagctatatgactgtctttttatttgcttgataacaaatgtttgttttcaaaatatcttatggagcagtccttgtatgattgtactggtcacttgcagtaggaatgaccaattaataatgccccagctcctcgaagctcatgatctgccaagaagacaacactaatgggtgcatgaataattacataatttgtgtccatgatatgggagggacccttctgaaaggggcagagccagtcccctcctggcctgtggtcctcackgggagccacttccctctgctcccttgttccatggttcaccctctttatcctctagttttgatggtgggctaacactcttcaactcaagttctcctggcttttctgctagannnnnnnnnnn

SEQ ID NO: 585954 - DNA, 567 bp, Homo sapiens
aaagtaagctagaggaaaagaaaattttactgagaacagcataaggaagagaaaatatatgtcctatccattaagtggaagtggatcatcrtataggtctacattcttattatctttatgttgagtagcctggggtggtgaaggatgagtaggggttggtcttttatatcaggggtggcaggagtagcagaaagtctgtgtataagcagtcttgttcaattcaaccccatgttgttcaagggtcaactgtacatagtataagtctacaagcaggacatacatacagaagatatccaaatatccaaattgccaagtaaaaactaaagctgtttctgagctagactctccctaggaaatacaattctctaagtcaaattaaacctgaaatcaaagcttaaatatttcagaattcatacataattaaggtgatacctggtaaaccctctcagctagatgaaggacttcccaggatctcacgggtgctgttaaatacttgcctgacacaccggatatagctttggattagtgcagagagcaaaatatgtcttgacaacaacttagagtgtg

SEQ ID NO: 585955 - DNA, 567 bp, Homo sapiens
aaagtaagctagaggaaaagaaaattttactgagaacagcataaggaagagaaaatatatgtcctatccattaagtggaagtggatcatcgtataggtctacattcttattatctttatgttgagtagcctggggtggtgaaggatgagtaggggttggtcttttatatcaggggtggcaggagtagcagaaagtctgtgtataagcagtcttgttcaattcaaccccatgttgttcaagggtcaactgtacatagtrtaagtctacaagcaggacatacatacagaagatatccaaatatccaaattgccaagtaaaaactaaagctgtttctgagctagactctccctaggaaatacaattctctaagtcaaattaaacctgaaatcaaagcttaaatatttcagaattcatacataattaaggtgatacctggtaaaccctctcagctagatgaaggacttcccaggatctcacgggtgctgttaaatacttgcctgacacaccggatatagctttggattagtgcagagagcaaaatatgtcttgacaacaacttagagtgtg

SEQ ID NO: 585956 - DNA, 541 bp, Homo sapiens
tatatttgtacatatgacaaatgttagaaaaacaatataaattttatctcactttgcttttctaacattaatttgaatgttttttcatgtatttaattataacatagtttaccaaattcccaatttaaaccatataaaagaaaacagttccaattgttaagtatttacattgtttataattatttgtcccataaacaatatgaaaatgaattttctttaaaattgatttctaaatgcatctctgagtacttcattggaatacagtaaaagaaattaatatcttgaaacttccaatctgctctatayttatgctaataaaaatataatgcaagccgcatatataagtttaagttttctagtggacacactaaaaagagtaaaaagaaataaatgaagttaatcacttcttggccttttggctaagatcaagtgaagaaataagtaaaattaacagtaataatttatttaacccaatttattaaaatatttcaatgtataattatttaagaataattaaaaagatattacattttctaggttt

SEQ ID NO: 585957 - DNA, 566 bp, Homo sapiens
caaaaattaacaaggcatgttggtgcatgcctgtaatctcagctactcgggaggctgaggtgggagaatgacttgaacctgggaggcagaggttgcagtgagccgagtttgcgccactgcactcctgcctgggtgacagagtgagactccatctcaaaaaacagtagaaagatcacaaattatcgaccaatgtcacacctcaaggaactggaaaaagaacaaatcaaacccaaagttagccaaagaaataacaaagatcagagcagaactaaatgaaatagaaaccacgaaaacaataaaaaagatcaacaaaacaaaagttggatcttcaaaaagttaaaattaatgaaccactagctagactaacccaggaaagaagagaaaataaaaataaaaacaatcagaaatgaagaatgggacattacaactgataggatagaagcacaaaacatcatgagagactattatgaacagctatakcctcacaaactagaaaacctagaggaaatgaataaatttctggacagttacagtctatcaagattgaaccaggaagtagaactctt

SEQ ID NO: 585958 - DNA, 309 bp, Homo sapiens
taattccagctactcaggaggttgaggcaggaraattgcttgaacccgggaggcggaggttgcagtgggccgagatcacgccactgcactccagcctgggcgacagagcgagactccgtctcaaaaaaaaaaaaaaaaaaaaaaaaaggaaaaaaaaacccccaaaaaaacaaatgtttaaatgagcttcccaaactctgtggacaggtgtcttgtgagcttagatcctcataactgtcagtgaggctggtcaggttgtgggaacagcccaagtccctgggtctgttgactctagtcttgagcagccac

SEQ ID NO: 585959 - DNA, 551 bp, Homo sapiens
ggctgacttccttcacgctacagttttctcctttcaagaaggtggaatacgatggtaattatagcttgtgggatctttggcggagggagtattgataagaatatgttgtccatggcggcctattttgtgaccaccccccacaagagttgttattccagcctagggtgaggtcaaattgttggacagtatttgaaaaatgtcacaatgcaacgtgctattygactcaacatctaaatgtactcttggcatccagagtggaatatcagtggtgtggacatcagccccatatgaactcaggggatcctcagaaaaggaaaatgttgggccaggagtggtggttcatgcctataatcctagtactttgggaaggtgagaggggagggttgcttgaggccacgagttggagaacagcctgggaaacatatagtgagaccgtgtctctacagaaaaattaaaaaaatagtcaggcatggtggtatctgtagtcccagctacttgggaggtggaggtgagaggatcgcttgaatccaggaaatcaaggctgtagtgag

SEQ ID NO: 585960 - DNA, 551 bp, Homo sapiens
ggctgacttccttcacgctacagttttctcctttcaagaaggtggaatacgatggtaattatagcttgtgggatctttggcggagggagtattgataagaatatgttgtccatggcggcctattttgtgaccaccccccacaagagttgttattccagcctagggtgaggtcaaattgttggacagtatttgaaaaatgtcacaatgcaacgtgctatttgactcaacrtctaaatgtactcttggcatccagagtggaatatcagtggtgtggacatcagccccatatgaactcaggggatcctcagaaaaggaaaatgttgggccaggagtggtggttcatgcctataatcctagtactttgggaaggtgagaggggagggttgcttgaggccacgagttggagaacagcctgggaaacatatagtgagaccgtgtctctacagaaaaattaaaaaaatagtcaggcatggtggtatctgtagtcccagctacttgggaggtggaggtgagaggatcgcttgaatccaggaaatcaaggctgtagtgag

SEQ ID NO: 585961 - DNA, 551 bp, Homo sapiens
ggctgacttccttcacgctacagttttctcctttcaagaaggtggaatacgatggtaattatagcttgtgggatctttggcggagggagtattgataagaatatgttgtccatggcggcctattttgtgaccaccccccacaagagttgttattccagcctagggtgaggtcaaattgttggacagtatttgaaaaatgtcacaatgcaacgtgctatttgactcaacatctaaatgtactcttggcatccagagtggaatatcagtggtgtggacatcagccccatatgaactcaggggatcctcagaaaaggaaaatgttgggccaggagtggtggttcatgcctataatcctagtactttgggaaggtgagaggggagggttgcttgaggccacgagttggagaacagcctgggaaacatatagtgagaccgtgtctctacagaaaaattaaaaaaatagtcaggcatggtggtrtctgtagtcccagctacttgggaggtggaggtgagaggatcgcttgaatccaggaaatcaaggctgtagtgag

SEQ ID NO: 585962 - DNA, 544 bp, Homo sapiens
atgatttctgttattatgtttgccacattcttaataatactaataaattgtgtgcattttggaaatttcttttggattaggacaatggaaaactctgcatcttgctgctaatggtcagcctctaaaaattcagagaraggaaggatcacaatccatgtgtagtgtatacaatgtatacaacagtgcaaagatgaactacaaacaccactcaagataaattattatatgtttccacactgatccatgcactggtcattatacatctgaactcctaaagtagtgtcataatcaaggggtaattcttgaagataaatatggtgtcaccaacctcaaaagtggaatgaccacacagaggactaacttttgattaacttgaggaggcaattttttttttttttttttgagacggagtctcactctgtggccaggctggactgcagtggtgagatctcagctcactgcaacgtctgactccctggttcaagcgattctcctgcctcagcctaccgagtagctgggattacaggcgtgcgccaccacaccc

SEQ ID NO: 585963 - DNA, 535 bp, Homo sapiens
tcagaggtgtacataaatcaattgcactgaatagtagtggttatggcaatattataaataaaattaaaaataatgattaatatttattgatccttgtcaaatatattacatgtattttcacatttaatccttagaataacggcatgaattagctacttttattatcgtcattttacagtaatttacattttacattaataactgaatrcaccatatgatattaaagctttttaaatttcttacaggtgaaaaggttgaatgtaggaattcgactacagacagacactagttaagtattgtagggatatatagcatactagagactgagctcataagtactttgctacactgaatggttatgaatcatttatttctgaatttgccattgtatcatctagacaaatatttaataatctctctagcaaatgctaaaagccattgtgataatgaaaatgtagcaagattcaggcaactggtaaattgtagtagagttcattggtttcttgttttatgaccagtcaaatacaaatgtcac

SEQ ID NO: 585964 - DNA, 550 bp, Homo sapiens
aaaattgaggctgtagattaaacgaataaggatgctgattcctgtattatttcagctactacaaaaccaaaataatmcgctgcattctaaccatcaagataggatgatctagaagaaatgtgacatcctgaatagatatccttggctgctaggaagcttctgtctcattttctcatagctgcctgtccctggccagtatgtgtccaaagaaaactagttcattttaaccttagccagtgtaagtcatatctcaataagataatcaagacctattttaaaagttacattacatctgaggttttaaaatgtaaattaccttgcatttaaattttaaatcttaaattatgtattttgttcatggcatgggcaaattttattcccattaagatgtctacatgggtaaatgtttaaatataaaatcatttctgaatttattcaaagatgaccagtttttagtagcagaaaaagttgtgtttctttggagcacacatgcacattctttatgcataaccacagctcacacatatagtgtcttacataaacatgcatt

SEQ ID NO: 585965 - DNA, 414 bp, Homo sapiens
  misc_feature 149, 154: n = A,T,C or G
caaatctcattttgaattgtagtttccataatccccacgtatcctaggagggaacaggtggagataattgaatcatggaggcagtttccccatcctgttctcataatagtgagtgagttctcacgagatcagatggctttataaggggnttccntaccacccccacccccccaccttcactctgccctgctccttgctgccaccgtaagaagaaggatgtgatatcttcaccttctgccatgattgtaatttcctgaggcttccccagacctgctgacctgtgagtcaattaaacctctttctttsataaagtacccagtctcgggtacgtctttattagactaatacaaagggctaatttaccctctctgtttgagctgagacatccatcttattcagcctttggatgtcaga

SEQ ID NO: 585966 - DNA, 561 bp, Homo sapiens
gttataaaccattatagccaaagaaattcaaaaagtattgtaaaatagtatgtacttgggcatatttatgtgtgtgtaaatgcacactcagtcacacacacccctgttatccttagctctccttgttgattttatttttgatatctcaagacaaggtatcatgtactatgctaattaagtttccaagatctaaagcttgaagataccgcagaggccttggagtcacagctcccaggtagccaaaacaatggactgaaactaatawgaaattaagcaatgaattatacaaaatcttgtattacgggttaaaaattagtgcagaagaatgggctgtgggaaaggcctggatgtgtggctgactactggctctgcgtcagctcgtaggtgtaggagctgacctgtctaagctgtaggtggcagtggacgaggagtaggaaattgcagttgtcatggttaatgaatgccacctgtgagagattctcagcatgggaaatttactcttgcatcattggaagtgaattgtctgtaaatattcctgtcttggataaaagagccatggtg

SEQ ID NO: 585967 - DNA, 561 bp, Homo sapiens
gttataaaccattatagccaaagaaattcaaaaagtattgtaaaatagtatgtacttgggcatatttatgtgtgtgtaaatgcacactcagtcacacacacccctgttatccttagctctccttgttgattttatttttgatatctcaagacaaggtatcatgtactatgctaattaagtttccaagatctaaagcttgaagataccgcagaggccttggagtcacagctcccaggtagccaaaacaatggactgaaactaataagaaattaagcaatgaattatacaaaatcttgtattaygggttaaaaattagtgcagaagaatgggctgtgggaaaggcctggatgtgtggctgactactggctctgcgtcagctcgtaggtgtaggagctgacctgtctaagctgtaggtggcagtggacgaggagtaggaaattgcagttgtcatggttaatgaatgccacctgtgagagattctcagcatgggaaatttactcttgcatcattggaagtgaattgtctgtaaatattcctgtcttggataaaagagccatggtg

SEQ ID NO: 585968 - DNA, 620 bp, Homo sapiens
gtggatcacttgaggccaggagtttgagtcctgtctagctaacatggtgaaaccccatctctactaaaaatacaaaaattagccagacatggtggtgcatggtggtgcatggtggcatgtgactgcaatcccagctacttggctacttgggagactgaggcatgagaatcacttgaacccagtgggtggagagccgagacacaccatggcactccagcctgggtgacagagtgagactctgtctcattataaaaaagaaaaagaaaacctcagtttgaacttcatgagaccactaaagagrtttaagttttacaaattatttattagaagtctttctaaattttgagagaaatcatagttcattaatatattagttaatatatcttattaaattcaggtttaattgtgttacagttcagatttctactgttaactctgtggtacatcatagatcattttatatccttaataatctagaataaattgagtgggtaatatatttatgactacttgggatgggggattggagcctactttagccatttcaaatggtcagaaaaatttaaggttgagtggttagtgtatcattatgattgtgatttatttgatcctaaatgatt

SEQ ID NO: 585969 - DNA, 409 bp, Homo sapiens
tagagagaacttggcagcaaccacagaaggttcaggccaccttcccaagacaagcaccatcctcccctaacaagactaactcctgctctagcttttctggaaatacccttattactytttattattatttcattatctagttgaggagccctaaacagtgagtttaggttagcctgatttttaaaaatttctctctgtatcttcctaaactgaaagatttttttttcattttagaaaccaatcctgtagagtcaagattctgctgattctgctgattgcattcccatggtagagtttaatgtttcatttatcctctagatttcctgcagattagtagttgaatctataaacttaatctgattcagatttcactttggggaggaagattacaccatcggtgctgttgtgt

SEQ ID NO: 585970 - DNA, 472 bp, Homo sapiens
accatattccttgggatttattaagataaaatatttaataattgttattgcctgyggcatttattgaatgcaaaccacggataaagcatttcacgtaaattctcatttatcttcatcaaacagtttcaacataagcattactatactcttgttacaagtgtataaacctatttccaaatgttaatttgttgaaactctttgaatcaatactgcatcagggattggatgtttggaggattcatatagggaggttataaaggaagcaaagcaggcctatcagttagctattgttagctattattgttatgtaataaaccatccaaatcttcagtggcttaaaacgacatttttcatagttcaagtggttgggcttggctgatctcttttgaaacaccactcttgtgtaggttaactagggaatttatcaaatggagacattccccaagaatgtaaaaatatatttattctttac

SEQ ID NO: 585971 - DNA, 597 bp, Homo sapiens
attatgctggccaggctggtcttgaactcctgacctcatgatccacctgcctcagcttcctaaagtgctgggttacaggcgtgagtcaccawaaccagctgatgctggccttctaaaatgcaataagaagtacattctattatcctattgtctgaaaaattaatcttagaatgatttcttcttcaaatgtttggtaaaaatcaaataaaactctaaaactatttaataagttgatgttagtgtccttcttttattaggctggattataacattaggccaaaagtaaaatttaagactgcaaagctatactgattttcagagatgtgcataaaaggaaaccaaaatgaataagaaaggcagatatcactctgtcttcacatagaatataatcccatgttttaagtatgtcattacatgctttgcccaaaatatttaaattttttgttgttttcagtaagttgaagcaagtctaatttctcatatgctctatttattgactgacttattaaaattgagacaattattatcataatactattaatgatagggtctaagtatttcattttcagaaatctaaaagtaattctggtacaattt

SEQ ID NO: 585972 - DNA, 316 bp, Homo sapiens
tatgagtcatgttttctgatccaactggaaatgttcaacagtagttgtcttcttgaggtctagcaggctcatcttggacacctcattgtrttcctccctcctcgtcttctaagggatttgtctggtctgagccatcagtggagcttggtcaaggttagttacagactccaacctcaaccttcctattcactcgtagagtcccttctatcaagttggaagaagagacctcacagagaactaacagaacaataactcaatagagccagttttactaagtccagcattggtcccaggaatgctggtcaacgttataaag

SEQ ID NO: 585973 - DNA, 604 bp, Homo sapiens
gttaagtgacttgcacaaaaaaacactctagtacaattgtggatgttttaatttccactctagaatcttaatatgtttattgtatgaaccttaaaaaatggccacttgtaggaattttcctcccttctctatttaatgatggaattacttrtactactaacaaatatcactatcccactggtaaaaataatagcttgtttctcaaataggagtgcaataccagtaatccattatctgcagactattgaagttaaaccaacattggattttaggttctgaaaatgtcagaagaactttcatttgattctagcttatcacagtgcctgaaacagggagacagcactgtaactgcaatttatttcaaacactagcagttgcacaaggtttttatgatgtgtgaaaaaagactcagtttacaattttaagaaaaggagaagaaatgcagagaggtcactgtaatttcaacttcatatgcaatgattaacaatagatacaatttaagattatcactaactcctacacttgccataatttacaactctacgcaattaattgaaataactaaaacctatttcacaaacatacataattagaaatttatatt

SEQ ID NO: 585974 - DNA, 604 bp, Homo sapiens
gttaagtgacttgcacaaaaaaacactctagtacaattgtggatgttttaatttccactctagaatcttaatatgtttattgtatgaaccttaaaaaatggccacttgtaggaattttcctcccttctctatttaatgatggaattacttgtactactaacaaatatcactatcccactggtaaaaataatagcttgtttctcaaataggagtgcaataccagtaatccattatctgcagactattgaagttaaaccaacattggattttaggttctgaaaatgtcagaagaactttcatttgattctagcttatcacagtgcctgaaacagggagacagcactgtaactgcaatttatttcaaacactagcagttgcacaaggtttttatgatgtgygaaaaaagactcagtttacaattttaagaaaaggagaagaaatgcagagaggtcactgtaatttcaacttcatatgcaatgattaacaatagatacaatttaagattatcactaactcctacacttgccataatttacaactctacgcaattaattgaaataactaaaacctatttcacaaacatacataattagaaatttatatt

SEQ ID NO: 585975 - DNA, 504 bp, Homo sapiens
tcacattatgtaaaatgttaatattttagtaaaacttaactatatctttggttttctttggtcatttccttttcatcattctctgtcagatatctagaatagccagacatttgcatattttttattaayggcatttcttgcttgccttatggagcttcaaggtcctcatatggaaaaaagactcctattacattgggaagtcataatgctatctgtcatgagtttttgtgagtccttggctccatgaaaataaaatagtgtctactgtcaaaataagcctagctggtgtttaccttttatataatagtgttttctccccttaaacataaagcagcagagaatgcacactaaatcagctacaataacacttttggatgccttaaattattagtcacaatcagtaatgtagacttaatttatattttccaatccctttaatcactagaaacatttcaggatctccatattccagtttcaacatgatggtagtttttcctaatgatc

SEQ ID NO: 585976 - DNA, 388 bp, Homo sapiens
cagtccatttgtctttaatgagtaggcaacatatagtagggtcttgtttatcgattcagccacactatatcttttaattggagaatgatatggtttgaccatgtccccacacaaatctcatcttgaattgtaatccccataatcgccgtgtgtcatgggagggacccagtgagaggtgattgaatcatggggggtggttttctcrtgctgttctcatgatagtgagtgagttctcatgagatctgatgattttataagctactggcatttcccctgctggcacttattctctccctttcctttataaattacccagtctgaggtgttttctcatagcagtgtgagaacagactaatacagtaaattggtaccaggagtggggcattgc

SEQ ID NO: 585977 - DNA, 388 bp, Homo sapiens
cagtccatttgtctttaatgagtaggcaacatatagtagggtcttgtttatcgattcagccacactatatcttttaattggagaatgatatggtttgaccatgtccccacacaaatctcatcttgaattgtaatccccataatcgccgtgtgtcatgggagggacccagtgagaggtgattgaatcatggggggtggttttctcgtgctgttctcatgatagygagtgagttctcatgagatctgatgattttataagctactggcatttcccctgctggcacttattctctccctttcctttataaattacccagtctgaggtgttttctcatagcagtgtgagaacagactaatacagtaaattggtaccaggagtggggcattgc

SEQ ID NO: 585978 - DNA, 388 bp, Homo sapiens
cagtccatttgtctttaatgagtaggcaacatatagtagggtcttgtttatcgattcagccacactatatcttttaattggagaatgatatggtttgaccatgtccccacacaaatctcatcttgaattgtaatccccataatcgccgtgtgtcatgggagggacccagtgagaggtgattgaatcatggggggtggttttctcgtgctgttctcatgatagtgagtgagttctcatgagatctgatgattttataagctactggcatttcccctgctggcacttattctctccctttcctttataaattacccagtctgaggtgttttctcatagcartgtgagaacagactaatacagtaaattggtaccaggagtggggcattgc

SEQ ID NO: 585979 - DNA, 492 bp, Homo sapiens
tatatgatgatagaaggaataagcaggacactattcwcaagaaaagaaggatttctatatactactgttttatgagcaaggactgatttttaggttactaatttggagagctaggctgattttccttttcttcatttcttgtttgaaggtcctgatgtttatagacttagaattcattcacttatttattgattgttttctgtcctcagaaaatactatgtctaagaatacattatctattctactttaggaaagaatataataacttaaaaataatgtacctaaaaacactatgatatgaaaattacatgaagtcaataatcttcatggttttgaatatgttgaactgtcataatctgagatttctaaaggaaagactatctttttaaacattcatagtgttcatttctttacatttgtatttttatttagtaatttcttataatctggagacaaactttacttatatcacacaggtaactttataatgaa

SEQ ID NO: 585980 - DNA, 329 bp, Homo sapiens
ctgataaaacaggctgcggtaaagaagccagccaaaacttaccaaaaccaagatggctacaaaagtgacctctggtcatcctcactgctcactatacgcgaatcataattagagtacagtgagcagtgaggataatgagcattagttgctaaaagacactcccatcagcatcakgacagtttacaaacgccatggcaatgtcaggaagttatctaatatattctaaaaaagggaagacccctcagttctgggtactactccccctttcccagaaaactcatgaataatccaccccttgtttagcatataatcaagaaataactataagt

SEQ ID NO: 585981 - DNA, 329 bp, Homo sapiens
ctgataaaacaggctgcggtaaagaagccagccaaaacttaccaaaaccaagatggctacaaaagtgacctctggtcatcctcactgctcactatacgcgaatcataattagagtacagtgagcagtgaggataatgagcattagttgctaaaagacactcccatcagcatcatgacagtttacaaacgccatggcaatgtcaggaagttatctaatatattctaaaaamgggaagacccctcagttctgggtactactccccctttcccagaaaactcatgaataatccaccccttgtttagcatataatcaagaaataactataagt

SEQ ID NO: 585982 - DNA, 577 bp, Homo sapiens
gatgacaggaaggaaaagtgctgtgcaaaaggaggaaaagccccttataaaaacatcagctctcatgagaacttactcactatcacaagaactgcagcatgggaataacacccccatgattcaattacttcccaccaggttcctccyacaacaagtggggattataggaactacaattcaagatgagacttgggtggggacacagccaaaccatatcatttggcccctcccaaatctcatggcctcacatttcaaaaccaatcatgccttcccaacagttccccaaagtcttagctcatttcagcattaactcaaaagtccatctgagttaatgctgaaatgagtttcagcattttcagttaatgctgaaactcatctgagacaaggcaagtcccttatgcctatgagcctgtaaaatcaaaagcaagttagttacttcctagataaaatgggggtacaggcattgggtaaatatatgcatcccaaatgggagaaattggccaaaacaaaccaggtgcaggctccatgcaagtctgaaatctaataaggcagttgttaaaccttaaagttccaaaat

SEQ ID NO: 585983 - DNA, 577 bp, Homo sapiens
gatgacaggaaggaaaagtgctgtgcaaaaggaggaaaagccccttataaaaacatcagctctcatgagaacttactcactatcacaagaactgcagcatgggaataacacccccatgattcaattacttcccaccaggttcctcccacaacaagtggggattataggaactacaattcaagatgagacttgggtggggacacagccaaaccatatcatttggcccctcccaaatctcatggcctcacatttcaaaaccaatcatgccttcccaacagttccccaaagtyttagctcatttcagcattaactcaaaagtccatctgagttaatgctgaaatgagtttcagcattttcagttaatgctgaaactcatctgagacaaggcaagtcccttatgcctatgagcctgtaaaatcaaaagcaagttagttacttcctagataaaatgggggtacaggcattgggtaaatatatgcatcccaaatgggagaaattggccaaaacaaaccaggtgcaggctccatgcaagtctgaaatctaataaggcagttgttaaaccttaaagttccaaaat

SEQ ID NO: 585984 - DNA, 604 bp, Homo sapiens
gtaccaatttactgtattagttcattctcatgctgttaataaagacatacccaagactgggcagtttatgaaggaaagaggtttaattaactcacagttcagcatggctggagaggcctcaggaaacttacaatcatggtggaaggagaagcaaacacatcctttttcacatggcagcaggaagaaaaagtgctgaacaaaagggggaaaagccccttaaagccatcagatctcatgagaatgagctcactatcatgagaacagcagcatgggggtaactgcccccatgattaaattacctctcactggttctctcccacaacacgtggggattatgggaactacaactcaagatgagatttgggtggggatactatttcaacaaccgtacaaaaaaatctttattcatacgtctgcaagaatgtatgtttgtgcaaatgtacgcatggaaaatacacacaagagggttaacatcactcctgttactttgggagagaaaatgatattcaacggaaattrttacaattatatatatatatatttgttgtattttgagaattacttcttaatagttaaaaattataaaattataatagttaaaaat

SEQ ID NO: 585985 - DNA, 495 bp, Homo sapiens
aatgggtgaaatacaatcagtggatgggaatagtacctgggaaaaaaagagcaacttctcccacacattctgtctactcatagaaaattcatgagttataaattgagtagcgattaatagatgtaaatttcaccagaaaaattaaacagagaacaaattacaaagcttttcaaagacaaagtccaattacctaatggtaatgaagaaacccttattccagatagactgtatgatgatgctcccaataatcataaatcctccccagatgagatttggacaaacgcattcttttttaaaaaaaattcaactttggccgggtgcggtggctcacgcctgtaatcccaacactttgggaggccaaggtgggtggatcgcctgaggttggaatttcgagaccagtctgaccaacatggagaaatcccgtstctactaaaaatacaaaaattaggctgggtgcagtggctcacacctgtaatcccagcactttgggaggcc

SEQ ID NO: 585986 - DNA, 558 bp, Homo sapiens
cagggattacttcttggtttggatccattgctgctgaactagtgtgatttttggggagagttaaagagtcttgttttctcatattaccagagttggttttctgrttccttctcatttaggtaggctctatcagagggaaggtctagggctgaagtctgttgttcaggttcttgtgtcccacagggtgttcctttgatgtagtactctcctcctcttcctgtgagtgtggcttcctgagagccaagctgtagagattgttatctctcttctgggtctagccacccagcaagtctaccaggctccaggctggtactgggggttgtctgcacagagtcctgtgatgtgaaccatctatgggtctctcagctgtggataccagcacctattccagtggaggtggcagggggtgaaatggactctgtgagggttcttagttttggtgatttcatgccctgtttttgtgatggttggcctcctgccaggaggtggcgctttccagagagcatcagctgtgctagtatggggaggaatcggtggtgggcagggccatagaattcc

SEQ ID NO: 585987 - DNA, 371 bp, Homo sapiens
acctttcagcactaggcagtttttctcctgctttagtttcctctacaacctccggaagagtttttctcggccctgctacctgtttcttccatcactctgttgctcactggattggtttttacattagtgtgttttgatagcacacaatggtttcctcagttacacaacagactcagtgccaataaactttttttaggtaatgtaaagcatatttgagcacaagaatgattgcaytttcatggctaaaaataaagttgtttttaattttccatgagaatgctggctctcagcacaaggggccacctcctacctggtgaactctttatgccaaagtcatcactatgtggctggaaacgtgaaattcaagtttt

SEQ ID NO: 585988 - DNA, 371 bp, Homo sapiens
acctttcagcactaggcagtttttctcctgctttagtttcctctacaacctccggaagagtttttctcggccctgctacctgtttcttccatcactctgttgctcactggattggtttttacattagtgtgttttgatagcacacaatggtttcctcagttacacaacagactcagtgccaataaactttttttaggtaatgtaaagcatatttgagcacaagaatgattgcactttcatggctaaaaataaagttgtttttaattttccatgagaatgctggctctcagcacaaggggccacctyctacctggtgaactctttatgccaaagtcatcactatgtggctggaaacgtgaaattcaagtttt

SEQ ID NO: 585989 - DNA, 371 bp, Homo sapiens
acctttcagcactaggcagtttttctcctgctttagtttcctctacaacctccggaagagtttttctcggccctgctacctgtttcttccatcactctgttgctcactggattggtttttacattagtgtgttttgatagcacacaatggtttcctcagttacacaacagactcagtgccaataaactttttttaggtaatgtaaagcatatttgagcacaagaatgattgcactttcatggctaaaaataaagttgtttttaattttccatgagaatgctggctctcagcacaaggggccacctcctacctggtgaactctttatgccaaagtcatcactaygtggctggaaacgtgaaattcaagtttt

SEQ ID NO: 585990 - DNA, 636 bp, Homo sapiens
  misc_feature 1, 2, 3, 4, 5, 6, 7, 8, 9, 10, 11, 12, 13, 14, 15, 16, 17,18, 19, 20, 21, 22, 23, 24, 25, 26, 27, 28, 29, 30, 31,32, 33, 34, 35, 36, 37, 38, 39, 40, 41, 42, 43, 44, 45: n = A,T,C or G
nnnnnnnnnnnnnnnnnnnnnnnnnnnnnnnnnnnnnnnnnnnnngtgttcacacttatgaaatacacttgaaaagcatgggtgaattaattctcgagaataggttaatcaccaacattgactcaggaagaagtggaaaatgtaaacaaacccaaaacaatacaaaagattgaaaagctacaaaaggatctactcagattattttatagaataaatttacccagatcttcaaggaagagaacatttcaatattaagaaactgctctagagcatagagaaacatgaaaaacttcccaatgtattataccaagtcagcatacctagatactcaaaactgaagatagaagcaaaaaatgaaaacaaaataacaaaagtatagatatcttacttctgaaaacaggtgcaaatatcacagataataaaatactcattagtgtttgcatccagttaagtattacaatgaatattacttcacaattaagcttggtttagtctaggaagccaaacragtttcaacattaggacacatgctgaagatctttactacattaatgggttaaaagagaaaaattatacttccattctcaaaagataaggaagaaaaatatttgaacctgtttctttggggggaaaaaa

SEQ ID NO: 585991 - DNA, 636 bp, Homo sapiens
  misc_feature 1, 2, 3, 4, 5, 6, 7, 8, 9, 10, 11, 12, 13, 14, 15, 16, 17,18, 19, 20, 21, 22, 23, 24, 25, 26, 27, 28, 29, 30, 31,32, 33, 34, 35, 36, 37, 38, 39, 40, 41, 42, 43, 44, 45: n = A,T,C or G
nnnnnnnnnnnnnnnnnnnnnnnnnnnnnnnnnnnnnnnnnnnnngtgttcacacttatgaaatacacttgaaaagcatgggtgaattaattctcgagaataggttaatcaccaacattgactcaggaagaagtggaaaatgtaaacaaacccaaaacaatacaaaagattgaaaagctacaaaaggatctactcagattattttatagaataaatttacccagatcttcaaggaagagaacatttcaatattaagaaactgctctagagcatagagaaacatgaaaaacttcccaatgtattataccaagtcagcatacctagatactcaaaactgaagatagaagcaaaaaatgaaaacaaaataacaaaagtatagatatcttacttctgaaaacaggtgcaaatatcacagataataaaatactcattagtgtttgcatccagttaagtattacaatgaatattacttcacaattaagcttggtttagtctaggaagccaaacaagtttcaacattaggacacatrctgaagatctttactacattaatgggttaaaagagaaaaattatacttccattctcaaaagataaggaagaaaaatatttgaacctgtttctttggggggaaaaaa

SEQ ID NO: 585992 - DNA, 467 bp, Homo sapiens
tggaattctctaccacccgggctcccaccaagcaaaatctacagaagcccactgctagaggttttttacagccactaaaggtaatgaaagcaaaagcaaaaaacaaacccagctcaactgctgactcagttgactctaccctccaccctaatgaagagcctgcgtatttccaaatgtatatgttatttacctcagtaaattattttctacacatcatatctgtgccattcaatcaaaaattgagacacaataaagatttaagaaaaaaacattttcaagraatcaagcaatcaacagaccacatacacagatgaccaaatgttagaagtatctgataggactttaaaataactaatctatgaaagaacctagtggaaaaagtgaacaacatgtatggacagatagaaaattttagcagaaagttggagacaataaaaaagttgaatggcaatgttagaaatgaaaat

SEQ ID NO: 585993 - DNA, 564 bp, Homo sapiens
ttaaagacttaaatgttagacctgaaactgtaaaaactactaggaaaaaaaaaaccagcttaagaacatggtccttatagggattgttgtgctgcctacactcatgcttcctccagctgaactgacagtcacagaggctgacctgccttcatccctaataggtaatggagggccttgattttcatacctagaggatgaaggagttagattagatcagtggcttgcaaactgtgttccttggagccctagggttcyaagaaggtttctcatgaacatcataatgaataaagagagggtatgccaaatcaacttttatctgtttcatagatgacgatctgcttctgcttgtggaaaccagagcttgattgatataaaatactgtcaaacattggattcattagtctttaaggtccatatgtgattcacttacttgattcagtatatttgtttgcaaataaaaaattataatatggggagtttttaataaatatctattatatgaattaataaaataatagtttcaatatcataaatatatagattagattactgcttaaaacaacc

SEQ ID NO: 585994 - DNA, 495 bp, Homo sapiens
tgcaacaccattcacaatagcaaaaacatggaatcaacctaaatgcccatcaatggtatgcagggtttaaaaaaaaacaatgtagtacatagacaccgtggaatactattcagccattaaaataaaaagaaagaaaaaaaacacgagagcatgtcctgtacaggaacaaggatggagctggaggacattatccttagcaaactaatgcaggagtggaaaaccaaatactgcatgttctcacttttaagtgagagataaataatgagaaccaatgggcataaagaggggaacragagacactggggcctacgtgagggaacagagtgggagtggggagaggatcaggaaaaagaactatcaagaactatgcttagtacctgggtgacgagatgatctgtacaccaaacccctgtgacacaaatttgcctgtattaacaaatgtacatatgtaccccaaatctaaaataaaagttacaaaataaaataaaaataaaa

SEQ ID NO: 585995 - DNA, 495 bp, Homo sapiens
tgcaacaccattcacaatagcaaaaacatggaatcaacctaaatgcccatcaatggtatgcagggtttaaaaaaaaacaatgtagtacatagacaccgtggaatactattcagccattaaaataaaaagaaagaaaaaaaacacgagagcatgtcctgtacaggaacaaggatggagctggaggacattatccttagcaaactaatgcaggagtggaaaaccaaatactgcatgttctcacttttaagtgagagataaataatgagaaccaatgggcataaagaggggaacaagagacactggggcctacgtgagggaacagagtgggagtrgggagaggatcaggaaaaagaactatcaagaactatgcttagtacctgggtgacgagatgatctgtacaccaaacccctgtgacacaaatttgcctgtattaacaaatgtacatatgtaccccaaatctaaaataaaagttacaaaataaaataaaaataaaa

SEQ ID NO: 585996 - DNA, 626 bp, Homo sapiens
accattttcttctctctctctctctcctcaatcttcccacattaattcatgcaaatagacaacttcaattttctttcccctcatcatattctttctccaccatagagtgccatggcttgccagttagctcgacctagatggaagacatattaatactctgagaataaattctaagatttgaacaaacaaatttggttttaaaaagcaggagggatttagacatcttctctattcttaagcctccactccaattttatttccttcttaagaatgtcaaataccatccctattctgcccatgtaagraaaagtatccttcttctactttgcagctgggaattcaatttaagaggaaattaaaatacatttggctaattgttacaaaatattattttgaatgaaatgtttaatggccatctgcaattcttctttgagtttcctaatggcatagttccctggttttctattattttatgtttttaccaatgtttttactccttttctgtgatatgttttgaaaataatttcctcagactatctaaatcagtatttacctatttaatttttacatagccagttttctctatcttttcttttgtgccttcttgctttttaattttatttagg

SEQ ID NO: 585997 - DNA, 626 bp, Homo sapiens
accattttcttctctctctctctctcctcaatcttcccacattaattcatgcaaatagacaacttcaattttctttcccctcatcatattctttctccaccatagagtgccatggcttgccagttagctcgacctagatggaagacatattaatactctgagaataaattctaagatttgaacaaacaaatttggttttaaaaagcaggagggatttagacatcttctctattcttaagcctccactccaattttatttccttcttaagaatgtcaaataccatccctattctgcccatgtaaggaaaagtatccttcttctactttgcagctgggaattcaatttaagaggaaattaaaatacatttggctaattgttacaaaatattattttgaatgaaatgtttaatggccatctgcaattcttctttgagtttcctaatggcatagttccctggttttctattattttatgtttttaccaatgtttttactccttttctgtgataygttttgaaaataatttcctcagactatctaaatcagtatttacctatttaatttttacatagccagttttctctatcttttcttttgtgccttcttgctttttaattttatttagg

SEQ ID NO: 585998 - DNA, 561 bp, Homo sapiens
tctttgctcttccataagaagcaatttctcatccattcaaattttataatgacatcacaataattcagtcacatcttcaggcttcacatctaattctacttctcttgctatttccactgcatttggagcatttgcaattacttgtccgctraacttctggactcatcaacgtcattcatggaggttggaatcaacttctttcaaactcctataaatgttgatattttgacctcttccaaccaatccatgaatggtattagtggcatttaaaatattaaattcttttaagaaggttttcagtttacattgccaagatccatcagaggaatcactatctatggcagttatagccttacaaaatgtactttctaaacaataatacttgaaagtcaagatgactccttgattcaatggttgcaaaatgaatgttttgctatcaggcaatacaattttaatctccttgtatgtctccatcagagctcttgggggaccaggtgcatggtctatgaatagcaatatgttcaagtgaatttttttctgaacagtaggtcttaacaatag

SEQ ID NO: 585999 - DNA, 482 bp, Homo sapiens
attctgcttcatgatctaatcacctccccagagctctaccttttcataccatgtctttcaaggttaggatttcaacattaaattttagaggacacaaacattcagaccacaagaaatgatttaaaaagagttggcaaaagtatgtgtgcagcctaaggggaaacaatgttaacaagtaaatagggctgagtcaatcgtttcaaaatattggcctgagaaaatgctttcagagtcacagtaagtgaatcttaaatttatatttagaatacaacagtgtgacctagagcctgtttgacttgcaattttctgtaacgttgaaagtatagttatttgaacattatttggttacatttattctgttwtatcctaggttaaagaaaattaaaaccttgggtaggagtcagttgtaatggacatgacttattaagattataggcatatttactagtttatttttacttgactcactcatttgttaaaat

SEQ ID NO: 586000 - DNA, 613 bp, Homo sapiens
tataacactattcaggggtggttttgaaaagacattggaagctgagcagtagcatttgcctgtaagtctagctacccaggatgctaaggcaagaggattgcctgagcccaagagtttagggctatagtatgctatgatcacatttgtgaataatcactccactctagcttgggcaacataatgagaccccatctctcaaacaaacaaacaaacaaaaaacagtataaaatggtgaggagggaaaattttttccatgcagtagattcgcaactgagctactaggaaactgtttattcagtttgtgtggaaagagaagtgacctgaagttagttagagtgtgagtgtscgtgtgtgtgtgtgcgtgtgtgtgtgtgtgtaggaagtgggtaatggtatggtcacctagttaggggtgtggaagaataaaacccggaaattcaaaagcaaggagatctgagggagaggcataaaaatgaatgtatgcaagtgaagataacatgttaatatttttgcttcacatattaacacccacgcaaagcatccattcactgtggagaaggcactagacaaccttctagtggagaaggcagtagacaaaatgactgagtcagtt

SEQ ID NO: 586001 - DNA, 613 bp, Homo sapiens
tataacactattcaggggtggttttgaaaagacattggaagctgagcagtagcatttgcctgtaagtctagctacccaggatgctaaggcaagaggattgcctgagcccaagagtttagggctatagtatgctatgatcacatttgtgaataatcactccactctagcttgggcaacataatgagaccccatctctcaaacaaacaaacaaacaaaaaacagtataaaatggtgaggagggaaaattttttccatgcagtagattcgcaactgagctactaggaaactgtttattcagtttgtgtggaaagagaagtgacctgaagttagttagagtgtgagtgtgygtgtgtgtgtgtgcgtgtgtgtgtgtgtgtaggaagtgggtaatggtatggtcacctagttaggggtgtggaagaataaaacccggaaattcaaaagcaaggagatctgagggagaggcataaaaatgaatgtatgcaagtgaagataacatgttaatatttttgcttcacatattaacacccacgcaaagcatccattcactgtggagaaggcactagacaaccttctagtggagaaggcagtagacaaaatgactgagtcagtt

SEQ ID NO: 586002 - DNA, 639 bp, Homo sapiens
tgccacggtcatctgctgcacagatcaacccgtcacccaggtattaagctcagcatcccttagctattctttctgatgctctcccttcccccacccccacccccaacaggcccctttgtgtgttgtttcccaccatgtgtccatgtgttctcatcattcagctcccacttataagtgagaacatgtggtatttggttttctgttcctttgtcagtttgctgaggataacagcttccagttctgtccatgtccctgcaaaggacattatctcatccctttttatggttgcatagtatttcatggtgtatatgtaccacatttttttatccagcctatcattgatgggcatttgggttgattctatgcctttgctattgtgaatagtgctgcaatgaacatatgcatgcatgtatgtttatmatagaatgatttatatgcctttctaataagcgccatactgactggtatgagataatatttcattgtggttttgatttgcatttctctaatctccttagagattctgagcatcttttcatattatttttggctgcttgtatatcttcttttgagaggtatctgtttgtgtcctttgccatacaagttatagaattgctgggtaaaatggtatttctgctt

SEQ ID NO: 586003 - DNA, 561 bp, Homo sapiens
tggtgaaaccccatctctactaaaaatacaaaaaattagctgggtgtgtggcgggcacctataatcccaactactcaggrggctgaggcaggagaatcacttgaacccgggacacggaggttgcagcaagctgagatcgtgccattggactccagcctgggcgacaatagcgaaactccgtccccccaccaaaaaaaataataaaataaataagtatgctgaagccactgaggatgagagcaagacactgggataaggggagcctggtagccaggtcctaaagccattccagagggctgcagaatggcccagagaagaagttctcagctaaggcatggcactaatgactaatcgatggttgtaatcatttcttcctttttttttttttttgaaacaaggtcttgctctgtcacccaggctggagtgcagtggcacaatcatggctcactacagccttgactcctgggttcaagcaatcccccttccttagcttcccaaagtagcattacaatcagcaccaggaattgagcccagctgaactgagccaccatacgcatagca

SEQ ID NO: 586004 - DNA, 585 bp, Homo sapiens
tcaaccctgtcaaccatgccaagaaagaagagagcagcttatgtccaaagaaactgggaaagaaaaaacaaatctccatgatgctttctttagatgacactaagcaactgaatgggggattaaaaaacaaaaacaaacaaaaaaacaaaacaataaaaacaccaccacagtaaacaaacagaaaaaaccaaacacacattgacctcatctctgggtcttttgtaactgaagaaacaacacctgagttacatggaacaaacactttatcttagtcttcttcaccttcrctgtcctatttttgaaccctagacaccacacctgcctagctgtcattgggcttttaaattctctgaaatagactatctaggtgtttgagagcagtacatagaaattagtaagcacctgagaggtgctgatttctctctctctctctcttttttttttgagacagtctcactctgttgcccaggctggagtgcagtggtgccatctcagctcactgcagcctctgccttccaggtcaggcaatattcgtgcctcagcctcctgagtagctgggactacaggcgcatgccaccatgcctg

SEQ ID NO: 586005 - DNA, 585 bp, Homo sapiens
tcaaccctgtcaaccatgccaagaaagaagagagcagcttatgtccaaagaaactgggaaagaaaaaacaaatctccatgatgctttctttagatgacactaagcaactgaatgggggattaaaaaacaaaaacaaacaaaaaaacaaaacaataaaaacaccaccacagtaaacaaacagaaaaaaccaaacacacattgacctcatctctgggtcttttgtaactgaagaaacaacacctgagttacatggaacaaacactttatcttagtcttcttcaccttcactgtcctatttttgaaccctagacaccacacctgcctagctgtcattgggcttttaaattctctgaaatagactatctaggtgtttgagagcagtacatrgaaattagtaagcacctgagaggtgctgatttctctctctctctctcttttttttttgagacagtctcactctgttgcccaggctggagtgcagtggtgccatctcagctcactgcagcctctgccttccaggtcaggcaatattcgtgcctcagcctcctgagtagctgggactacaggcgcatgccaccatgcctg

SEQ ID NO: 586006 - DNA, 585 bp, Homo sapiens
tcaaccctgtcaaccatgccaagaaagaagagagcagcttatgtccaaagaaactgggaaagaaaaaacaaatctccatgatgctttctttagatgacactaagcaactgaatgggggattaaaaaacaaaaacaaacaaaaaaacaaaacaataaaaacaccaccacagtaaacaaacagaaaaaaccaaacacacattgacctcatctctgggtcttttgtaactgaagaaacaacacctgagttacatggaacaaacactttatcttagtcttcttcaccttcactgtcctatttttgaaccctagacaccacacctgcctagctgtcattgggcttttaaattctctgaaatagactatctaggtgtttgagagcagtacatagaaattagtaagcacctgagaggtgctgatttctctctctctctctcttttttttttgagacagtctcactctgttgcccaggctggagtgcagtggtgccatctcrgctcactgcagcctctgccttccaggtcaggcaatattcgtgcctcagcctcctgagtagctgggactacaggcgcatgccaccatgcctg

SEQ ID NO: 586007 - DNA, 540 bp, Homo sapiens
catttttagtaaagacagggtttcactgtgttggccaggctagtctcaaactactgaamtcaggtgatccaccccttcggcctcccaaagtgctgggattacagatgtgagccaccatgtccggcctgagaggtgctgatttcttttgtgatgttaaaggaattagtttcctgatgaggttgagctgctatctgagtagaacccaaggaggccaaaaggtgggtacttcagggaagaccctggagtggtaagacaccagcactgctgcccagtaccatgcgagaatcttttctaaagaaaaaagtgtgcagggggcgaagaaaggaagctggcttgtacagtagcagagatggacacgtaagtagctgacactgatcaataatgcccatgcgccaggcactgtactggggctgcatgtgcatgatatagtctgtcagtcctcacagtagctccatgaggttgatgcaatgacatcataacagagaagttaaggcaattgcccaaagacacacagccagcaattggcagggccaggctcta

SEQ ID NO: 586008 - DNA, 410 bp, Homo sapiens
caagactactaagaacacctttatgcacataaactagaaaacctaaaggagatgggtaaattcctggaaatatacaactcacctagattaaaccaggaagaaataaaaactytgaacagaccaatagcaagcagcgataaatggtaataaaaagttaccaagaaaaaaaaaaaagtccaggaccatacaggttcatagctgaattctattagacattcaaagatttggtaccaatactattgacactattccaaaacacagagaaagagggaatcctccctaggtcattctgtgaagccagtatcaccccaataccaaaaccaggaaaggacataacaaaaaaggaaactacagaccaatatccctgataaacgtagatgtaaaaatcctcaagaaaatactagctaacc

SEQ ID NO: 586009 - DNA, 410 bp, Homo sapiens
caagactactaagaacacctttatgcacataaactagaaaacctaaaggagatgggtaaattcctggaaatatacaactcacctagattaaaccaggaagaaataaaaactctgaacagaccaatagcaagcagcgataaatggtaataaaaagttaccaagaaaaaaaaaaaagtccaggaccatacaggttcatagctgaattctattagacattcaaagatttggtaccaatactattgacactattccaaaacacagagaaagagggaatcctccctaggtcattctgtgaagccagtatcaccccaataccaaaaccaggaaagkacataacaaaaaaggaaactacagaccaatatccctgataaacgtagatgtaaaaatcctcaagaaaatactagctaacc

SEQ ID NO: 586010 - DNA, 474 bp, Homo sapiens
gaataaacattctttattatatttgatttattcttgacattttctctgtagagaagtgtgtgaaatactgacttcccttttaaactcattgggaataaaggatgttcagatttgattggattcttagtaatacctaaggaaacccaattaaaaatttgagagtttgactcttcccagtaaaccagctagacaaatacaggtrtgttcttcaagtttgcagacaagtatctattgctttgtattgttttctttacacacaaggtgtataaagaaaaattaaaattgagccaggcatcatggctcacacctgtaatcccagcactttgggaggctgaggtgagcagatcctttgagctcaggagtttgaaaccagcctgggcaacatggcggaaccccctatcccctctctacaaaaaagtgcaataattggcctgttgtggtggcatgcacctatagaccctgctacttgggagg

SEQ ID NO: 586011 - DNA, 474 bp, Homo sapiens
gaataaacattctttattatatttgatttattcttgacattttctctgtagagaagtgtgtgaaatactgacttcccttttaaactcattgggaataaaggatgttcagatttgattggattcttagtaatacctaaggaaacccaattaaaaatttgagagtttgactcttcccagtaaaccagctagacaaatacaggtatgttcttcaagtttgcagacaagtatctattgctttgtattgttttctttacacacaaggtgtataaagaaaaattaaaattgagccaggcatcatggctcacacctgtaatcccagcactttgggaggctgaggtgagcagatcctttgagctcaggagtttgaaaccagcctgggcaacatggcggraccccctatcccctctctacaaaaaagtgcaataattggcctgttgtggtggcatgcacctatagaccctgctacttgggagg

SEQ ID NO: 586012 - DNA, 584 bp, Homo sapiens
tccgtgtgtgaatttcatcatggtgccaatgtgatatccaactcatagtaaagcacgttcagaaaacatttgctggatttgaccttgaaatctaaatacagagcacctcagctgatagatcctctgttaggtcaggtcagaaagcacgtactagtttaaacaaagttggttggagattcataaagtacattaaagagggcttaatatgtttatctcatctggttggaaaaaaaaagaaagaaaaaaggaatgtagaaaaagggtattttcactctayacagggaacccactgaataaatgtttgcttgtgttgacgtctatgtatctggcctccaaagcctattcctgaataagtagcaatatttttaagctgaaggaaagaaagaaaaaagggaagagggtaaaaagtttacctctctgaaagactcatccatctgatcatttatgtctttgattttttgcttaagttcctcgaggttgttcagaatgactatccgggtttcttccattgcagccaactcctgagatctctgttcttcacttataccctctggggtctgcgattaatcaacacagaaatggat

SEQ ID NO: 586013 - DNA, 552 bp, Homo sapiens
tagcatatttccaaagtcatctgcatctgtaagtgttacataaagcaagttcttgactggtaactctcaggttttctaaatatcattaagattgttctgtatagttaagtcaacttacagtgtttttcacattcctctcttctccatttatccctaaatcgattattaacattgtactttgttaggcaaataatccagtgtggaaattaattgaagagaaagagcatgcaaaacaaataggaaggttgttttaaaaagaattttctgtctgctgtctcaaggtaatatatgtccaccttcagaaagtaataagtaaaaaaatgtgtttcttggaatccatcagctctgctcacttgtactctttctacactgctgtctggwaacctgggtgtccttgatgtttcctgcctctaaaggatgcagagtcttacctctcttgcaacaacagatgctgcactaagcttcagaggcctcctattccacaattacacgcttgagcaattaaaaacatctgccaagatctgctcgtgtacgcaccaacagcattcttgt

SEQ ID NO: 586014 - DNA, 552 bp, Homo sapiens
tagcatatttccaaagtcatctgcatctgtaagtgttacataaagcaagttcttgactggtaactctcaggttttctaaatatcattaagattgttctgtatagttaagtcaacttacagtgtttttcacattcctctcttctccatttatccctaaatcgattattaacattgtactttgttaggcaaataatccagtgtggaaattaattgaagagaaagagcatgcaaaacaaataggaaggttgttttaaaaagaattttctgtctgctgtctcaaggtaatatatgtccaccttcagaaagtaataagtaaaaaaatgtgtttcttggaatccatcagctctgctcacttgtactctttctacactgctgtctggtaacctgggtgtccttgatgtttcctgcctctaaaggatgcagagtcttacctctcttgcaacaayagatgctgcactaagcttcagaggcctcctattccacaattacacgcttgagcaattaaaaacatctgccaagatctgctcgtgtacgcaccaacagcattcttgt

SEQ ID NO: 586015 - DNA, 572 bp, Homo sapiens
actggggttgggggaggatgaatcttttaacaaacagaaagatagaaaggaaggtgactctgagagtgctgtgaagaatgggagggtggtgacagaaaggctggtgacagatcacactamggaatttggatgcatagtcaagtacagtgtgatgcaaaccacagtaatatggtctaatttcttctttttaatcacattggctgctgtgaagagaatggattgaaggaaagcaagtggaagtagactaaataagagattttcataatagagaagagaatgctgttagtggagatgcagagatgttgaagcaatcaagaaacaagctggtaatcaactgaatgtagggatgataaggaaagacgtgtcaagatcaatttccaggtttctgttgaacatataggtgaatagagatgcaatctcctggttggaaaaactagaggatggagggtggagggtggaaggcaagggaaaagataagatcaagagttcagttatgggtgtgttcaattggaaatacccatgaaatatccaagtggggatgtcaggtaggcacaggatatgagtcagaattc

SEQ ID NO: 586016 - DNA, 556 bp, Homo sapiens
aactgtgttataggtctgataagtgccagaacttcaaatccaactctatgttctttctacttaagctgaaatacagattctgctcttcaagtccagctggacacagtggcccacacctgtaatcccagcacttttgggaggccgaggcgggcagatcacttgaggtgaggagttcgagaccagcctggccaacatggcaaaaccccatttctactaaaaatacaaaaattagtcrggtgtggtggcaggcacctataatcccagctactcgggaggctgaggtgggagaattgcttggacccaagaggtgggggttgcaatgagccaagattgcaacactgcactatagcctgggtgacagagtgagaccctgtctcaaaaaaaaaaaaggccaagggttctgtggaggtaagaagtcaatttattccacaaatcattaaaatataagatgacagagaggtactgagcctcctgtagtcctgatatctttatttttaagcacttcgcctatttctggtcattttactcctaattttcctggggaaagtgtgaaatg

SEQ ID NO: 586017 - DNA, 546 bp, Homo sapiens
caattgtttatcttgacttgttcaagttatttcccttctttcaagcagtaagtggtcaaaaggtagatagcatggaagggaaaaattaagtgttttataatactcattctgcacaatcagctgctaagtaatgaagatatgatattatcataattattatttttactttacaatattttagaaacctaccccacccactcattttttttttttttttttttttttggagacagagttgctctgtcacccaggctggagtacagtggtgcgatccagctcactgcaacctcggcctcccaggttcaagtgattatcctgcctcagcctcccgagtagctgggattacaggcatgcaccaccacacccagctaatttctgtactttaatagtgatggggtttcgccatattggccagggtggtctcagactcctgacctttggtgatctgcccacctcagcatcacagagtgctggaattacaggcatgagccaccgagcccggcctcatgyactcaatttgtgatgtaaagcgaaatgcattacaaa

SEQ ID NO: 586018 - DNA, 655 bp, Homo sapiens
gtgtgtgtgtgtattttaaccttttaattgaggctggaattcttgatatggagggtttgacagttttatgaagaaatcattatttgggcacgcagtggtgacacttagctaccccacataacgttatcttgcaaatatcttaaatgtgatggcctgcttacttgttatcttgaaaatgtatttgctttcaracttctcccagttacttaaaaatacatgtatcagcttttaggaacttaattcagtatgataaagagttagtattttatacttaaaaaaaaaatcagctaggagccagtgatatgaccccaaccttctttgtaaagtcagctactataatttttaaggcagtatacacattttattgatgttgacttgcagaatgcacgtagcttttttaaaagatactttatcatgaaaaatattaaactacacaaaaatttaaatgtatactaaaataataataaaataataaacaaagatcaatgtacttatcacccagcttcaacaattatttatatatgctaatcttgtttcatttgtaaacctcactttaccctaaaacatggattgttataaagcagattccaaacatcatcatatttcattcgtaaataatttacaatgtaactctaagagtatttttaagatatat

SEQ ID NO: 586019 - DNA, 433 bp, Homo sapiens
tttattcataacatcatcttattgtaaacatcagtgctgaaagagaccagcctgtggaccaccagtgtgcggggagtgctttgaacaccaagcatcaaccactgtctgccacaaaatgcggactccaagtmagcgtctctgctccatggctcttgcagggcatgagtatagactcaaactttgttataaagtggaaattttgacccaaaccctaattttttttttgaaatgaattttcctgaatttgcttctgtaatctaaatccctctgcattttctcaacaatatgaaacgatttacagttttctatcacttgctcttgcagtcagtccctcttcgattaattcctactatattgattggatgatcctaaggcagtgtctgtatatgacagtgtgaaatgacaagtaatacgttgcataatttgggaattc

SEQ ID NO: 586020 - DNA, 433 bp, Homo sapiens
tttattcataacatcatcttattgtaaacatcagtgctgaaagagaccagcctgtggaccaccagtgtgcggggagtgctttgaacaccaagcatcaaccactgtctgccacaaaatgcggactccaagtcagcgtctctgctccatggctcttgcagggcatgagtatagactcaaactttgttataaagtggaaattttgacccaaaccctaattttttttttgaaatgaattttcctgaatttgcttctgtaatctaaatccctctgcattttctcaacaatatgaaacgatttacagttttctatcacttgctcttrcagtcagtccctcttcgattaattcctactatattgattggatgatcctaaggcagtgtctgtatatgacagtgtgaaatgacaagtaatacgttgcataatttgggaattc

SEQ ID NO: 586021 - DNA, 428 bp, Homo sapiens
ctgaattcaattacatgtcatcagtgcatgctttattcataacatcatcttattgtaaacatcagtgctgaaagagaccagcctgtggaccaccagtgtgcggggagtgctttgaacaccaagcatcaaccactgtctgccacaaaatgcggactccaagtcagcgtctctgctccatggctcttgcagggcatgagtatagactcaaactttgttataaagtggaaattttgacccaaaccctaattttttttttgaaatgaattttcctgaatttgcttctgtaatctaaatccctctgcattttctcaacaatatgaaacgatttacagttttctatcacttgctcttgcagtcagtccctcttygattaattcctactatattgattggatgatcctaaggcagtgtctgtatatgacagtgtg

SEQ ID NO: 586022 - DNA, 569 bp, Homo sapiens
atttcatgactaagtcctataaattaaagcactaatttttagctccaaaatttctttttttgatgatttcaatttctgtgtttwttttttatatgatcacttattgttttcctcatgcgttgaattttttctctgtatttcttgaagtttgttgagctttcttaaaacagctattttaaattcttttttacataattcgtacatctccatttgcttaagattggtcattgacaccttactttgtttgtttggtgatatcatgtgtttttatttttcttaattcttgtggtttttcactgatgtctgtgaattggagaagtaggtacttgattctgttctttacagcctggctttgtctgggtaagctccttaacagtaaacctgtccagagattctggaaaaactgtctggcatggtccctaagttcatgactgctacagccattgcatcactagacggcatcctaagcctagggccatagtggctggtacagtgccaggctggaattctttggtcactaatgccagtgcagtgtttgggcacacccacagctcatagacactgaggcc

SEQ ID NO: 586023 - DNA, 582 bp, Homo sapiens
ttaggaaaaatgtttttttcaaaatattgccattcattgaaaatgtacctgagcccccaagaactctgaagcagatgtacaaagagatgaatgttgttttcatgcctgctaacacaacatccattctgcagcctatggatcaaagagtaaatttgactttcaggtttcattattaaataaatacattttgtaaggctatagctggcacagatagtgatttatttgatggatctgggcaaagtaaattaaaaaccttctgtaaaatatwcaccactccagatgccattaagaccatttgtgattcataggaggaggccaaaatatcaacattacaggagtttgggagaagttgattccaactcttgtggatgactttgagggattcaagacttcagtggaggaagtaacttgcagatgtggtggaaatagcaagagaactagaattagaagtgaagcttgaacatgtgacttaattgcttcaatctaacggtaaaacttgaatgaatgaaaaatggcttcttatggatgagcaaagaaagtggtttcttgagatggaatctactcctggtgaagatgctgtga

SEQ ID NO: 586024 - DNA, 544 bp, Homo sapiens
tgaaaatgtacctgagcccccaagaactctgaagcagatgtacaaagagatgaatgttgttttcatgcctgctaacacaacatccattctgcagcctatggatcaaagagtaaatttgactttcaggtttcattattaaataaatacattttgtaaggctatagctggcacagatagtgatttatttgatggatctgggcaaagtaaattaaaaaccttctgtaaaatatacaccactccagatgccattaagaccatttgtgattcataggaggaggccaaaatatcaacattacaggagtttgggagaagttgattccaactcttgtggatgactttgagggattcaagacttcagtggaggaagtaacttgcagatgtggtggaaatagcaagagaactagaattagaagtgaagcttgaacatgtgacttaattgcttcaatctaacggtaaaacttgaatgaatgaaaaatggcttcttatggatgagcaaagaaagtggtttcttgagatggaatctacwcctggtgaagatgctgtg

SEQ ID NO: 586025 - DNA, 570 bp, Homo sapiens
tttcaaactacctatctaacaaaagattaataatcagaatatgtaagtagctcaaacaactctataggaaaaaatgtaatcatccaattaaaaaatgggcaaaagggctgggtgtggtggctcatgcctctaatcccagcactttgggaggccaaggcaggtggatctcttgaggtcaggagtttgagaccagcctggccaacatrgcaaaaccctgtctctactaaaaatacaaaatagcagggcgtggtggcatgcacctgtaatcccagctactcgagaggctgaggcaggagaatcacttaaacccaggaggtggaggttgcagtaagccaagattgagccactgcactccagcctgggcaacagagcaagactctgtctccaaaaaaaaaaaaaaagaaaaaatgaaaaaaaatgggcaaaagatttgaatagacatttttcaaaagaagacacacaaatggcaaacaggtctatgaaaatgtgctcaacatcactgatcatcagagaaatgcaaatcaaaactacaatgagatatcatttcaccctcgttattaaaatggctta

SEQ ID NO: 586026 - DNA, 499 bp, Homo sapiens
tctggggaggctgaagcagcagttagtgagaaggaggcaaaaccagagaagggcgatgctgccattctcattacccgattccgagcctgggtccggccagagctggggcagaggggagaggctgtggaccagatatgataagagttctgatgaaagattggactgggctttggagagaccaagaatgtgatcatgtttaggattgacctagccatttactagctatgtggccccacaggtcacttaaacctttacgttaattaaacccctccctgcctcagttcaattaaagtacctggggattaaaagagctggtgcatgcacagcccttggtacggtagccagcacacagtaagtgcccaggaagtgttcgctttccgtagtagaagtggtarcagtagcaatagttgtgacagcagcagtagtacttctaccgatagacatcgtgcccaaaagtgaccacccctcccgcctcccccgagaaaaaccccaaatgcta

SEQ ID NO: 586027 - DNA, 286 bp, Homo sapiens
atcaaaaaaacacacaatggatacaaaaaaataaaaatcaagaaattaaatcataccaccagagaaaatcacgtttactaaaaggaagacaggaaggaaagaaagaagaaagagaaaaatcacaaaacagacaaaaaacaaatgacaaaatggcaggtgtaaacttctactgatcaataataacattgaatggaaacgctacaatgaaacaacagaatggttrgatagatttaaaaaaaaaaaaccaatgatctgttgcctacaagaaacacacttcacttataaa

SEQ ID NO: 586028 - DNA, 608 bp, Homo sapiens
ggtgcagcacatcaacatggcacatgtatacatatataacaaatctgcatgttgtgcacatgtaccctaaaacttwaagtataataataataataataaatcaatcacgaccctttcatgtgaaatctttagtgttgtgagcccttaaaagggacagaaattgtgcactcggggagctcggattttaaggcagtagcttactgatgttcccagctgaataaagcccttccttctaccaaaaaaaaaaaaaaaaagaaaaaagaaatcagaaaaggtagcatatttgtattattcagggttctccagagaaacaaataatgggataggtacgtagatatacaaacagatagacaaagatttattacgaggaattggctcacacaagtatggaggctaagttccagaatctgctgtcttgtctgtaagctggaggacaagaaagccagtggtataggtctggtccaaaaccagaggcctcagaaccaggtgagccaatggcataagtcccagtttgagtttgaagatccaaaaaccaggcgcactgatgtctgagggcaggagaaaatgaatgtcccagtttaaggagagagagcacatttgcctttcct

SEQ ID NO: 586029 - DNA, 608 bp, Homo sapiens
ggtgcagcacatcaacatggcacatgtatacatatataacaaatctgcatgttgtgcacatgtaccctaaaactttaagtataataataataataataaatcaatcacgaccctttcatgtgaaatctttagtgttgtgagcccttaaaagggacagaaattgtgcactcggggagctcggattttaaggcagtagcttrctgatgttcccagctgaataaagcccttccttctaccaaaaaaaaaaaaaaaaagaaaaaagaaatcagaaaaggtagcatatttgtattattcagggttctccagagaaacaaataatgggataggtacgtagatatacaaacagatagacaaagatttattacgaggaattggctcacacaagtatggaggctaagttccagaatctgctgtcttgtctgtaagctggaggacaagaaagccagtggtataggtctggtccaaaaccagaggcctcagaaccaggtgagccaatggcataagtcccagtttgagtttgaagatccaaaaaccaggcgcactgatgtctgagggcaggagaaaatgaatgtcccagtttaaggagagagagcacatttgcctttcct

SEQ ID NO: 586030 - DNA, 532 bp, Homo sapiens
ttctgttcaggaaggcagtgtggtataagagagatatccccgttgaagcctgacattgtccctagtagcttgggtgaattacttaacttctcagtctcagtttcttatctataaaatgagagtaaataatgtctgctcttaggataggtaaaatggttgccaggattattatagataaagtaacattcctatcacagtacctaggatatatagctatcatcagcatctttatcatcattattttattrtcactactgacaaagattgttagaagtcagtgccaagacagagtaaaagcctctgagtgaacaaaaaggtgttgttcaggaaacgtaggtttattttgggcactcagaaagcatttttgctaatttttatttcgcaaccactttaggagagttaaaatttctggaaatgtactatttttattgtttttgtttatttatttatttatttattttgagacagggtcttgccctgtcacccagggtggagtgcaatggtgctatcatggctcactgcagcctccatc

SEQ ID NO: 586031 - DNA, 624 bp, Homo sapiens
ctaaacactgctttagaattcatatagttggtattttattgactttttaagtcaattttttcctctctttgatattagagctcagcacatcagcttaaaagaactgtgccctgatggatgraaagtttggatctcagcaggattctctttctactaaaagcaatgaaatttaggatgagctattaggattgggggcttgaggtgggcaaaggaggggaggcaagtgtgagggattgccagagaaaatatcctgaagggttcttaagcctgcaggaatttatgggataatttccatccttaaacgagatctttaaagattttcacgctttcttgttgccagcggggtcttctgttgaaataagataatttctgtgtttgcgtacctccaaagagtaagagaaaaaaatagtcacgttgacacattccttcttagatatcaaacagaatgacagcctgagttgaggacaaagaaaagtgacaagctttgcacatgccagggactctgaatcctctcatatattcagttatgtggatggtatttatatgcttagaagaaatatctgtgtaaaacaatcacataaaacacaataaaggtaaccaaagtttactggcaaagtacccaag

SEQ ID NO: 586032 - DNA, 623 bp, Homo sapiens
aagcacagaatgaatttttttgccatccattgttctggaggcattgcgaatgtctgacattccaggtgtagagttgtgtagctgactagacttcagamaacctcccggtctgagccaggagcactacaacctgtgaagaatgtgcacccggcctggctacacagcaacagcacccaatgggcccaggagccagcaggagacctttcttggaggaaggagtcttttttctttggtttgaaaatgcaggtgatgttttaaaattaaaattaaattaagatgcatgttaaaaacaaaccatcagtggctgcttctggaggcagggggatgcctgggaaggggcacgagggggctttctgggctgatgggaatgctcttttacttgataggaatgtgggttacacagatgtctgcatttgtcagtgcaaaactgattgaaccgcatgccaaagatccaggcatttcgttgtagagaagttacattaaaaacaatatttagagaggacctataggctgtcagtggtaacaaaatctagattaatgagttttccagataaaaacagtaacagttaaaaatcagaaacgtttttagttttactagtttgaaggaaaacgaaaaaacagca

SEQ ID NO: 586033 - DNA, 623 bp, Homo sapiens
aagcacagaatgaatttttttgccatccattgttctggaggcattgcgaatgtctgacattccaggtgtagagttgtgtagctgactagacttcagacaacctcccggtctgagccaggagcactacaacctgtgaagaatgtgcacccggcctggctacacagcaacagcacccratgggcccaggagccagcaggagacctttcttggaggaaggagtcttttttctttggtttgaaaatgcaggtgatgttttaaaattaaaattaaattaagatgcatgttaaaaacaaaccatcagtggctgcttctggaggcagggggatgcctgggaaggggcacgagggggctttctgggctgatgggaatgctcttttacttgataggaatgtgggttacacagatgtctgcatttgtcagtgcaaaactgattgaaccgcatgccaaagatccaggcatttcgttgtagagaagttacattaaaaacaatatttagagaggacctataggctgtcagtggtaacaaaatctagattaatgagttttccagataaaaacagtaacagttaaaaatcagaaacgtttttagttttactagtttgaaggaaaacgaaaaaacagca

SEQ ID NO: 586034 - DNA, 566 bp, Homo sapiens
aaaactaggatctaataaaatgataccaagtggtatgcaaattcctaaggtttaaacatagcacatacacaccaaaataaatggaaattctaacaattaaactttctccacggcttccgatcacttayctgtttgttctgactcctgaagagccctctgtactccttccagacatctcaaggcgcagtcaagtctccctcttccatgaagccctcctggactccctaccttctgcacaccagtgtttgacacgaacgcaccactgtgtccttccttgctaaggcactgtctgaatatcctgctgttcccttccagaccatgctgggaagggctggggagaatatctactttagagcagagatgttttcattcactgttatcttgctggcggacagcacagggcctgctgtacagttggtaccaatacatatttacaggtctaaggagggtcatacgtaaattaattatcctcacaacgctaaaaccaaagcaaatgcacttaaataaaccaataaccttctatcctaaaaaaagccaacacctcctactcctctgttcccacccat

SEQ ID NO: 586035 - DNA, 386 bp, Homo sapiens
gaccttcctaaatgtcctaacgaaggcactgagaaagctgggtgttggtcagggcaggactaagttcttccagtctgctccccaaccccgaaaaccttcctgagcctcagcagaggggcttcctttggccccaaaggcctggagctccctgcttgrcagggagggcagggcgaggcccccaggtagtagtctcctgcccggtcgggtgtttgttctgatttgtcacagccagctggatgtcagggcacctcactggtgccgcagcctccagcccactcggtatggaggccaaggtagagacagcagaatggagtctacactggcacttcagagaaaacagatttactgctgctcaaatctcagacttcttgattttcggggaattc

SEQ ID NO: 586036 - DNA, 386 bp, Homo sapiens
gaccttcctaaatgtcctaacgaaggcactgagaaagctgggtgttggtcagggcaggactaagttcttccagtctgctccccaaccccgaaaaccttcctgagcctcagcagaggggcttcctttggccccaaaggcctggagctccctgcttgacagggagggcagggcgaggcccccaggtagtagtctcctgccyggtcgggtgtttgttctgatttgtcacagccagctggatgtcagggcacctcactggtgccgcagcctccagcccactcggtatggaggccaaggtagagacagcagaatggagtctacactggcacttcagagaaaacagatttactgctgctcaaatctcagacttcttgattttcggggaattc

SEQ ID NO: 586037 - DNA, 386 bp, Homo sapiens
gaccttcctaaatgtcctaacgaaggcactgagaaagctgggtgttggtcagggcaggactaagttcttccagtctgctccccaaccccgaaaaccttcctgagcctcagcagaggggcttcctttggccccaaaggcctggagctccctgcttgacagggagggcagggcgaggcccccaggtagtagtctcctgcccgrtcgggtgtttgttctgatttgtcacagccagctggatgtcagggcacctcactggtgccgcagcctccagcccactcggtatggaggccaaggtagagacagcagaatggagtctacactggcacttcagagaaaacagatttactgctgctcaaatctcagacttcttgattttcggggaattc

SEQ ID NO: 586038 - DNA, 520 bp, Homo sapiens
aaattcacaccagcttttagaggactgataacagagagttttctttgattaatkgggggagagcagaggtgaacatgcaggagaagtgcaatgtggtaacctgggccggaagagagtccacagagggaggaaaatgatctcaaaataaggacaaagtcaaagacaattttcaacaaccacacaagttttttctccagaccagaccctgcaaaaggagatatgattgacatcacaatggctttttcagaaaacaactttttgtctaatagtggtagagaatccagtttaaattacaggtgtacattactgatcagaccaaggcatttatatgattggagatggtaacactagacatatgtccacagtgggatagactctgctcacaggcgctgctggtaggtagagcggtgtgtgtctttaacattcacttggtgttatcacttgatgtttccagacctgatttccccatggtttgaggaataaataaactattgagagtaatttaaagagaagccacaga

SEQ ID NO: 586039 - DNA, 407 bp, Homo sapiens
cagaattcagttcttcgtgatgccaagacagaagggagagataaaaattggaaatgttaatttgaaggctgtaggcagatattagagaaaaacaagagttaaaatttgataaggtttggcaatgygtgtaagatgacaagatctggtacaatttacaggcagtaacgaaactgttttttcatatttgtcagttacctgcagtttacaagaggttcaaacacaaagagttcgaagacaatgaacaggaccagaatctgataacccaccagggtgtgctatagttttccactgaaacacaaaaattctctccacagatacttcccttttgagcaagataatctcaaaggaccagacacagtcgctcacgtctgtaatcccagtactttaggaggccgaggtaggagaat

SEQ ID NO: 586040 - DNA, 407 bp, Homo sapiens
cagaattcagttcttcgtgatgccaagacagaagggagagataaaaattggaaatgttaatttgaaggctgtaggcagatattagagaaaaacaagagttaaaatttgataaggtttggcaatgcgtgtaagatgacaagatctggtacaatttacaggcagtaacgaaactgttttttcatatttgtcagttacctgcagtttacaagaggttcaaacacaaagagttcraagacaatgaacaggaccagaatctgataacccaccagggtgtgctatagttttccactgaaacacaaaaattctctccacagatacttcccttttgagcaagataatctcaaaggaccagacacagtcgctcacgtctgtaatcccagtactttaggaggccgaggtaggagaat

SEQ ID NO: 586041 - DNA, 407 bp, Homo sapiens
cagaattcagttcttcgtgatgccaagacagaagggagagataaaaattggaaatgttaatttgaaggctgtaggcagatattagagaaaaacaagagttaaaatttgataaggtttggcaatgcgtgtaagatgacaagatctggtacaatttacaggcagtaacgaaactgttttttcatatttgtcagttacctgcagtttacaagaggttcaaacacaaagagttcgaagacaatgaacaggaccaraatctgataacccaccagggtgtgctatagttttccactgaaacacaaaaattctctccacagatacttcccttttgagcaagataatctcaaaggaccagacacagtcgctcacgtctgtaatcccagtactttaggaggccgaggtaggagaat

SEQ ID NO: 586042 - DNA, 572 bp, Homo sapiens
atgtcattaaattcaacctaattattttaacataggcagcaagaatggcgatttaacatattggctcttcaaagtttgctttgtggaagatttcataaggatgttcaaaatggacctttaaaaacctcttgaggcttgattcttcagagagagtatttaaaaaataaacaaacacaaacctcttgaagttaagaagccaagccaagaattcaccatgagatttcacctatattaatcatagatttgagtaaattcctctcttcttgaggtcacrcaaatagtctcggtttccttggcccactagcaagagaacttccttattcatcggtaaggctgagaaccccataagacaaccctgtaaagtcagcttcagttccttaagacttactggccatatcttgattcattctcagatatgacattctgaacaaagccttattcagaataagctttgttgtataaccaatgtttccaattacatcgtcttaataaggagaacagattcttactgaacctatgtgaataactatattgccatggaaataaaagtattcaataaaagtttccgaatt

SEQ ID NO: 586043 - DNA, 572 bp, Homo sapiens
atgtcattaaattcaacctaattattttaacataggcagcaagaatggcgatttaacatattggctcttcaaagtttgctttgtggaagatttcataaggatgttcaaaatggacctttaaaaacctcttgaggcttgattcttcagagagagtatttaaaaaataaacaaacacaaacctcttgaagttaagaagccaagccaagaattcaccatgagatttcacctatattaatcatagatttgagtaaattcctctcttcttgaggtcacgcaaatagtctcggtttccttggcccactagcaagagaacttccttattcatcggtaaggctgagaaccccataagacaaccctgtaaagtcagcttcagttccttaagacttactggccatatcttgattcattctcagatatgacattctgaacaaagccttattcagaataagctttgttgtataaccaatgtttccaattacatcgtcttaataaggagaacagattcttactgaacctatgtraataactatattgccatggaaataaaagtattcaataaaagtttccgaatt

SEQ ID NO: 586044 - DNA, 577 bp, Homo sapiens
gatcaacaaaccccccccccccccagttgagagtgttataaaaataacgcgcgattattaatgagaacctccccaagtccctatgggtccactggatttcttttattttcctttggttttgtaggttggagtttggtttgtttttgtttttaaattttctctggtaatgacaccttagccttatcttttaattgcatgaataagattctttttttgagacagagttttgctctcgttgtccaagctggagtgcaatggcactatctcagctcactgcagcctccacctcctgggttcaagcgattctcttgtctcagcctcccaagtagccgggattacaggtgcctgtcaccaygcccagctgactttcatatttttagtaaagacagagtttcactgtgttggccaggctggtcttgaactcctgacttcaggtggtccacccgccttggcctcccaaagtgctaggattacaggtgtgagccaccatgaccagccaacattttccctcttggtttttagggaatatatagtaactgtggcatacagtctctgtatggaaaaataattgtgctga

SEQ ID NO: 586045 - DNA, 505 bp, Homo sapiens
agaatttctgttcattttttcctaatgcttaaattgttcttcaaaaaaaatcatttgttaggcaaaaaaagtgacttaagaatttatcacatagttgataacaatgctgtatatttcatacagcagtggctttggttgtacatgttatgaaaattattactcctccatcttgcccccacactcccaggctctgaggcttcctcatggaattagcatgcattaaagagcataaagtcctattttgaggatgaaacttgaaacttttcaagtatgycaggaataatctctgtgtgtttcaattccaatgtgttgtaaaatttgtgaacactgaaactcaatgtcaatgtagtttggtaacaacagagaagggtcatgccttatgctgtcagacattcatttgtaaaattagactcttaaaactgtttctatttttgaagtatctaagtatttctcattgggtgtacagacagcccaactattggatgataaatttggtctttcaaat

SEQ ID NO: 586046 - DNA, 492 bp, Homo sapiens
tcctaagtctatcgcataattgggatgaactgcctctgtagtgatggggggcaaggtttgagagaggatcttaaatgtgtggagtttgtatgaccacttagacccagggtgttgttctgggctgttctctgcatgactgtttactgatcttactgggagttgtcccactcactgagcaaactcagggcaagatgctatgtaggccagtctaagatcaacaatgatcccagacttatttataaacccacaggaaaggcccctgagagtgctctgccatctgacctgagactagggtgaggaaggattagtgctaaggcacgggaagtccttggtggccaactaggtttccagtgtgagccaggagactcatttggcctttcagccagtaggcagctgcagactgttctctggactcttgtamaaggtgcaatatcaactacagggcttgccattttgggtgttgtatatggaagttgattatgactcatacca

SEQ ID NO: 586047 - DNA, 576 bp, Homo sapiens
taaagtacttagcacagtgcctggtggttctagtcattcttcatttgccagcccaccccatcccaatccaatttctgcccctctttgactctctgttcctgggaggctgaacccttatgggcagtattccattctccctyaattcctgccttctgcgtgggcttggtcaagggtaggcaccaccaagagatctgagagcagagagagaggtgagagtattggctgtacacccattttgatgccttgtctctgggaacaaactaccttccttcccaatttcagcccccttcaggggctgctagcccaggccctgggcacactaggtcttccctttgtcactgaagccccaggagcagtaaaggcttcccactgtccctcagctttgagtgcctcctatttattcttttgactctgcccacattgctataaagtatttttcccttaagatttctttgactatctgggatgaatcctgtttcctgcccagaccctaatacactgtacatagtaatttctttaaaatgtgagctttggttattatattaaattattaatattaaatatttaaattgttaa

SEQ ID NO: 586048 - DNA, 576 bp, Homo sapiens
taaagtacttagcacagtgcctggtggttctagtcattcttcatttgccagcccaccccatcccaatccaatttctgcccctctttgactctctgttcctgggaggctgaacccttatgggcagtattccattctcccttaatkcctgccttctgcgtgggcttggtcaagggtaggcaccaccaagagatctgagagcagagagagaggtgagagtattggctgtacacccattttgatgccttgtctctgggaacaaactaccttccttcccaatttcagcccccttcaggggctgctagcccaggccctgggcacactaggtcttccctttgtcactgaagccccaggagcagtaaaggcttcccactgtccctcagctttgagtgcctcctatttattcttttgactctgcccacattgctataaagtatttttcccttaagatttctttgactatctgggatgaatcctgtttcctgcccagaccctaatacactgtacatagtaatttctttaaaatgtgagctttggttattatattaaattattaatattaaatatttaaattgttaa

SEQ ID NO: 586049 - DNA, 463 bp, Homo sapiens
ttacctgattctttcttctaaaagtctgtaatgctaggatgtccaacaaatctgtgccccccaacccacagctcacgactcagcattttagctatgctccctccctcrtccaagctttgactcttcagttcctgttagtagctggaggcagctggaatgcctttctccaattctactcttccttcaagactgagcccaaactgtttctctcatcttgatgccatctgtgaaactctacatcagtcattcctcctccaaggtctcacaccgatttaagcatctctgccataatatttattacaatagattgttatttgttaagggactagcccacaagtctatcacatatgcctagcactaagaattatgattggcacatagggaaagctcaacaaatctgtatggaatgaatgaatgaatgcattgaaagcctacttacctaaaatctcctatatattcaaat

SEQ ID NO: 586050 - DNA, 594 bp, Homo sapiens
gcagtggggagcaaggaggctgcagtttcttctcaagcgcggtgagtattgggatcgggactcctcagcaccagaagaaagaaagggtcagagaaggcttcggaagcgattgatctttaagcagtttattgaagaacaggtgagatttaggtgaggggtctargacagaaggatcagcctatgtggagactgggggcataagacccttggttcaggtggtgactgtttggggtccgtgagacagacttgggtgcagaaaacttacttgcaaggtgattccaggaagtagaaggagagtagagaaagtgaggccagtgaaagataagttaagagctggttagtgagtgggcaattggaactcaaggccgctagggtatccccaaggaataactcagaacatgcttcagcattgtcccactagaggaccgagctgctggaactggggtccactggctcctttcacccactggttgaaggtgcccctggagagaatgaccccccagcccaatttgggttttctggattgtgtttaagaggattcctcaaagccctgaggcagcaaagcctccagtggctgcctcatgcttaatgaag

SEQ ID NO: 586051 - DNA, 594 bp, Homo sapiens
gcagtggggagcaaggaggctgcagtttcttctcaagcgcggtgagtattgggatcgggactcctcagcaccagaagaaagaaagggtcagagaaggcttcggaagcgattgatctttaagcagtttattgaagaacaggtgagatttaggtgaggggtctaagacagaaggatcagcctatgtggagactgggggcataagacccttggttcaggtggtgactgtttggggtccgtgagacagacttgggtgcagaaaacttacttgcaaggtgattccaggaagtagaaggagrgtagagaaagtgaggccagtgaaagataagttaagagctggttagtgagtgggcaattggaactcaaggccgctagggtatccccaaggaataactcagaacatgcttcagcattgtcccactagaggaccgagctgctggaactggggtccactggctcctttcacccactggttgaaggtgcccctggagagaatgaccccccagcccaatttgggttttctggattgtgtttaagaggattcctcaaagccctgaggcagcaaagcctccagtggctgcctcatgcttaatgaag

SEQ ID NO: 586052 - DNA, 600 bp, Homo sapiens
gcatagtttttctaccatacaaatatattaaatataaataaccttaagagcatgataaaagtacaatgtaaaataattaggaaggtggggtgttttgactatgtaccacctttgttcttaatacaaacttttgaaacaacataaacttttataattaataacttaatataataacaatataataacctaatataaacttttgaaatgtcattctatataatttaatttttaatattgtctgcttaacagccagctcacaaaattcatggaagtttaacatttggttcttgtgagctttttgagctggttctagcatgtctctgcacccggaggtaggtagaaactccttcatcagaaggcctctggggtttggagctctcatggcaagtgcagtggtgacagtagggaaagtaatttattttgggaagctcaaatccccttcacagctgcagggtcagaacaagcttggtctggatttggcagagacargaggttgggtgagactccctcaggaatctcaagacagcagaggcagctgcttttggaggaaggatcccatgtgccgagtgcaaggctgttcgttacactggggtatgctca

SEQ ID NO: 586053 - DNA, 604 bp, Homo sapiens
aggcaggcctgtcagacttaaggaatttcagagtagggaccccgtcatgaaacccttgggaagctattggaggtgtcagagcgaagaggcsgggggctgatttggttcatattggagagaaaggaagactgtgaactctgaagaggtactcgtcttacacgtgtgtatatgtgtgtgttggctaggcatgctctcagaaacaaagaagcctgcctctccatgcaccggtcagcagctgtgtgaccagggatgcctgtaccaaaggggaaatggattgaacactctctggacagttgatgtgaaaaaatgatggttaatttctagatatgataatggtattggacttatttccttattgttgttttaaggggtttgtttgtttgtttcagacagggtctcaccctgttacccaggctggagtgcagtggcgtgatttcggctcactgcagcgtcagcctcctgggctcaaggtgtcctcttacctcagcctcctgcctaactaggactacaggtgcatgccaccacacctggctggttttcatattttttgtagagatggggttttgccacattgcccagctggttttgaacgcctggactcaag

SEQ ID NO: 586054 - DNA, 466 bp, Homo sapiens
tcatccttttcctctttgtctgggtctgactataaactgagacacataaagtttaactaacttgccaataatcatgcatgcagtgaatgacaaggccagacagtctggctccagaacgtgtgatcttaaccacttgatgggaaaaaattggtaagaaggtgggtgtatgcattgtgaggcaggcctgtcagacttaaggaatttcagagtagggaccccgtcatgaaacccttgggaagctattggaggtgtcagagcgaagaggcggggggctgatttggttcatattggagagaaaggaagactgtgaactctgaagaggtactmgtcttacacgtgtgtatatgtgtgtgttggctaggcatgctctcagaaacaaagaagcctgcctctccatgcaccggtcagcagctgtgtgaccagggatgcctgtaccaaaggggaaatggattgaacactctctgga

SEQ ID NO: 586055 - DNA, 589 bp, Homo sapiens
ggactcagcaacatggacttccactcaccaaggctgacctggctatggccactgctgagtgcccaatttgccagtagcagagaccaacattgagccctctatatggcaccattcttcaggrtgattagtcagctacctggtggcaggttgattatattggacctcttccatcatggaaagggcagagatttgtcctcactgaaatagacacttactctggatatgggtttgcctatcctgtatgcaatgcttctgccaagactaccatccacggactcacagagtgccttattcaccatcaaggtattccacacagcattgcctctgaccaaagcactcactttgtggctaaagaagtgcagcagtgggctcatgctcgtggaattcactggtcttaccacgttctccatcatcctgaagcagctggattgatagaacggtaaaaatggacttttgaagtcacaattacaatgccagctaggtgacaatactttgcagggctgggacaaggttctctagaaggccatgtatgctctgaatcagtgtccaatatatggcactatttctcttatagccaggattcataggc

SEQ ID NO: 586056 - DNA, 573 bp, Homo sapiens
tcaaaaaatcctgaaggtggtatgggaatgagaaatatttggtgaacatttgaatgagggggcaatgcctctgaaagggagagaagaaatgaaaaggaagtcactattctcttaccaggccctgtgtcataaactacgtttatactgataaccatcatcatcattacctcctgagctcctgctctgtactaagaacttgacacagagttatgtcattttaactttccaagcaacttatgaagtcagtaattattacttctattttataaaacaataagcataggaaaagacagctgaggctgagggtgtgcaaarccccaagagcctggaggtgccgcagaggggactgtgagagcaactggcctcctggtgatctctgcaagaggaggagaaggaggaggaggaagcctctgccctgaggggctctgaggctgaggctgcctcatggaggggcctgcgtgacctgtgctcccagcaagaatgagccttgctgtcacggggggctgcttcctgtagtagtgagctccttgttgcaggaggaattcaagctggcctctatgacacaaagattcc

SEQ ID NO: 586057 - DNA, 531 bp, Homo sapiens
tccatcatagctccgtcatagctcagctgggttttttgttgttgctgctgttttttgttttgttttgttttgttttcatctcctctgcattcttgcacattctcttcctaatccaaccttgctccaaatctctctctgtttttatttcattctctgcccctccctctctccctgtctcgttattctatttgcaagtaaaacrataatatgtgtcacatgcaggctgtaaactaacagagcattccaagctgtgctgtctagctttggcaccagactcaggactggatttcccagcaggggcttggtgtctggagttgtttcccctcacacgccacgccatttgctttctcttgcttcagctatggcttttcttactgtagggtgagcattgggtttagggtcagaagctctggtccaaaactcgagtctccttttccatggctctgtgtctttgagaagccacttgagctctctgacctgcagcgtcctcatttgaaaagtggctagggccaacaggactgtttacagtca

SEQ ID NO: 586058 - DNA, 531 bp, Homo sapiens
tccatcatagctccgtcatagctcagctgggttttttgttgttgctgctgttttttgttttgttttgttttgttttcatctcctctgcattcttgcacattctcttcctaatccaaccttgctccaaatctctctctgtttttatttcattctctgcccctccctctctccctgtctcgttattctatttgcaagtaaaacaataatatgtgtcacatgcaggctgtaaactaacagagcattccaagctgtgctgtctagctttggcaccagactcaggactggrtttcccagcaggggcttggtgtctggagttgtttcccctcacacgccacgccatttgctttctcttgcttcagctatggcttttcttactgtagggtgagcattgggtttagggtcagaagctctggtccaaaactcgagtctccttttccatggctctgtgtctttgagaagccacttgagctctctgacctgcagcgtcctcatttgaaaagtggctagggccaacaggactgtttacagtca

SEQ ID NO: 586059 - DNA, 524 bp, Homo sapiens
ttaactgtataaattcttcatatataatrtttagaatgaaatttattttgggggtgcaaagatttacagttgaacattttcagtttattgtctcctttagagattatctttgaaaaataatgaaagacaaataacttaaaaaacctaccataagaacctatgcgattcccatgagaatatgaccttccatgttaattaaccacaccccagaggcaccacagttagctggggggaggctaaagttcaagctccccttcctagcatttctcctccttcaatcctgccccctagagattcatgccattggctacagatctgtaaggtacacaaatgcttaactagtaaaggtagtgctggctccaccactgagtagagaagcatggtccttggatttcttgctgtactgaagccctgggagcacaactgtggagaccaaactactcatatcctctgtctataccagagtcactgggaccagaggcgaacggcacctggctgcagactcaaaatgagagtgacagcca

SEQ ID NO: 586060 - DNA, 524 bp, Homo sapiens
ttaactgtataaattcttcatatataatgtttagaatgaaatttattttgggggtgcaaagatttacagttgaacattttcagtttattgtctcctttagagattatctttgaaaaataatgaaagacaaataayttaaaaaacctaccataagaacctatgcgattcccatgagaatatgaccttccatgttaattaaccacaccccagaggcaccacagttagctggggggaggctaaagttcaagctccccttcctagcatttctcctccttcaatcctgccccctagagattcatgccattggctacagatctgtaaggtacacaaatgcttaactagtaaaggtagtgctggctccaccactgagtagagaagcatggtccttggatttcttgctgtactgaagccctgggagcacaactgtggagaccaaactactcatatcctctgtctataccagagtcactgggaccagaggcgaacggcacctggctgcagactcaaaatgagagtgacagcca

SEQ ID NO: 586061 - DNA, 444 bp, Homo sapiens
tgaagggggagaaattgaaatggaaagtcrtcatgtagctatccggcactgtctgtctcaatcatatgtctctgcgtggactctataccttttgggtcagagaagaagtgactgaaatagcagattggctcccttatggatatgtccaagacctggcaggctagcggtggctcctatacctacagcatggtgtctcatcacacatgtctcagacacggtcactcccctcagcttcagaaggggttctcatgagtcatttcagacagtaggtgaagagaaaaatgtgaaggacagtgcttagtgctggcaaggatgccgggaaatgggttctctactacgttactggtaggcgtatgtgtgtaaaccttttatgagctacttgatggcatgtatcaacattattgttaaaagacaccctttaacacaatatttccaataatgagg

SEQ ID NO: 586062 - DNA, 307 bp, Homo sapiens
ttgtcatagctaagcattacaagaggaagtaagcagcaaggggtgaagaaatgaaatgygctgtgtgctgtggttgacaatgtgaggagaaaataagttaataccacttcactgatggatgcctcttggtgcttctcatcatccactcagcaaacttgccaacaacataggaaagtcctgggggaaaaaagcctccctcaaggtatcattcttgatcttttcttttacccacatgaaggtgtgagagtgtggtacacagggaggccagagaaggttctcagctattgtgaggattgacttggttgct

SEQ ID NO: 586063 - DNA, 465 bp, Homo sapiens
cagggcaaagtggacccagcccagccatagattgtcagcaaactgtgtgmcttcttcagactttgattttcttggatgttaaaataggaggtgcagggtcagcctgaaggacactaaatgtccctctagctgtgccatgccccgacttataaatactctccactgtcccagactgtcacgtacccccaacccagagccatgtgtgtgtgttcttggatatctgccccttcctagacccctgcattaagctaggatttcctgaagttttcatacaagttcctggggagggactgctgagttttccagccaacataagcctggatcttagagaataaggtgggtactaagaccaacttctcacatccctcttcccctcatggacccagaggaactagtgaggccttggctacagtccaacagtagccatgcagaaaagcctgttgctcagcccagggatatcagggt

SEQ ID NO: 586064 - DNA, 612 bp, Homo sapiens
tgggaggggaggatatatggttagcacaccatttatataataattatcacagggatttttaattttatcatggcagtgttctgacagatgtatagtgttttgagggcagaggatgatctcctaatttgcccaaagagccttatgggtttgtggggctctgggggtgccaaatgggaaggagagggggcacatgaaaaggaaatggygggaagagggcaacaggccagggggtaatatcttcccaggccccttaggcctctacagaacggaaatgaacttcattcacccccaaacccacccacttaaatccaaagagagcttagggttattatgcatggacaggaacacattctaccaagaacacatgctcttaagagctagtagctcccagttagagtcaaaccagtcattgttatattatagattgaatccagcctctttctcccaaactgtggtcatcactgcatgaatccacactaaggtgtgtgaatgggaacctgcagattatctcctcctactgaaaatgctgcccaggggaatcttggaagctatggacagcatccaggcagagctggtcccactgttatctccagaagcaaatgcccaagctgt

SEQ ID NO: 586065 - DNA, 593 bp, Homo sapiens
ctggctccaggaagcctctctgctcccaccctcactcctgctggctggaagaaccctgacctcttgcagggctgatctttggctcagctaaggattggggctcccaatcctcccctttgtggggtctcctccatctcttttctccctcagcccatgtgtgggttcccaggttctcacagtaccccagttctgagtgccctgtgactgcaccccagcccatttcatagtcagtttggaattccttaaaatgttgtaactgaaatcaggttctcctgctcactgcttggaagccaaacttgagagacaagatttagtggaaggaaaagcaggcttattcaagagctggcagcctgaggagatggcagactagtgttgcagagaccatctcaagtcagtacaaattctaggctctttttatgttaaagacatgaccaacaactgctaacatctgggcaccagcgagggtccaggaagttggaaactcctttgtccttggtcagatcacaaagctcctataaaccttcaasgaaacatagttgtttacatacttctcctttaatcccagagtcagtttcaaaaactacatgattgct

SEQ ID NO: 586066 - DNA, 573 bp, Homo sapiens
ctgcttcctcattcttccacctcatcaggattcatttctagtttccttggggttctcctttaccatgtaacccctcatcttttttgcacattcaacttctccttctatctccaaaatgacaagtgtttctcaacctgcacagacccctcccaagccactattctcctctggttccttctctctgcagcctggagtctacactgcctgctccctgctgtctgtctctcaccctctgctggctgcctttgctccccctcccctgaactcagctctgcccaagccctctggggttcgctgctgagcatgtgttctcttgcagagaatgtcttattttcaaccactgttcagctgtatcccgaggaccccacctccacagcccccgtggagccctctcctgagctccatgtccacccacgagctccccccttgcagctccctcatgactcctggaagtayacacccaatactgaatgcatcagagcaccctgcatctcttgatacccagccatcctggttagggctccaccgctcaccccatggctaaagctgcaaatctagcattggagatatggg

SEQ ID NO: 586067 - DNA, 595 bp, Homo sapiens
ctctagggtcagctaaaatagcacgcatatgtgcacgttctgaatgcttcataagttaacaagaactttgtgaactaagtagccctgggtatcttttgacaggtaaggaacagattctaggaaattagttgttatggactgaatcttgttccccaaatttcctgtgttgaagccctaactcctaagacctcagaatgtgactctatttgcagatgggtttttttaaagaggtaattaagttaaaatgaggccattagggtgggctctgatccaatttgactggtgttcttctaagaagatgaggacacacacacagagtcaagaccacatgaagacacaaggagaaggyggcatctgcaagccaagttgagagagagaggccttgggagaaaccaaccctgccagcaccttgagctcagcacttccggcctccacaactgtgagagaataaagtctgttgttttaagctgccctgactatgtgactgtggtgttttgttatggcagccctagcaaatgaatacataagtcaaggtgaggacagaagagaatggaagaaaagaaaatagccttgcctgaaggggagatgagaagaa

SEQ ID NO: 586068 - DNA, 525 bp, Homo sapiens
agtggttatagagttgttataaacgttcaaatataggtttttgtgtgatgttttcatgcctccagagtaaatacccaggagtgggtttgctaggccacatggcaagttatgtttaactttgtaagaaactgcctatttgtccagggtggaccattttgccctcccacctgcaaagcatgagcgtttcaattgctccacatccttgtcagcrcttttttttcttttagccattgttctaggtgtcagtagcacagtaattacctttcccttatgcttaaggaactttcccatcctagacttgaactcaagtgctcctggatagctgctgagccagattaaattcttacatagcacagtttcctctcagaagcattaggaaaggatgatcacacagaccaggtttaaaatgcagtgatgaaccttcctggactctgggcatcacaaagtgagtctgcagttttcagagcttgcaatggcctgtctagccttctgttctgccaacaatgaggtactataacagcaggt

SEQ ID NO: 586069 - DNA, 469 bp, Homo sapiens
tcttattaattatgttattggatattatgtagcctcttaaatttcttgtccacttatccctckctgaatcccaaaatgctatgaacatgcatacttgatgaatgaatgtgtgatgtagagctcctgtggtcagctagaattgtgttttgttttgttttttcttttatagccaaagattgctgaggaaaacttaacctatgccgaactggagctgatcaaaccccaccgggctgccaaaggcgcccccaccagcactgtctacgcccagatcctcttcgaggagaacaagctgtagtacagcgtccacctccaaggttctatttaatacctgccacccagtgatttatgaagccttggagacaaagcccttatgtctgtattttcactcatgccttctgagtggtggggagccccttttcagcagcattctgggtgcctttgaagaggtacaagcctgctctccccaaaa

SEQ ID NO: 586070 - DNA, 456 bp, Homo sapiens
ttatgtagcctcttaaatttcttgtccacttatccctcgctgaatcccaaaatgctatgaacatgcatacttgatgaatgaatgtgtgatgtagarctcctgtggtcagctagaattgtgttttgttttgttttttcttttatagccaaagattgctgaggaaaacttaacctatgccgaactggagctgatcaaaccccaccgggctgccaaaggcgcccccaccagcactgtctacgcccagatcctcttcgaggagaacaagctgtagtacagcgtccacctccaaggttctatttaatacctgccacccagtgatttatgaagccttggagacaaagcccttatgtctgtattttcactcatgccttctgagtggtggggagccccttttcagcagcattctgggtgcctttgaagaggtacaagcctgctctccccaaaagaatcggggcc

SEQ ID NO: 586071 - DNA, 456 bp, Homo sapiens
ttatgtagcctcttaaatttcttgtccacttatccctcgctgaatcccaaaatgctatgaacatgcatacttgatgaatgaatgtgtgatgtagagctcctgtggtcagctagaattgtgttttgttttgttttttcttttatagccaaagattgctgaggaaaacttaacctatgccgarctggagctgatcaaaccccaccgggctgccaaaggcgcccccaccagcactgtctacgcccagatcctcttcgaggagaacaagctgtagtacagcgtccacctccaaggttctatttaatacctgccacccagtgatttatgaagccttggagacaaagcccttatgtctgtattttcactcatgccttctgagtggtggggagccccttttcagcagcattctgggtgcctttgaagaggtacaagcctgctctccccaaaagaatcggggcc

SEQ ID NO: 586072 - DNA, 601 bp, Homo sapiens
cccttctgccctgcagctcccagtcctctgacaggcacccctcaccgccttcctggtgtgtcccacatgtcccatttcacggggcaccagctcctgcacagtgctcctcactagaygtgagcttttcattttctcctggtctgcctccaggactagattgtaaaatcctgtgggctggggccttatcttcctcattcacccttgtaccttggcacctaggaagacaaggtgtttaataaataattatgagtaaatgtagaatgaattgtggagtgggttgctcctgcaaattatttagaaatgtgtgcaaatcatagctctaaggagcctaggtcagggcaatgctgtgagtgttctctttttacacccaagaagtgaggatcacagcgagatgagggcttctgcacagtccccaagccctgaatctccctgaggtgttgcccaggtttgtcaaataaaacaggatctggggcaagtctaatattgtccacacctgaagtagcctgcaaaaacaaagcagtaggaaatgacaggctctgctgcaaactggaaaggctatccaagtctctccaaggctttcaacccccaagtaatgactctc

SEQ ID NO: 586073 - DNA, 601 bp, Homo sapiens
cccttctgccctgcagctcccagtcctctgacaggcacccctcaccgccttcctggtgtgtcccacatgtcccatttcacggggcaccagctcctgcacagtgctcctcactagatgtgagcttttcattttctcctggtctgcctccaggactagattgtaaaatcctgtgggctggggccttatcttcctcattcacccttgtaccttggcacctaggaagacaaggtgtttaataaataattatgagtaaatgtagaatgaatkgtggagtgggttgctcctgcaaattatttagaaatgtgtgcaaatcatagctctaaggagcctaggtcagggcaatgctgtgagtgttctctttttacacccaagaagtgaggatcacagcgagatgagggcttctgcacagtccccaagccctgaatctccctgaggtgttgcccaggtttgtcaaataaaacaggatctggggcaagtctaatattgtccacacctgaagtagcctgcaaaaacaaagcagtaggaaatgacaggctctgctgcaaactggaaaggctatccaagtctctccaaggctttcaacccccaagtaatgactctc

SEQ ID NO: 586074 - DNA, 601 bp, Homo sapiens
cccttctgccctgcagctcccagtcctctgacaggcacccctcaccgccttcctggtgtgtcccacatgtcccatttcacggggcaccagctcctgcacagtgctcctcactagatgtgagcttttcattttctcctggtctgcctccaggactagattgtaaaatcctgtgggctggggccttatcttcctcattcacccttgtaccttggcacctaggaagacaaggtgtttaataaataattatgagtaaatgtagaatgaattgtggagtgggttgctcctgcaaattatttagaaatgtgtgcaaatcatagctctaaggagcctaggtcagggmaatgctgtgagtgttctctttttacacccaagaagtgaggatcacagcgagatgagggcttctgcacagtccccaagccctgaatctccctgaggtgttgcccaggtttgtcaaataaaacaggatctggggcaagtctaatattgtccacacctgaagtagcctgcaaaaacaaagcagtaggaaatgacaggctctgctgcaaactggaaaggctatccaagtctctccaaggctttcaacccccaagtaatgactctc

SEQ ID NO: 586075 - DNA, 585 bp, Homo sapiens
tgtcagccataattggcttctgtggtttatattttttaaaattccaagatataccaacgtaacagatagctcaacaaacatatgtctttttaaattaagatatattctgtgtcacatgaagtacaatggacaaaatgcaacaaattgaattgagctaaagaccaaatatatattaagcctggctggtcttaaaaatgtaactggatacagccaggcatggtggctcacgcctataatcccagcactttgggatcctgaggtgggcagatcacctgaagtcaggagtttgagaccagsctggccagcatggtgaaaccccatctctactaaaaatgcaaaaattagctgggtgtggtggtatgcccctgtaatcccagctactcgggaggttgaggcaggagaatcacttgaacctgggaggcagaggttgcagtgagcccagatcatgccaatgcactccagctttggcaacagagtgagactttgtttcaaaataaaaaaataaaaataaaaaaataaaaacgtaactggatagacctaaggatcttgaataagcagaaaataatttaggtaaaaaccaaataa

SEQ ID NO: 586076 - DNA, 566 bp, Homo sapiens
gttaatgtcagccataattggcttctgtggtttatattttttaaaattccaagatataccaacgtaacagatagctcaacaaacatatgtctttttaaattaagatatattctgtgtcacatgaagtacaatggacaaaatgcaacaaattgaattgagctaaagaccaaatatatattaagcctggctggtcttaaaaatgtaactggatacagccaggcatggtggctcacgcctataatcccagcactttgggatcctgaggtgggcagatcacctgaagtcaggagtttgagaccagcctggccagcatggtgaaaccccatctctactaaaaatgcaaaaattagctgggtgtggtggtatgcccctgtaatcccagctactcrggaggttgaggcaggagaatcacttgaacctgggaggcagaggttgcagtgagcccagatcatgccaatgcactccagctttggcaacagagtgagactttgtttcaaaataaaaaaataaaaataaaaaaataaaaacgtaactggatagacctaaggatcttgaataagcagaaa

SEQ ID NO: 586077 - DNA, 585 bp, Homo sapiens
tgtcagccataattggcttctgtggtttatattttttaaaattccaagatataccaacgtaacagatagctcaacaaacatatgtctttttaaattaagatatattctgtgtcacatgaagtacaatggacaaaatgcaacaaattgaattgagctaaagaccaaatatatattaagcctggctggtcttaaaaatgtaactggatacagccaggcatggtggctcacgcctataatcccagcactttgggatcctgaggtgggcagatcacctgaagtcaggagtttgagaccagcctggccagcatggtgaaaccccatctctactaaaaatgcaaaaattagctgggtgtggtggtatgcccctgtaatcccagctactcgggaggttgaggcaggagaatcacttgaacctgggaggcagaggttgcagtgagccsagatcatgccaatgcactccagctttggcaacagagtgagactttgtttcaaaataaaaaaataaaaataaaaaaataaaaacgtaactggatagacctaaggatcttgaataagcagaaaataatttaggtaaaaaccaaataa

SEQ ID NO: 586078 - DNA, 566 bp, Homo sapiens
gttaatgtcagccataattggcttctgtggtttatattttttaaaattccaagatataccaacgtaacagatagctcaacaaacatatgtctttttaaattaagatatattctgtgtcacatgaagtacaatggacaaaatgcaacaaattgaattgagctaaagaccaaatatatattaagcctggctggtcttaaaaatgtaactggatacagccaggcatggtggctcacgcctataatcccagcactttgggatcctgaggtgggcagatcacctgaagtcaggagtttgagaccagcctggccagcatggtgaaaccccatctctactaaaaatgcaaaaattagctgggtgtggtggtatgcccctgtaatcccagctactcgggaggttgaggcaggagaatcacttgaacctgggaggcagaggttgcagtgagcccagatcatgccaatgcactccagctttggcaacagagygagactttgtttcaaaataaaaaaataaaaataaaaaaataaaaacgtaactggatagacctaaggatcttgaataagcagaaa

SEQ ID NO: 586079 - DNA, 566 bp, Homo sapiens
gttaatgtcagccataattggcttctgtggtttatattttttaaaattccaagatataccaacgtaacagatagctcaacaaacatatgtctttttaaattaagatatattctgtgtcacatgaagtacaatggacaaaatgcaacaaattgaattgagctaaagaccaaatatatattaagcctggctggtcttaaaaatgtaactggatacagccaggcatggtggctcacgcctataatcccagcactttgggatcctgaggtgggcagatcacctgaagtcaggagtttgagaccagcctggccagcatggtgaaaccccatctctactaaaaatgcaaaaattagctgggtgtggtggtatgcccctgtaatcccagctactcgggaggttgaggcaggagaatcacttgaacctgggaggcagaggttgcagtgagcccagatcatgccaatgcactccagctttggcaacagagtgagactttgtttcaaartaaaaaaataaaaataaaaaaataaaaacgtaactggatagacctaaggatcttgaataagcagaaa

SEQ ID NO: 586080 - DNA, 538 bp, Homo sapiens
ctggctttttacaacctacagtcttatcaccaaagttagctattgttaataacttcttgtccattcttgtatgtgttatrgtttctttcttagaaagaagtatgctatactagtatacatactatttattcatgaaccttgcacttatcatgtaatcatatgtcttagtggtcttttcataatagatgtctctctttcccatgctgtcagtggtgattgcatgaggcattgtacagacgtaccaataattacttactctgtgtcatattgttggttattcagattgttttcactttgtccttgcagacaacactgcaatgaacatccttatgcatatattattccaaatacatcatcgtgatggctgtgtgagagaaatatacattgttgattttatttttttattttttataatttcaacttttgattttagatacagtgggtacatgtgcaggtttgttacatgggtatgttgtgtaatgctgaggtttgcggcatgattgatccgatcactcaggtactaggcatagtagttgtt

SEQ ID NO: 586081 - DNA, 538 bp, Homo sapiens
ctggctttttacaacctacagtcttatcaccaaagttagctattgttaataacttcttgtccattcttgtatgtgttatagtttctttcttagaaagaagtatgctatactagtatacatactatttattcatgaaccttgcacttatcatgtaatcatatgtcttagtggtcttttcataatagatgtctctctttcccaygctgtcagtggtgattgcatgaggcattgtacagacgtaccaataattacttactctgtgtcatattgttggttattcagattgttttcactttgtccttgcagacaacactgcaatgaacatccttatgcatatattattccaaatacatcatcgtgatggctgtgtgagagaaatatacattgttgattttatttttttattttttataatttcaacttttgattttagatacagtgggtacatgtgcaggtttgttacatgggtatgttgtgtaatgctgaggtttgcggcatgattgatccgatcactcaggtactaggcatagtagttgtt

SEQ ID NO: 586082 - DNA, 538 bp, Homo sapiens
ctggctttttacaacctacagtcttatcaccaaagttagctattgttaataacttcttgtccattcttgtatgtgttatagtttctttcttagaaagaagtatgctatactagtatacatactatttattcatgaaccttgcacttatcatgtaatcatatgtcttagtggtcttttcataatagatgtctctctttcccatgctgtcagtggtgattgcatgaggcattgtacagacgtaccaataattacttactctgtgtcatattgttggttattcagattgttttcactttgyccttgcagacaacactgcaatgaacatccttatgcatatattattccaaatacatcatcgtgatggctgtgtgagagaaatatacattgttgattttatttttttattttttataatttcaacttttgattttagatacagtgggtacatgtgcaggtttgttacatgggtatgttgtgtaatgctgaggtttgcggcatgattgatccgatcactcaggtactaggcatagtagttgtt

SEQ ID NO: 586083 - DNA, 439 bp, Homo sapiens
  misc_feature 219, 254, 275, 290: n = A,T,C or G
gaattcataaaagtgacggggggagagcgcggagagggaaggctgggagccccagggagtcttcactacctacactgccgctcagctcccggcgcgagtggaggtcggggtggggagacgcgactcctgcccgggatggctgacactctgcgagccccggcggcccgcggccgggcccggtgactaggcggagggcgcggagggtccgcggcgggcggntggcgctgcagcagcctgggcacggctgccgccgncccgcggcgagagtgtgcacnggtgttgaaggccgnagtgctgcccgtgaggggtgtgmtcgcttgagccggagcggggctcgcccctcgtcggcttccgccgcccagcccgtgatcgctctccggccgtccccggcaccctcggccccccacggcggttggtcccggcgggggaaggagaaagt

SEQ ID NO: 586084 - DNA, 439 bp, Homo sapiens
  misc_feature 219, 254, 275, 290: n = A,T,C or G
gaattcataaaagtgacggggggagagcgcggagagggaaggctgggagccccagggagtcttcactacctacactgccgctcagctcccggcgcgagtggaggtcggggtggggagacgcgactcctgcccgggatggctgacactctgcgagccccggcggcccgcggccgggcccggtgactaggcggagggcgcggagggtccgcggcgggcggntggcgctgcagcagcctgggcacggctgccgccgncccgcggcgagagtgtgcacnggtgttgaaggccgnagtgctgcccgtgaggggtgtgakcgcttgagccggagcggggctcgcccctcgtcggcttccgccgcccagcccgtgatcgctctccggccgtccccggcaccctcggccccccacggcggttggtcccggcgggggaaggagaaagt

SEQ ID NO: 586085 - DNA, 439 bp, Homo sapiens
  misc_feature 219, 254, 275, 290: n = A,T,C or G
gaattcataaaagtgacggggggagagcgcggagagggaaggctgggagccccagggagtcttcactacctacactgccgctcagctcccggcgcgagtggaggtcggggtggggagacgcgactcctgcccgggatggctgacactctgcgagccccggcggcccgcggccgggcccggtgactaggcggagggcgcggagggtccgcggcgggcggntggcgctgcagcagcctgggcacggctgccgccgncccgcggcgagagtgtgcacnggtgttgaaggccgnagtgctgcccgtgaggggtgtgatcgcttgagccggagcggggctcgcccctcgtcggctyccgccgcccagcccgtgatcgctctccggccgtccccggcaccctcggccccccacggcggttggtcccggcgggggaaggagaaagt

SEQ ID NO: 586086 - DNA, 439 bp, Homo sapiens
  misc_feature 219, 254, 275, 290: n = A,T,C or G
gaattcataaaagtgacggggggagagcgcggagagggaaggctgggagccccagggagtcttcactacctacactgccgctcagctcccggcgcgagtggaggtcggggtggggagacgcgactcctgcccgggatggctgacactctgcgagccccggcggcccgcggccgggcccggtgactaggcggagggcgcggagggtccgcggcgggcggntggcgctgcagcagcctgggcacggctgccgccgncccgcggcgagagtgtgcacnggtgttgaaggccgnagtgctgcccgtgaggggtgtgatcgcttgagccggagcggggctcgcccctcgtcggcttccgccgcccagccsgtgatcgctctccggccgtccccggcaccctcggccccccacggcggttggtcccggcgggggaaggagaaagt

SEQ ID NO: 586087 - DNA, 428 bp, Homo sapiens
tattgattggaagactcaattttgttagcatattacatcaacacaattctgattaatatttctagtaggagattttagagaaatttgaaagctagtttcaaaatgtatttgaaaatcaaagaacctagaataagcaagtcggtcttgaagaagcaataagttggaggacttactctgctagatttcaaacctgattttaaagctacagtaatttwaaaacagtagtaatggtgtaagtattcataaatatatcaaagtgaaagaatacagattcaaacaatatgcccacatatgtacagttattcattttttttagtagaatcttttttattcataagaaatccatcaaaacaaaaaagttttccagccacacacaggaggggtatgggtgggggaaggtgtctgtccatctatccctggcccccagc

SEQ ID NO: 586088 - DNA, 591 bp, Homo sapiens
  misc_feature 1, 2, 3, 4, 5, 6, 7, 8, 9, 10, 11, 12: n = A,T,C or G
nnnnnnnnnnnnttcatgtgcctataggacctccctgtggcaatgacatctctcagctcagtaagggccacttgcagtagcaatatgaccctaacaggaagactcagtggatccttatcaccttcatagaaaggtactcaccatccatgtcaacagccaagccaacacgctgttgctccaatacgtaaaaggcacttctgtagggctggcatgagtcagtcagttcaagacaacctgaaggagttgaataacatctatccagtgagtcctgcaagacttcaggccctttctcatccagcagctccctgctgagcctggaaaagtgggaaaaagtaaagaataagccagggggaatcagaaaccacacagccccagctagatttcatggctaacgtaaggaagagtttgaaaagaaaaaggacagatccattaatgaggtaasaaattattgcctttatgttgggatagactagggccaggtagaaaaggatgaaagagagagacacacactcacacacacacacaaacacacacacacacacacacacacacacacacagagcgagctcagtgaattggtcaggtgacaca

SEQ ID NO: 586089 - DNA, 591 bp, Homo sapiens
  misc_feature 1, 2, 3, 4, 5, 6, 7, 8, 9, 10, 11, 12: n = A,T,C or G
nnnnnnnnnnnnttcatgtgcctataggacctccctgtggcaatgacatctctcagctcagtaagggccacttgcagtagcaatatgaccctaacaggaagactcagtggatccttatcaccttcatagaaaggtactcaccatccatgtcaacagccaagccaacacgctgttgctccaatacgtaaaaggcacttctgtagggctggcatgagtcagtcagttcaagacaacctgaaggagttgaataacatctatccagtgagtcctgcaagacttcaggccctttctcatccagcagctccctgctgagcctggaaaagtgggaaaaagtaaagaataagccagggggaatcagaaaccacacagccccagctagatttcatggctaacgtaaggaagagtttgaaaagaaaaaggacagatccattaatgaggtaagaaattattgcctttatgttgggatagactagggccaggtagaaaaggatgaaagagagagacacacacwcacacacacacacaaacacacacacacacacacacacacacacacacagagcgagctcagtgaattggtcaggtgacaca

SEQ ID NO: 586090 - DNA, 591 bp, Homo sapiens
  misc_feature 1, 2, 3, 4, 5, 6, 7, 8, 9, 10, 11, 12: n = A,T,C or G
nnnnnnnnnnnnttcatgtgcctataggacctccctgtggcaatgacatctctcagctcagtaagggccacttgcagtagcaatatgaccctaacaggaagactcagtggatccttatcaccttcatagaaaggtactcaccatccatgtcaacagccaagccaacacgctgttgctccaatacgtaaaaggcacttctgtagggctggcatgagtcagtcagttcaagacaacctgaaggagttgaataacatctatccagtgagtcctgcaagacttcaggccctttctcatccagcagctccctgctgagcctggaaaagtgggaaaaagtaaagaataagccagggggaatcagaaaccacacagccccagctagatttcatggctaacgtaaggaagagtttgaaaagaaaaaggacagatccattaatgaggtaagaaattattgcctttatgttgggatagactagggccaggtagaaaaggatgaaagagagagacacacactcacacacacacacamacacacacacacacacacacacacacacacacagagcgagctcagtgaattggtcaggtgacaca

SEQ ID NO: 586091 - DNA, 552 bp, Homo sapiens
ctcgactccagagtgattgaartctacattgatatataggttcagcccacggtgatggcaaatctcagcccaacaaggggcacaaggcccaaagattatggggtctacctgggccatgaactggagctttatcaccttcacagtgtagtactcactgcctatgtcaacagccatgcagacttgctgttcctctaatgagtgaaatgtgctgctgtaagactggtacgaggccaacatttcaggaggaattgagagagtcgaataaccttcatcccaggactcctgggggacttcctcctcttcagactcctgcagattcctgatgagccaggcaggacagggatgatagaagatttaaccaacagacattagacaacaaaacctcccagatgatctgatgggagacagaatggagtggtcacagaaaccaaaggcatttttccttcaagagaaataaaactatccttctaaatgcagggtggagggtgactgctctggggacagagcaaaaatgggcagcatgtgctcagtacatttgccacagatgagcca

SEQ ID NO: 586092 - DNA, 552 bp, Homo sapiens
ctcgactccagagtgattgaaatctacattgatatataggttcagcccacggtgatggcaaatctcagcccaacaaggggcacaaggcccaaagattatggggtctacctgggccatgaactggagctttatcaccttcacartgtagtactcactgcctatgtcaacagccatgcagacttgctgttcctctaatgagtgaaatgtgctgctgtaagactggtacgaggccaacatttcaggaggaattgagagagtcgaataaccttcatcccaggactcctgggggacttcctcctcttcagactcctgcagattcctgatgagccaggcaggacagggatgatagaagatttaaccaacagacattagacaacaaaacctcccagatgatctgatgggagacagaatggagtggtcacagaaaccaaaggcatttttccttcaagagaaataaaactatccttctaaatgcagggtggagggtgactgctctggggacagagcaaaaatgggcagcatgtgctcagtacatttgccacagatgagcca

SEQ ID NO: 586093 - DNA, 552 bp, Homo sapiens
ctcgactccagagtgattgaaatctacattgatatataggttcagcccacggtgatggcaaatctcagcccaacaaggggcacaaggcccaaagattatggggtctacctgggccatgaactggagctttatcaccttcacagtgkagtactcactgcctatgtcaacagccatgcagacttgctgttcctctaatgagtgaaatgtgctgctgtaagactggtacgaggccaacatttcaggaggaattgagagagtcgaataaccttcatcccaggactcctgggggacttcctcctcttcagactcctgcagattcctgatgagccaggcaggacagggatgatagaagatttaaccaacagacattagacaacaaaacctcccagatgatctgatgggagacagaatggagtggtcacagaaaccaaaggcatttttccttcaagagaaataaaactatccttctaaatgcagggtggagggtgactgctctggggacagagcaaaaatgggcagcatgtgctcagtacatttgccacagatgagcca

SEQ ID NO: 586094 - DNA, 552 bp, Homo sapiens
ctcgactccagagtgattgaaatctacattgatatataggttcagcccacggtgatggcaaatctcagcccaacaaggggcacaaggcccaaagattatggggtctacctgggccatgaactggagctttatcaccttcacagtgtagtactcactgcctatgtcaacagccatgcagacttgctgttcctctaatgagtgaaatgtgctgctgtaagactggtacgaggccaacatttcaggaggaattgagagagtcgaataaccttcatcccaggactcctgggggacttcctcctcttcagactcctgcagattcctgatgagccaggcaggacagggatgatagaagatttaaccaacagacattagacaacaaaacctcccagatgatctgatgggagacagaatggagtggtcacagaaaccaaaggcatttttccttcaagagaaataaaactatccttctaaatrcagggtggagggtgactgctctggggacagagcaaaaatgggcagcatgtgctcagtacatttgccacagatgagcca

SEQ ID NO: 586095 - DNA, 598 bp, Homo sapiens
ttgtgtttatagagcctgtcttcagagtttatcttcctcagcctagagagaggtatgagacacaaggaaaacagaggctacctgcaataatgtgtgcagcatcctcccattcaacatgagaggatgagccaatcagaggttgagtcgactttgtcttcctcaaatgtgattttggttttcctatgtggctggttggagtcataagrgccatggctatttgaataagtgatggcacattcctcctgtgagtcctcagggacttccttttcttcagccttctgcatctccctgatgagccaggtgggacagagatgacagaagattaaacacagagggattggaccccagggagtcctagctggttttgacaggcggcattaagagagtggtcccagaaagcaaaatggaggttcccattaagggggaacatgcaatcctgttctctctgcaacagagcatggctgccatgggaaccagagaggaagagagcagctgctgttcattgcactggacagataggagctgaggaggatgaagactcagctatccctgtacggtgcagacgtgacactcggcacacacagagaaacatgacagc

SEQ ID NO: 586096 - DNA, 598 bp, Homo sapiens
ttgtgtttatagagcctgtcttcagagtttatcttcctcagcctagagagaggtatgagacacaaggaaaacagaggctacctgcaataatgtgtgcagcatcctcccattcaacatgagaggatgagccaatcagaggttgagtcgactttgtcttcctcaaatgtgattttggttttcctatgtggctggttggagtcataagggccatggctatttgaataagtgatggcacattcctccwgtgagtcctcagggacttccttttcttcagccttctgcatctccctgatgagccaggtgggacagagatgacagaagattaaacacagagggattggaccccagggagtcctagctggttttgacaggcggcattaagagagtggtcccagaaagcaaaatggaggttcccattaagggggaacatgcaatcctgttctctctgcaacagagcatggctgccatgggaaccagagaggaagagagcagctgctgttcattgcactggacagataggagctgaggaggatgaagactcagctatccctgtacggtgcagacgtgacactcggcacacacagagaaacatgacagc

SEQ ID NO: 586097 - DNA, 598 bp, Homo sapiens
ttgtgtttatagagcctgtcttcagagtttatcttcctcagcctagagagaggtatgagacacaaggaaaacagaggctacctgcaataatgtgtgcagcatcctcccattcaacatgagaggatgagccaatcagaggttgagtcgactttgtcttcctcaaatgtgattttggttttcctatgtggctggttggagtcataagggccatggctatttgaataagtgatggcacattcctcctgtgagtcctcagggacttccttttcttcagccttctgcatctccctgatgagccaggtgggacagagatgacagaagattaaacacagagggattggaccccagggagtcctagctggttttgacaggcggcattaagagagtggtcccagaaagcaaaatggaggttcccattaagrgggaacatgcaatcctgttctctctgcaacagagcatggctgccatgggaaccagagaggaagagagcagctgctgttcattgcactggacagataggagctgaggaggatgaagactcagctatccctgtacggtgcagacgtgacactcggcacacacagagaaacatgacagc

SEQ ID NO: 586098 - DNA, 598 bp, Homo sapiens
ttgtgtttatagagcctgtcttcagagtttatcttcctcagcctagagagaggtatgagacacaaggaaaacagaggctacctgcaataatgtgtgcagcatcctcccattcaacatgagaggatgagccaatcagaggttgagtcgactttgtcttcctcaaatgtgattttggttttcctatgtggctggttggagtcataagggccatggctatttgaataagtgatggcacattcctcctgtgagtcctcagggacttccttttcttcagccttctgcatctccctgatgagccaggtgggacagagatgacagaagattaaacacagagggattggaccccagggagtcctagctggttttgacaggcggcattaagagagtggtcccagaaagcaaaatggaggttcccattaagggggaacatgcaatcctgttctctctgcaacagagcatggctgccatgggaaccagagaggaagagagcagctgctgttcattgcactggacagataggagctgaggaggatgaagactcagctatccctgtacggtgcagacrtgacactcggcacacacagagaaacatgacagc

SEQ ID NO: 586099 - DNA, 571 bp, Homo sapiens
tttacccacagtttctgggacaaaaaccaaggaatctctatcgtgatcagccttcaggcctcctgaagactatctctcacagtgtcctattctcatgctgaggagcctgaagtccctgtgtgaggattagacagtggattgttatgtgtgtaggagaaccagcttaatatgtctgtccatgtctgaacttattgcagaaattgaaaagtacmaagaagtggaagaagaccaagacccatcatgccccaggtaactttgagcaattatggatgcttaattctgtgttgacacctggagatgccaggtccagggaaaacaagagtgtgttcaatttcatgttttcaacgaaggttgaattactcctcctgacattgctgttggttttcattgcagtagatgtttaggtttccatttcttcctccccttatcatttactaacttactataggttgaccatacctcaaaggctgtatggcaactgcatggaatcttgagcaagtttatggaaaattattgagcccactcttttcatgatcactgttcgctgtgtgtcccgagggcactaactcag

SEQ ID NO: 586100 - DNA, 571 bp, Homo sapiens
tttacccacagtttctgggacaaaaaccaaggaatctctatcgtgatcagccttcaggcctcctgaagactatctctcacagtgtcctattctcatgctgaggagcctgaagtccctgtgtgaggattagacagtggattgttatgtgtgtaggagaaccagcttaatatgtctgtccatgtctgaacttattgcagaaattgaaaagtaccaagaagtggaagaagaccaagacccatcatgccccaggtaactttgagcaattatggatgcttaattctgtgttgacacctggagatgccaggtccagggaaaacaagagtgtgttcaatttcatgttttcaacgaaggttgaattactcctmctgacattgctgttggttttcattgcagtagatgtttaggtttccatttcttcctccccttatcatttactaacttactataggttgaccatacctcaaaggctgtatggcaactgcatggaatcttgagcaagtttatggaaaattattgagcccactcttttcatgatcactgttcgctgtgtgtcccgagggcactaactcag

SEQ ID NO: 586101 - DNA, 567 bp, Homo sapiens
cttaatatgtctgtccatgtctgaacttattgcagaaattgaaaagtaccaagaagtggaagaagaccaagacccatcatgccccaggtaactttgagcaattatggatgcttaattctgtgttgacacctggagatgccaggtccagggaaaacaagagtgtgttcaatttcatgttttcaacgaaggttgaattactcctcctgacattgctgttggttttcattgcagtagatgtttaggtttccatttcttcctccccttatcatttactmacttactataggttgaccatacctcaaaggctgtatggcaactgcatggaatcttgagcaagtttatggaaaattattgagcccactcttttcatgatcactgttcgctgtgtgtcccgagggcactaactcagagtgtcctttgaccccttcatcagtgtgtcacccggccaactcgctgagctcactttctcctctctctctctctctctctctccctccctctccctgtctttctctttcattcttttctacctggccctggtctatcccaacataaaggcaataattc

SEQ ID NO: 586102 - DNA, 567 bp, Homo sapiens
cttaatatgtctgtccatgtctgaacttattgcagaaattgaaaagtaccaagaagtggaagaagaccaagacccatcatgccccaggtaactttgagcaattatggatgcttaattctgtgttgacacctggagatgccaggtccagggaaaacaagagtgtgttcaatttcatgttttcaacgaaggttgaattactcctcctgacattgctgttggttttcattgcagtagatgtttaggtttccatttcttcctccccttatcatttactaacttactataggttgaccatacctcaaaggctgtatggcaactgcatggaatcttgagcaagkttatggaaaattattgagcccactcttttcatgatcactgttcgctgtgtgtcccgagggcactaactcagagtgtcctttgaccccttcatcagtgtgtcacccggccaactcgctgagctcactttctcctctctctctctctctctctctccctccctctccctgtctttctctttcattcttttctacctggccctggtctatcccaacataaaggcaataattc

SEQ ID NO: 586103 - DNA, 571 bp, Homo sapiens
tttacccacagtttctgggacaaaaaccaaggaatctctatcgtgatcagccttcaggcctcctgaagactatctctcacagtgtcctattctcatgctgaggagcctgaagtccctgtgtgaggattagacagtggattgttatgtgtgtaggagaaccagcttaatatgtctgtccatgtctgaacttattgcagaaattgaaaagtaccaagaagtggaagaagaccaagacccatcatgccccaggtaactttgagcaattatggatgcttaattctgtgttgacacctggagatgccaggtccagggaaaacaagagtgtgttcaatttcatgttttcaacgaaggttgaattactcctcctgacattgctgttggttttcattgcagtagatgtttaggtttccatttcttcctccccttatcatttactaacttactataggttgaccatacctcaaaggctgtatggcaactgcatggaatcttgagcaagtttatggaaaattattgagcccactcttttcrtgatcactgttcgctgtgtgtcccgagggcactaactcag

SEQ ID NO: 586104 - DNA, 567 bp, Homo sapiens
cttaatatgtctgtccatgtctgaacttattgcagaaattgaaaagtaccaagaagtggaagaagaccaagacccatcatgccccaggtaactttgagcaattatggatgcttaattctgtgttgacacctggagatgccaggtccagggaaaacaagagtgtgttcaatttcatgttttcaacgaaggttgaattactcctcctgacattgctgttggttttcattgcagtagatgtttaggtttccatttcttcctccccttatcatttactaacttactataggttgaccatacctcaaaggctgtatggcaactgcatggaatcttgagcaagtttatggaaaattattgagcccactcttttcatgatcactgttcgctgtgtgtcccgagggcactaactcagagtgtcctttgaccccttcatcagtgtgtcacccggccaaytcgctgagctcactttctcctctctctctctctctctctctccctccctctccctgtctttctctttcattcttttctacctggccctggtctatcccaacataaaggcaataattc

SEQ ID NO: 586105 - DNA, 542 bp, Homo sapiens
gtaccttggcttggctcttgacgtggacagtgagtaycttactgtgaaggtgataagcctccacctggtcttccagataggggtgatattcctgttccaagtggcccttactgacccgagagatgtcattgccgcaggcaggacctatgggcgcatataggttgtaatgaaactgtagtctcagttggaagcctagacatgaaatgggtcagtgagcaaggctctattcctagtctccagccatgcctgtggcaagctgagcccgctctcagcacattggacccaggcagatgtaaaaaattcacagaagtatgatttggactgaagggtttgtagatttcctccttcattctaatttcagtgtctaaaattcttgcatccatgaacgagctgggcatttgatgagacagggctgaatactgcagttttcctcctagaaatcatctggggcattttctttgaactgatgggaacaataaggcataactgtttgcacaaacttgggataaatgattttgggataacgatctaccagaatgggg

SEQ ID NO: 586106 - DNA, 494 bp, Homo sapiens
ttgtgaacagctacttctgtgttgacatctggagactcctggttcagggaaaacagagcgggctgacattatcgattacatcttttccagcaagcctgaattattcctactaacattgctgttggttttcattgcagtagatatttaggtttccatttcttcctccccttatcatttactaacctactgtaggtggaccagacttcaaaaactgtattctcatggcgactgcatggaaacttgagcacattttatggaaaattattgagcacagtcttttcatgatccctgtatgctgtgtgtcctgagggcactaactcagagtgtcctgttactccctcatcagtgtgtcacctggacaattcactgagctcgttctctctctctgtgtgtgtgtgtgtgtstgtgtgtgtgtgtgtgtgtgtgtgtgtgtgtgtgtgtctatctgtctttctctttcattcttttccatttggccctgttctgtcccaaca

SEQ ID NO: 586107 - DNA, 584 bp, Homo sapiens
gattccatgcagttgccatacagcctttgaggtatggtcaacctatagtaagttagtaaatgataaggggaggaagaaatggaaacctaaacatctactgcaatgaaaaccaacagcaatatcaggaggagtaattcaaccttcgttgaaaacatgaaattgaacacactcttgttttccctggacctggcatctccaggtgtcaacacagaattaagcatccataattgctcaaagttacctggggcatgatgggtcttggtcttcttccacttcttggtacttttcaatttctgcaataagttcagacatggacagacatattaagctggttctcctacacacataacaatccactgtctaatcctcacacrgggacttcaggctcctcagcatgagaataggacactgtgagagatagtcttcaggaggcctgaaggctgatcaccatagagattccttggtttttgtcccagaaactgtgggtaaaattccctattctggtagatcgttatcccaatatcatttgtcccaagtttgtgcaaatggttatgccatatttttccaatcgatttaaagcaaat

SEQ ID NO: 586108 - DNA, 553 bp, Homo sapiens
aagggccacttgcagtaggaatatgaccctaaccagaagactcagtggatccttatcaccttcatagaaaggtactcaccatccatgtcaacagccaagccaacacrctgttgctccaatacgtaaaaggcacttctgtagggctggcatgagtcagtcagttcaagacaacctgaaggagttgaataacttctatccagtgagtcctgcaagacttcaggccctttctcatccagcagctccctgctgagcctggaaaagtgggaaaaagtaaagaataagccagggggaatcagaaaccacacagccccagctagatttcatggctaacgtaaggaagagtttgaaaagaaaaaggacagatccattaatgaggtaacaaattattgcctttatgttgggatagaacagggccaggtagaaaacaatgaaagagaaagacagagagagagagagagacagagacagagagagagacagagacagagacagagagaaagtgacctagtgaattggccaggtgacatactggtaagggagtaaaaggacactc

SEQ ID NO: 586109 - DNA, 553 bp, Homo sapiens
aagggccacttgcagtaggaatatgaccctaaccagaagactcagtggatccttatcaccttcatagaaaggtactcaccatccatgtcaacagccaagccaacacgctgttgctccaataygtaaaaggcacttctgtagggctggcatgagtcagtcagttcaagacaacctgaaggagttgaataacttctatccagtgagtcctgcaagacttcaggccctttctcatccagcagctccctgctgagcctggaaaagtgggaaaaagtaaagaataagccagggggaatcagaaaccacacagccccagctagatttcatggctaacgtaaggaagagtttgaaaagaaaaaggacagatccattaatgaggtaacaaattattgcctttatgttgggatagaacagggccaggtagaaaacaatgaaagagaaagacagagagagagagagagacagagacagagagagagacagagacagagacagagagaaagtgacctagtgaattggccaggtgacatactggtaagggagtaaaaggacactc

SEQ ID NO: 586110 - DNA, 628 bp, Homo sapiens
atccttatcaccttcatagaaaggtactcaccatccatgtcaacagccaagccaacacgctgttgctccaatacgtaaaaggcacttctgtagggctggcatgagtcagtcagttcaagacaacctgaaggagttgaataacttctatccagtgagtcctgcaagacttcaggccctttctcatccagcagctccctgctgagcctggaamagtgggaaaaagtaaagaataagccagggggaatcagaaaccacacagccccagctagatttcatggctaacgtaaggaagagtttgaaaagaaaaaggacagatccattaatgaggtaacaaattattgcctttatgttgggatagaacagggccaggtagaaaacaatgaaagagaaagacagagagagagagagagacagagacagagagagagacagagacagagacagagagaaagtgacctagtgaattggccaggtgacatactggtaagggagtaaaaggacactctgagttagtgccctcatgacacacagcaaactgtgatcatgaaaagagtgagctcaatagttttccataaaatatgctcaaaattcgatgcagtggccatgagagtacagcttttgaagtatg

SEQ ID NO: 586111 - DNA, 554 bp, Homo sapiens
tgttgctccaatacgtaaaaggcacttctgtagggctggcatgagtcagtcagttcaagacaacctgaaggagttgaataacttctatccagtgagtcctgcaagacttcaggccctttctcatccagcagctccctgctgagcctggaaaagtgggaaaaagtaaagaataagccaggggraatcagaaaccacacagccccagctagatttcatggctaacgtaaggaagagtttgaaaagaaaaaggacagatccattaatgaggtaacaaattattgcctttatgttgggatagaacagggccaggtagaaaacaatgaaagagaaagacagagagagagagagagacagagacagagagagagacagagacagagacagagagaaagtgacctagtgaattggccaggtgacatactggtaagggagtaaaaggacactctgagttagtgccctcatgacacacagcaaactgtgatcatgaaaagagtgagctcaatagttttccataaaatatgctcaaaattcgatgcagtggccatgagagtaca

SEQ ID NO: 586112 - DNA, 591 bp, Homo sapiens
acgtaaaaggcacttctgtagggctggcatgagtcagtcagttcaagacaacctgaaggagttgaataacttctatccagtgagtcctgcaagacttcaggccctttctcatccagcagctccctgctgagcctggaaaagtgggaaaaagtaaagaataagccagggggaatcagaaaccacacagccccagctagatttcatggctaacrtaaggaagagtttgaaaagaaaaaggacagatccattaatgaggtaacaaattattgcctttatgttgggatagaacagggccaggtagaaaacaatgaaagagaaagacagagagagagagagagacagagacagagagagagacagagacagagacagagagaaagtgacctagtgaattggccaggtgacatactggtaagggagtaaaaggacactctgagttagtgccctcatgacacacagcaaactgtgatcatgaaaagagtgagctcaatagttttccataaaatatgctcaaaattcgatgcagtggccatgagagtacagcttttgaagtatggtcaacctatggtacgttaggaaatgataagggga

SEQ ID NO: 586113 - DNA, 554 bp, Homo sapiens
tgttgctccaatacgtaaaaggcacttctgtagggctggcatgagtcagtcagttcaagacaacctgaaggagttgaataacttctatccagtgagtcctgcaagacttcaggccctttctcatccagcagctccctgctgagcctggaaaagtgggaaaaagtaaagaataagccagggggaatcagaaaccacacagccccagctagatttcatggctaacgtaaggaagagtttgaaaagaaaaaggacagatccattaatgaggtaacaaattattgcctttatgttgggatagaacagggccaggtagaaaacaatgaaagagaaagacagagagagagagagagacagagacagagagagagacagagacagagacagagagaaagtgasctagtgaattggccaggtgacatactggtaagggagtaaaaggacactctgagttagtgccctcatgacacacagcaaactgtgatcatgaaaagagtgagctcaatagttttccataaaatatgctcaaaattcgatgcagtggccatgagagtaca

SEQ ID NO: 586114 - DNA, 554 bp, Homo sapiens
tgttgctccaatacgtaaaaggcacttctgtagggctggcatgagtcagtcagttcaagacaacctgaaggagttgaataacttctatccagtgagtcctgcaagacttcaggccctttctcatccagcagctccctgctgagcctggaaaagtgggaaaaagtaaagaataagccagggggaatcagaaaccacacagccccagctagatttcatggctaacgtaaggaagagtttgaaaagaaaaaggacagatccattaatgaggtaacaaattattgcctttatgttgggatagaacagggccaggtagaaaacaatgaaagagaaagacagagagagagagagagacagagacagagagagagacagagacagagacagagagaaagtgacctagtgaattggccaggtgacatactggtaagggagtaaaaggacactctgagttagtgccctcatgacacacagcaaactgygatcatgaaaagagtgagctcaatagttttccataaaatatgctcaaaattcgatgcagtggccatgagagtaca

SEQ ID NO: 586115 - DNA, 574 bp, Homo sapiens
aatttgtcacatctgcccaggtccaatgtcatgaggataggatcagggcgccacaggtatggcctgagactaggaagagagtcttgctcactgacccatcccttgyctgggcttccaggtagaactagagtttcattcaacctacatgtgcctataggtcctccctgtggcaatgacatctctcagctcagtaatggccacttggagcaggaatatgatctttatatggaagactcagtggatccttatcaccttcatagaaaggtactcacctcccacgtcgagagaaaagccaacatgtttttcctccaatgcataaaaggaacttccatagggctggcaggagtcaggctgttcaagacaactggaaggagttgaataacatctatccagtgagtcctgcaagacttcaggctctactacctccagcagctccctgctgagcctggaaaaggaggaaaatgtaaagaataagccaggggaaatcagacacaacagagccccaactaggtttcatgggtagcatagggaagtggttaaaaaactaaaaggatagatccattaatgaggtaac

SEQ ID NO: 586116 - DNA, 574 bp, Homo sapiens
aatttgtcacatctgcccaggtccaatgtcatgaggataggatcagggcgccacaggtatggcctgagactaggaagagagtcttgctcactgacccatcccttgcctgggcttccaggtagaactagagtttcattcaacctacatgtgcctataggtcctccctgtggcaatgacatctctcagctcagtaatggccacttggagcaggaatatgatctttatatggaagactcagtggatccttatcaccttcatagaaaggtactcacctcccacgtcragagaaaagccaacatgtttttcctccaatgcataaaaggaacttccatagggctggcaggagtcaggctgttcaagacaactggaaggagttgaataacatctatccagtgagtcctgcaagacttcaggctctactacctccagcagctccctgctgagcctggaaaaggaggaaaatgtaaagaataagccaggggaaatcagacacaacagagccccaactaggtttcatgggtagcatagggaagtggttaaaaaactaaaaggatagatccattaatgaggtaac

SEQ ID NO: 586117 - DNA, 231 bp, Homo sapiens
cagtgagtcctgcaagacttcaggctctactacctccagcagctccctgctgagcctggaaaaggaggaaaawgtaaagaataagccaggggaaatcagacacaacagagccccaactaggtttcatgggtagcatagggaagtggttaaaaaactaaaaggatagatccattaatgaggtaacaaattattgccttcatgttgggacagaacagggccaaatggaaaaga

SEQ ID NO: 586118 - DNA, 536 bp, Homo sapiens
gaggagaaagtaagctcagcgagttggccgggtgacacactgatgaaggggtcaaaggacactctgagttagtgccctcgggacacacagcgaacagtgatcatgaaaagagtgggctcaataattttccataaacttgctcaagattccatgcagttgccatacagmctttgaggtatggtcaacctatagtaagttagtaaatgataaggggaggaagaaatggaaacctaaacatctactgcaatgaaaaccaacagcaatatcaggaggagtaattcaaccttcgttgaaaacatgaaattgaacacactcttgttttccctggacctggcatctccaggtgtcaacacagaattaagcatccataattgctcaaagttacctggggcatgatgggtcttggtcttcttccacttcttggtacttttcaatttctgcaataagttcagacatggacagacatattaagctggttctcctacacacataacaatccactgtctaatcctcacacagggacttcaggctcctca

SEQ ID NO: 586119 - DNA, 543 bp, Homo sapiens
atgaggtaacaaattattgccttcatgttgggacagaacagggccaaatggaaaagaatgaaagagaaagacagatagacacacacacacacacacacacacacasacacacacacagacacacacacacacacagagagaacgagctcagtgaattgtccaggtgacacactgatgagggagtaacaggacactctgagttagtgccctcaggacacacagcatacagggatcatgaaaagactgtgctcaataattttccataaaatgtgctcaagtttccatgcagtcgccatgagaatacagtttttgaagtctggtccacctacagtaggttagtaaatgataaggggaggaagaaatggaaacctaaatatctactgcaatgaaaaccaacagcaatgttagtaggaataattcaggcttgctggaaaagatgtaatcgataatgtcagcccgctctgttttccctgaaccaggagtctccagatgtcaacacagaagtagctgttcacaattgctcagttacctgggcatggtggg

SEQ ID NO: 586120 - DNA, 532 bp, Homo sapiens
gaggagaaagtaagctcagcgagttggccgggtgacacactgatgaaggggtyaaaggacactctgagttagtgccctcgggacacacagcgaacagtgatcatgaaaagagtgggctcaataattttccataaacttgctcaagattccatgcagttgccatacagcctttgaggtatggtcaacctatagtaagttagtaaatgataaggggaggaagaaatggaaacctaaacatctactgcaatgaaaaccaacagcaatatcaggaggagtaattcaaccttcgttgaaaacatgaaattgaacacactcttgttttccctggacctggcatctccaggtgtcaacacagaattaagcatccataattgctcaaagttacctggggcatgatgggtcttggtcttcttccacttcttggtacttttcaatttctgcaataagttcagacatggacagacatattaagctggttctcctacacacataacaatccactgtctaatcctcacacagggacttcaggctc

SEQ ID NO: 586121 - DNA, 556 bp, Homo sapiens
  misc_feature 545, 546, 547, 548, 549, 550, 551, 552, 553, 554, 555, 556: n = A,T,C or G
aattgtccaggtgacacactgatgagggagtaacaggacactctgagttagtgccctcaggacacacagcatacagggatcatgaaaagactgtgctcaataattttccataaaatgtgctcaagtttccatgcagtcrccatgagaatacagtttttgaagtctggtccacctacagtaggttagtaaatgataaggggaggaagaaatggaaacctaaatatctactgcaatgaaaaccaacagcaatgttagtaggaataattcaggcttgctggaaaagatgtaatcgataatgtcagcccgctctgttttccctgaaccaggagtctccagatgtcaacacagaagtagctgttcacaattgctcagttacctggggcatggtgggccttggtcttcttcctcttcttggtcctttttagttcctgcaatacattcagacagggacagacaaaataagccaattcacctacacccataacagtccactgtctaatccccacacagggatctcaggctcctcagcatgagaacaggacatnnnnnnnnnnnn

SEQ ID NO: 586122 - DNA, 444 bp, Homo sapiens
  misc_feature 57, 60, 70: n = A,T,C or G
tagctgttcacaattgctcagttacctgggcatggtgggcctggtccttctccctcntcntggtcctttntagtgcctgcagtacatcagacaagggacagacaaagtaagccaattcacctacagcccatacagtcccactgtctaatccccacacagggatctcaggctcctcagcatgagaacaggacaatgtgagagagatacttcaggaggcctgaaagctggtcatgatattctttggtttgcatctcagaaccaagggtgaaatatcccyattctggtagatcgttatcccaaaatcatttatcccaagtttgtgcaaacagttatgccttattgttcccatcagttcaaagaaaatgccccagatgatttctaggaggaaaactgcagtattcagccctgtctcatcaaatgcccagctcgttcatggatgcaaga

SEQ ID NO: 586123 - DNA, 475 bp, Homo sapiens
  misc_feature 112, 115, 125: n = A,T,C or G
tgtcagcccgctctgttttccctgaaccaggagtctccagatgtcaacacagaagtagctgttcacaattgctcagttacctgggcatggtgggcctggtccttctccctcntcntggtcctttntagtgcctgcagtacatcagacaagggacagacaaagtaagccaattcacctacagcccatacagtcccactgtctaatccccacacagggatctcaggctcctcagcatgagaacaggacaatgtgagagagatacttcaggaggcctgaaagctggtcatgatattctttggtttgcatctcagaaccaagggtgaaatatccccattctggtagatcgttatcccaaaatcatttatcccaagtttgtgcaaacagttatgccttattgttcccatcagttcaaagaaaatgccccagatgatttctaggaggaaaactrcagtattcagccctgtctcatcaaatg

SEQ ID NO: 586124 - DNA, 475 bp, Homo sapiens
  misc_feature 112, 115, 125: n = A,T,C or G
tgtcagcccgctctgttttccctgaaccaggagtctccagatgtcaacacagaagtagctgttcacaattgctcagttacctgggcatggtgggcctggtccttctccctcntcntggtcctttntagtgcctgcagtacatcagacaagggacagacaaagtaagccaattcacctacagcccatacagtcccactgtctaatccccacacagggatctcaggctcctcagcatgagaacaggacaatgtgagagagatacttcaggaggcctgaaagctggtcatgatattctttggtttgcatctcagaaccaagggtgaaatatccccattctggtagatcgttatcccaaaatcatttatcccaagtttgtgcaaacagttatgccttattgttcccatcagttcaaagaaaatgccccagatgatttctaggaggaaaactgmagtattcagccctgtctcatcaaatg

SEQ ID NO: 586125 - DNA, 325 bp, Homo sapiens
cctgaaagctggtcatgatattctttggtttgcatctcagaaccaagggtgaaatatccccattctggtagatcgttatcccaaaatcatttatcccaagtttgtgcaaacagttatgccttattgttcccatcagttcaaagaaaatgccccagatgatttctaggaggaaaactgcagtattcagccctgtctcatcaaatgcccagctcgttcatggatgcaagaattttagacactgaaattagaatgaaggaggaaatctacaaacccttgagtccaaatcatasttctgtgaattctttacatctgcctgggtccaatg

SEQ ID NO: 586126 - DNA, 269 bp, Homo sapiens
cttccaactgagactacagtttcattacaacytatatgcgcccataggtcctgcctgcggcaatgacatctctcgggtcagtaagggccacttggaacaggaatatcacccctatctggaagaccaggtggaggcttatcaccttcacagtaaggtactcactgtccacgtcaagagccaagccaaggtactgttcctccaatgagtaaacagcactgctgtagggctggcctaagtcaggcagttcaagataacctgaaggagtcgaa

SEQ ID NO: 586127 - DNA, 632 bp, Homo sapiens
tttgtctttacacctgtatattttgcttcttgcatctgcttcaatgccctctgtcatttattataactagatttattgttccaatagatttgtactacagtcagaacaaacaaatcactggatccagcagaagccttagatatatgacataacagagatttgcacaaagatttgccccattgccttctcgaatttctcttatcatcaatccatctagctggagctctctgaaggtcatcagaggtcagtataattttaataagattttaactgaaggatagccttgatgttcagtgaccttcagacatgtttataatcgagaagccactccccctgttgaatgataacctcttccatgaattaccaaaccaatggtgctcacattctgattaacgattgattcccataaacccagcttcccccaacactgatgatctaaataacctgaattatttgcattgccttatcaattccatctcatttcctktcttggtggttttgctcacactgcttctatgtggaatgtccgtatgtagccactcgagtttccacttcatcgttccatcatctgtagtctctatacactatccatcatcaggactaatgtgagctgactttcctccaaaaagctt

SEQ ID NO: 586128 - DNA, 609 bp, Homo sapiens
tgctcacattctgattaacgattgattcccataaacccagcttcccccaacactgatgatctaaataacctgaattatttgcattgccttatcaattccatctcatttcctttcttggtggttttgctcacactgcttctatgtggaatgtccgtatgtagccactcgagtttccacttcatcgttccatcatctgtagtctctatacactatccatcatcaggactaatgtgagctgactttcctccaaaaagctttccctgaacttatcctgaaataacgtttttctytgctaacttagcatttgtcacgttagtatacagcttctctaactgtcatgaaatgaaataaatgggaagaagatgaaacatgaaaagaaatctgcttcttaaggcaggccctgggggaatagccctggctggaggtaatgtaaggtctagatggtgtttttagaatctgaagactgcaacaccaaacacaacaagtataagcctaggcaagctgtcagtgcagggcctaaaattaggtatttcaacaagtggatgaatcaatttggggaattgtattagtaaacagaggaagcccatccagtaaaagggagagtaagca

SEQ ID NO: 586129 - DNA, 454 bp, Homo sapiens
ttgcggtcatgtttccttctctacaggacatgtttgtctacctccatttgctgaacaatgttcctaatcagtactattgattttacattttaatttgatccattttatttgcacagatctaagaagtgttgattaatatttaatgacctcctagtatttttttgatgaaacaataaactaaggctcacaagtttacgtctatctatagatttataaagcccttgtgctttaaatttacttttacatgtttaacagctcagtttagagcagaccamaccagtccgttcacctctacctgatttcatctgcagtatttataatgcaaatgtatcctttttaataaaagatatccaatgtctcggtgtccctgctctgccaagaaaggacattctttcttacctccaagcctgagattgcatagtccatagagcaagcaccagattggtttcctaga

SEQ ID NO: 586130 - DNA, 604 bp, Homo sapiens
actgttcctccaatgagtaaacagcactgctgtagggctggcctaagtcaggcagttcaagataacctgaaggagtcgaataacatctatccagtgagtcctgcaagacttcaggctctttctcatccagcagctccctgctgagcctggaaaagtaggaaaaagtaaagaataagccagggggaatcagaaaccacacagccccagctagatttcatggctaacataaggaactgtttaaaaagaaaaaggacagatccattaatgaggtaatgaattattgcctttatgttgggatagaccagggccaggtagaaaagaatgaaagagaaagacaggcacagggaggcacacacacacagagagagagagcaagcagtgtgctcagtccggtggccgcgttgctcagtgagtaagaggtcaatgtgcgttagtagctagagccctcggagcacacagsgatcagtgatcatctgaagactgggctctaccatatactgtgctcaagttcacaagcactcgccgttaccatacagcctttgaagtatggtccacctacagtaggttagtaaatgataaggggaggaagaaatggaaacctaaa

SEQ ID NO: 586131 - DNA, 604 bp, Homo sapiens
actgttcctccaatgagtaaacagcactgctgtagggctggcctaagtcaggcagttcaagataacctgaaggagtcgaataacatctatccagtgagtcctgcaagacttcaggctctttctcatccagcagctccctgctgagcctggaaaagtaggaaaaagtaaagaataagccagggggaatcagaaaccacacagccccagctagatttcatggctaacataaggaactgtttaaaaagaaaaaggacagatccattaatgaggtaatgaattattgcctttatgttgggatagaccagggccaggtagaaaagaatgaaagagaaagacaggcacagggaggcacacacacacagagagagagagcaagcagtgtgctcagtccggtggccgcgttgctcagtgagtaagaggtcaatgtgcgttagtagctagagccctcggagcacacagggawcagtgatcatctgaagactgggctctaccatatactgtgctcaagttcacaagcactcgccgttaccatacagcctttgaagtatggtccacctacagtaggttagtaaatgataaggggaggaagaaatggaaacctaaa

SEQ ID NO: 586132 - DNA, 604 bp, Homo sapiens
actgttcctccaatgagtaaacagcactgctgtagggctggcctaagtcaggcagttcaagataacctgaaggagtcgaataacatctatccagtgagtcctgcaagacttcaggctctttctcatccagcagctccctgctgagcctggaaaagtaggaaaaagtaaagaataagccagggggaatcagaaaccacacagccccagctagatttcatggctaacataaggaactgtttaaaaagaaaaaggacagatccattaatgaggtaatgaattattgcctttatgttgggatagaccagggccaggtagaaaagaatgaaagagaaagacaggcacagggaggcacacacacacagagagagagagcaagcagtgtgctcagtccggtggccgcgttgctcagtgagtaagaggtcaatgtgcgttagtagctagagccctcggagcacacagggatcagtgatcatctgaagactgggctctaccatatactgtgctcaagttcacaagcactcgccgttaccatacagcctttgaagtatggtcmacctacagtaggttagtaaatgataaggggaggaagaaatggaaacctaaa

SEQ ID NO: 586133 - DNA, 610 bp, Homo sapiens
attatccccacaactcagggaatttagaggcttccccttttgtctttgtaggaatagcagactttctgactgtaatgtccaaagttctttacaagttgaagtacagaagagatcagaaaatgtcttacgcacatgagagttgttatccaaagatttgtcataggagcagcgactctaggtgttctctattctatttagaagaattacattagattttgattcctcaatgtggccaagaaatagagctacttgctgggagcaagaaagacaacatgacttctggaaactatttattatgaaaaatgaattttcattatgtagcaaattacaytgcagaagtattacaaagaattctcatagacatggtatattaaatctcaaatcaataatcatacatagtcaattaaaaatatctttgttgatatctttcagaacctgggaaataattttctgactttcaaattttttagtttctattcaatggcagaaaatctatattgtgccaaaccagtctgaaaattagtagttgattatatgctggacacagaaaaattttctataacctgttaaatgcaacactccattcattgcttaattctccccaaatagc

SEQ ID NO: 586134 - DNA, 610 bp, Homo sapiens
attatccccacaactcagggaatttagaggcttccccttttgtctttgtaggaatagcagactttctgactgtaatgtccaaagttctttacaagttgaagtacagaagagatcagaaaatgtcttacgcacatgagagttgttatccaaagatttgtcataggagcagcgactctaggtgttctctattctatttagaagaattacattagattttgattcctcaatgtggccaagaaatagagctacttgctgggagcaagaaagacaacatgacttctggaaactatttattatgaaaaatgaattttcattatgtagcaaattacactgcagaagtattacaaagaattytcatagacatggtatattaaatctcaaatcaataatcatacatagtcaattaaaaatatctttgttgatatctttcagaacctgggaaataattttctgactttcaaattttttagtttctattcaatggcagaaaatctatattgtgccaaaccagtctgaaaattagtagttgattatatgctggacacagaaaaattttctataacctgttaaatgcaacactccattcattgcttaattctccccaaatagc

SEQ ID NO: 586135 - DNA, 287 bp, Homo sapiens
tattctttgcccgtttgctgtagttactctttgtaccaaaggttctgagtctggagtctctgcttccactggtcagatagactctctccttacattgtggtctctcactgaatgttctcacccactgcttcctcactacgtaatayctgcccaagaagctcccgtcttctcattctcccatcccatatgctgacattctttccagtccctgcattgttatgagagctcagtgggggagggagctgaatgtctgtattcagtccacaactacgatctaggatactctg

SEQ ID NO: 586136 - DNA, 662 bp, Homo sapiens
ctctgcttccactggtcagatagactctctccttacattgtggtctctcactgaatgttctcacccactgcttcctcactacgtaatacctgcccaagaagctcccgtcttckcattctcccatcccatatgctgacattctttccagtccctgcattgttatgagagctcagtgggggagggagctgaatgtctgtattcagtccacaactacgatctaggatactctgtattaaccataaataattgatgcaagtttcttccactcagccatagctgagccagattacccgcaatgctatctcatcccaccacagtctctacgactaatttctattatacaaggtaagatcaacatttgaagtgattgagtttaaacataaaaagatgtattggctcctgcgactgggcagtcttcagggttagttgcttgagtgatcaacgataccattaagattatgattgggacatgaaaaaaagaactggcaaataaggagagaactttgacaatagaaaggcatttaatccttgtgttgttttgagcgccctaaaggaaaagacaaattaaaggcagatcctaacagaactattaacaaagaaggaagagggtgaatgagactcttgaatcaaaaattcttaattcttaactccacctgtgaaat

SEQ ID NO: 586137 - DNA, 618 bp, Homo sapiens
actattaacaaagaaggaagagggtgaatgagactcttgaatcaaaaattcttaattcttaactccacctgtgaaatcttacttaatctggttatactragaataatcatcacaccattctgtctcacattctagaaggctttgtagtggtagaactgtaaacaacatataaacatttctgaaatattgtggttgttttatcttccataagcctcacacaagccgtgtgtatgatcatccatcttctgggccattatctgattattgctgctatctctcgctttggggaaaggagagtctctttccttatcaatagtattggatcagctcttctaatttcatgatgacatgagtgttcaggaatgatggaaggcaaatgtaaccctgagaaaacttggtttaactactgcatttcacaagtccatatccatcctagaaggtcttccagcctgctctctgccttgctcccaagatggccacatgtaggtctcttctttcccgtaaccagagggttatagattatattatccttcaaagtctgggataaaccaatttctcactctaaagagaacaacgtgttttgatttttccaaccctaaccctagcctaaagtctacc

SEQ ID NO: 586138 - DNA, 618 bp, Homo sapiens
actattaacaaagaaggaagagggtgaatgagactcttgaatcaaaaattcttaattcttaactccacctgtgaaatcttacttaatctggttatactgagaataatcatcacaccattctgtctcacattctagaaggctttgtagtggtagaactgtaaacaacatataaacatttctgaaatattgtggttgttttatcttccataagcctcacacaagccgtgtgtatgatcatccatcttctgggccattatctgattattgctgctatctctcgctttggggaaaggagagtctctttccttatcaatagtattggatcagctcttctaatttcatgatgacatgagtgttcaggaatgatggaaggcaaatgtaacyctgagaaaacttggtttaactactgcatttcacaagtccatatccatcctagaaggtcttccagcctgctctctgccttgctcccaagatggccacatgtaggtctcttctttcccgtaaccagagggttatagattatattatccttcaaagtctgggataaaccaatttctcactctaaagagaacaacgtgttttgatttttccaaccctaaccctagcctaaagtctacc

SEQ ID NO: 586139 - DNA, 618 bp, Homo sapiens
actattaacaaagaaggaagagggtgaatgagactcttgaatcaaaaattcttaattcttaactccacctgtgaaatcttacttaatctggttatactgagaataatcatcacaccattctgtctcacattctagaaggctttgtagtggtagaactgtaaacaacatataaacatttctgaaatattgtggttgttttatcttccataagcctcacacaagccgtgtgtatgatcatccatcttctgggccattatctgattattgctgctatctctcgctttggggaaaggagagtctctttccttatcaatagtattggatcagctcttctaatttcatgatgacatgagtgttcaggaatgatggaaggcaaatgtaaccctgagaaaacttkgtttaactactgcatttcacaagtccatatccatcctagaaggtcttccagcctgctctctgccttgctcccaagatggccacatgtaggtctcttctttcccgtaaccagagggttatagattatattatccttcaaagtctgggataaaccaatttctcactctaaagagaacaacgtgttttgatttttccaaccctaaccctagcctaaagtctacc

SEQ ID NO: 586140 - DNA, 618 bp, Homo sapiens
actattaacaaagaaggaagagggtgaatgagactcttgaatcaaaaattcttaattcttaactccacctgtgaaatcttacttaatctggttatactgagaataatcatcacaccattctgtctcacattctagaaggctttgtagtggtagaactgtaaacaacatataaacatttctgaaatattgtggttgttttatcttccataagcctcacacaagccgtgtgtatgatcatccatcttctgggccattatctgattattgctgctatctctcgctttggggaaaggagagtctctttccttatcaatagtattggatcagctcttctaatttcatgatgacatgagtgttcaggaatgatggaaggcaaatgtaaccctgagaaaacttggtttaactactgcatttcacaagtccatatccatcctagaaggtcttccagcctgctctctgccttgctcccaagatggccacatgtaggtctcttctttcccgtaaccagagggttatagattatattatcyttcaaagtctgggataaaccaatttctcactctaaagagaacaacgtgttttgatttttccaaccctaaccctagcctaaagtctacc

SEQ ID NO: 586141 - DNA, 515 bp, Homo sapiens
ggaagtctggaaggcttacacctttcaagatgtcatcagttgatakagaaaaccatgaaactcaaaacaataaattcctgctggacaaaagcacaatttgtgtccagatgttgtgcatagctacagaattacgacaaacccaatttagagaaaaccatggaaagaagtatggatatgaagggaaaaaaaggtgtggagtgaagggttgtaagatatggatcttggaggaatttaagagctaatacacaccacaccagaggaattaacaaaagatgacttcatggagatgagtgcttcctaaccagtgccagataatgaggaagaagacataggaaaagcagtgccagaaaacaaattggcattcaacaatctggcaaaaaagctttgattattcaagactacttttgacttcttttatgacatagaccgttccatgatacaggaactgaaactaaagcaaatggtggaagacggataggtactacactgaaatgtttttagagaaatgaaaaagc

SEQ ID NO: 586142 - DNA, 515 bp, Homo sapiens
ggaagtctggaaggcttacacctttcaagatgtcatcagttgatagagaaaaccatgaaactcaaaacaataaattcctgctggacaaaagyacaatttgtgtccagatgttgtgcatagctacagaattacgacaaacccaatttagagaaaaccatggaaagaagtatggatatgaagggaaaaaaaggtgtggagtgaagggttgtaagatatggatcttggaggaatttaagagctaatacacaccacaccagaggaattaacaaaagatgacttcatggagatgagtgcttcctaaccagtgccagataatgaggaagaagacataggaaaagcagtgccagaaaacaaattggcattcaacaatctggcaaaaaagctttgattattcaagactacttttgacttcttttatgacatagaccgttccatgatacaggaactgaaactaaagcaaatggtggaagacggataggtactacactgaaatgtttttagagaaatgaaaaagc

SEQ ID NO: 586143 - DNA, 311 bp, Homo sapiens
aatttgaagagtcatattttgtaaatccagttacctttttccactactctaggcctcatatactatctggcctaagggttaaaggtccayaattgaataagccaaacttgttaatttgagggtaaagcatgtcaagaaatctggccttaatgtccaatgaacttatgtcatattaagtagctggatagaaacatgcattccaaagtggatactgtttatcaggctcagtgctctattcttgacagtaaatcccagaatagggtggatgctttaattttgtattaaatagtattaggtgtaatatcaaaacc

SEQ ID NO: 586144 - DNA, 528 bp, Homo sapiens
tcatctttctgttctccaacgaatacaactactactgtttttatacctacaaatctgacaaagatgggagaaggsatcttatagtttcaatttgtatttctttggtgaccaatgtactaaattactcaatgtactaaattactcttttcctgtttatcatccatttcaaacaaaatgtaaaccattttttaaatttttttatattaatgcaaattgtaaatcactactttatttattcaacttcctaagcaaaattatatgttgtcccatttatacattttatattagatcattctgccttacatttataacctaaaaactgtcagaattatataataatgatgaacagttgattataaataatgtctttattaggatatttctccataaatctaaatttcatcaatctttctttaaatatctctacacaatgtcctcttgtattatattaataattgcagatacacttctttttgctatttctattaattctttcctattcctattgtctgttagtctcccatttct

SEQ ID NO: 586145 - DNA, 528 bp, Homo sapiens
tcatctttctgttctccaacgaatacaactactactgtttttatacctacaaatctgacaaagatgggagaaggcatcttatagtttcaatttgtatttctttggtgaccaatgtactaaattactcaatgtactaaattactcttttcctgtttatcatccatttcaaacaaaatgtaaaccattttttaaatttttttatattaatgcaaattgtaaatcactactttatttattcaacttcctaagcaaaattatatgttgtcccatttatacattttatattagatcattctgccttacatttataacctaaaaactgtcagaattatataataatgatgaacagttgattataaataatgtctttattaggatatttcwccataaatctaaatttcatcaatctttctttaaatatctctacacaatgtcctcttgtattatattaataattgcagatacacttctttttgctatttctattaattctttcctattcctattgtctgttagtctcccatttct

SEQ ID NO: 586146 - DNA, 576 bp, Homo sapiens
cataggacagtgccagtttagcactgaaaaaaatcagttctcctaattctaaaaagaggagacagccaggcgtggtgggtcactaaaaatacaaaaaattagctgggcatggtggtgcatgcctgtaatcccagctacttgggaggctgaggcaaaagaatcacttaaacccgggaggtgaaggttgcagtgtgctgagatagcgccattgcactctcgcctgggcaacaagagcgaaactccgtctcaagaaaaaaaaaaaaaaaagagagagagagaaactgtaatttcatttcagaagttttatagggtactatttccaattctttttttcttactccattaaagtgtaattagcagtatgtgaaaatttccactttatcctcaatcagaagcctctccttccaattagcatatattttttctattaactttgtaaagtgggattcttgttttatacatacccmtggaaagtatacttaaactgtgagaccctgggattttatatttccaaatagaagataccatcctcttgtatcacaaaatgtacctaagatggtttggattatatttaaa

SEQ ID NO: 586147 - DNA, 484 bp, Homo sapiens
cttccacattttcaggtatcttaacagcagtgctctactctattggtaccaatttactgtattagttcattttcacatgctgataaagacatacacaagactgggtaatttataaacaaaaaagtttaatggactcacagttccacgtggctggggaggcctcaaaatcatggtggaaggtaaaggcatgccttccgtggtgacagaccagaaagaaggagaaccaagggaaagaggtttccccttataaaaccttcagatctcctgagacttattcactaccaagagaacagtagggaaggaactgttcccatgattcagttgtctcccactgggtccttcccacacatgtaggaattatggaagctacmattcaagatgagatttgggtggagacacagccaacccataacaatagccatgtagcctgttggaggatgagtcctgtcctttgttctatttctccagtaacattaatgtagaa

SEQ ID NO: 586148 - DNA, 446 bp, Homo sapiens
atttaatctgtgacccaagaattccactcctaatatttatccaacataaatgagaacatacgttcacaaaagaacttgaacatgaatgttgatagcagcttcattcataacagccccaaactggaarcaacctgaatatccattaacagggaactagataaactgtgctatatgtgtatgatgaaatacactcagcaataaaaaagaacaaaattctaatacatgtgctaatatggtaggatctcaaaactatattgacagaaactttgaagagtacattcatttatacgaatctcaataatggacaaagttaatctatagtgatagaaatcagaaagtaattgtgggggttgggggattgattggaaaatgatatataaagaaactttctggggtgataaaagtgttctgtatcttgtgtggggcagtggctacataggtgtaca

SEQ ID NO: 586149 - DNA, 492 bp, Homo sapiens
attatattttaaatgttttctgtttttttttctttgttgcttctccttctggaacaccaatattgcatgtgttgtaatgtttgattacatcccatatgtttcttaaacctcaattttttttactgtgcttttctttttgctctttgtcacatgattttcagagaaaagtttttgagctcattgatcctttcctcctctcaatctagataggattctcttgaattccctctatcaatttttcaactcaattatagtactcttcaactctatgatttctatttggtacttctttatactttctaactattgaaattctcagtttgttcttgcattgctgtcctaacattggtgagcatttttataaacatcattttgaatttcctgttaggttaatcacatatacmcaatttacttgggtaaatttttgaagacttactttttcttttatttggaatattttgccctgtttctgtattttcccttgactccctc

SEQ ID NO: 586150 - DNA, 591 bp, Homo sapiens
catcatgttgaccaggctggtctcaaactcctgacctcaggtaatccacccatctcggcctcccaaagtgctggggttacaggcgtaagccaacacgcccggcctatgacattcattttaggtccaaggggtgcatatgcaggtttgttatgtgggtaaattacatgttgctgtgttgtgacagttcaatatacagattattttgtcacccagatcatcagcayaatccgctataggtagtttttctatcctctccctctcaccctccagcctcaagtagataccagtgtctgttgttcccttctttgtgtccacatgtactcaatgtttagctcccacatataagtgagaacatgcagtatttggtttcctgttcctgcgttaatttgctgaagataatggcctctagctccatccatgttgctggaaaaaaaaaatagattttctttctttttttttttttaatttatttgagacagtgtctctgtcacccaggcttgagtgcagtggcgcaatcatggctcactgcaacctctgcctcctgggttcagacaatcctcctgcctcagcctcccaagtagctaggactac

SEQ ID NO: 586151 - DNA, 578 bp, Homo sapiens
ttcatttaggtctatgatctattttgagttgattttgtatataagaaagaagttcaattttattctttttcatgtgtccacttcttccaggaccatatattgaaaaggctaatttttccctcattgaactgcatgcccattttaagcaaaaaaagattgttttctatgactgcagtccgagagaaggataatcaggctcattgactyagtcttctcacatcccagaatttctagcacttgctattttgtgacataaacctcctccaaacacatttgttacctaaacaaacacaagaactgtacttaaccttgctgaactacataagaatttgaaccacttctgtttgctataaatacgcagtgctgtgaaagaggctgttggtttctattgaaactcaattctagagtatttgtctgggaagctgggggactgattttcctgttttacccatgacctctcccaataaatgcatttattaatttccatgaattgttgtggctggtgggaggtatgcagcagccgccagttgtatggctagaacatgcaggctgccaacagaaggccacaaagactattg

SEQ ID NO: 586152 - DNA, 578 bp, Homo sapiens
ttcatttaggtctatgatctattttgagttgattttgtatataagaaagaagttcaattttattctttttcatgtgtccacttcttccaggaccatatattgaaaaggctaatttttccctcattgaactgcatgcccattttaagcaaaaaaagattgttttctatgactgcagtccgagagaaggataatcaggctcattgactcagtcttctcacatcccagaatttctagcacttgctattttgtgacataaacctcctccaaacacatttgttacctaaacaaacacaagaactgtacttaaccttgctgaactacataagaatttgaaccacttctgtttgctataaatacgcagtgctgtgaaagaggctgttggtttctattgaaactcaattctagagtatttgtctgggaagctgggggactgattttcctgttttacccatgacctctcccaataaatgcatttattaatttccatgaattgttgtggctggtgggaggtatgcagcagccgccagttgtatggctagaacaygcaggctgccaacagaaggccacaaagactattg

SEQ ID NO: 586153 - DNA, 578 bp, Homo sapiens
ttcatttaggtctatgatctattttgagttgattttgtatataagaaagaagttcaattttattctttttcatgtgtccacttcttccaggaccatatattgaaaaggctaatttttccctcattgaactgcatgcccattttaagcaaaaaaagattgttttctatgactgcagtccgagagaaggataatcaggctcattgactcagtcttctcacatcccagaatttctagcacttgctattttgtgacataaacctcctccaaacacatttgttacctaaacaaacacaagaactgtacttaaccttgctgaactacataagaatttgaaccacttctgtttgctataaatacgcagtgctgtgaaagaggctgttggtttctattgaaactcaattctagagtatttgtctgggaagctgggggactgattttcctgttttacccatgacctctcccaataaatgcatttattaatttccatgaattgttgtggctggtgggaggtatgcagcagccgccagttgtatggctagaacatrcaggctgccaacagaaggccacaaagactattg

SEQ ID NO: 586154 - DNA, 354 bp, Homo sapiens
aactgttcgtcccttactattcccatcttaacaaatggaacacctgtttacctagttattaaagagagaaatctgggagtcattctcgtttcctcactttccccatttcccacatcaacaagacctatatctttggtccacagacaccaccctagttcaagccaccatcatcttgcctaggataatgcaacagtctattgactgatctattttcactgtcactgttgccccattcccatggccattctctgaaagtagtcagagcttcattgtccttcagtggcttcatgttgcacttagaattaaatgcaaacttaggggccaggcacagkggctcacacctgtaatcccagc

SEQ ID NO: 586155 - DNA, 609 bp, Homo sapiens
acatggtgaaaccccatctctacaaaaaatacaaaaattagctgggcgtggtggcgcacacctataatcccagctactcaggaggctgaggtgggaggattgcttgaccctgggcgtcagatgaagctgagatcacaccattgcacctcagcctgggcaacagagcaagaccctttttcaaaaaataatatatatatatatatatatatatatatatatatatatatatayacacacacatatacatatacatataaaataaagtaagcctaacagcctgaaagtcagttgttttagctggtaaagaggaaaacactgaaaattgccctagagacagcaaatatggtaattgttgtagctcatttacactaaataatcatttaaagtatatagttataatataatacatagcaatgttgaagaaagatacagctaacaaaaattggaaagtagaaagagtgaagaagtatgagaggttggagtgtgaatatctttatcttacccagagtgaggagttaatgtatatttttgaaggttgaaaatccaagaattagatgtttaaagtacttagattacataatttaaattacaaagtttaccacgagagaa

SEQ ID NO: 586156 - DNA, 609 bp, Homo sapiens
acatggtgaaaccccatctctacaaaaaatacaaaaattagctgggcgtggtggcgcacacctataatcccagctactcaggaggctgaggtgggaggattgcttgaccctgggcgtcagatgaagctgagatcacaccattgcacctcagcctgggcaacagagcaagaccctttttcaaaaaataatatatatatatatatatatatatatatatatatatatatatatacacayacatatacatatacatataaaataaagtaagcctaacagcctgaaagtcagttgttttagctggtaaagaggaaaacactgaaaattgccctagagacagcaaatatggtaattgttgtagctcatttacactaaataatcatttaaagtatatagttataatataatacatagcaatgttgaagaaagatacagctaacaaaaattggaaagtagaaagagtgaagaagtatgagaggttggagtgtgaatatctttatcttacccagagtgaggagttaatgtatatttttgaaggttgaaaatccaagaattagatgtttaaagtacttagattacataatttaaattacaaagtttaccacgagagaa

SEQ ID NO: 586157 - DNA, 536 bp, Homo sapiens
atctgatggttatataactgttacataactgtttgacagttcctccttcacacttgctctctcttgcctgccaccatgtaagacgtacctgcttcctcttctacagcgtttctaagtttcctgaggcctcctcaaccatgtggaaccatragtcaattatacctctttttttttagatttgtcaaccttaaggtatgatgtagaatttttttttccccttttcttttacccagtgtattagttacccagtgtattacccagtgtattagtggtctcatgctggtaataaatttacccagtgtattagtctggtctcatgctggtaataaagtgtattacccagtgtattagtctggtctcatgctggtaataaagacatacccaagactgggtaatttataaaggagagaggtttaattgactcacagctctgcatagttggggaggcctcagaaaacttaacaatcatggtagaaggcgagagagaaacaagacatcttcttcacaaggtggcaggaaggaaaagtgctgagtga

SEQ ID NO: 586158 - DNA, 401 bp, Homo sapiens
aaatgagaaaaatgtctccctctggacaagatctgtagaatacacgtgctaccccagaaggacaaagagctctaagttttagttttccaagagggcacatctgtcgcagcccatttccctttcttttctttttttttaaattaatttttaatttctgtgggtacatagtagatgtatatgtttatgggttacatgagatattttaagacaggcatgtaatgtttaataatcacatcacggtaaatgggggtatccatcgcctcaagcatttatcctttgtgttaccaacaatccaattatgctcattagtttttatyttattttattttatttttgtaggtacatagtggatgtgtatatttatggggtacatgagatgttttgatacagacatgcaatgt

SEQ ID NO: 586159 - DNA, 581 bp, Homo sapiens
cttgggtaataattgttttgttcaaggaagttgaagatagggccccaatcccttctagcttgtagagtttctgctgagaaatttgctgttaatctgataggttttcctttrtagttacctggtgcttttgcctcacagttcttaagtttctttccttagtcttaactttagataacaataacctgatgacagtgtccctaggcaatgatctttctgtgatgaatttcccaggtgttctttgtgcttcttgtatttggatgtctaggtctctagcatggtcaggaagtttttcttgattattcccccaaatatgttttctaaactttcagatttctctttttcctcaggaacaccaatttttcttaggtttggtcacttaacataatcctagacttcttggaggctttgttcatattttctttttttgtctttgttggattgggttaattcaaagaccttgtattcaagctctgaatttctttcttccgcttgttcaattctattgttgagagtttccaaagcattttgcatttctagaagtgtttcaggaacattgtttcctgaagtttttattgtttttt

SEQ ID NO: 586160 - DNA, 394 bp, Homo sapiens
ctctttccaataaatagtgttgggaaaactggatatccaatgcagaagaatgaaattgggtccttatctcataccacataaaaataaacccgaaattgattaaggacttacatgtaaaagctgaaactataaaaccactggcagaaaacccaaagggtgatttattgatgttggtcttggcaatgaatrtttggaatatgaccccaaaagtacaggcaacaaaagcaaaaaaagacaaatgaatgacataaaacaaaaagcttttgcacagcaaaggaaattatcaaaggaatggagacaacctacagaaggagagaaaatatttgcaaaccatacatctaataaggggttagtatctaaaatataaaaagaactcaaacaattcaatagcaag

SEQ ID NO: 586161 - DNA, 504 bp, Homo sapiens
atccaaaaaactcaaagaccttcagatttgaagttaggttgtgtctccattaggaaacttacatgatttaggaatgtaggaatcccaacgtggaggataccagactcctaacatggaaaatgattctgtagaagcacatggttgaatgggaataaaactgtagctttgagaaccatattttgttttcatttttcattttaaatttggagaaattaaggtaacrgagtttccccagaataggagagggatgggaagtgttgtttttagctgaagtactatatgtgccaaatattttttagctgtagaactagtatctagttggaagacatagcaataacaattaattctgcttcttaatgtactgcaggccagggaaatggaaagcgagaacagaacagtgataagagaattcatcctccttcgtttgacccagtttcgagatatttagctcctggtctttgtgctagttttaatattctacttcttcatcctccctggaaattt

SEQ ID NO: 586162 - DNA, 440 bp, Homo sapiens
agccttacctctcgggaatagtacctacttgatcacagtgtgttaactttttgatgtgctgatggattcaattagctaatattttgtcgatgatatttgcatctgtattcataagggatattgccctgatgatttgttttttgttctgtccctgccaggttttggtatcaggatgatactggcttcatagaatgagttagggaggagctcctactcctcaattttttggaatagtttcaataaaattggtagagttctttttttaactctggtagaattcarctgtgaatctatctggcccaggacttactttggttggtaggtttttttattattgattctgtttcacagcttgatgttggtctaatcagggtttcaatctcttccagggattcaatcttgggagattgtgtgtttccatgaatttatccatttcttct

SEQ ID NO: 586163 - DNA, 600 bp, Homo sapiens
gatgacgcaggcaaaatgaaactgttttttctaccatttttttgtgttttttcttgaagtttttctgtctgctctgttgttttaacttctgaagtagattcctgatctctgctagatattttcatttgtggatatttrcccagttgttgttcctttaggaggaataaagactgagatcacctactctgccattctagctgatgtctaacacattttctttgttcatctgtctatggacttttaggctgtttccatatcttggcttttgtgaataatgctgtagtaaacatgggtgtgaaggtatctctttgaggttctgatttcaattcttttggacatattcctaaaagtgggattgctgaatcatataataattttgtttttaatgttttgaggaactgacacattatttttcatagtgactgcaccattttctatttccaccaaaagtgtataggagtttcaattccctaaattctagccaacacttcttttgttttttgataatagccatgctaataggcatgaggcaatatctcattggtgtttggatatgcatttccttaacaactagtgatgctgaacatatttgcttatacc

SEQ ID NO: 586164 - DNA, 495 bp, Homo sapiens
ttttaaaaacaatttgacagtaccctgtaatcatatactkaccaattcttataggctgaatgtttgtgtcttcccaaaatttgtacgttgaaattataacccccaatgagatggtattaggagatgaggcttctgggaggtgatttagcttctggaggtgatgagggtagagcctttgtattagtctgttctcatgctgctatgaagaaatacctgagactgagtaatttataaagaaaaggtttaattgactcacagttctgcatggctggggaagcttcaggaagcttacaatcatggtggaaggggaagcaaacacattcttcttcacatggtggcagcaagaggaattgctgagcaaaaggggaaaaactccttataagaccatcagatcttgtgcgaactcactcactatcacgagaacagcatggaggtatctgcccccatgattcagttacctcccatcaggtccctcccatgacacatggggattat

SEQ ID NO: 586165 - DNA, 429 bp, Homo sapiens
ctgggcaaattataagaaaagaggtttaattggctcgtggttctgtaggctgtataggaagcatagcaacattagcttctggggaggcctcaggaagctcccaatcagggcagaaggcaaagtgggagcaggcacatcacatagcgagatagtgagaatragatcaagcaagaaagagaaagagacagagagagagagagaagccacacactcttttttcatttttcttttctttcttccttttctttttttgagatggagtcttgctctgttgtccagcctggagtgtaatggcgtgatcttggctcactgcaacctccgcctccagggttcaagtgattctcctgcctcagcctctcaagtagctggaattacaggtgcccaccaccatgcccggatagtctttgtatttttagtagagatggggtt

SEQ ID NO: 586166 - DNA, 260 bp, Homo sapiens
agcgcatttgatatattaggataagcattctcgaaacttttgtttcacttaygagtatgcagccaggcacagtggctcacgtttgtaatcccagctactctggagggagatgggggaggattgcttgaggtcaggagttgagaccagcctgggcagcacagagagacctcatctccaaaaagaaaacaaacaaacaaacaaaaaacagatatgagtacattggatcaccaaatgtcttcactgcccctttacccacaaag

SEQ ID NO: 586167 - DNA, 550 bp, Homo sapiens
taggctacagtgagctttgatcgtgccattgcactccagtctgtgtgacagagcaagatcccatctcaataaataaataaataaataaataaataaataaataaataaataaaataattaataaaacactttttccttggtgtgaccatggcaaataggtggaactcagctgtcaagcgcttttatatagagagggtaaattagcagtgatggggccactgaaaagccagaaacagttcatctccttgtaaagtttccattttcttggcaaatgaaagttcccaagagtaagtgctacctttctattttggaactgattttaaaaaagatgtttctgaggtctttggatttagtttctctyaataatatacaaaccaaatttctcagctgatatatttaatgatgattttctaactgggatctgaaaatccagctgtgccatacccactgctttcttatgcctctccctcttagtgactaagattctttgatatgaatttaggtcatcctgaaatataataaattttggttaccttatataaagttaaag

SEQ ID NO: 586168 - DNA, 427 bp, Homo sapiens
gtgaaaccccgtctctactaaaaacacaaaaattagctgggtgtggtggcaggcacctgtaatcccagctactccggaggctgaggcagaagaatcgcttgaacctgggaggcggaggttgcagtgagctgagatcatgccattgcactccagcctgagggacaagagtgagacttcgtctcaaaaaaaaaaataaaagattgactatagtattaattagagtactaaaaaacaaaagaaaaaatcaataataggagattgataaattatagttaagcaaattatgatagtcattataatatgtatatagtcatgaaaacatctgtctagtcattaaaatagtattttaatatttaaggwcaaaataattctccttatatgttaagtaaaacaacaacccagtataataaaatatgccattagagta

SEQ ID NO: 586169 - DNA, 571 bp, Homo sapiens
taatgtatatatttctccaactatattcacatttcatgttttgttcctgtttctggtaaaagattctaaataccaaataaaacacaatgccctactagtttatcaaaaggaatatattaaagaaaaaggactggaataatccagaatgcaattttcaaggcaaaaataatgcctstgatctcagtagggttgtgatatgctctctgcggaacctattgctcctggtttttcaattacaactttgaatcatattccttgattagtaacaagcaatcaatcataattaattagttaaaatgttcaaccgttaaaatcattaccattaattaaaataattatctctattttggctgcacttcattaccattttggggatatgcattgctttactgtaccttgtgttcttagtacagcttctctgtgaacacaaggcatacagcagataatctgtctgctactttaaaaatgactacttgaataaggtttcggacttcgttgttcttgtcgcatctgggaaagcattttactacagtgttatgagctttattaagaaagctctttgaaatggatg

SEQ ID NO: 586170 - DNA, 580 bp, Homo sapiens
acatttatatgttgtctccatcccaaaatgaacatgggtcatatgttacatacatatttgtttaatacacatgtgtcaggaccaactttgtaaatattaatagcccttcctatgacctgttaaatatgtatatttagccaaaaaagttagtaattgtttatcatagagtcttttggaattttcccatatagcttatgtcatttgcgtattcctttataatataataycatatctttgaattatttttcttgcccttgttgcactggctagaaaatctaccactatcttgattagtggtgatagcagacatccttgtttcatttccagtctcaaagagaaagctttcaatattgtaccattaactatgatgtttgctataaatttttgagggtatcctgtatcacgttaaggaggttcccaagttctcttcttattcctagtttgctgaaagcttttatcatgaatagaaattgcattttatcaatgttctttctgtacctatttaggtgaatatatgattctttccctttattttgttaataggttgaattataattgttttttacaaaatgttaaccca

SEQ ID NO: 586171 - DNA, 543 bp, Homo sapiens
gcgagggtccataagaaagagattgtaaagtggtttcttttatctaatttcagctctaaagtaacaagcagatctagtgataaagaaaatatttgaatttaggactctaagtgttcttttagccgatccaaaattattcactttgtaatgggattgtttctgtgattctaattcaacgtttgcaatgttcttgtaggttggttaacctcaggacttagaaaagaaatgactgtaatgtaaccrttcaaaagatcagtttaccactaaatacacaaacataagtgtgtaaaactttttcaatagaagactcagtcaagttcttaagcaaaagacattccttcaacaagctggtgtgcaataactgctttccagaaactccagtaccactaaaaattcatgttttgaatgagattaaatcctttattgctctggctattgaagaggtggtgccaagagactgaaatcttatgaaagacatttattttttcaaggaatgtgttaatatttatttaattaaattcataactctttgtttaaaatgta

SEQ ID NO: 586172 - DNA, 383 bp, Homo sapiens
  misc_feature 382, 383: n = A,T,C or G
gaacactttaacactgttggtgggaatgtaaactagtacacctactatgaaaaacagtgtggacattccttaaataaccaaatgtagatctatcgcttgatctagcaatcccgctaccgggtatgtacccagaggaaaagaggttaatatacaaaaaagatatttgcacatgcaagtttatggcagcatagtttgcaattgcaaaaatatgaaaccagctcaaaggcccataaatcaacgggtggataaagaaaatgtggtatatatacaccatggaatactactcagccataaaaaaggaatgaaataatggcattcacagcaacctggatggaattggagaccattattstaagtgaagtaactcagaaatggcaaaccnn

SEQ ID NO: 586173 - DNA, 543 bp, Homo sapiens
tcttaacatttatttaaaagtaaaaagtatatattatgttacaacatttattagatgcataataatgttaccagagcaacaataaatatataagttagaagtcaataggcaacatatagtcaccattatgatgtaggggttgtggtgataataaggtgatttattactcacagtgcaggaacaatagtgaacatagcaacattctgacttgaaacctctcttctgatccaggaacaactatcctgagctgcygttcatgattcaggttggcatcaatcaaattggaagcacatgaattatacattattgtttctgagccacaggtgggtattctgtttctagctgctcaaatgagttgcctcattccttattgcttcctactaatattctcatcttccagttttttgtttttatctgctaaagacatgaagaatgggaacactaccattgcatctcccagccccagagaaggatgttcactcccatgttctcaccttttcttcatctttatttgatggctataactttgtcattcatattttt

SEQ ID NO: 586174 - DNA, 542 bp, Homo sapiens
atcaaaattatctgcgtggtataacacaaagagagattctagtgtaaattatgaacattatttaataacatcaatattgggtcattaattatataccacattgattcaaaatgttaataatggggtaaatgtgtgtatttgttggaacaatgagagttgatacatatagaggctctgtactttctgccaaatttctctgtaaaactaaataaagttgctctaaaaataaagtctactaatttaaaaaaattctgttagaagttacaaaaataaagattctttttttttttcttgttaacaaaagacaaattagatccgtggaggcaaaagaattttgttttctaaaagaatctatagactgggaagacagarcctccagtgtaaaacacaagtgtggtccaaagaggactgggagagtagaagattttattagcccattcctgctttgctataaagaaatatctgagactgagtaatttataaagagtagaggtttaattgaatcatgcttctgtaggctgtacaggaagcatgatgctggc

SEQ ID NO: 586175 - DNA, 520 bp, Homo sapiens
gggtctgcctttcccagtccactgactaatgttaatctcctttggcaaccccctcacagacacacccaggagcaatattttacattcttcattccaatcgacactcaatattaaccatcacactgaataacaaattaccacaaaactagcagctttaaacagcacaaacgcattattttaccccttctgtgaagcaggttctctaatcagggtctcacaaggctacaatgaagatgtcagctggactgccttctcatctagacacccmataatggaataatccacatctaagctcatatagggagttggccaaatttatatccttggaactgcaaggaaaagcccagaatttacgggctatagtgtgtagatcaccattagagcctagaggtttctcacactgcccgacatcatggccttgtccacaagcagttagcaacatggctgttttcttcctcaagagcagaaagaggagctcccactgcagtcctctaagacacagtcttacataacacagcgt

SEQ ID NO: 586176 - DNA, 554 bp, Homo sapiens
caactaaaagtgttcatagtagttcgtttagaattagtattcctttataataaagctgtggcccatcttttcattttcatccattttcaaattaattctatattctctataaattgatatatacttctgctcattggcatcctaatgctatggttttaatgtgtcccctccaaaattcaggtgtcacaaatgtgataatattaacagatgaggactttaagaggtgattaggccataagaactcctctctcatgaatggcattaaggaccttataaaagaggcttcagtcagcgttcttctttcttgcccatctgacttccaccacatgaggacacagcttcctccctccagaggacmaaacaataggataccatcttggaaacagagagtggtcctcaccaaaccaccatatctgccagagctttgatcttagactttctggcctccagacctgtgaaaaaataaatttatgttctttataaatttcccagtctcagatattttttataacagcaaaaacaaaccaaagcacctactttaagtcaaaattgta

SEQ ID NO: 586177 - DNA, 541 bp, Homo sapiens
ttaagaggtgattaggccataagaactcctctctcatgaatggcattaaggaccttataaaagaggcttcagtcagcgttcttctttcttgcccatctgacttccaccacatgaggacacagcttcctccctccagaggacaaaacaataggataccatcttggaaacagagagtggtcctcaccaaaccaccatatctgccagagctttgatcttagactttctggcctccagacctgtgaawaaataaatttatgttctttataaatttcccagtctcagatattttttataacagcaaaaacaaaccaaagcacctactttaagtcaaaattgtatattgctttctttaagatgattttctttattctgctccagacaaatttaatatattgctcctttttgaaatgtattgacctgttttatatttttcaaaaaaaaatcatgtgtgttattgctgtgaaggtatttgtgtacatagttaaatttcctttaatttagcaataataatattttatttgaatgatgccataaaaccaaa

SEQ ID NO: 586178 - DNA, 554 bp, Homo sapiens
caactaaaagtgttcatagtagttcgtttagaattagtattcctttataataaagctgtggcccatcttttcattttcatccattttcaaattaattctatattctctataaattgatatatacttctgctcattggcatcctaatgctatggttttaatgtgtcccctccaaaattcaggtgtcacaaatgtgataatattaacagatgaggactttaagaggtgattaggccataagaactcctctctcatgaatggcattaaggaccttataaaagaggcttcagtcagcgttcttctttcttgcccatctgacttccaccacatgaggacacagcttcctccctccagaggacaaaacaataggataccatcttggaaacagagagtggtcctcaccaaaccaccatatctgccagagctttgatcttagactttctggcctccagacctgtgaaaaaataaatttatgttctttataaatttcccagtctcagatattttttawaacagcaaaaacaaaccaaagcacctactttaagtcaaaattgta

SEQ ID NO: 586179 - DNA, 541 bp, Homo sapiens
ttaagaggtgattaggccataagaactcctctctcatgaatggcattaaggaccttataaaagaggcttcagtcagcgttcttctttcttgcccatctgacttccaccacatgaggacacagcttcctccctccagaggacaaaacaataggataccatcttggaaacagagagtggtcctcaccaaaccaccatatctgccagagctttgatcttagactttctggcctccagacctgtgaaaaaataaatttatgttctttataaatttcccagtctcagatattttttataacagcaaaaacaaaccaaagcacctactttaagtcaaaattgtatattgctttctttaagatgattttctttattctgctccagacaaatttaatatattgctcctttttgaaatgtattgacctgttttatatttttcaaaaaaaaatcatgtgtgttattgctrtgaaggtatttgtgtacatagttaaatttcctttaatttagcaataataatattttatttgaatgatgccataaaaccaaa

SEQ ID NO: 586180 - DNA, 599 bp, Homo sapiens
atacaaatgtataaaataaacatttaaattatacagaatttttttttttttttttgctttgcttgtctctacacagccaataatttctgaagatcagacagcagccctgatggcccrtctctttgaaatgggattctgtgacaggcagctgaacctacggctgctgaagaaacacaattacaatatcctgcaggttgtgacagaacttcttcagttaaacaacaacgactggtacagccaacgctattgaggagtgaccttgtattaaataactgcctgctgctcagagatgatctttattctgtcattggggtatgggatagaagcccttgcttatttttaatctgatgaatctgtatagagcccatcgttgagttaccaagacaatacctgctacagtattttggggagcaaactaaagaccagaacttaaattttcactttagacattggatgaatagtatgaagacagtttttcagttgatttggataaaactattttagtgcattgacaagtgtaacttcaacttcatatagaaccatttttctttctgcttttattgaaactgagtatttttctttggctaatgtggattttt

SEQ ID NO: 586181 - DNA, 550 bp, Homo sapiens
agcataaaggcaaaatcaatatatattcatgtattcattcatgcattgagcaaatattcattgagtatcactaaatgccaggtaatgttttaattgtaaatacgctggtgaacagacaaaaatctctggcctcactgagcttaaattctagtgggggagctgatcaacaagaaaaacatacagcatgatagaagatgctatggatggaaacarggcagggtaggagatttggcaatgttggaggattgcagtcatcatgaggaaagtcagagttggctttactgagctgacatttaacaaagacataaaaaaaaccagagagtgaactctgtaagtagttgggaaaagagaattctaagcaaaatgagcagcaagtcagccctgcatctgtttaagaagttgcaaggaggctggagaagagtggtaaagggaaaaatccacagcaaaaatgaggtcaggaagataatcgtgaagggaacctcatttagagtctcataggtctttgtaaggactttggtgctaacactacatgagctgtccttgatacaac

SEQ ID NO: 586182 - DNA, 611 bp, Homo sapiens
  misc_feature 411: n = A,T,C or G
tgtcattagtttagttttaaggttttataaggaaaaaaaccaatggcgaattaaacatttgttaattcaacctgtattattttatgagtagctgtgttatatgtacttaagtgaagacaagtgagcttagaacttagaacctagagtgtttcatgtatggtgccttctttckgttgatttgcatttccacccctgggaaatgctaaagaggactaaggacaccattgaaatgtcactctttctgaatgagggagatggcagtgcttctcaaactttaatgtgtttacagaacccctggggagacttcttgaaacttagattctcatgaagtctggggttggggggctgggtggcacttctgctgatgagcagttggtagaccactccttgaggaaggagctagaatctttntgaggtgcaagtgtggagatgctcttcagccagtgtgatcctccctctccccaaccttcccctcagcaacaaccagcaacatgtgatttaaaagtttccctacttttattcttttatacttcctttcagtttagatttctttagtggttgggggtaacagtattctcccttaaaaattcctatgtgggtcatttcttctt

SEQ ID NO: 586183 - DNA, 572 bp, Homo sapiens
taactttttattttatttgtttctatatgcaagtattattttgattaaaaattatttaaggcaatagaataattaatttgtaataaaatttaccagtaatacaatttaataaaacttcagtgagaactgtaatagtttcagaagagttaagataacagaaggctaaaatcaaacaaatacaaatttaaaacaaaactaagaagtgacacaaaaattattaaatcaaaaatttaaaagcttgaaagctttttaaaatatataaatgacaaaatttaagataaaagattggaagttattatagttttcaaggaaatataaatgaaggataagcacatgaggtaaaagttaaatatgtaggagttgattaggctaacaattaagacctactatgttaaggtgaaaagtatgaatactaagcacaaaaactctaaaaaaatgttttcagaaaaaaatgtaaagtttagtagytagatggaagaaaaaagacatctaaaagttcatgtttaaaatactatttttgaataaatatttctgatagttataatttttcatccattcattcattcattcac

SEQ ID NO: 586184 - DNA, 443 bp, Homo sapiens
attatgctaaatttactctacctgtgccctagaaatgcaagaagaaagcctggatgacagcacatgtacttacagcatggtttgctgagtattttaagcccactattgggactsgatgcccagaaatgaagattcctctcaaaatattactgcttattggcaatgcacctggtcacccaagaagttcgatggagatgttcaaagagattaatattgttttcatgcctgctaacacaacattcattctgcagtccatggttcaaggagttactttgactttaaagcattattatttaagaaatacatcttgtaaggctatagctgtcatagatagtgattcttctgttggatctgggcacagcaaattgaaaatcttctggaaaggattccccattcttgatgcctttaagaaaattcatgattcatgggaggaagtcaaaata

SEQ ID NO: 586185 - DNA, 503 bp, Homo sapiens
gcttggtccatctaacacaattgcgtgctgtatctggagactagtggaaactattgaaagattttagtgagtgcattggtactatgaaagagtattttgttggcacgtgggaggatacatggagagagaaaaagtagatgtggaaacatcagttatcaggctattagtgtaatccagacagtgatacacagtataatgcccctcaaagatatccaagtcctaatccctggaaattgtgactgttttacatagcgaaagggacattgtaggtgtgattaagttaaggactttggaatgtggrgattaacttggattattttcgtggcacaatctaatcatatgagcccttaaaaatagagaatctttgttagctgtggtcagagaaagatacaggaatacaaatctgggccagatgctatactggtggctttgaagactgatgaaggggaccgtgagccaaaaaatgctggtagtttctagtggaagaggcaaacaaaataaaa

SEQ ID NO: 586186 - DNA, 638 bp, Homo sapiens
caattctataaaggcaaatatgatacagtttgagtatatatctctcacactgaatttaggaatatgcatatatagctatgtacacatgtaatttagaaatatatattttctagtatttctgatttctaatatttagaaatttctaaatatatgtatatatttgtgggcgtgtgcatattatatatatatttaaraatgaactttattgaagtataatttacctaaaataaaaaaagacattaaatgtttatagtttgatgagttttgataactttatatactcatatacatatatattcaccaccataagcatttctgtcaccaagaaaattcttgtacctcaacccagtgaaactccctcacatttataagcgatcactgattttctgtctgtcagtaatgatttagatttttgtttttgagagtttcatgtaaatggtatggtaatatgtcctattttgtggctggcttcttttgccctgcatagaggtttttttttttttttttttttttttttggaaaaaaatcaagggtggggcatgcatctctagttattaacttttttgctgagcagtattctattatataactgggccatattttaaaggccagtaaaattttttttaaaatgtcaatga

SEQ ID NO: 586187 - DNA, 638 bp, Homo sapiens
caattctataaaggcaaatatgatacagtttgagtatatatctctcacactgaatttaggaatatgcatatatagctatgtacacatgtaatttagaaatatatattttctagtatttctgatttctaatatttagaaatttctaaatatatgtatatatttgtgggcgtgtgcatattatatatatatttaaaaatgaactttattgaagtataatttacctaaaataaaaaaagacattaaatgtttatagtttgatgagttttgataactttatatactcatatacatatatattcaccaccataagcatttctgtcaccaagaaaattyttgtacctcaacccagtgaaactccctcacatttataagcgatcactgattttctgtctgtcagtaatgatttagatttttgtttttgagagtttcatgtaaatggtatggtaatatgtcctattttgtggctggcttcttttgccctgcatagaggtttttttttttttttttttttttttttggaaaaaaatcaagggtggggcatgcatctctagttattaacttttttgctgagcagtattctattatataactgggccatattttaaaggccagtaaaattttttttaaaatgtcaatga

SEQ ID NO: 586188 - DNA, 552 bp, Homo sapiens
taaatggtatggtaatatgtcctattttgtggctggcttcttttgccctgcatagaggtttttttttttttttttttttttttttggaaaaaaatcaagggtggggcatgcatctctagttattaacttttttgctgagcagtattctattatataactgggccatattttaaaggccagtaaaattttttttaaaatgtcaatgatcagggttggctgaacatttttctaragtttaaatatactaattagtgctctgatatggttgggctctggaccccactcaaatctcatctgaaattgtaatccccatgtgtcaggggagggatcttgtgggatgttattggatcatgggatcttccatggattcccccatgttgttcttgtgatagtgagtgagttctcacaagatctgatggtttaaaagtatgtggcagtccccgcaacctctctttcctgctgccttgtaaatatggtgcttgcttctccttcaccttttgccatgattgtaagtttcctgaggcctccccagtcatgtggatctgtgagtca

SEQ ID NO: 586189 - DNA, 619 bp, Homo sapiens
tgtttttcctaaccttaataaaatagcagagggggggatatcaatatttaagagtgtttgaaatatatacaatggagtattattcagccataaaaatattgagatgctgccatttgcaaaaacatggatgaatctggaggtcattatgttaagtgaaataagccagacaaagaaagaaactatccatgttccaaccttcaattaaatctaaagtattatgagagctctttcgtttgcccaatgtaagattaaaaaaagaaactaacaaatcagaatgtaagttcagaaaaagtaaactgatgtacatatcctttaatacttttcaggatgaaaaatgttaaatatactaatatgcttgtcaggatgaaatacatatacaataatttaacaatttaagaaaaaggctttgttatatacccaaacttatcaacaggtagaaacagttttgccacaacgtcaycctaagaaactcatgaattgatctgaaattcaaagatttaatcttcttcaagaggtatttaattattctgcaatgtgtacatgcatcataacatcacattgtaccctataaataaatgcaattacatttgtcaagttaaaaaataagagagagacacca

SEQ ID NO: 586190 - DNA, 478 bp, Homo sapiens
aatagttcatccaggatttaactcagccagttgattcaaacattagaagaaaaattaaagaaagagaagaagaaagaatctccccagtttacattctcagaatctcccagcagctcatttctaaagtggctgtggttaaatttagcagctgacaattgcttcccagtctagtgtgcaaggctgactgcgagattttaagatgctgctctttgattaggagaatcaaaacaggctgctgagccaccctagcccagcacgatgggggctggattgaggagtgagtcagtcaggaagccattgtsaatgtcaagcacaaacatcccagaatagctgcccactgggcatgagacttcagtggctgccccatgactgccagcctgtgaattggagatggcagtgagcttgacaagaagggtctgaaccaaaaataatccctgttggctccagaaggctcctggagaaatgagagcttcaggta

SEQ ID NO: 586191 - DNA, 452 bp, Homo sapiens
aaatgaattcaacttgaagatgtcatttgtatactagaagcagaactattgctttttgttgttgttgttgttgttygagacaggatctcactcagtcgcccaggctggagtacagtggcatgatcaaggttcactgcagcctcaaccacctgcactcaaatgatcctcccacctcagcctcctggccagctgggactacaggtgcacaccaccatgcccagctttttttttttttttttttttttgtattttttgttgaaatgggattttgccatgtgcccagcctggtctcagactcctcaagggatctgcccacctcagccccctaaagtgctggattgcaggtgtgagccagtgcacctggccttgggttttgagatcaaaaagacaaactgaactgctgagatctaatatgattttaaggaatctgcttgttttccccctcttattta

SEQ ID NO: 586192 - DNA, 439 bp, Homo sapiens
atactagaagcagaactattgctttttgttgttgttgttgttgttcgagacaggatctcactcagtcgcccaggctggagtacagtggcatgatcaaggttcactgcagcctcaaccacctgcactcaaatgatcctcccacctcagcctcctggccagctgggactacaggtgcacaccaccatgcccagctttttttttttttttttttttktgtattttttgttgaaatgggattttgccatgtgcccagcctggtctcagactcctcaagggatctgcccacctcagccccctaaagtgctggattgcaggtgtgagccagtgcacctggccttgggttttgagatcaaaaagacaaactgaactgctgagatctaatatgattttaaggaatctgcttgttttccccctcttatttattattccattggaattc

SEQ ID NO: 586193 - DNA, 452 bp, Homo sapiens
aaatgaattcaacttgaagatgtcatttgtatactagaagcagaactattgctttttgttgttgttgttgttgttcgagacaggatctcactcagtcgcccaggctggagtacagtggcatgatcaaggttcactgcagcctcaaccacctgcactcaaatgatcctcccacctcagcctcctggccagctgggactacaggtgcacaccaccatgcccagctttttttttttttttttttttttgkattttttgttgaaatgggattttgccatgtgcccagcctggtctcagactcctcaagggatctgcccacctcagccccctaaagtgctggattgcaggtgtgagccagtgcacctggccttgggttttgagatcaaaaagacaaactgaactgctgagatctaatatgattttaaggaatctgcttgttttccccctcttattta

SEQ ID NO: 586194 - DNA, 452 bp, Homo sapiens
aaatgaattcaacttgaagatgtcatttgtatactagaagcagaactattgctttttgttgttgttgttgttgttcgagacaggatctcactcagtcgcccaggctggagtacagtggcatgatcaaggttcactgcagcctcaaccacctgcactcaaatgatcctcccacctcagcctcctggccagctgggactacaggtgcacaccaccatgcccagctttttttttttttttttttttttgtattttttgktgaaatgggattttgccatgtgcccagcctggtctcagactcctcaagggatctgcccacctcagccccctaaagtgctggattgcaggtgtgagccagtgcacctggccttgggttttgagatcaaaaagacaaactgaactgctgagatctaatatgattttaaggaatctgcttgttttccccctcttattta

SEQ ID NO: 586195 - DNA, 452 bp, Homo sapiens
aaatgaattcaacttgaagatgtcatttgtatactagaagcagaactattgctttttgttgttgttgttgttgttcgagacaggatctcactcagtcgcccaggctggagtacagtggcatgatcaaggttcactgcagcctcaaccacctgcactcaaatgatcctcccacctcagcctcctggccagctgggactacaggtgcacaccaccatgcccagctttttttttttttttttttttttgtattttttgttgaaatgggattttgccatgtgcccagcctggtctcaractcctcaagggatctgcccacctcagccccctaaagtgctggattgcaggtgtgagccagtgcacctggccttgggttttgagatcaaaaagacaaactgaactgctgagatctaatatgattttaaggaatctgcttgttttccccctcttattta

SEQ ID NO: 586196 - DNA, 438 bp, Homo sapiens
tactagaagcagaactattgctttttgttgttgttgttgttgttcgagacaggatctcactcagtcgcccaggctggagtacagtggcatgatcaaggttcactgcagcctcaaccacctgcactcaaatgatcctcccacctcagcctcctggccagctgggactacaggtgcacaccaccatgcccagctttttttttttttttttttttttgtattttttgttgaaatgggattttgccatgtgcccagcctggtctcagactcctcaagggatctgcccacctcagccccytaaagtgctggattgcaggtgtgagccagtgcacctggccttgggttttgagatcaaaaagacaaactgaactgctgagatctaatatgattttaaggaatctgcttgttttccccctcttatttattattccattggaattc

SEQ ID NO: 586197 - DNA, 484 bp, Homo sapiens
ttgaacgaggtctttacctgctctcaggctcagtttctacatctgtaaaatgaatacactaatgagagttatataattgctgtgaagattagatgagataagatacacaaacttgacctgatgtctggtctgtggtaagcactcagtggctgatgataaggaggaggagctgagtgactgaatagattgtagtccctattctctggaggcagacaatgtatgcaaataaatgctcgtagtagggagagagctgagacagcagtaagtgggtgtatggaggtgggacggaggaaagagaagggtgactctgcctggggcattcygggtgggctttgtagaaaacatgccacctggttagggatgggaaaattaagtatagtcttctagggagacaactgggaaaaaaaattcaagcagggggaagagcgtcttcaaagatacaggagttggatcataatagtgagttctgagatcctcagcaatt

SEQ ID NO: 586198 - DNA, 545 bp, Homo sapiens
tttctttcagctttaaagatgttgctccactaccttcttgtttctgatgaggaatctgctgtcatcttatttttgatcctttgtacccagtgcctattttctctggcttttaatattattctaggccaggtacgtggctcatacctgtaatcccagcactcttggaggccaaggtgggtgaattgcttgaacccaggagttcaaggccagactgggcaacatgatgaaaccccatctctacaaaaaatacaaaaataaatattattctacttattactggttatgagcaatttgattatgatatgccttggtgtaattttcctgtttcttgtgcttggagctcactgagcttcttgggtctgtaggtttacaattctcattacatttggaaaaaatttctgctgtttcttacattttctcctaactcctttcccctcctattcattaggggtccagttacayatatattaggtctcttgaaatacctattttatttttattggggtgctattgtaaatgatactagtttttaaaaatctgaattc

SEQ ID NO: 586199 - DNA, 425 bp, Homo sapiens
aatttttttaaaaaagtaacacataatacagtaaggaaaatacagatacctgaattccaccttcctaaagatttggattcattcatcttgggtgtgggctcccgtatctgccttttaaaattattgagaggtgactctgaggctttccaaagactgccaataaggccaatattaataatacctaatgtcacttgacggccattacgtgctgggcactcagctgaatgttccttctccttggaattttacaacactatcaagtagatgtttgtattacctacatttacagataaggaacttgagaacttaaaaaagtcaagggcctagccagagactggacatatcagggcggatacttgcaccccattttctctgactctsaaatctgtgctcttcccacctcagcagctatagcagaaagtgtt

SEQ ID NO: 586200 - DNA, 504 bp, Homo sapiens
ggtggtattttccatttagcggggtctgggtttctacaaaacaactcagggacatatgttaagatgttatctctagtttctatagggaaacaaacattttgtggctctaattttcttttttttwaattatactttaagttttagggtacatgtgcacaacgtgcagttctgttacgtatgtatacatgtaccatgttggtgtgctgcacccattaactcgtcatttaagattagtttgtggctctaattttcttgactgttgttttaagctattattaccttcttacttatcagggtgctcatctacttcttgaggctagccaggtggctggaattttccttggaggtactcaagagattcctttatttttcgtgccttaaatgggtctgttctccctcttcaaagctcaagctcttaaggactatgctattgttagatttttcatattggagcagaccttccctcctactcaagaacaccccttcttcagacagcctggctgg

SEQ ID NO: 586201 - DNA, 504 bp, Homo sapiens
ggtggtattttccatttagcggggtctgggtttctacaaaacaactcagggacatatgttaagatgttatctctagtttctatagggaaacaaacattttgtggctctaattttcttttttttaaattatactttaagttttagggtacatgtgcacaacgtgcagktctgttacgtatgtatacatgtaccatgttggtgtgctgcacccattaactcgtcatttaagattagtttgtggctctaattttcttgactgttgttttaagctattattaccttcttacttatcagggtgctcatctacttcttgaggctagccaggtggctggaattttccttggaggtactcaagagattcctttatttttcgtgccttaaatgggtctgttctccctcttcaaagctcaagctcttaaggactatgctattgttagatttttcatattggagcagaccttccctcctactcaagaacaccccttcttcagacagcctggctgg

SEQ ID NO: 586202 - DNA, 504 bp, Homo sapiens
ggtggtattttccatttagcggggtctgggtttctacaaaacaactcagggacatatgttaagatgttatctctagtttctatagggaaacaaacattttgtggctctaattttcttttttttaaattatactttaagttttagggtacatgtgcacaacgtgcagttctgttacgtatgtatacatgtaccatgttggtgtgctgcacccattaactcgtcatttaagattagtttgtggctctaattttcttgactrttgttttaagctattattaccttcttacttatcagggtgctcatctacttcttgaggctagccaggtggctggaattttccttggaggtactcaagagattcctttatttttcgtgccttaaatgggtctgttctccctcttcaaagctcaagctcttaaggactatgctattgttagatttttcatattggagcagaccttccctcctactcaagaacaccccttcttcagacagcctggctgg

SEQ ID NO: 586203 - DNA, 504 bp, Homo sapiens
ggtggtattttccatttagcggggtctgggtttctacaaaacaactcagggacatatgttaagatgttatctctagtttctatagggaaacaaacattttgtggctctaattttcttttttttaaattatactttaagttttagggtacatgtgcacaacgtgcagttctgttacgtatgtatacatgtaccatgttggtgtgctgcacccattaactcgtcatttaagattagtttgtggctctaattttcttgactgttgttttaagctattattaccttcttacttatcagggtgctcatctacttcttgaggctagccaggtggctggaattttccttggaggkactcaagagattcctttatttttcgtgccttaaatgggtctgttctccctcttcaaagctcaagctcttaaggactatgctattgttagatttttcatattggagcagaccttccctcctactcaagaacaccccttcttcagacagcctggctgg

SEQ ID NO: 586204 - DNA, 452 bp, Homo sapiens
gcctaacgttttgtgtgcattttttgtagaggtggggttttgccatgttgcccaggtgggtttcaaactcttgagctcaaatgatctgctctcttaggcctcccaaaacgctggaattataggtatgagccaccatgctgggcctcatacatttcttaataaagtattttcagattataayagctagagtggatttgcttaactagaataaagaactttgaccataacaaacattacctgcaccagaggcctgatgggtgattagaaatcaatttcatagctaacaggcaattcaagttttctactttccaggcaaattattcctggaaatttgtttcttttttcattgaagtttttcaatattattgctatatagttcattattatttctgaaatcactactatttctataggtgattctcttttgggggttgaattttaatttcttagtc

SEQ ID NO: 586205 - DNA, 539 bp, Homo sapiens
aattcgagctactcaggaggatgaagcaggagaatcacttgaacctgggaggcagaggttgcaatgagtcaagatcgtgccattgtactccagcctgggtgacagaaggagactccatcaaaaaaaaaagaaaaaaaaaggaaggaaggaaggaaggactgactcagggttgacccaaataacaaataaatgtggagtattgcaaaaaaaatcccatttttcaggtaaaagaaaatgctgaagttttatgttttatagaagtagaaaaacttaagggaggcaggcatttgcttttaaccctgaattgttaaaacactccagtttgttcactaattctttgaataacctgaatttacattctataaatgtgagcctatttgtggagcttcaaggtctcatactaaaaatatgaaccttttatttacttctctattaatcgaacatctttcaaatgcctgtaagtgccagcmactacactagaaaaatgcggacatataggcaaacaagagctgtgccctgccctctccatgagcccctgg

SEQ ID NO: 586206 - DNA, 436 bp, Homo sapiens
gaattcagtttctctggttatagattgttatccaaataaaatatttatgtattggwcactatatcatatgtattggtcaccatatcatataaattggttgaaaaatgattttctggtttttctgtgtgtattctttttttttttaggtttgattctcataaaggtttctggtgtcagttactggaagaaggtaaaacaaaatgccttggaaagagcaaaggaagaaaataccctccaatggattctgatgtaagcatagaccttaaaaatacaaactaaatcagcaaaatggtaaccaataatatcatctactttcttaaaaaactagttaaagtcaaaattcagcctttctaaaaattaaaagtgccatttcaatttcagtacaggtaggttgcttattttgatttacccacaatatattattacctgtcatgca

SEQ ID NO: 586207 - DNA, 572 bp, Homo sapiens
ggcctctgtgcttaagaggctgaagcctgccagagctgcttgaggacagctgtggtttgtccttttagggttatctgtcctaccctgtcatacaccagctactcagggaaactgaagtcagatttcacctcctttattttgctgctcgaattgtctgacccttggccagtgaagccccttccaactgrtttctgtgtccttttgatatgtccccactattctttgctctttccttattctttagcccaacaaggcatgcctgctgtatccctgggatcaaccatttctccaaggacccccttggagaagaactccagggttccttctagtggaattatttctagaaaactagatctaggcactaggtatgcttgttgctaaagtgatttctttacttcttggacttctcagggtattgagttacaaaatatatgtgtgcacatttggacatacagctgaatgtacaaccacacatacatatgtttattcctgtttctatttttttggttgtttcctttggcttttttgttttgtttttttgttgttgttgttgttgttgctgtttttgtttt

SEQ ID NO: 586208 - DNA, 572 bp, Homo sapiens
ggcctctgtgcttaagaggctgaagcctgccagagctgcttgaggacagctgtggtttgtccttttagggttatctgtcctaccctgtcatacaccagctactcagggaaactgaagtcagatttcacctcctttattttgctgctcgaattgtctgacccttggccagtgaagccccttccaactggtttctgtgtccttttgatatgtccccactattctttgctctttccttattctttagcccaacaaggcatgcctgctgtatccctgggatcaaccatttctccaaggacccccttggagaagaactccagggytccttctagtggaattatttctagaaaactagatctaggcactaggtatgcttgttgctaaagtgatttctttacttcttggacttctcagggtattgagttacaaaatatatgtgtgcacatttggacatacagctgaatgtacaaccacacatacatatgtttattcctgtttctatttttttggttgtttcctttggcttttttgttttgtttttttgttgttgttgttgttgttgctgtttttgtttt

SEQ ID NO: 586209 - DNA, 570 bp, Homo sapiens
tgcatctgtttgaagatgggcagaaatcttgtgaccatctcactgcctgtaagtttccctgcatgcaggtgtcctagcggtgaaggacaagtgcctcagttctggtttcaccttttaagatgcagcacattattcaacctcaccaaacctcaatatgcttatgtgaaaatgtctgtcttgtagaggttgctgggttgattgagcgaggtaacgtatattaagttgatttatcattgccagtaattaatcaagcaatggccactgttactatccaaatagcacaaaaacaaaaagcagactttaagccattggtcaggatatgcttgatgatttttccactagaattatttatttatgtatttatagtcagtcagtacttctctaaaatatgcaattctctatcattccatgtgataccttcattaagtgataacgtatcacatcctatgtgatatctttttttttttttttgagacagagtttggctcttgttgcccaaactggagtgcaacrgtgcgatctcagcttactgcaacctccacctcccgggttcaagcgattctcctgtga

SEQ ID NO: 586210 - DNA, 570 bp, Homo sapiens
tgcatctgtttgaagatgggcagaaatcttgtgaccatctcactgcctgtaagtttccctgcatgcaggtgtcctagcggtgaaggacaagtgcctcagttctggtttcaccttttaagatgcagcacattattcaacctcaccaaacctcaatatgcttatgtgaaaatgtctgtcttgtagaggttgctgggttgattgagcgaggtaacgtatattaagttgatttatcattgccagtaattaatcaagcaatggccactgttactatccaaatagcacaaaaacaaaaagcagactttaagccattggtcaggatatgcttgatgatttttccactagaattatttatttatgtatttatagtcagtcagtacttctctaaaatatgcaattctctatcattccatgtgataccttcattaagtgataacgtatcacatcctatgtgatatctttttttttttttttgagacagagtttggctcttgttgcccaaactggagtgcaacagtgcgatctcagcttactgcaacctccacctcccrggttcaagcgattctcctgtga

SEQ ID NO: 586211 - DNA, 627 bp, Homo sapiens
tgcgtcattgcactccagcctgggcaacaagagcaaaactccgtctcaaaaaaaaaaaaaaatagcctatagtttccaaattgttcataggcataactcatatgtaacatctaatattagaatatacaatattgatacagtttcaaaggttatgaagataaatagttctatttgtatcttgtcaataaaaatattcaacagttttgctagattattatactatgattttccaaaggtttattatttttagttaagaatactaaaatctgctaaaagatacatatcagattgaaacatacaattttatccaaagcttagtatgtgattcctaaaatattcttacaaacagagctttatgttaacttctttctccctaaactgataagcattcttttatggttgtttgagtagtacatattgtatatgttcatatttaatataattagagatatccraagcattaatatataccaacttgtattcaaagaattcttaacatttacaatactcaactaggtagaagcaataattggatatggcaagtggaatggcaatgtaataaatataccctagaattttatggatgaatgggatattagaagtcagagttaacattttttcccatct

SEQ ID NO: 586212 - DNA, 585 bp, Homo sapiens
gagcgagtgaggaaatggtgaaccatttaataaatggtgcttgctattggttatctatgcggaaaaatgacatccttaccttacttcatacatataaattagttccagctggaataaaggtctcaatgactaaagaaaaacatttgatatttttattaaaaatatggaatacatcttcataaacttgtgataggagatgacttttaaaaattatgaagcaaaagcacaaattatttaaaaatatatataaatttgaatattaaaattgaaatgtcctaggcccagtgccttggctcacacctgtaattaatcccagcattttgagagaccgagctgggaggatcacttgaacccaggagtttgagaccagcctgggcaacagagtgagaccttgccttataaaacttttaaaaaattagccaggcagggtggcatgcacctgagatcccagctatttgggagacggargaggaaggatcacttgagcctaggaggttgaggctgtagtgagccattatcatgctattgcactccagcttgggcaacagaccaaaatgctgtctcaaaaaaaaaattaaaatgtcc

SEQ ID NO: 586213 - DNA, 544 bp, Homo sapiens
attttaattcctttcattttctggtagagacaaaggagacacgttttatacgtggacccaaaactgtggtgccggtcacagactgggaaggcagccttcccttggtgtttaatcactgcagggacgcctctctgattattcacccacgtttcaagggtgtcagaccacgcagggacgcctgccttggtccttcacccttagcagcaagtcccgcttttctggggaaagggcaagtaccscaaccccttctctccttgtctctatcccttctctgcttttctggggaaagggcaagtaccccaaccccttctctccttgtctctatcccttctctgcttttctgggagaggggcaagtacccctcaaccccttctccttcaccctcagcggcaagtcccgcttttctgggggaggggcaagtaccccaaccccttctctccttgtctctaccccttctctgcttttctggggaaagggcaagtaccccaaccccttctctccttgtctctaccccttctctgcttttctggggaaagggcaagta

SEQ ID NO: 586214 - DNA, 544 bp, Homo sapiens
attttaattcctttcattttctggtagagacaaaggagacacgttttatacgtggacccaaaactgtggtgccggtcacagactgggaaggcagccttcccttggtgtttaatcactgcagggacgcctctctgattattcacccacgtttcaagggtgtcagaccacgcagggacgcctgccttggtccttcacccttagcagcaagtcccgcttttctggggaaagggcaagtaccgcaaccccttctctccttgtctctatcccttctctgcttttctggggaaagggcaagtaccccaaccccttctctccttgtctctatcccttctctgcttttctgggagaggggcaagtacccctcaaccccttctccttcaccctcagcggcaagtcccgcttttctgggggargggcaagtaccccaaccccttctctccttgtctctaccccttctctgcttttctggggaaagggcaagtaccccaaccccttctctccttgtctctaccccttctctgcttttctggggaaagggcaagta

SEQ ID NO: 586215 - DNA, 350 bp, Homo sapiens
gttggaatatggtatcttaatgctacaaagcrtctgttttgtcagcccaaagatctctgttgtaatgacaatgttggtcagttgtgtctgaactccaaagtataatgaggcacatctaaacccacctgccagtcatggcctaacctagtttttcaaatttctttgaagtgctctttacaaaagaggagtccattcagcaggttggtggcttacaacttaatttttggttttaacacacagaaaaacaaaatcagttcacaaattgaatgtaaaacagattggtaaaaaaaaaaaaaaaaattaagtgcctcctgaatattcctacatgtcaaagaaaaagaaattatcag

SEQ ID NO: 586216 - DNA, 350 bp, Homo sapiens
gttggaatatggtatcttaatgctacaaagcgtctgttttgtcagyccaaagatctctgttgtaatgacaatgttggtcagttgtgtctgaactccaaagtataatgaggcacatctaaacccacctgccagtcatggcctaacctagtttttcaaatttctttgaagtgctctttacaaaagaggagtccattcagcaggttggtggcttacaacttaatttttggttttaacacacagaaaaacaaaatcagttcacaaattgaatgtaaaacagattggtaaaaaaaaaaaaaaaaattaagtgcctcctgaatattcctacatgtcaaagaaaaagaaattatcag

SEQ ID NO: 586217 - DNA, 350 bp, Homo sapiens
gttggaatatggtatcttaatgctacaaagcgtctgttttgtcagcccaaagatctctgttgtaatgacaatgttggtcagttgtgtctgaactccaaagtataatgaggcacatctaaacccacctgccagtcatggcctaacctagtttttcaaatttctttgaagtgctctttacaaaagaggagtccattcagcaggttggtggcttacaacttaatttttggttttaacacacagaaaaacaaaatcagttcacaaattgaatgtaaaacagatyggtaaaaaaaaaaaaaaaaattaagtgcctcctgaatattcctacatgtcaaagaaaaagaaattatcag

SEQ ID NO: 586218 - DNA, 487 bp, Homo sapiens
caactgcttgataagagattcagtgtctctttcctaaagcagttaacagggaggctgttgyctgggtcaggatgatttccccaatcactgataaaaagtaaaagaggaaagtgtcattgatggtgcatggcagggacatgctccatgcagtggtcaccctcagtaagagagatgaactttgggaaataatactgaatggcagaaaagaaggtagactatgaaggtgcccaaaacaagaataaggtgcaacccatttagtgtctgagtactatagagacctgtcgctcttgataattgtggatctgtgactgctgcatgcatcgagaaaacacggtatcatctttgtgtatctatagtacatagtttgatctcatactggtaagaacaatggcataacaccattacctgatacttacaaatgtatgtaccatcatgtcaataaattttatttttaatttttttacataggaacaatgttaaactcaca

SEQ ID NO: 586219 - DNA, 412 bp, Homo sapiens
agtctctccctatttcagaatgttacatttccagcacattctacagttgttcttgagaagtgtaagaaagagagtggggagaactaactgagtcgagaaccattagaggactgtactggagtcacccccaacccaaacacccccrttagaaagccattccattttatatgcctactaataaccctgaactggtggcagaggtgtgtcttgtttgactgatgaagcccctcgacgaacacaatgtcaaagcaacatcatagagccagagccagaatagatttcactgggccaatgaaaactactaccagaggcaggatgatcaggcccacctgaagcagttatgtagcccaggatccaatgatccacagaagaagttgctaaaggggtgaaagaagaatccttcaggtgggac

SEQ ID NO: 586220 - DNA, 412 bp, Homo sapiens
agtctctccctatttcagaatgttacatttccagcacattctacagttgttcttgagaagtgtaagaaagagagtggggagaactaactgagtcgagaaccattagaggactgtactggagtcacccccaacccaaacacccccgttagaaagccattccattttatatgcctactaataaccctgaactggtggcagaggtgtgtcttgtttgactgatgaagcccctcgacgaacacaatgtcaaagcaacatcatwgagccagagccagaatagatttcactgggccaatgaaaactactaccagaggcaggatgatcaggcccacctgaagcagttatgtagcccaggatccaatgatccacagaagaagttgctaaaggggtgaaagaagaatccttcaggtgggac

SEQ ID NO: 586221 - DNA, 561 bp, Homo sapiens
aattttggcttttgttgccattgcttttggtgttttagtcatgaagtccttgcccatgcctatgtcctgaatggtattgcctaagttttcttctagggtttttacggttttaggtctaacatttaagtctttaatccatcttgaattaatttttgcataaggattttcgcatcgatgtttatcaggtctcacttctttcttatgactcatcgcagccgtgcagaccttccgtatgggcacacttgctgatcctacacaaggtttttaatatctgtggggaaaataaatgtgtttaaagcattttaaaaggctaaactgggctcaggcacggtggcttacacctgtaatcccagcactttgggaggctgaggcaggcggatcacttgaggtcgggagtttgagaccagcctggccaacatggtgaaaccccatctctactaaaaatacaaaataaacaaacaaaaaacattagccgtgtgtggtggcagrtgcctgtagtcagctactcaggaggctgtggcaggagaatcgcttgaacctgggaggcagagggtgcaggtg

SEQ ID NO: 586222 - DNA, 289 bp, Homo sapiens
agagtgaaactctgtctcaaaaaaataagtaaaataaaataaaataaaataaaataaaacagttgaaattaattttaatgatacattttatataatcaataaaaatatagttaaataattaaagtatatttaatgattacatttaattgtattttgcacaaaattcagtgtgtattttatttcaaggcatgtcacttctcaccagccacattttaaatatctgttgaagtcaaataaaatatagaratgaatctctaaatttaaaacattttacttgggaagcaagaat

SEQ ID NO: 586223 - DNA, 517 bp, Homo sapiens
tggacagatagcattgttaaacattattatattataacacaaagaatggtaaatatcaaattagactaagtgaagtattaataccagtgggccatgtattattagtgctacataagaaaacaaatcaaaatttggatatctcattagagacatgtcttagaaataaaattgtattaaggagagttagtggtaagtaaaatattttaaattcaaatttctatgaaatatttatcccacygcttttgtttccatgcagaatcttctgttgttgagtgggtataataagttttggacaaaaataaaataacctttgtgggtttaaaatttggaataatcttttttgcggattcgtattgccatcttgggaaatttctcactcatattattataacttcttttatttgaatgggcacagttacagtccacagtttttattctcagacacctaattacagccaaattctaggtcattctctttagagaaatctcaaagacaatggcaggcttttggattaaa

SEQ ID NO: 586224 - DNA, 549 bp, Homo sapiens
cagttactcataacaagacagattataagcaaaattttaaaagtcgtaggcaaaaggaatcttggaagcaagcagtaagataaacctgttgtgtcatctatagcatgcttcattgagatttgcagtggatttatcaacacagtccttgcaggccagaaaaaaagttaagtgatayagtcaaagtgctgaaacaaaaactttcaaagcaagaatactataggaaaagtcttcaaaaaaagttccaaagtaacaaaatgcagtaaaagtacatcactagtatatctgccttactgaaaatgcttaggggtgtctcttccactgaaaataaaattctagaaaaaacctacattatataaaaaacacataactctctaataaagacatgcacataacaggaaattgtattaaaattataatacagaaaacaattctattttcaaaatttgatagacaaaaacatgaaagtagttataaacacaatatgacaatataatttgtgacttacaaagttgagagcagacatactgaaaaaaactatgcatctgaata

SEQ ID NO: 586225 - DNA, 570 bp, Homo sapiens
aagaagcttaaattagtttggctaagataaacacagttactcataacaagacagattataagcaaaattttaaaagtcgtaggcaaaaggaatcttggaagcaagcagtaagataaacctgttgtgtcatctatagcatgcttcattgagatttgcagtggatttatcaacacagtccttgcaggccagaaaaaaagttaagtgatatagtcaaagtgctgaaacaaaaactttcaaagcaagaatactataggaaaagtcttcaaaaaaagttccaaagtaacaaaatgcagtaaaagtacatcactagtatatctgccttactgaaaatgcttaggggtgtctcttccactgaaaataaaattctagaaaaaacctacattatataaaaaacayataactctctaataaagacatgcacataacaggaaattgtattaaaattataatacagaaaacaattctattttcaaaatttgatagacaaaaacatgaaagtagttataaacacaatatgacaatataatttgtgacttacaaagttgagagcagacatactgaaaaaaacta

SEQ ID NO: 586226 - DNA, 549 bp, Homo sapiens
cagttactcataacaagacagattataagcaaaattttaaaagtcgtaggcaaaaggaatcttggaagcaagcagtaagataaacctgttgtgtcatctatagcatgcttcattgagatttgcagtggatttatcaacacagtccttgcaggccagaaaaaaagttaagtgatatagtcaaagtgctgaaacaaaaactttcaaagcaagaatactataggaaaagtcttcaaaaaaagttccaaagtaacaaaatgcagtaaaagtacatcactagtatatctgccttactgaaaatgcttaggggtgtctcttccactgaaaataaaattctagaaaaaacctacattatataaaaaacacataactctctaataaagacatgcacataacaggaaattgtattraaattataatacagaaaacaattctattttcaaaatttgatagacaaaaacatgaaagtagttataaacacaatatgacaatataatttgtgacttacaaagttgagagcagacatactgaaaaaaactatgcatctgaata

SEQ ID NO: 586227 - DNA, 549 bp, Homo sapiens
cagttactcataacaagacagattataagcaaaattttaaaagtcgtaggcaaaaggaatcttggaagcaagcagtaagataaacctgttgtgtcatctatagcatgcttcattgagatttgcagtggatttatcaacacagtccttgcaggccagaaaaaaagttaagtgatatagtcaaagtgctgaaacaaaaactttcaaagcaagaatactataggaaaagtcttcaaaaaaagttccaaagtaacaaaatgcagtaaaagtacatcactagtatatctgccttactgaaaatgcttaggggtgtctcttccactgaaaataaaattctagaaaaaacctacattatataaaaaacacataactctctaataaagacatgcacataacaggaaattgtattaaaattataatacagaaaacaattctattttcaaaatttgwtagacaaaaacatgaaagtagttataaacacaatatgacaatataatttgtgacttacaaagttgagagcagacatactgaaaaaaactatgcatctgaata

SEQ ID NO: 586228 - DNA, 558 bp, Homo sapiens
tacctgaaagtgtaggtataattgtatcgtttcacttaattcaaatgttgtctttagtggtattagtaaaaattataatatcttacaakttttgagctgttatttgtgttaggaactattctatattttgtgtagagtcttatttaagcattacagtggtttcctctgagaaactgactattttcattcccattttattgatgaggaaattgagacacaaaaaggctaagcaacagctaggaagcgacagagcttcaagtaggattccagcccaagttgaatgtcatccaagagctatgctctttctattcaaataggctgctctttcattaatacagtgactaatgagaggtaataagtagtgtgctttcttcaaaggaaaattgagtttgttttgaaggcagagtaataggctattcagtgtttgcaactacatgaatcattaatgtggcattagctagtgcactacaatttcctgaagtcttctcactctcataggactgctctacatttggcctctgccaatggaaattcagaagtagtacaactcctgctgga

SEQ ID NO: 586229 - DNA, 591 bp, Homo sapiens
ctattcccacatactgtgggttcaacagcttttttccttttttatttccagtgtattttgatgtttttatttttagttggtatggagagagggagtgaagatagttttaagtggatacacttttcctttaatgaaggcaagctgtaggtgggtgacaaagagaaaagagctacgctttggattcacacaagactgggtttaattcctaactttcttacttgctacgtgtgtgacattgggaacgtgatttaccacccaatatgttgtcatatgtgaaaagtaggagaatatatccttcaaagttggctgtgcataagcaagaaagatacatgtggcatttaattcagtgcgtagcacatgcttattggcatcattaactgaaactcctgtgactactattcttaccattattattaatattactgctttcagcatgcagagrgctcttatttatcttagcccctagctaattttctatcacagcatatcagtctagggaagctgtgacaaaatcttcacttaaatctttgtccacttcagataagtggccctagcattgtttcttgcccatcaaaggactttaaattagta

SEQ ID NO: 586230 - DNA, 594 bp, Homo sapiens
gcacccaagatgcttatgtcttttagygcatgtaaatgtttgattctgcatggacaggcaagatgtcaaattggtaaagtatatcaaattagcttttaaaataactttattacagtttctaaaggagaaattatctctgtaattttagaactgccctcatacttgctgtatgttgtggatcagcaagtatagtcaatcttctacttgagcaaaatgttgatgtatcttctcaagatctatctggacagacggccagagagtatgctgtttctagtcatcatcatgtgtaagtgtttacatgaaaaggctagttaatgctaaattgaggtttaaaataattataacaattgcatcttacatatcaggtgagatgtcatagtttggttcaggtagttttagagtggcagtgagttagtcccctgcatcagccagaaatcagacaaaaagcaagacaagttagaagtaccaatgggtgcaggattctttacctcaggacttttaagacctttatccttagagatcccaatattgttcatttcatccaagtataacacctatgcatggcataaaaaagagtatcacatctttgatttt

SEQ ID NO: 586231 - DNA, 594 bp, Homo sapiens
gcacccaagatgcttatgtcttttagcgcatgtaaatgtttgattctgcatggacaggcaagatgtyaaattggtaaagtatatcaaattagcttttaaaataactttattacagtttctaaaggagaaattatctctgtaattttagaactgccctcatacttgctgtatgttgtggatcagcaagtatagtcaatcttctacttgagcaaaatgttgatgtatcttctcaagatctatctggacagacggccagagagtatgctgtttctagtcatcatcatgtgtaagtgtttacatgaaaaggctagttaatgctaaattgaggtttaaaataattataacaattgcatcttacatatcaggtgagatgtcatagtttggttcaggtagttttagagtggcagtgagttagtcccctgcatcagccagaaatcagacaaaaagcaagacaagttagaagtaccaatgggtgcaggattctttacctcaggacttttaagacctttatccttagagatcccaatattgttcatttcatccaagtataacacctatgcatggcataaaaaagagtatcacatctttgatttt

SEQ ID NO: 586232 - DNA, 594 bp, Homo sapiens
gcacccaagatgcttatgtcttttagcgcatgtaaatgtttgattctgcatggacaggcaagatgtcaaattggtaaagtatatcaaattagcttttaaaataactttattacagtttctaaaggagaaattatctctgtaattttagaactgccctcatacttgctgtatgttgtggatcagcaagtatagtcaatcttctacttgagcaaaatgttgatgtatcttctcaagatctatctggacagacggccagagagtatgctgtttctagtcatcatcatgtgtaagtgtttacatgaaaaggctagttaatgctaaattgaggtttaaaataattataacaattgcatcttacatatcaggtgagatgtcatagtttggttcaggtagttttagagtggcagtgagttagtcccctgcatcagccagaaatcagacaaaaagcaagacaagttagaagtaccaatgggtgcaggattctttacctcaggacttttaagacctttatccttagagatcccaatattgttcatttcatccaagtataacacctatgcatggsataaaaaagagtatcacatctttgatttt

SEQ ID NO: 586233 - DNA, 560 bp, Homo sapiens
aaaaaaatttcaaaaattagccaggcattgtaccacctgcctgtagctctggctacttgtgaggctgaggcagcaagttcacttgagcctacacggtcaaggcttctgagacccctgatcaaaccactgcactcattcctgggtgtcagagtgtgaacttgtctcaaaaaaacatcaaaacatgagatgcagcaaactactgagagaaattcacagcagtaaacacctacattaaaaataaacaattctaaattaataacctaatgtttggcaaaaatagttaagggctaattaactactcatcacaccttggagaaagaatatcagtgcggcaagcaaaagtcatgtagaatatctaagagaaaagactgaggagtgaggtgcctgggggattcgggctttgaaaattatccacatattcctgagaatccagaagcccataagcatgttcagggtcaatcaagggacaggcaaatgctcacaaagacctacgaagctgttatctctcatgtctgctttacctccaagcmctgcacaagcaggaagaaaagaaaacagca

SEQ ID NO: 586234 - DNA, 481 bp, Homo sapiens
cgtgtgagccaccatgcctggtccatttttattacctctttattattgtggtatgattactattttgtataaatggratgatacactgtattatgttttgtgtctggtttatttcacttaatgcatgtgaggtcagttatgtcatttttttttttttactaattttttgtatattttagaaaatgcatttagaagagaataaaaaacttttaaaataacttccatatttctcaatgttgtgcatttttttcaaaaaataagcaaatattttattttttttggtttctttgagacagatcttattctatcaccatggctggagtgaagtaacatgatcatggcttactgcagattctacctcctaggctcaagtagtcttcccacctcaggctaccaagtatctgggaccacagctgcacaccaccatgcccaactaatttttaaattttgtgtatagatggggtctcattatgttgcatgg

SEQ ID NO: 586235 - DNA, 443 bp, Homo sapiens
ggcttgtctcaaactcctgcgctcatgagattctcctgcctaggcctcccaaagggctgggattacaggtgtgagccaccacacccagcctatttttttctaaagacagggtctcattctgtcctcagctcaagtgctgtggcgtaatcatagctgaaggcagcctcaatgtactgagctcaagtgatcctccctcactgacccaaagtgctgggattacaggcatcagccaccatgtccagcctgaaataatattytaattaaacattaagaaaaatagaagaaataagatctagtgtttcgtaacacaataggacaactatagttaaccgtaatttattgtataaaagatagaattgttgagtaaggtgtgagcaccagtttagggttttggcacattctttacacttgaagagtttctatctggtatgaattatttgatg

SEQ ID NO: 586236 - DNA, 443 bp, Homo sapiens
ggcttgtctcaaactcctgcgctcatgagattctcctgcctaggcctcccaaagggctgggattacaggtgtgagccaccacacccagcctatttttttctaaagacagggtctcattctgtcctcagctcaagtgctgtggcgtaatcatagctgaaggcagcctcaatgtactgagctcaagtgatcctccctcactgacccaaagtgctgggattacaggcatcagccaccatgtccagcctgaaataatattttaattaaacattaagaaaaatagaagaaataagatctagtgtttcrtaacacaataggacaactatagttaaccgtaatttattgtataaaagatagaattgttgagtaaggtgtgagcaccagtttagggttttggcacattctttacacttgaagagtttctatctggtatgaattatttgatg

SEQ ID NO: 586237 - DNA, 543 bp, Homo sapiens
ccttatgtgtacctttaagatgcttagacattaacgttcaagagtggtccctggtcctatctgtattaagatgtagatcattttaatgccaaaaccccaatattcctagtgagccattattcattaagacaaggtgacagctagctcatgtggacacagctgagatgatactaygtagcaaatttccaataattctcatgaacacttggaaagtcaattctataataagtcatagaaattataataaatcacttaatatttgtttgggaaggtgctttataaagttatagtgtatatgaatataactaatagttgtgaattcagagctgtgagaataaagcaaaaaaatcacactgtgtttgagtcagcaatctttagatttctatctagtcttcctacccagtccataaattctaagtataatcctagtactcgctctcaagtttaagttaaatgctagcctatacaaaaaatactctttctcttacttcttttttgttatttatatgttgctttgtttaaaggaagaacacaaaaatgccc

SEQ ID NO: 586238 - DNA, 543 bp, Homo sapiens
ccttatgtgtacctttaagatgcttagacattaacgttcaagagtggtccctggtcctatctgtattaagatgtagatcattttaatgccaaaaccccaatattcctagtgagccattattcattaagacaaggtgacagctagctcatgtggacacagctgagatgatactatgtagcaaatttccaataattctcatgaacacttggaaagtcaattctataataagtcatagaaattataataaatcacttaatatttgtttgggaaggtgctttataaagttatagtgtatatgaatataactaatagttgtgaattcagagctgtgasaataaagcaaaaaaatcacactgtgtttgagtcagcaatctttagatttctatctagtcttcctacccagtccataaattctaagtataatcctagtactcgctctcaagtttaagttaaatgctagcctatacaaaaaatactctttctcttacttcttttttgttatttatatgttgctttgtttaaaggaagaacacaaaaatgccc

SEQ ID NO: 586239 - DNA, 543 bp, Homo sapiens
ccttatgtgtacctttaagatgcttagacattaacgttcaagagtggtccctggtcctatctgtattaagatgtagatcattttaatgccaaaaccccaatattcctagtgagccattattcattaagacaaggtgacagctagctcatgtggacacagctgagatgatactatgtagcaaatttccaataattctcatgaacacttggaaagtcaattctataataagtcatagaaattataataaatcacttaatatttgtttgggaaggtgctttataaagttatagtgtatatgaatataactaatagttgtgaattcagagctgtgagaataaagcaaaaaaatcacactgtgtttgagtcagcaatmtttagatttctatctagtcttcctacccagtccataaattctaagtataatcctagtactcgctctcaagtttaagttaaatgctagcctatacaaaaaatactctttctcttacttcttttttgttatttatatgttgctttgtttaaaggaagaacacaaaaatgccc

SEQ ID NO: 586240 - DNA, 543 bp, Homo sapiens
ccttatgtgtacctttaagatgcttagacattaacgttcaagagtggtccctggtcctatctgtattaagatgtagatcattttaatgccaaaaccccaatattcctagtgagccattattcattaagacaaggtgacagctagctcatgtggacacagctgagatgatactatgtagcaaatttccaataattctcatgaacacttggaaagtcaattctataataagtcatagaaattataataaatcacttaatatttgtttgggaaggtgctttataaagttatagtgtatatgaatataactaatagttgtgaattcagagctgtgagaataaagcaaaaaaatcacactgtgtttgagtcagcaatctttagatttctatctagtcttcctacccagtccataaattctaagtataatcctagtactcgctctcaagtttaagttaaatgctagcctatacaaaaaayactctttctcttacttcttttttgttatttatatgttgctttgtttaaaggaagaacacaaaaatgccc

SEQ ID NO: 586241 - DNA, 582 bp, Homo sapiens
cttgcatgcttctaagttttctccctgtttaaaagacacatgtgaagaaaagcagcccttgaaatgttgtgttgtgagaacaagatgtttggagctgytgcggattagccaaccatgaaaggaaacatgaagaaaacactgccaacagcacagctgaaagagggacaaatgggatcctaggatatcactgaacaaccaaaacaactctggttcctactgttttagccactgctcatctagtatttacagtccaaagcattctacctggtaaatttcccatggcccacagggtaagacctactcatttctatagtattaaaaaagtctatcataaacttgccttagctaagtattcacctcattcccaaactctggtgtctcacacttttggtactagcaaaagtgaactgctcagaaaccctgcaaagttcactcggcatcctgtcttttgcagttgttgctcttcctgccaaacaggcaatctcatcagatgttcttctggcaaacacacaaacttgttgcatgttccttctgccaaaaattattcttctgcttctttacctagaaaaattcttctcactc

SEQ ID NO: 586242 - DNA, 582 bp, Homo sapiens
cttgcatgcttctaagttttctccctgtttaaaagacacatgtgaagaaaagcagcccttgaaatgttgtgttgtgagaacaagatgtttggagctgctgcggattagccaaccatgaaaggaaacatgaagaaaacactgccaacagcacagctgaaagagggacaaatgggatcctaggatatcactgaacaaccaaaacaactctggttcctactgttttagccactgctcatctagtatttacagtccaaagcattctacctggtaaatttcccatggcccacagggtaagacctactcatttctatagtattaaaaaagtctatcataaacttgccttagctaagtattcacctcattcccaaactctggtgtctcacacttttggtactagcaaaagtgaactgctcagaaaccctgcaaagttcactcggcatcytgtcttttgcagttgttgctcttcctgccaaacaggcaatctcatcagatgttcttctggcaaacacacaaacttgttgcatgttccttctgccaaaaattattcttctgcttctttacctagaaaaattcttctcactc

SEQ ID NO: 586243 - DNA, 568 bp, Homo sapiens
tttgtgcttttgaagattatgtgatctaatatatatagtatacttaggacagtatctggtacttgtaaagtgtttaataaatgttagatcttatttttgttctaaattcccactgatgcttttggagacccattttttgttttaaaaaaatgaaggtagctttataatagcctcagttttttttttttttttttttgagacagaatctcgctctgctgcccagactggagtgcagtggcatgatttcggctcactgcaagctgtgcctcgtgggttcacgccattctcctgcatgagcctcccaagtaggtgggactacaggcgctcgccagcatgcctggttaattttttgtattttttgtagagacagggtttcaccgttttagtcaggatggcctcgatctcctgcacctcaggtgatccaccggtctcagcctcccaaagtgctgggattacaggcaygagccaccatgcccagccaatattctgttatttaaaaaaaattattgaattactcaatatagaaatctaaagaaagtaaaaaaaaattaaaaattgtttatcctcc

SEQ ID NO: 586244 - DNA, 568 bp, Homo sapiens
tttgtgcttttgaagattatgtgatctaatatatatagtatacttaggacagtatctggtacttgtaaagtgtttaataaatgttagatcttatttttgttctaaattcccactgatgcttttggagacccattttttgttttaaaaaaatgaaggtagctttataatagcctcagttttttttttttttttttttgagacagaatctcgctctgctgcccagactggagtgcagtggcatgatttcggctcactgcaagctgtgcctcgtgggttcacgccattctcctgcatgagcctcccaagtaggtgggactacaggcgctcgccagcatgcctggttaattttttgtattttttgtagagacagggtttcaccgttttagtcaggatggcctcgatctcctgcacctcaggtgatccaccggtctcagcctcccaaagtgctgggattacaggcatgagccaccatgcccagccaatattctgttatttaaaaaaaattattgrattactcaatatagaaatctaaagaaagtaaaaaaaaattaaaaattgtttatcctcc

SEQ ID NO: 586245 - DNA, 602 bp, Homo sapiens
tgttgtatagctttgcattggctgagttttcaatgtttagacatttgagtataagaaaactgctacactaaaagtaatagacataaaaataaaaaataaacagctgtgtaatgttatcaggctagctagatgttatgcatctgtgattctgaggcttctttgcagcatttggttcatggargttctggtaagaccagcttgtgagcgttgatgtttcagagcaggttattttctatggtgtgaaagatgcagtcattgccaagagtcacaaaaagtgaggctgggaagaggatacactgaataaagttttaaggaagtttaagaaagcacacaccacattgccatttgctttcttaaagtttcaaggaaaatttctaaaaaatacgttcgtatggtttgtaaggttcacatgagataaggaagtaaatagagcacttagcataggaattggaaaaaaaatacttatactttcagacatagaagacatacagttaacagatttcagagtcaagcactggttagataaagtcaaatgctctctttagatgtgtactgcaaggcattagccaggtgcagtggctcatgcctgtaatctcagcact

SEQ ID NO: 586246 - DNA, 548 bp, Homo sapiens
gttttgcttgctcctcctcatctttctccttttggacattgttgtttcccagggctcactcctcagtcttctttcttgtgactttttctttttcttttttggagacagagtttcactctgtctcccaggctggagttcagtggtgtgatctcggctcactacaacctctgcctcctgggttcaagcaattctcctgcttcggcctcctgagtagctggcattacaggtgcatgccaccgtgcccagctgatttttgtatttttagtagacacagcatttccccatgttggccaccctggtctcaaactcctgacctcaggggatctgtctgccttggtctcacaaactgttgggattacaggtgtaagccactgcacctggcccctcgtgactttttctactgtgtatatgctagtgatttctgaatgtatgtctccagctcagatctttctccttaattccagatttctatatcagcctgcctacttgacrtctctatttggttagttattgggtatcacacacttgtcagatccaaaattgggcta

SEQ ID NO: 586247 - DNA, 265 bp, Homo sapiens
gtacaagtcatttctttcctaagttagagtcaactttaaccaaaaattttctgtataaaagttgccttcaattaactatgttcaaaatgaaastattttatattccagaattgtagacttcattttaaaattttggtcaagatgaattggttaataatagctctcaggaagatctgttttccttttttaaaatacatatttctctgtataatttattccttaaaattaattattttctttctgtttttggtatttttagaagctt

SEQ ID NO: 586248 - DNA, 265 bp, Homo sapiens
gtacaagtcatttctttcctaagttagagtcaactttaaccaaaaattttctgtataaaagttgccttcaattaactatgttcaaaatgaaagtattttatattccagaattgtagacttcattttaaaattttggtcaagatgaattggttaataayagctctcaggaagatctgttttccttttttaaaatacatatttctctgtataatttattccttaaaattaattattttctttctgtttttggtatttttagaagctt

SEQ ID NO: 586249 - DNA, 265 bp, Homo sapiens
gtacaagtcatttctttcctaagttagagtcaactttaaccaaaaattttctgtataaaagttgccttcaattaactatgttcaaaatgaaagtattttatattccagaattgtagacttcattttaaaattttggtcaagatgaattggttaataatagctctcaggaakatctgttttccttttttaaaatacatatttctctgtataatttattccttaaaattaattattttctttctgtttttggtatttttagaagctt

SEQ ID NO: 586250 - DNA, 595 bp, Homo sapiens
cattaacttttataataccaagagccaagaagaaattatgaacgaatactttgggaaaacaaaatcggagaatgattaagtcatttaaagaagtaaagttcttattattcattagaagatttaacattagatgctggtaatgacctttgtttccccttagaacattaattatgtgtaacctaagctcataagaaaattacattacttaactcagacatgaagttctagtggcttgtaccagatattttttatcccttgacacctaggaaaacacatttaaaagtctttttttaatagctagtagtcgccaaaatatgaagtgatttgcataagggaagaaaccaggtttactgcctccatgtggtattggcaatttccatactcaggcayacagtgttcgatcatctaacattaaccctaatagccaagcagtgaacatttattttattccattgggaattatagtaagtcagaattttgtgtattacatttttaaatatatgttctaattgacgaccctaaaattcctgtctgcttatttcaactggaagtggcaaattttaccaattatctggagaagaactaagttacatca

SEQ ID NO: 586251 - DNA, 422 bp, Homo sapiens
ataaaagacacacattaatttcacatctctattatttttaatacaaaaatataattcagttattttcttcttaataggagcatagggtctggttcttgatgtaagaaacaaggactacacacctgtaatcccagcactttgggaggccgacgcaggcggatcacctggggtcagggttcgagcccagcctggccaacgtggagaaacccagtctctactaaaaatacaaagttagccaggtgtggtgrcgcatgcctaaaatcccagctactcgggaggctgaggcaggagaatcgcttgaacttgggaggtggaggttgagttgagcaaagattgcaccattgcactccagcctgggcaacaagagtgaaactccatctcaaaagaaaaaaaaaaaaaaaaagaaaaggaaacaaggacta

SEQ ID NO: 586252 - DNA, 558 bp, Homo sapiens
ttattgtcttaaaattgttctcaaaatggaattcatttagaaattgtttgttcaaaatatgttatgcttcatatttatttattctttttgtcaagactagcaagtgtctgaattttatttttcaaattaaaactcattacctttaacaaatggtaatgtaactcttaacctattttttttctaaactacttcagttaagaatgaaaatttgtttttaaaactataaatatttgttatcactaaatataaaccatttaatataaaagaattaaacaggtttttaatcaatgaatgccatagcattagttagatttgataatgcaacattctttcaccctggtgcatctaaactagttttccctgggtttgttgcaaatctggaagctagcaatgccctgttagaatagtgattgctgatcgggcgcagtggcttaagcctgtaatcccagcactctggaaggctgaagtgggcggatcacttaaggtcaggagttygagaacagcatggccaacatggtgaaaccccatttctactaaaaatacaaaaattagccgggc

SEQ ID NO: 586253 - DNA, 580 bp, Homo sapiens
ggatcacttgaggtcaggagtttgagacgagcctggtcaacatggcaaaaccgcatctctactaaaaatacaaaaaaattagctgggcatggtggcacacgcctgtagtcccagtcactcgggaggctgaagcaagagaatcgcttgaaccagggaggcagaggttgcagtgagccaagagcacgccattgcactctagcctgagtgacagagcaagrcttcttccaaaaaaaaaaaaaggacctatcccaaaagtacctcctggagtgataatgggactcaacagaggggtggaccacgcaatggccagctggagaaggcaatgcaatctcagggaggcagtgcttgtctttagaaaggatgcctccagcaggtaatctccaagggacccaccaaactgtcttacagaggaaagagccggcaatggtgcctctgccacattgggaaagcccaaagccagagcacaactatatgagccaagtaagacagttcttaacccttacttattcttccttccttcttatgatacaggcagggcccagagcagcaaccaactagagggggaggaagtagagcaagg

SEQ ID NO: 586254 - DNA, 309 bp, Homo sapiens
aaatcctagtattataaccaacttctacattccttagcagagtattaacataatcttgaaaaaaagaaaagaatttagtttgatgattgagatgtcttattcctcatctcccatgccaaatttttaaaaatagatagaaaacaatgtatttgaactttaaaagyttcaactaaataatattggaaatgtggtaataactatttatccagtttcaaatcttattaatatatcatttaaatgttcataagattgtaggtaaatatgtttaacttttatgtttctgtctttactagctaaatgtatttttaa

SEQ ID NO: 586255 - DNA, 309 bp, Homo sapiens
aaatcctagtattataaccaacttctacattccttagcagagtattaacataatcttgaaaaaaagaaaagaatttagtttgatgattgagatgtcttattcctcatctcccatgccaaatttttaaaaatagatagaaaacaatgtatttgaactttaaaagcttcaactaaataatattggaaatgtggtaataactatttatccagtttcaaatcttattaatatatcatttaaatgttcataagattgtaggtaaatatgtttaacttttatgtttctgkctttactagctaaatgtatttttaa

SEQ ID NO: 586256 - DNA, 610 bp, Homo sapiens
tgtcctttaattttgcactgcaggccccttgcttgtctcactgtattcgctcccattcctggctcaggttctacaagatgctctgaaaaagatgggctccagagtgtaaaatatgaagaaaaatttcccactctggcccaaacttggagggtcacaaggcactgtgagcacacactccagcttcagggcctttgcgcttgacatgtcttctgyctggaatgctctctcctcaatacccctatggctcacaccttcctttattccagcctcctcagaagggcctcccagggcccctctggctaaagaagcccctcccccattgccttctatcacttcactctgctttgcttttcctcattatgtttatcaccactggacatattttccatcatttatttgattatgggctcttctgctaaactggcagctccatgaggacagggacgtgtctattgttactgatatgtccccattgcctacaacggtgcctggtacggaatagattctcaattaatttgtttttcatgcataaaggaaagacaggaagaaggaaggagagaaagttaagagaagtcctgaagggaagaacgggtttaattatacttaaccc

SEQ ID NO: 586257 - DNA, 542 bp, Homo sapiens
tgagaatcacttaaacccaggaggtggaggttgcagtgagtcgagattgtgccactgcactccagcctgggcaacagagtgagactctgtcttaaaaaaaaaaaaaakcttaatttaaactttgatcttaggatgaaataccctcatagtgtgctctgctgttagagattcatgtgggaaaaacatatatcttggtttctttaaataaattagtagagggaaaagctgaatcgacatatgttatcatataaaggagttaaaatcatgttctttggtgtgaatagaccttggtttgaaactaaactctgctgcttattaggtgggtacttcagagaaattactttttatctctcaatcctcagttttcttatcattaaatgagtttaataacttctatcccataaagttattgtgaagattcctgggaaatatgtatatacatatttaataaccatcagcacaaagaatggcatgcaatagttgctctatagaagttaattcctttccactttcatgtcaatatttttaacctagctgttaga

SEQ ID NO: 586258 - DNA, 542 bp, Homo sapiens
tgagaatcacttaaacccaggaggtggaggttgcagtgagtcgagattgtgccactgcactccagcctgggcaacagagtgagactctgtcttaaaaaaaaaaaaaagcttaatttaaactttgatcttaggatgaaataccctcatagtgtgctctgctgttagagattcatgtgggaaaaacatatatcttggtttctttaaataaattagtagagggaaaagctgaatcgacatatgttatcatataaaggagttaaaatcatgttctttggtgtgaatagaccttggtttgaaactaaactctgctgcttattaggtgggtacttcagagaaattactttttawctctcaatcctcagttttcttatcattaaatgagtttaataacttctatcccataaagttattgtgaagattcctgggaaatatgtatatacatatttaataaccatcagcacaaagaatggcatgcaatagttgctctatagaagttaattcctttccactttcatgtcaatatttttaacctagctgttaga

SEQ ID NO: 586259 - DNA, 542 bp, Homo sapiens
tgagaatcacttaaacccaggaggtggaggttgcagtgagtcgagattgtgccactgcactccagcctgggcaacagagtgagactctgtcttaaaaaaaaaaaaaagcttaatttaaactttgatcttaggatgaaataccctcatagtgtgctctgctgttagagattcatgtgggaaaaacatatatcttggtttctttaaataaattagtagagggaaaagctgaatcgacatatgttatcatataaaggagttaaaatcatgttctttggtgtgaatagaccttggtttgaaactaaactctgctgcttattaggtgggtacttcagagaaattactttttatctctcaatcctcagttttcttatcattaaatgagtttaataacttctatcccataaagttattgtgaagattcctgggaaatatgtatatacatatttaataaccatcagcacaaagaatggcatgcaatagttgctctatagaagttaattcctttccactttcatgtcartatttttaacctagctgttaga

SEQ ID NO: 586260 - DNA, 581 bp, Homo sapiens
ttattgacagattgttagctacagttatacattttaaacatttggacatttgtatgtgggcctctatttatttcctkgtagtggtttacaagtatgagaagatgtctgcaaaaaagttattaccaaaagtttaacagtcaaaaggatgagctgtgtggaaagaatactggtaattaagtgaagccatgttttgacatgcacatttttctaggccgttgactcttcccaagtcatctactttgattattgcttatttcctcattttaatatttagtttacaaaattttgtaaatagtattcaaacaaaaaaggcaaaaacgtgggaaaataataaagagtaattttaaatgaaaaactcacttcccaactctaccaaaactgaataatgaaatctggatgccttcctattctgaagtgtttcttacctagatacagctctagccatgaagagtttttggaagaaatgcctttctaagctttccacaatatgagtgtatatattccaggtagaccctattaaggtgctgttaattttttaccactgtgctttttaaaaacgagcttagattctaaaacgcaac

SEQ ID NO: 586261 - DNA, 581 bp, Homo sapiens
ttattgacagattgttagctacagttatacattttaaacatttggacatttgtatgtgggcctctatttatttccttgtagtggtttacaagtatgagaagatgtctgcaaaaaagttattaccaaaagtttaacagtcaaaaggatgagctgtgtggaaagaatactggtaattaagtgaagccatgttttgacatgcacatttttctaggccgttgactcttcccaagtcatctactttgattattgcttatttcctcattttaatatttagtttacaaaattttgtaaatagtattcaaacaaaaaaggcaaaaacgtgggaaaataataaagagtaattttaaatgaaaaactcacttcccaactctaccaaaactgaataatgaaatctggatgccttcctattctgaagtgtttcttacctagawacagctctagccatgaagagtttttggaagaaatgcctttctaagctttccacaatatgagtgtatatattccaggtagaccctattaaggtgctgttaattttttaccactgtgctttttaaaaacgagcttagattctaaaacgcaac

SEQ ID NO: 586262 - DNA, 591 bp, Homo sapiens
ctgcatttcatcatgaagaagaaaaacataatttggagatgctgaaaaagaaggggaaagaaatttttcatcgacttcatttaagtaaagccaaaatggctcataggatggagattttaagaggaatgtatgaggagctgaacgaaatgtgccataaaccagatgtggagctacttcaggtaaaaactcgccatgtggtttcaggtttttgaatattcacatgtataagtattttcctcatggctgaaatccatctccctacttttatttccatgatgtgtttccaaaaacacattcacataactaatgctactttgttgggagagtatagccccactaagggattctaccaggscaaaggtccctcctactttatccaccagccacaaaactttgtggaatggtcaaggtaacagccccaagaaatattccccatctaattcaataatatactttgggttgttaaacatgtatagaatagtgagtgattcatttacatttaggttaatttgtaaacatggcaagatcagaagttttgggaatctaggtttgcattaacattattttggggtccactcatttgggtaacag

SEQ ID NO: 586263 - DNA, 591 bp, Homo sapiens
ctgcatttcatcatgaagaagaaaaacataatttggagatgctgaaaaagaaggggaaagaaatttttcatcgacttcatttaagtaaagccaaaatggctcataggatggagattttaagaggaatgtatgaggagctgaacgaaatgtgccataaaccagatgtggagctacttcaggtaaaaactcgccatgtggtttcaggtttttgaatattcacatgtataagtattttcctcatggctgaaatccatctccctacttttatttccatgatgtgtttccaaaaacacattcacataactaatgctactttgttgggagagtatagccccactaagggattctaccagggcaaaggtccctcctactttatccaccagccacaaaactttgtggaatggtcaaggtaacagccccargaaatattccccatctaattcaataatatactttgggttgttaaacatgtatagaatagtgagtgattcatttacatttaggttaatttgtaaacatggcaagatcagaagttttgggaatctaggtttgcattaacattattttggggtccactcatttgggtaacag

SEQ ID NO: 586264 - DNA, 395 bp, Homo sapiens
aaatgttattacacctctacagcatatacaattatgtattattcttttaataatagagaaaaaatgtgaccatatcactgggcaaagtaatgatttaatgtctatctctkcacagtttgtttcagaacatatctaaaatgtatttttttcttcaatagaaaaatcttcttgtattatttgtctttaagatcatcaacaggtagacatcaatttgctgtgatgtgagtatttattggaatgtaagttatgcctgctatagtctcaaacatcaaaaatttggtagaaattaacacatgtaaagtttataagtttctgaaaagaatattctggctttacattatctgtttagcccctgattcaatctactctgggttcctgctctctgctacctagat

SEQ ID NO: 586265 - DNA, 395 bp, Homo sapiens
aaatgttattacacctctacagcatatacaattatgtattattcttttaataatagagaaaaaatgtgaccatatcactgggcaaagtaatgatttaatgtctatctctgcayagtttgtttcagaacatatctaaaatgtatttttttcttcaatagaaaaatcttcttgtattatttgtctttaagatcatcaacaggtagacatcaatttgctgtgatgtgagtatttattggaatgtaagttatgcctgctatagtctcaaacatcaaaaatttggtagaaattaacacatgtaaagtttataagtttctgaaaagaatattctggctttacattatctgtttagcccctgattcaatctactctgggttcctgctctctgctacctagat

SEQ ID NO: 586266 - DNA, 395 bp, Homo sapiens
aaatgttattacacctctacagcatatacaattatgtattattcttttaataatagagaaaaaatgtgaccatatcactgggcaaagtaatgatttaatgtctatctctgcacagtttgtttcagaacatatctaaaatgtatttttttcttcaatagaaaaatcttcttgtattatttgtctttaagatmatcaacaggtagacatcaatttgctgtgatgtgagtatttattggaatgtaagttatgcctgctatagtctcaaacatcaaaaatttggtagaaattaacacatgtaaagtttataagtttctgaaaagaatattctggctttacattatctgtttagcccctgattcaatctactctgggttcctgctctctgctacctagat

SEQ ID NO: 586267 - DNA, 395 bp, Homo sapiens
aaatgttattacacctctacagcatatacaattatgtattattcttttaataatagagaaaaaatgtgaccatatcactgggcaaagtaatgatttaatgtctatctctgcacagtttgtttcagaacatatctaaaatgtatttttttcttcaatagaaaaatcttcttgtattatttgtctttaagatcatcaacaggtagacatcaatttgctgtgatgtgagtatttattggaatgtaagttatgcctgctatagtctcaaacatcaaaaatttggtagaaattaacacatgtaaagtttataagtttctgaaaagaataytctggctttacattatctgtttagcccctgattcaatctactctgggttcctgctctctgctacctagat

SEQ ID NO: 586268 - DNA, 482 bp, Homo sapiens
tgctggatttctcccaacagagaacatcttcagagttattcttctctgctaagagaacatttctcttttgtctcctggtctctgtatgtctgaggaacccttttctatgtcatctggtaacttctcattttattttttccttgtataattttggaccagtccatgccatcttttcctctcattcttccctatatagcaatgaattttgtaaaataaagaaaatggcaagaagagaggaagaggatatcagtgaagaggatgtcatgctggacaccgtgttgttcttggcacacactgcatgcartcctcactgccatcagcagggtggcttttattctcacattttttttgatctatctaataatgggaggggagagtaacactatcagtgtccctcacccagtaaaatgcagatttttattaagaggctgtgccttgctctgttgcccaggctggagtgtagtggtgcaatcatagttcac

SEQ ID NO: 586269 - DNA, 270 bp, Homo sapiens
atcaaagttccctgatatacaccatccctaattgctccttctcacctcctctcaggcctatcttttgctgtagtcacttctgaccagagaaaagtcagaaatgkgtctatatgctctgggaacctgtttatcccagaaagccctctttttcgcacctcatcaaatgggacaaataagttacatttaatgtctttagttgcattctaatgtcatcaaaactcatttatagtgtttctattaaatatggtgaaaacactaaaaccatgtgta

SEQ ID NO: 586270 - DNA, 270 bp, Homo sapiens
atcaaagttccctgatatacaccatccctaattgctccttctcacctcctctcaggcctatcttttgctgtagtcacttctgaccagagaaaagtcagaaatgtgtctatatgctctgggaacctgtttatcccagaaagccctctttttcgcacctcatcaaatgggacaaataagttayatttaatgtctttagttgcattctaatgtcatcaaaactcatttatagtgtttctattaaatatggtgaaaacactaaaaccatgtgta

SEQ ID NO: 586271 - DNA, 565 bp, Homo sapiens
agtggaggtgatactatggagggcttagaaataatttaaatctccacatcctatttttctaaaataaagggaggaaagaaggaaacaaggaagagaaggaggaagatggctttcaccttgttcctacacaatggtgtttggcaaagacactttttaaagtttgctttgtgtgtctgattacattttgtactcggaaagtaattaaaccatygttgggacagagaaaaatgtgatcatacatttctgtgtgcaacattggagcactttgtctcttttccacaatagtcttcgtttaacatttatatatactctcacaaaaactcaagaataagggataataaatggaaggttcttctaacctcctgggtagccacaaagtggacagtgtccattaattgctcttcagatgtttaagctaagtcaaggctgtgccactgtgcatttgagtagacttcaggattcagaatcacttctctgacctcagtgctctgggtatgcacatgagcttgtgtgcatgtgagtgcaaagctgtgttttctcagagagattttaagctggtgataca

SEQ ID NO: 586272 - DNA, 564 bp, Homo sapiens
gagcttccaacataaaagtgctgaaagggtggcacatctattgggggcatggaagttccacatcccttcccacatacctgagcctatgcatctcttctatttggcttcctgagttggatcctttttataataaatgggtaacagtaagtaaagtgctttcctgagttctgtgagccgccatagcaaataatcaaatctgaggaaggggtcgtgggaacctctgatttacagccagttggtcaaattacaggtgataacctgaagtatcaagtggtagtgtggggcagtcttgtgggagtgagcccttaaaactgtggatctccaggtagattgtgacagaagctaaattgtaggacaccagttgggtctgcagagagttggagaattgcttggaaaatcccactcgtctgttgtcagaagtgaagacatttgaatacaattattatgtatcaattttaaaaagacaccctttctgaaaagaaatagatgttttagaagatgatgtagtttggctttgtgtccccacccaaatctcrtctcgaactgtaatcgccacgtgttgag

SEQ ID NO: 586273 - DNA, 557 bp, Homo sapiens
tttttctcttttgaatggataaagtggccaatttcttactatttcttttgtacaacctttgcttgtttttaacctagactctttgctttgtgttgcttgctttgttaggcatggcaagtaatagaagatgtgggttctaattttagaagaaaattatccttggcaggcataaggaactagaaatttggtgctcagggagccaatttttaatcaaataggaaaatcaaaacatttgaatttaaaagtgtctgaattttctgcctcattgatttaagtttaagaagttggatgagctgaagatagtacatgcatagttcattggatttgggttgaactacttttacttagtatctgagacaatttatttttcatttaaattgtttttatctcttagaaaaatatacacaagaaataaagaggttggatatggagcatcattaaaactaatctgcaaattaacacctgtatctctcatggtgttcactgcaaataataatttccactctagctgtttacagcytaaagggatttattatgggatataaggttgcttatgt

SEQ ID NO: 586274 - DNA, 370 bp, Homo sapiens
gtcatgagggctctgtcctcatgaacagacacacgttattattgtggagtggattagttatcttgagaatgagcttgttctaaaggtgagttctgtcctctcttgctctctttctctttctcccacattctttttcatctactttctaccatgggatgatgcagcaagaagaccctcaccagatgccagaccctcagccttggatttcttaayccccagaactctaagaagtaaatttctttttctttctttttttttttttaaataaattgcttagtctgtggtattttgttatagcaacacaagatggactaagacaagctccttattcatagccatatcctgggatcaaacacatatggatatagtt

SEQ ID NO: 586275 - DNA, 403 bp, Homo sapiens
tcaagccatcctcccaccttagcctcctgagtagctggtacaggtgcatgccactatgcccacctaattttttaatttttgtagagatggggtcttgctatgctgcccgggctagccttgaattcctcgcctcatataatcctcccacctttgcctccccaagtgctggggtgatggttacagtcatgagctactgctccccatctcaaattttattaatttaaatttaaagrgccattttagattctaaagtttgtaattgcttgttggcactatgattgtactttcacagtcttatcctccatgaaaggtcagggcatgttaggctggcacagccatgcaggtagttttacttcagagacagagacagctgatggacaggagaggggacattctctatgta

SEQ ID NO: 586276 - DNA, 536 bp, Homo sapiens
actatttgtcaattaccatttacatttcttagggacgtgctgattaatgataacacatgttaaaagcatcagagggaaagagaggttttgactccccactagatctcctgtgatacctcctcgctgggaagtgaccggagtgctttactattgctccagaggtgacctctattggacagggatgaaagcccggtctctccatgaagttttctgactccaccctagtgaggaaatggagaggtgcctagttactgctgggtggagacggaatcctaggcagcctgtgtggtctccactggcaccacgggatggggtcttattattacctagaggggatggaagtccctattctctacccagccttctgtgacacgacactggccaatgggttgtggtgcctcattatagactggcatgaatggaagtctaggtacttcaatctagaatatagtggttattgtctaaaagccttcattttgtkaggctgccccgttcttagtcctttagctagagagactaggcttttgttgttgttg

SEQ ID NO: 586277 - DNA, 570 bp, Homo sapiens
atctagaaaaccccattgtctcagccccaaatctccttaagctgataagcaacttcagcaaattctcaggatacaaaatcaatgtacaaaaatcacaagcattcttatacaccaatagcagacaaacagagagccaaatcatgtgtgaactcccgttcacaattgcttcaaagagaataaaatacctaggaatccaactttcaagggacgtgaaggacctcttcaaggagaactagttgttcccatcctttactccgtatttaatccacctggggatgtttaaaaaaattgatgagtcacttccactcccagatattctgatttaattggtattgagtataacgatggtactgataatttaaaaaatttctcaggtgattctagtacttggcatagttaggaaatcactgttacaactatatttccagatttaacttcaaggaaataatgttatgaattctttgttaatgttttttataaagatgcttgaggaagacatgctagagcaaaaactacarctctggtcctcttggatattttagataaggtaagatttttgaattgcactga

SEQ ID NO: 586278 - DNA, 645 bp, Homo sapiens
tacttttgacttgtcagcataatcaaatggggcatatgggattgagattaaacagttgattaagtcccatgatagaatacatttagtttctcttctccttttggtcttgcttattcacatctcttcaatctttctgagaactccctttacaactccagatctacaataattttatgaaatcatcagttaagctccttggattaatatccttattttctttctttattctaaagttccaargtacatattaactgcctccttcaatcttctgtattcaaattacacctcctttccctgaattgaaagggaatttcaatgtcctttatgaaagctatagataaccctttcttatttatctatcttttattccctacaattttcataggttttatgtcctgattaaattatttatatccgcttctattaacattaacttcttcaatacttaatggcttatctagtgcttttctgaggttaacaactggttttaatcacccttttctgatttatatgacattacaaataattttggaaattgtagataatttgtcatagtactaaaagtttgtatgcaaggggtgtgtgtgtgtgtgtgtgtgtgtgtgtgtcacagagagagagagagagggaaagagaaagagaaat

SEQ ID NO: 586279 - DNA, 645 bp, Homo sapiens
tacttttgacttgtcagcataatcaaatggggcatatgggattgagattaaacagttgattaagtcccatgatagaatacatttagtttctcttctccttttggtcttgcttattcacatctcttcaatctttctgagaactccctttacaactccagatctacaataattttatgaaatcatcagttaagctccttggattaatatccttattttctttctttattctaaagttccaaggtacatattaactgcctccttcaatcttctgtattcaaattacacctcctttccctgaattgaaagggaatttcaatgtcctttatgaaagctatagataaccctttcttatttatctatcttttattccctacaattttcataggttttatgtcctgattaaattatttatatccgcttctattaacattaacttcttcaatacttaatggcttatctagtgcttttctgargttaacaactggttttaatcacccttttctgatttatatgacattacaaataattttggaaattgtagataatttgtcatagtactaaaagtttgtatgcaaggggtgtgtgtgtgtgtgtgtgtgtgtgtgtgtcacagagagagagagagagggaaagagaaagagaaat

SEQ ID NO: 586280 - DNA, 482 bp, Homo sapiens
atattaaataaaaactttcaaagataaccaaaagcagagagatcgttgtaaaccattccatgtactcatcacccagtctcaattactgacattttgccagacttgtgtcattgtttaataaccattccagttttcctttgtgtgtgtayactgttttaaagcaaataataaaaattacgctatactacccataaatattactaagcattttaaccccataagaactttaaaaatatccaccacagtattattgcacttcatacagctaactaaatttgtcatcaatattgaaatttcaccagttgcgacaaaaatatactttgttttttttttcaaaataacatccagcaaatatccacacattgcatgtgtaattaggtttaagtcttttttattctataacaaccttccttccttctctttgcttttattcccttccatgccattgtttttttgtttggtttggtttttcaaaatttatg

SEQ ID NO: 586281 - DNA, 482 bp, Homo sapiens
atattaaataaaaactttcaaagataaccaaaagcagagagatcgttgtaaaccattccatgtactcatcacccagtctcaattactgacattttgccagacttgtgtcattgtttaataaccattccagttttcctttgtgtgtgtatactgttttaaagcaaataataaaaattacgctatactacccataaatattactaagcattttaaccccataagaactttaaaaatatccaccacagtattattgcacttcatacagctaactaaatttgtcatcaatattgaaatttcaccagttgcgacaaaaatatactttgttttttttttcaaaataacatccagcaaatatccacacattgcatgtgtaattaggtttaagtcttttttattctataacaamcttccttccttctctttgcttttattcccttccatgccattgtttttttgtttggtttggtttttcaaaatttatg

SEQ ID NO: 586282 - DNA, 639 bp, Homo sapiens
cactcactatcatgagaacagcttggggaaaccacccccatgatccaatcacttcccacctattctctccctcaaggcatggggattaaaactggagatgagatttgaatggggacacagagccaaaccatatcaccatcttttctttaattgcttcaaataaattaaaagttatggttaggaaatactctctacccctaggttgtaaaaaatttcaatttaattattattttaatacttatatatttaatttcaaaactctgacccatttggaatttrtcttgacagatttggtgaggattatacacaattttctcttttccatatgatgaattattgctttaaacattattaattagtaaaggctccatcatatcacttaataatagcaccaattaaatactaacacctggaggtctggaggtggctgagacctattctatctgatgtgatatattttgctgtgaatctgaaaactatatatacatatatcatttgtcttatatttaggatatagaggcctggaaaccgagagatggatttaaaagtacttcctctcaactgtacttcaaatggcccttcagattcatttttctcctgtttaataatgtcagctctgttagtttagagatctacttc

SEQ ID NO: 586283 - DNA, 639 bp, Homo sapiens
cactcactatcatgagaacagcttggggaaaccacccccatgatccaatcacttcccacctattctctccctcaaggcatggggattaaaactggagatgagatttgaatggggacacagagccaaaccatatcaccatcttttctttaattgcttcaaataaattaaaagttatggttaggaaatactctctacccctaggttgtaaaaaatttcaatttaattattattttaatacttatatatttaatttcaaaactctgacccatttggaatttgtcttgacagatttggtgaggattatacacaattttctcttttccatatgatgaattattgcttyaaacattattaattagtaaaggctccatcatatcacttaataatagcaccaattaaatactaacacctggaggtctggaggtggctgagacctattctatctgatgtgatatattttgctgtgaatctgaaaactatatatacatatatcatttgtcttatatttaggatatagaggcctggaaaccgagagatggatttaaaagtacttcctctcaactgtacttcaaatggcccttcagattcatttttctcctgtttaataatgtcagctctgttagtttagagatctacttc

SEQ ID NO: 586284 - DNA, 639 bp, Homo sapiens
cactcactatcatgagaacagcttggggaaaccacccccatgatccaatcacttcccacctattctctccctcaaggcatggggattaaaactggagatgagatttgaatggggacacagagccaaaccatatcaccatcttttctttaattgcttcaaataaattaaaagttatggttaggaaatactctctacccctaggttgtaaaaaatttcaatttaattattattttaatacttatatatttaatttcaaaactctgacccatttggaatttgtcttgacagatttggtgaggattatacacaattttctcttttccatatgatgaattattgctttaaacattattaattagtaaaggctccatcatatcacttaataatagcaccaattaaatactaacacctggaggtctggaggtggctgagacctattctatctgatgtgatatattttgctgtgaatctgaaaactatatatacatatatcatttgtcttatatttaggatatagaggcctggaaaccragagatggatttaaaagtacttcctctcaactgtacttcaaatggcccttcagattcatttttctcctgtttaataatgtcagctctgttagtttagagatctacttc

SEQ ID NO: 586285 - DNA, 552 bp, Homo sapiens
atatcttctttgaagaaatgtttactctagtcctttgcccattttttaattgggttgttttttctttggtgttgagttgtgagagttcttgatgtattctggatatcccacacatactcattattttttctttgtactaattaccttacataatataggttatactatatgcacataacaagagcatagaatatgtaaatgtaagttaatactactgcataatgtagatatttgtagtctattcttatggcacatatttataaacattaaaaataggcctaggtggggtcttcctttgtttattttatccttatttaatgcattttactccagtaaaacttagaatatattaaaagccaagatgtgtcagataaggtggatattctgactcagagttcacttcaatcttctagtatgtgttctatagaaaccagaaagtcaaaaytaagtttcctagattccccttttatctggagttcccatgtgaccacatataaaaaatgatgaagcaaaggaaaatagagttagggagaatagatcatgtggtggaag

SEQ ID NO: 586286 - DNA, 552 bp, Homo sapiens
atatcttctttgaagaaatgtttactctagtcctttgcccattttttaattgggttgttttttctttggtgttgagttgtgagagttcttgatgtattctggatatcccacacatactcattattttttctttgtactaattaccttacataatataggttatactatatgcacataacaagagcatagaatatgtaaatgtaagttaatactactgcataatgtagatatttgtagtctattcttatggcacatatttataaacattaaaaataggcctaggtggggtcttcctttgtttattttatccttatttaatgcattttactccagtaaaacttagaatatattaaaagccaagatgtgtcagataaggtggatattctgactcagagttcacttcaatcttctagtatgtgttctatagaaaccagaaagtcaaaattaagtttcctagattccccttttatctggagttcccatgtgaccacatataaaaaatgatgaagcaaaggaaaayagagttagggagaatagatcatgtggtggaag

SEQ ID NO: 586287 - DNA, 384 bp, Homo sapiens
ggtccccacgtgatttgtgagcacaggaaaatttgaggagcactgaattaaacaaaatcatttccggttgtctcacacactccagggacagggatctatcaaggcctggggaacaaactggagccagcggatcaaatactatcagggtgctctgtcccacctttgcctctgctctttttatatttgtttccacccccacagctgtctctgattcactctccagactggatttatctacctcataggaccatatacagaaaacaaggctgctgagagctcaacattctcacattatgtatcttttatatatatatatatatatatatatatatatatatatatatatatatatatatatwtatttatttatttatttattttgag

SEQ ID NO: 586288 - DNA, 526 bp, Homo sapiens
tccagtatacaataaaatattattaactgtagtcctcatgctgtgcattagatctccagacttattcatcctgcatatcttcaatttcgtaccctttgacctacatctccccatttcctttctgccmtagtaaccagtgttttattgtttctatgtatttgatattttcttttttttgattccacatataagtgagatcatgcactatttttcatttcgtgtctgccttatttcacttagcataatgtcctctaggtttatccatgttgtaaatggcaagatattttttaaggctgaataatattccattagacacacacacatatacctcttacaatttttcatccattcatctgttgacaggttttcttctctctctctttttttttttttttttcattttgagacagaatttcactcttgttgcccaggctggagtgcaatggtgaaatctcagttcactgcaacctctgcctcccaggttcaagcgattctcctgcctcagcctcccgagtagctgggatta

SEQ ID NO: 586289 - DNA, 626 bp, Homo sapiens
ggattacaggcatgagccaccatgcctggcctaactttaagacttttatctgggggtggtggcacacacctgtggtcccagctagtcgggaggctgagatgggaagatcacttgatcctgagaggtcgaggctgcagtgagccctgcactccagcctgggcaacacagcaggaccccgtcttcaaaaaaaaaaaaagacttagtaacatatgagatgtgtgtaatgactgggagagaagacatctaagaagacacctgggggactagacagaagagcagctctcaaagtgtggcctggaacccctgggaatccccaagactttcatggaaactacatggtcaaaaccattttcagagtagtagtaaaaccctgtttgtctttttcactgtcatgctctcatgggtgtatggtagcattttccagaagatatatgaaatggaatattgtaactaatttgaatgaaaatgcagttatgagaatccagctgtcttctattagtaccatcattaaaaataattacaaaaatraaaaaaatgccacatttctcaccacattttgttgctgctgttttgtaaaaagttatttttcatacaaatttatgttaacatgcaataggtttgagagg

SEQ ID NO: 586290 - DNA, 500 bp, Homo sapiens
ctccgcctcccgggttcaagcgattctcctgcctcagcctccagagtagctgggactacaggcgcctgccaccatgcccagctaattttttttgtatttttagtagagatggggttttgctatgttggccaggatggtctcgatctcctgaccttgtgatctgcgcgacttggcctcccaaagtgctaggattacaggcrtgagcactagcgcccggccttcaatttgcattttctagagtcctggcttagaattcctgatctgctcactatatactccaactattcccctgtctatggaagtaactatctctcttccttgtcctcttttatctatctttctttaattaattaattttagagatgggggtctcactctgttgcccaggctggagggcagtggtgcaaacagctcagtgcagtctcaaactcctgggctcaatgatccgccatctcaggctcccaaatagctgggactgcaggtgcactccaccgcaccca

SEQ ID NO: 586291 - DNA, 632 bp, Homo sapiens
cacagaacttttgtttttgagacagggtcccactctgtcgcccaggctagagtgcagtggagtgatcacagcttagtgcagccttgacctcccaaggctcaagtgatcctcccacctcagcctctgggtctgctgggactacagctgtgtacaccaccatgcctcgctaatttttttttttctgtattttgtaaagatggcgtctcaccacattgcccaggttggagaactagttttttaaacaattaacagaaataagttatttttctatgctgacttgaaaatgaagagcagagaaatactgaatactttctatgccaggcgttgttgtattaactaattaaacctcaaaatgatcccatgaggcgttattatttatgtctctgctttataaagaaagaaatggaagcaaaacaggttaagtaacttgtyaaccaaggtcacacagctattaagtgccaaagtaagactaggaccaggcctgcctggcttaaatcatcctcttatccactttgcagtgcggagtacataccaagggttgggacaagggtgaagtaagacacttgtcttgggtgcaaaattaaagaaggcaccaaaaaaacctcagtgatcagataggcattttaatgcaa

SEQ ID NO: 586292 - DNA, 545 bp, Homo sapiens
ggtaggtctgtgttttctgtgtgttggtgtaggtatgtgtatgtgtgtgtgtgtatatgcaagcacgagcaccaacttgtgttgtaaaatgtgattcttacagtagaccttgattttcaaaaaatttgaaagccggacagcaagataatagttcagctttttgtgaacggtaaggagtgtgyaaatctgaacctgtagtgtctcctggattgctgtcagtgaggacagaggatcctctttaaaaactgggtccaaactccctctggtctcattttgcacctctccacagtataaactctcctttccaaccattccaaataacttaattccctaatctcagggggccgtttcattgcagaaattgctgcttgttcacaaacttagtaaggtacttaaaaaagattttgtcatggttaataaaagtcacagggtaaattggtcttatttcttctttttagtgcaaaatgtaatcccttcaccctgattgttttgcttagttgtacacaccacccatcgggaggccagaaaacttgtatttatttcta

SEQ ID NO: 586293 - DNA, 545 bp, Homo sapiens
ggtaggtctgtgttttctgtgtgttggtgtaggtatgtgtatgtgtgtgtgtgtatatgcaagcacgagcaccaacttgtgttgtaaaatgtgattcttacagtagaccttgattttcaaaaaatttgaaagccggacagcaagataatagttcagctttttgtgaacggtaaggagtgtgcaaatctgaacctgtagtgtctcctggattgctgtcagtgaggacagaggatcctctttamaaactgggtccaaactccctctggtctcattttgcacctctccacagtataaactctcctttccaaccattccaaataacttaattccctaatctcagggggccgtttcattgcagaaattgctgcttgttcacaaacttagtaaggtacttaaaaaagattttgtcatggttaataaaagtcacagggtaaattggtcttatttcttctttttagtgcaaaatgtaatcccttcaccctgattgttttgcttagttgtacacaccacccatcgggaggccagaaaacttgtatttatttcta

SEQ ID NO: 586294 - DNA, 545 bp, Homo sapiens
ggtaggtctgtgttttctgtgtgttggtgtaggtatgtgtatgtgtgtgtgtgtatatgcaagcacgagcaccaacttgtgttgtaaaatgtgattcttacagtagaccttgattttcaaaaaatttgaaagccggacagcaagataatagttcagctttttgtgaacggtaaggagtgtgcaaatctgaacctgtagtgtctcctggattgctgtcagtgaggacagaggatcctctttaaaaactgggtccaaactccctctggtctcattttgcacctctccacagtataaactctcctttccaaccattccaaataacttaattccctaatctcagggggccgtttcaytgcagaaattgctgcttgttcacaaacttagtaaggtacttaaaaaagattttgtcatggttaataaaagtcacagggtaaattggtcttatttcttctttttagtgcaaaatgtaatcccttcaccctgattgttttgcttagttgtacacaccacccatcgggaggccagaaaacttgtatttatttcta

SEQ ID NO: 586295 - DNA, 545 bp, Homo sapiens
ggtaggtctgtgttttctgtgtgttggtgtaggtatgtgtatgtgtgtgtgtgtatatgcaagcacgagcaccaacttgtgttgtaaaatgtgattcttacagtagaccttgattttcaaaaaatttgaaagccggacagcaagataatagttcagctttttgtgaacggtaaggagtgtgcaaatctgaacctgtagtgtctcctggattgctgtcagtgaggacagaggatcctctttaaaaactgggtccaaactccctctggtctcattttgcacctctccacagtataaactctcctttccaaccattccaaataacttaattccctaatctcagggggccgtttcattgcagaaattgctgcttgttcacaaacttagtaaggtacttaaaaaagattttgtcatggttaataaaagtcacagggtaaattggtcttatttcttctttttagtgcaaaatgtaatcccttcaccctgattgttttgcttagttgtacacaccacccatygggaggccagaaaacttgtatttatttcta

SEQ ID NO: 586296 - DNA, 554 bp, Homo sapiens
tccaacataatttttactacctctatcatcgccaccatttctaccataactacatatctccaacatcaccaccaataccactgtcatcacctccagcaaccctcttcaccaccatgaactttgctacaaccaccatcattgccatcaccaacatcatcactaatacctayatatgttctataagaacctgcatatgttctataagagccttggcaacagcatctctctcagttcttctgcttcttttctttggtttcctttccatagtgtatccattacaatgtaaaattactaaaaaatataccagcttaaagtagcgcccatgcgtttatctcacagttattaggtcagaagcctgggtggatcatgatttagttaggtcacctgcttttttccctcacaaaggtcaaaattagctgagtcatgctcctttctggaggctctgggggagagtcttcctccaagcccatctatgttgttggctgaattcagttctttgcaggtactgggaatgttattttgcaaagcattaaaaggaatcagatcctgctgac

SEQ ID NO: 586297 - DNA, 625 bp, Homo sapiens
tattaacataccaagaattatttgttgatggagcagattagtaaagatcataatcttcactgagttcagaagatcaaggttcaagatcagcttagacattttctaactgtgtaaccctggacgttttaattaaactctgtctcatttttattatctgtacccagaaaattagtttcaggccggatacagtgcctcacacctgtaatctctgcactycaggaggccaaagcacaaggatcacttgaggtcaggagttaaaagaccagcctggccaacaaggtgaaaccccatttctatggagaattgcttgaacccaagaggcagagtttgcagtgacccaagatcacaccactgcactccagcctgggtgacagacaacagaatgagactctatcaaaaaaaggaagaaaggtagaaagaaaaagaaagaaagaaagagaaagagagagaaagaaagagaaagaaagaaggaaagagagagaccagaagaaagaaagaagaaaagaagaaaaagaaagaaagaaagaaagaaagaaagaaagaaagaaagaaagaaagaaagaaagaaagaaagaaagaaagagagacagaaggaggagaaagaaaatgagtttcaggattaaat

SEQ ID NO: 586298 - DNA, 625 bp, Homo sapiens
tattaacataccaagaattatttgttgatggagcagattagtaaagatcataatcttcactgagttcagaagatcaaggttcaagatcagcttagacattttctaactgtgtaaccctggacgttttaattaaactctgtctcatttttattatctgtacccagaaaattagtttcaggccggatacagtgcctcacacctgtaatctctgcacttcaggaggccaaagcacaaggatcacttgaggtcaggagttaaaagaccagcctggccaacaaggtgaaaccccatttctatggagaatygcttgaacccaagaggcagagtttgcagtgacccaagatcacaccactgcactccagcctgggtgacagacaacagaatgagactctatcaaaaaaaggaagaaaggtagaaagaaaaagaaagaaagaaagagaaagagagagaaagaaagagaaagaaagaaggaaagagagagaccagaagaaagaaagaagaaaagaagaaaaagaaagaaagaaagaaagaaagaaagaaagaaagaaagaaagaaagaaagaaagaaagaaagaaagaaagagagacagaaggaggagaaagaaaatgagtttcaggattaaat

SEQ ID NO: 586299 - DNA, 607 bp, Homo sapiens
agctttttgatgtgctgctggattcggtttgccagtattttactgaggatttttgcatcaatgttcatcagggatattggcctgaaattttttttgttgtgtcyttgccaggttttcgtatcaggatgatgtgacctcatgaaatgagttagggaggagtctctctttttctattgtttggaatagtttcagaaggaatggtaccagctcctctttgtacctcaggtagaatttggctgtgaatctgtctggtcctggggttttttcgttggtagtataatgtcttccaggttcatctatattgttgcaaattgcaggattttcttctttttaaggctgaataatattcctgtgtgtgtgtgttttagtgtgtatgtgtgtgtacctttcacatttttcttattgctttatttgtcaacacttaggttatttccatatcttggctattgtgaataatactgcaatgaacatgtgagtgaaggcatctctttcagacattgatttcaattcttttgaatatatatgcagaagtgggattgctggatcatatggttcttcaaactgtgtctagctctctctcacttctccctggaaattaagacagctc

SEQ ID NO: 586300 - DNA, 583 bp, Homo sapiens
ccactgcaccccagcttgggtgatggagaaagaccctgtgccaagggggaaaaatgatcctacccattggttacattaaagacaacaataactgagagggtttcacagagactggaagctgaggcccacacgctagatatggccagaaaatatgttctgtatagtcccccagctactttaaaactgggaaaatcaacattaggctcagaacttcaattgcttatgaaagaagcagatgcgagtactctgggcttccatcccaggaggtgagaaattggccggagctgtgtggcagctgctcatccgtgacccacctccacractccctactgcctgccggacctgggggctaaactcagttgtcatttgccattgtgctcaagctggcaatgtccttaccctggctctcctcacttgtcttgatgacctgtctgcacccacaggcctttatcaaccctggtgaaatgcaacttcctttccaggagccttcactcttgaacaaatggaaaatccttccactgaagtaacaaagccactaacgaaatgctaaggttcagacatcagtgaatccccaagaaaacta

SEQ ID NO: 586301 - DNA, 559 bp, Homo sapiens
caaaaaaaaaaaaaaaaaaaaacccacaacaaaacgatgacaatgtacccctctaaaaaattatttaaccatcctctcttgcaactaaatgaagcacatgtcactgaataacagctcctaagaaaaagctttaaagacaattgacccagttagtacagtgttttktttttttttttttgcctttggccagtcttcattcttgcaacgtggctgcggatgtgatagctggggctgcgggggccacatggcaaccatgaggtgccctggaggatggagtttgggatccttgtaagcagggaactgccatgcgagccatgaactgtgtatctctgtacttctcttacgtaagagaaaaaccaccctctcttttgtttcagctagtattacttgggcttccagtgacacttacttaagggattaaatctattaactatagtcgtgaaaggaagctgactgtcaaaggatatatatctaaaatattaatatcatctctcagttaattatcactagcaacaaagaagtttaaggatctgagaagatctgcggaggtccatgaagc

SEQ ID NO: 586302 - DNA, 548 bp, Homo sapiens
aaggtggccatgcacagtggctcacacctgtaatcccagcactttggaaggctgaggtgggtggatcccctgaggtcaggagtttgagacaagcctgaccaacacagtgaaaccccgtttttactaaaagtacaaaattatttgggtgtggtggcacatgcctgtaactgwaatttcagctacttgggaggttgaggcaggagaatcgcttgaacccaggcggcggaggttgcattgagctgagattgtgccattgcactccacgctgggcaactagagcgaaactctgtcccaaaaaaaaaaaaaaaaaaaaaagaagcagttaaggcaattctaaaaagtcatttttaaataccacttatgttaaacagcaagggaggtattttgtttccaagaagtttacaatttttaatccttccactgcttagctgaaaaaaaaattgcactctgctttccattttgtttgcagctgaatcacagcttagtaatggtgaattaattttgaattactttagagatgttgtctgtcctatattctaacacgcccc

SEQ ID NO: 586303 - DNA, 548 bp, Homo sapiens
aaggtggccatgcacagtggctcacacctgtaatcccagcactttggaaggctgaggtgggtggatcccctgaggtcaggagtttgagacaagcctgaccaacacagtgaaaccccgtttttactaaaagtacaaaattatttgggtgtggtggcacatgcctgtaactgaaatttcagctacttgggaggttgaggcaggagaatcgcttgaacccaggcggcggaggttgcattgagctgagattgtgccattgcactccacgctgggcaactagagcgaaactctgtcmcaaaaaaaaaaaaaaaaaaaaaagaagcagttaaggcaattctaaaaagtcatttttaaataccacttatgttaaacagcaagggaggtattttgtttccaagaagtttacaatttttaatccttccactgcttagctgaaaaaaaaattgcactctgctttccattttgtttgcagctgaatcacagcttagtaatggtgaattaattttgaattactttagagatgttgtctgtcctatattctaacacgcccc

SEQ ID NO: 586304 - DNA, 548 bp, Homo sapiens
aaggtggccatgcacagtggctcacacctgtaatcccagcactttggaaggctgaggtgggtggatcccctgaggtcaggagtttgagacaagcctgaccaacacagtgaaaccccgtttttactaaaagtacaaaattatttgggtgtggtggcacatgcctgtaactgaaatttcagctacttgggaggttgaggcaggagaatcgcttgaacccaggcggcggaggttgcattgagctgagattgtgccattgcactccacgctgggcaactagagcgaaactctgtcccmaaaaaaaaaaaaaaaaaaaaagaagcagttaaggcaattctaaaaagtcatttttaaataccacttatgttaaacagcaagggaggtattttgtttccaagaagtttacaatttttaatccttccactgcttagctgaaaaaaaaattgcactctgctttccattttgtttgcagctgaatcacagcttagtaatggtgaattaattttgaattactttagagatgttgtctgtcctatattctaacacgcccc

SEQ ID NO: 586305 - DNA, 659 bp, Homo sapiens
atcgcttgaacctgggaggcagaggttgctgtgaaccaagatcgtgccactgcacttcagcctaacagcctaagtgacagagtaagactctgtcaaaaaaaagaaaaaaaaagaaaaagaaaagaaaaagcatgtatttataaaaccyggagcaattcttaaacccactaaactcagtaaatctatagtgcctataacattatactaaataagtaataaatacttttctgatgatacacgtactcaccaaatgtaatgaccagagaagatatgtttttagctaaaatatcctagctttgggatgaacagtaggagcactggattggatcagaatgcagtatacacatatttatttcttatgagtctgcctcttagtaaaaagtgtattttatacctctctgttttcaaaaacacaccaaaacccaagttttgtttcctcaaatgtttaatgacatttatttattgtatctgaatgatttattatgatattgtgatacagcatcacttaaggttgtttggatttttaaaagctattcccaaaagatttgcaactactttcccctgctatcttggttgcttcctgttctcacagaaatgtgaatgatgtccctcatgtattgcttatttcttgagcttttaggtacaacttggcaaatata

SEQ ID NO: 586306 - DNA, 550 bp, Homo sapiens
ttgctgtgtcatccaggctggaatgcagtggcacaatctcagttcactgcaacttccatctcccaggctcaagcaattatcctgcctcagcctcctgagtagctgggactacaggtgcgtgccacggcacctggttaatttttgttttttttttaagtagagacggggtttcaccatgttcrccaagtgggtctcaaactcctgccctcaagtgatcctcctgcttcatcctcccaaagtgctgggattacagctgtgagccacacacccagcctaaaatcccaatttttaaaagaatttaagaacaaagctggaggcatcacgctacctgacttcaaactatattacaaggctacagtaaccaaaacagcatggtactggtaccaaaacagagatatagatcaatggaacagaacagagccctcagaaatcatgccacatatctacaactatccaatctttgacaaacctgagaaaaacaagcaatggggaaaggattccctatttaataaatggtgctgggaaaactggctagccatatgtagaaagc

SEQ ID NO: 586307 - DNA, 550 bp, Homo sapiens
ttgctgtgtcatccaggctggaatgcagtggcacaatctcagttcactgcaacttccatctcccaggctcaagcaattatcctgcctcagcctcctgagtagctgggactacaggtgcgtgccacggcacctggttaatttttgttttttttttaagtagagacggggtttcaccatgttcaccaagtgggtctcaaactcctgccctcaagtgatcctcctgcttcatcctcccaaagtgctgggattacagctgtgagccacacacccagcctaaaatcccaatttttaaaagaatttaagaacaaagctggaggcatcacgctacctgacttcaaactatattacaaggctacagtaaccaaaacagcatggtactggtaccaaaacagagatatagatcaatggaacagaacagagccctcagaaatcatgccacatatctacaactatccratctttgacaaacctgagaaaaacaagcaatggggaaaggattccctatttaataaatggtgctgggaaaactggctagccatatgtagaaagc

SEQ ID NO: 586308 - DNA, 573 bp, Homo sapiens
cttatatactcataaaggattgttctacttacagtgtatttacccggttgtgaacaactgaaagraactgaaatcctgagactatctgatacttttcccaggaagtttagattctggggaagcagggaattcaatagctatgacaacaaaagtcgttaatgccagttatccacttaccaaagaagcatggtttcagaatgattgtagtagctaagtttaaagtaaaaagggggggggggcaaaaagataaccatctgttaacaagaacttcatttttgtcttttctttctactttcttcgggtgagtgatttgaggggattaatgcaaacatctgaacatgctgttttgcactgagctcacttagccttttctgctcaagtccttgacccacataaagaaagatatgatttccaaattcaatgaaagctgaaatcgaaggggaggggaaaaatgctatctcagctctaagtctgatttctcttctgtcctacagttgtaattgtatgatagagcttcacttaaaaatacctccctgtgttcaccagggctcctgcaatcctcatatgcgaagg

SEQ ID NO: 586309 - DNA, 573 bp, Homo sapiens
cttatatactcataaaggattgttctacttacagtgtatttacccggttgtgaacaactgaaagaaactgaaatcctgagactatctgatacttttcccaggaagtttagattctggggaagcagggaattcaatagctatgacaacaaaagtcgttaatgccagttatccacttaccaaagaagcatggtttcagaatgattgtagtagctaagtttaaagtaaaaagggggggggggcaaaaagataaccatctgttaacaagaacttyatttttgtcttttctttctactttcttcgggtgagtgatttgaggggattaatgcaaacatctgaacatgctgttttgcactgagctcacttagccttttctgctcaagtccttgacccacataaagaaagatatgatttccaaattcaatgaaagctgaaatcgaaggggaggggaaaaatgctatctcagctctaagtctgatttctcttctgtcctacagttgtaattgtatgatagagcttcacttaaaaatacctccctgtgttcaccagggctcctgcaatcctcatatgcgaagg

SEQ ID NO: 586310 - DNA, 573 bp, Homo sapiens
cttatatactcataaaggattgttctacttacagtgtatttacccggttgtgaacaactgaaagaaactgaaatcctgagactatctgatacttttcccaggaagtttagattctggggaagcagggaattcaatagctatgacaacaaaagtcgttaatgccagttatccacttaccaaagaagcatggtttcagaatgattgtagtagctaagtttaaagtaaaaagggggggggggcaaaaagataaccatctgttaacaagaacttcatttttgtcttttctttctactttcttcgggtgagtgatttgaggggattaatgcaaacatctgaacatgctgttttgcactgagctcacttagccttttctgctcaagtccttgacccacataaagaaagatatgatttccaaattcaatgaaagctgaaatcgaaggggaggggaaaaatgctatctcagctctaagtctgatttctcttctgtcctacagttgtaattgtatgwtagagcttcacttaaaaatacctccctgtgttcaccagggctcctgcaatcctcatatgcgaagg

SEQ ID NO: 586311 - DNA, 573 bp, Homo sapiens
cttatatactcataaaggattgttctacttacagtgtatttacccggttgtgaacaactgaaagaaactgaaatcctgagactatctgatacttttcccaggaagtttagattctggggaagcagggaattcaatagctatgacaacaaaagtcgttaatgccagttatccacttaccaaagaagcatggtttcagaatgattgtagtagctaagtttaaagtaaaaagggggggggggcaaaaagataaccatctgttaacaagaacttcatttttgtcttttctttctactttcttcgggtgagtgatttgaggggattaatgcaaacatctgaacatgctgttttgcactgagctcacttagccttttctgctcaagtccttgacccacataaagaaagatatgatttccaaattcaatgaaagctgaaatcgaaggggaggggaaaaatgctatctcagctctaagtctgatttctcttctgtcctacagttgtaattgtatgatagagcttcacttaaaaatacctccctgtgttcamcagggctcctgcaatcctcatatgcgaagg

SEQ ID NO: 586312 - DNA, 442 bp, Homo sapiens
agacataaaaatgacaaacagttatattgaatggtgatcaacatcattgatcattaaataaatgcaaaccaaaactacaatgagatatcatctcaccccagttaaaatggcttttatccaaaagacaggcagtaataaatgcaaatgatgatgtgagcaaaagggaaccctcatacactgttaaaggagatgtaaattagcacaaccattatgaagaacagtttggaggcttttcaaaaaatgtccaataggtcaagtgtggtggctcttgcctttaaccccagaactttgagaggcagtggcacgtggatcattagagtccaggagtaggagaccagcctgggcaacatggggagactttatctctacaaaaaatacaaaaaattagtcggccagcagatcacraggtcaggagatcaagatcatcctggctaacacggtg

SEQ ID NO: 586313 - DNA, 449 bp, Homo sapiens
gagtgattgaggcatttggcaaaaccacattatgaaagcaactacaaaactggacaaaattgtgaaaaayacaaattgtagcaatctgtaaattgattaaaggaatacaacgaatttgaagctttttctcatgaaaatgatttcacttgggtatgaagcagtctgtggcactagagctcatggcttctctcatatgccctccttggtttagttaagagtagaaattctaccagagtaaggcagatcatgaaaactatcagattccatgtcagaggaggcttataatttgaagcagaaataaatttttttgaagtcaaataagtctgaggttgctgttctggttgggaaatgaatgacttgtagaatccttacagatttaacgtgtaataagacttgataaatgtgactgtgttcctgttaatcaagacatcaataaatataatgaataa

SEQ ID NO: 586314 - DNA, 617 bp, Homo sapiens
aaatcttactttgggaggccatggtgggaggatcacttgaagccaggggttcaagaccagcaaggacaactaaggaagaccctatctcaagaaaagaaagaaagaaagagaagaaagaaagagagagaaagaaagaaggaaagaaaaaggaaagaaagaaagaaagaaagaaagaaagaaagaaagaaagaaagaaagaaagaaaagaaagaaagaaagaaagagaaagaaaagaaagagaaggaaaggaagcaaatkaaggaaaggaaggaaatgaaggaaaggaaggaaaggaaggaaaaagggataagcatggtggcatgtgcctatagttccagctgagagaactgagcttgagggttgggaggctgaggttggaggattgcttgagcccaggagttcaagaccactgtgatctatgattgcccactcacttcacttcaatgtgggcaacagagcaaaatattatttataaaataaaaatgaaaataattgtttaaaaagagcacattttaagcataaaacagaatttttgaaaacagagaaaaaaatcatataaccactagcttccaaagtatggtaattattttattgtattttgtctttataatcactga

SEQ ID NO: 586315 - DNA, 518 bp, Homo sapiens
gtcttttcatggtgccgggctaaacagttgcgactcttgcttttttatctccccaagctcccttttcataagcctttcatttctcaagtgaaactgagcaaactctgttctaaaacaaaaggctaagcagaacatctacactggaagttatggtgatttgggatagggggagaaaagagtaattagaggaaataatggagaaagtgaatttaaagttgacaccacatatggcattctgtctttgagtgagtttctttggtttttattttggggaagacatagtaggtgtatataattatgggggacatgagattttttgataaagacatgcaatatgtaataatcacatcagggtaagtggagtattgagtgagtttttttggctcaatgagaacaagggtataagaatgtatttagtgyctagtgtgtgttgggcacttcacatagtttattgcatttaatttagtcttgttaacaagattatgaggtacattgattgtctcttccatacaaaaaag

SEQ ID NO: 586316 - DNA, 508 bp, Homo sapiens
caaaacaaaactcaacaaaacagctaaggtagttggaaagactaagtcaagaaaaataatggccaagtaattttaagaaggaaaagttacaccagtcatcaaagaaactgattctagcatcagtatgcaactttccctgcataaagcactgtatatatattttctaaagcaaaacttatttggaagaattctatggtgagtgttagggctcatggaaatttccraatttcatcaattaaaaaagtccttaatacttccaaacaattaaaaaaaaaatcctttccaaggaaaaaaatcgggttgacattgaactctcatctgcaatatggagtgacagaagatgttttgtcattataaaagaaaattttgaacttaaaattccataggcagataagcctatggataatcaagtgtgagagcaatatacaaacacataaaatttactgaagaatttttttttttttttttttgacagagtaccactctgtcacccaagctggagtgcagt

SEQ ID NO: 586317 - DNA, 508 bp, Homo sapiens
caaaacaaaactcaacaaaacagctaaggtagttggaaagactaagtcaagaaaaataatggccaagtaattttaagaaggaaaagttacaccagtcatcaaagaaactgattctagcatcagtatgcaactttccctgcataaagcactgtatatatattttctaaagcaaaacttatttggaagaattctatggtgagtgttagggctcatggaaatttccgaatttcatcaattaaaaaagtccttaatacttccaaacaattaaaaaaaaaatcctttccaaggaaaaaaatcgggttgacaytgaactctcatctgcaatatggagtgacagaagatgttttgtcattataaaagaaaattttgaacttaaaattccataggcagataagcctatggataatcaagtgtgagagcaatatacaaacacataaaatttactgaagaatttttttttttttttttttgacagagtaccactctgtcacccaagctggagtgcagt

SEQ ID NO: 586318 - DNA, 611 bp, Homo sapiens
ggtgagttaaataggagattagataaagctgaagaattaatgaactggaacatatatcaaatatattaccaagaatgcaattttattaagacataatgtggaaaataaaaatgamatatgaagaacagaatgagtcccaaaaagaaagaataaaaaaattggagaaaaggcatatttaaaagagaatatatataaatttcctatgaccaagttgaagaaaaagaataaattcacaactctaggaagcaaaacatctgaaacaggataaataaaaagaaatcaacacctatgtacaacaacagtacccaacatcaagacaaagaaaagatcttaaaagtatttatagactctgggtgcggtggctcacaccaataatcccagcagtttgggaggccaaggtgagagatcatttgagcttaggagttcgagaccagcctggcaacatggcgagaccctgtctttatttaaatatatatatatatatatatatatatatatatatatatatatatatatatatatataaataaaagaacttaaaaaaaaaaataaaaataaaaaattaaagaaacacattttacctttaaaggcatgactattagaatgacaac

SEQ ID NO: 586319 - DNA, 328 bp, Homo sapiens
cctcacaagacattatattcggaagaaacaaaatgaccctgatagtatctcttctatttctccattatcaaactaatctagactatagaaagagactagttgtctgcaagattatcaatgatggaaagtctaacatcttccttgaaattcttatttaaatttcactagcttccacctaaatcatctctatttactataatcttggtgaagacagaaaatagtagatcaacaccttcaatgcaattgaggaccagaaattgcccgttccttgcccccgtttgtcctcacctaccctgcacatgcyatgaatgttgcatctaactctttg

SEQ ID NO: 586320 - DNA, 538 bp, Homo sapiens
atatctctcttttcattattaaaatgccactcagcagaaagaagatagaagttgtcaacatgacttttcaaagctataaagttggaagtgttgcttgttaggataaaacctctagagtaaaaagtgaaatgtaaggatgttattgtaccagcttgttgaatgcatatgagaacagaggctatattgtcaatttatggcatcaaagtgggagtgaggagcactaaaatttgtcatttcagacctcagtacattttcaggggagaagatactgaacccagggaacctgaccactcagttgctagcaaaatagaaatgtattttaaatatttgaactagcagcacttttaaaataattytagatgtgccaagaaattttatgaatgaagcttggctccctttgttttatttataattataacttaataatttataattctcgtttattgaagaaaatattagtagagaggagttttctatcccaatgtgttgctcatgttagtcattgttcctcaatttcttattccacttttatctgtct

SEQ ID NO: 586321 - DNA, 430 bp, Homo sapiens
tatataaatatacataagatttacaaagttatacctaaagtttatatgtatatagaggcagattggartgctaaatagtaccttttctgaattgctatgtccctgaagttgcagtttatatatctaaactttacaatatatcatttaaataaagtgcatatcacatttttatgctttaacactaaaatatactaagtatatatttagactttatttttatattattgatgtttcagggttctttatacttttgtaagtatatatgtaaaatttatatctatatagagtatgcatatataaattctctgtgtataaatttacatatgtaagtactctgagactttataaacaaatagaagtatgtaaggatatatagatacatatatgtgtgtgtacatatatatatatacaaacacacacacacacacat

SEQ ID NO: 586322 - DNA, 430 bp, Homo sapiens
tatataaatatacataagatttacaaagttatacctaaagtttatatgtatatagaggcagattggagtgctaaatagtaccttttctgaattgctatgtccctgaagttgcagtttatatatctaaactttacaatatatcatttaaataaagtgyatatcacatttttatgctttaacactaaaatatactaagtatatatttagactttatttttatattattgatgtttcagggttctttatacttttgtaagtatatatgtaaaatttatatctatatagagtatgcatatataaattctctgtgtataaatttacatatgtaagtactctgagactttataaacaaatagaagtatgtaaggatatatagatacatatatgtgtgtgtacatatatatatatacaaacacacacacacacacat

SEQ ID NO: 586323 - DNA, 503 bp, Homo sapiens
tgcagaaagatctctatataaatccaggtaggccatgattcagagtcacctatgaatgccatttactgcctttgtcctctggaaaagtcatgaagcttctctaaacctctatctccttgctataaaatgtagatattagtagtacctattttatgcaaggatttttagagtcaaatgaaaaatgcacatacagtacttagtacagtgtgtggaaaataaatatttcctactattgatgttatttgctccaaataaacacgaaaataattaggatcctgttgatttagtggctaaatctaacatgttcggtactaaaatattacagaatacaaacagcggaataaaaaatatgtaacttctattacatcctyaaactctggagactagtgactcagttatacaattataaattatattttttaatatgtatccagtcacaaacaattctaagcacaatgctaatatatttttcaattttacttttttttttttttttttttaag

SEQ ID NO: 586324 - DNA, 608 bp, Homo sapiens
ccaataccacctgtaagctgccaaagtttgggacttgcacactctgagtcaatggcctgagctctatgttggccacatttagccacagctgggacacagagtaccaagtcccaagactgcacaaagccgcaaggccctggacctggcccatgaaatcttttttttttcctcctagacctcctggcttgtgatgggagggactgccacgaagatctctgatataccccagagacattttccccattgtcttagtgattaacatttggctcctcattactcatgcaaatttctgcagccggcttgaatttctcctcagaaaatgggtttttcttttctgttgcatcttcgtrctgaaaattttctgaacttttatgctctgcttcctctttaaacataagttccaattccaaaccatatctttttgaatacataaaactgaaagcttttagcaatacccaagttacctcttgaacgctttgctgcttagaaatttctcataccaggtgccatagatcatttctctcaagttcaaagttccacagatctctagggcaggggcaaaatgccaccagtctctttgctaaagcctaacaagagtcacctttgct

SEQ ID NO: 586325 - DNA, 639 bp, Homo sapiens
ctttgtagcctcgatcttccaggctcaagggatcctctcccctcagcctcctgagtagctggcactgcaggcgtaagccatcccacctggctatttttgaattttttgtagagacaggatctccctactttggccatgcttcagctgatacttgagcttatrcttgaggtgatgcactgattttccttgaggcagacaagctgataggggcaggggagggacagggccacagcaatttccctgctttattggactgtgaaacaggattacccaacagccagctctcaacaggagccttgtcactggtaattattggacaatggatagctcctggaacaaagtagtagtgaaattatttaaattttcacctataatgaactgtaatggtatatgggtgaaagaaaatgtactagtgggtgcaatatatcaggagttaagaaaaatgagggaaatgataaatgcaagaacaatgaaatttgacagctctgtctgggggcaactgtgtttagaaaaagataataaaatgctcttctcaatcagaataagaatatcacattttgagtgtgtgttgggggagcaaatattatgatctcgtaaagaactgtaaaatgcaagaatagtagtattcattaaatctct

SEQ ID NO: 586326 - DNA, 639 bp, Homo sapiens
ctttgtagcctcgatcttccaggctcaagggatcctctcccctcagcctcctgagtagctggcactgcaggcgtaagccatcccacctggctatttttgaattttttgtagagacaggatctccctactttggccatgcttcagctgatacttgagcttatacttgaggtgatgcactgattttccttgaggcagacaagctgataggggcaggggagggacagggccacagcaatttccctgctttattggactgtgaaacaggattacccaacagccagctctcaacaggagccttgtcactggtaattattggacaatggatagctcctggaacaaagtagtagtgaaattatttaaattttcacctataatgaactgtaatggtatatkggtgaaagaaaatgtactagtgggtgcaatatatcaggagttaagaaaaatgagggaaatgataaatgcaagaacaatgaaatttgacagctctgtctgggggcaactgtgtttagaaaaagataataaaatgctcttctcaatcagaataagaatatcacattttgagtgtgtgttgggggagcaaatattatgatctcgtaaagaactgtaaaatgcaagaatagtagtattcattaaatctct

SEQ ID NO: 586327 - DNA, 415 bp, Homo sapiens
tacactgaaacaagaaaaactatgaaacatgaatgattctaatttatttccagrtaaaatagaacatcaaagataaatggattgggagaaaagggagatgttaaaaagtatggaggagattgaactagagatgtttagaaataacaaataaaatggaaaggctggcaagatctaagtttgggtcagaaaaagatactgtagttaagaatttcataaaggatgagttccagatgacaaatttctagcttcaccctttcacaggctatttcttctgactggtgttttcttcttttctttgatctcttagcttactcctaccagttcttaaagatttagattaaaaatttagttagcatactaccctcacccttgagtgaacatttttacaaccttcatgggtaaaattaaggaattc

SEQ ID NO: 586328 - DNA, 570 bp, Homo sapiens
tatataaatcctttttatttatttattttttttgagacagagtcttgctctgttgcccaggctggagtgcagtggtgcagtcttgccttactgcaacctctgcctcccaggttcaagtgattctcctgcctcagcctcctgcgtagctgggattacaggtgcccaccaccacgcccggctaatttttgtatttttagtagagatgggtttgccatgttggccatgctggtcttgaactcctcacctcaagtgatccacctgcctcagcctcccaaagtgctgggattacaggtgtgagccaccactcctggctcctttttttgcatctattgagatactcatgtggtttttggttttagttctgattatgtratgaatcacatgtcttcatttgcctatgttgacccaaccttccatcccaagcagggataaagcctacttaattgtgatggattagattttttgatatgctgctagatttggtttgttagtattttgttaaatattttgcatctgtgttcatcaaggatgttggcctgaggttttctttttttttgttgtgtctctgcc

SEQ ID NO: 586329 - DNA, 607 bp, Homo sapiens
gaatggtattgcctagtttgtcttccagggtttttatagttttctgttttacatytaagtctttaatccatctcaagttaatttttgtatatggtgtaaagaacaggtctagtttcagttttctgcaactagctagtcagttatcccagcaccttttattgactaggagtcctttcatcattgcttgttttttttttcaggtttgtcaaagtcaaaaataggtaggggtggaaactcttatttctgagttttctattctgttccattggtctatgtgtctgttctcgtactggtaccatgctcttttgtttactgtagccctgtagtataatttgatgttgagtagcatgatgcattcagctttgttctttttgcttaggattgtcttggctatttgggtgcttttttgggtttcatattaattttaaaataaattttttagttctgcaaagaatgtcagtgatagtttaatgggaaaacttacttgggcagtaaggacattttaacaattttgaatatttttatctatgagcatagaatgtttttctatttgtttgtgtcatctctgatttctttgagaaggggtttgtagttctccttgtaaaga

SEQ ID NO: 586330 - DNA, 607 bp, Homo sapiens
gaatggtattgcctagtttgtcttccagggtttttatagttttctgttttacatttaagtctttaayccatctcaagttaatttttgtatatggtgtaaagaacaggtctagtttcagttttctgcaactagctagtcagttatcccagcaccttttattgactaggagtcctttcatcattgcttgttttttttttcaggtttgtcaaagtcaaaaataggtaggggtggaaactcttatttctgagttttctattctgttccattggtctatgtgtctgttctcgtactggtaccatgctcttttgtttactgtagccctgtagtataatttgatgttgagtagcatgatgcattcagctttgttctttttgcttaggattgtcttggctatttgggtgcttttttgggtttcatattaattttaaaataaattttttagttctgcaaagaatgtcagtgatagtttaatgggaaaacttacttgggcagtaaggacattttaacaattttgaatatttttatctatgagcatagaatgtttttctatttgtttgtgtcatctctgatttctttgagaaggggtttgtagttctccttgtaaaga

SEQ ID NO: 586331 - DNA, 537 bp, Homo sapiens
aaacctgagtcatgagtttacctatgcaacaaacctgcacatgtagcccttaaactaaaataacagttaaaatattaaaaattaaaaaaataaattccaaccaataattttatatcccaccacacaaaggtttataaatcaaagataaataaaatcttttgcagacaaacaactgttaaagaaattcatcaccactagaccacctctacaaatggtcgttaaagaagttctaagcatgtaatcaaatgagccatacstgataacacaaaatcacacttacgtacatagctcacagaacctataaagcaaatacacaaatgaaactacaaaagaaccagctaacaacttcacaatagaatcaaaacctcccatatcaatattaacctacaatgtaaattgtatagatgctcccttgataaggcacattatggcaagttgaactttttttttttgagtgtttttgaatttcattaataatatttaaaatatttctatatatttgctttccagctatagtttctcttttaaaagtttaaa

SEQ ID NO: 586332 - DNA, 484 bp, Homo sapiens
ctgctcctggctgctgaaactgatgctggacttctggcctccagaactataagagaatatatttctatttctttaagctaccaaagttttggtaatttgttatagcagcccaaaaatactaatacaaatggggcttagaataaatccagcctaaaggtagtataatgattgggaatctccacgttcsattctctaatgttacacatattagaagattttatgaggaaatagcgtacaggaaaccccacggtgtatactggagcatctgttaattatataataaatgttgataattcttagtagagcatgacatctgggtagtaatatcttatctagaatcttcattctaagatattcaaggatgcagaaaaggggccctaagtagtcttttcatacatatatatgcatagatacatttcctggtgcatcaactagagaaaccttcaggacagcccttgatatccttggtgctacttttcacagg

SEQ ID NO: 586333 - DNA, 484 bp, Homo sapiens
ctgctcctggctgctgaaactgatgctggacttctggcctccagaactataagagaatatatttctatttctttaagctaccaaagttttggtaatttgttatagcagcccaaaaatactaatacaaatggggcttagaataaatccagcctaaaggtagtataatgattgggaatctccacgttcgattctctaatgttacacatattagaagattttatgaggaaatagcgtacaggaaaccscacggtgtatactggagcatctgttaattatataataaatgttgataattcttagtagagcatgacatctgggtagtaatatcttatctagaatcttcattctaagatattcaaggatgcagaaaaggggccctaagtagtcttttcatacatatatatgcatagatacatttcctggtgcatcaactagagaaaccttcaggacagcccttgatatccttggtgctacttttcacagg

SEQ ID NO: 586334 - DNA, 484 bp, Homo sapiens
ctgctcctggctgctgaaactgatgctggacttctggcctccagaactataagagaatatatttctatttctttaagctaccaaagttttggtaatttgttatagcagcccaaaaatactaatacaaatggggcttagaataaatccagcctaaaggtagtataatgattgggaatctccacgttcgattctctaatgttacacatattagaagattttatgaggaaatagcgtacaggaaaccccacrgtgtatactggagcatctgttaattatataataaatgttgataattcttagtagagcatgacatctgggtagtaatatcttatctagaatcttcattctaagatattcaaggatgcagaaaaggggccctaagtagtcttttcatacatatatatgcatagatacatttcctggtgcatcaactagagaaaccttcaggacagcccttgatatccttggtgctacttttcacagg

SEQ ID NO: 586335 - DNA, 567 bp, Homo sapiens
ttgcgtttcccccgtagaaagagtttacaaatggtagttcagttccaggtcagcccagaagagcttactggacaatagtccagctgaggtgccaaaaccacaggagtccggggatacacaagccctgagttttcttggaagaaagaaggacaaagggattatctgtttcttttctccttagactccctaagtcccctkctctacaccacctctctcagaggtaagagtaatcctagaaaaccttcaactagtttttttgttttaatttataagtaaagtacatacaaattaaaaatgtgctcctggaaaaaaaaaaatcccatctcagacccatatcctcaggctcttttcaaagagacaaagtcactgtttattacatttcttccagaaatactctctgcatatactcaaacgtatgcatgcatatatcacctttcaaattataggcagaaatggaagcatgcagtctgttgtgtacttttttttcaactattttaagttcagaggtacacgtgcggaatgtgcaggtttgttacataggtaaacgtgtgtcatagtggtttgctg

SEQ ID NO: 586336 - DNA, 400 bp, Homo sapiens
gaattctctctggcacggaggtctcggtgtctgacccagtgagggacctcccatatggggcctccagccacccccgccagtgtcctggggctgacagagatttgaattttccctagcatggagttcttgaggtcccacccagtgagggttctcctaactgggccctccggccacccctacctgtgttctcatgctgacagagattcgagttctccctggcatggaggtctccagttcctgcccagtgaagttcctttcaactcgggcccccagccaccaccccaccccctcctccagtgtcctcaggctgccagagatttcaattatccctggcatggcrgtctcaaagtcctgcctggtgagggatcaccgcactgggacctccagtcactcctgctgg

SEQ ID NO: 586337 - DNA, 581 bp, Homo sapiens
ggaacgaatctcagaacttgaagattggttctctaaaataagatggacaaaaataaaaaagaatgaacaaaaccttcaaggaggatgggattatataaagaggccaattctacaaatcactggcatctctgaaagggaggtggagaaatcaaacaacttggaaaacgtagttcaggatatcatctttgaaagcttccctaaccttgctagaaaggccaacagtcaaattcaggaratacaaagaactcctacaagattctacacaagaccatcctcaagacacataaacatcaggttttccaaggtcgaaatgagggaaaatatgttaaaggcagccagagagaaagggcaggccatctacaaagggaaccccattaggctaacagcagatctctcagctgaaatcctacaagccagaagggattgggggactatatttaacattattaaagaaaatcttcaaccaagaatttcatatacagctaaactaagctttctaaatgaaggagaaatgagatcatttacagacaagcaaattctgaggtaattcattaccaccacatctgccttacaagagattt

SEQ ID NO: 586338 - DNA, 544 bp, Homo sapiens
tcactgagtttgcctttttccatcrgctgccaggaagctcagatctaagttctgtgttcaatcatgacaccttcccccaaggaaggcttccttcctgttacacttcttaattccttggcattttcttggagcttactcttattgtggtgacttttggtcttgtgcttcttcctgtaaatggccacaaattatcttaggacaagtttgctgggaccctaattccaccagtcacccctgccaccttcacctgtgctgaaagaatcccccacccataaccccttctgttcagtttccctggcctggcagacttggtttcttgctcatagcttagagggcaagtatttttgtgtttaaaaatgcagagggtctaagtcagaaagatgaatatttacatattattaaagatccttttatttgtaagtgacaagaacctgatcaaattagctggagggaaaaaaggggatcatgctggaaatctgttggttcagtaattgaaaagtggagggggtgggcttcaggcacagctgcatccaggtgatcatgt

SEQ ID NO: 586339 - DNA, 309 bp, Homo sapiens
gaccacacaggcaaaaaacaagaaagagtaaagctttgcggggacaggaggccgggcagtcrggaggcccagtcccagcgagcatcttcattgtccccagggaccttgcagttagtgctgtgatagaatgacaaatgactcccctctaaaaccactctgaatagtcaaaacagcgagtgttaacctgtgagcaccaggccacacagtgcacaagcacaatgcaagggtaaaagccagcctggcctctgccccggctacctgccatgaatgacaaatcaatgggatctgaattaatgagaatcactggac

SEQ ID NO: 586340 - DNA, 365 bp, Homo sapiens
ctggttgagtcactagcaaatttcaccagccacatgtgtactcagcgacaaaaggttgaatgaatagaaagatttttaaagtcactcatgttttaccttttagcatgaaagaaaagttatgaagaatctgactcagtacagaaatttctaagaagcawctccctcaagacagatccgagtgaaaccaacaagcatgtgcatacacctgtcagaagcacttgatcaaattacaggtttatgttcggcccaggacaatgtgagagccagtgttaaattccccaacaggcacctgtcactcttcttttagaccaaaaccaacataagagctgtccagagaagaaaaagagaagagcacatcagaggaa

SEQ ID NO: 586341 - DNA, 353 bp, Homo sapiens
ctccctctacttctcctctcttcgtcctctctcctgctctctttctggttgagtcactagcaaatttcaccagccacatgtgtactcagcgacaaaaggttgaatgaatagaaagatttttaaagtcactcatgttttaccttttagcatgaaagaaaagttatgaagaatctgactcagtacagaaatttctaagaagcaactccctcaagacagatccgagtgaaaccaacaagcatgtgcatacacctgtcagaagcacttgatcaaattacaggtttatgttcggcccaggmcaatgtgagagccagtgttaaattccccaacaggcacctgtcactcttcttttagac

SEQ ID NO: 586342 - DNA, 618 bp, Homo sapiens
tattaagaaaattgacattaaaaaagttaagtaaccatttacctttcaatttgtaaacaataataactatattggaggaatataagattaatactagtatttcttcagtattgtttttcagtttgcagatctttaaaaacaatgaacatgtcatacttttcagacaatgaacatgtcatatttttcaaaggatgttgtggactttgaaatcatatatttttttttwaattttttgagtcagagttttgctcttattgcccaggctggagtgcagtggcgtgatcttggcttaccgcaacctctgcctcccaggttcaagtgatccttccgcctcagcctcctgagtagctgggagtacaggcatgtgccatcacacccggctgattttatatttttagtagggatggagtttctccatgttggtcaagctggtctcgaacgcccaacctcaggtgatccgcccgcctcggcctcccaaagtgttggggttacaggtgtgagccaccgcgcccagttgaaaccacagattttttaagaaaaattatgggccggggtaggaagaggttggttaatggatacaaagtcacagctagatggatggaataagttctaatgttc

SEQ ID NO: 586343 - DNA, 576 bp, Homo sapiens
tatttcttaaataagaagacttaaaagttgaatttattccttgacctatgggctatggaatggatgttgtgttagcaggcatgaaaactacagtaatttcttgcacatttcaatcaaagcttttagttgaccgggtccattgtgaatgagcagtcacatgttaatgaaagcattttttttttttttctgagcagtaggtctcaactgtgggtttaaaatattctgtaagccatgctgtaaacagatgtgctgtcatccaggcttttttttttccatttctagagtgcaggcagagtagattgagcataattcttaaggtcctaggatatgcagattggtaagtgagcattggcttcaacttgaaatcaccagctacattagctcctactaagagagttagcttattcttygaatctttgaaactaggcattgacttctccttcctagagagggaatccatatatgtcttctttttccaatataagtctgttccatctacattaaaaatccattgcttagtgtagtgttgggagcaggccaccccatatactggcccccaaactggccataaacaaa

SEQ ID NO: 586344 - DNA, 568 bp, Homo sapiens
actggtttgctgttaataaatacgtgggtaaatctctcagctctgaaggctgtgagacccctgatttcccactttatgcctctatatttctgtgtgtctgtctttaattcctctagtgccactgggttagggtatccctaactgagctggtctcrgcagtgtagccaccttcattagtgtctaatgtgcacaggtgactcttaggtgtcttgcattactgtttgtcttcagtaaataacttcaagataaatgactgattctccaggtcttctttcagggaggctcaggacttccctatgctttattttcctttgcatgaatgatcttagctagaaatcctggacaacctgctgcagctttgacatcagcacttgttgcctcaccttgaacttttatgttgtaaagatggcttccttttttaagccacatgagccaacctcttctagattcaaacttttcttctgcagcttcctcacagctctcagccttcatagaactgaagtgagttagggccttgctctagattaggctttgacataaggaaacgttgtggctcatttgttcttta

SEQ ID NO: 586345 - DNA, 521 bp, Homo sapiens
ctcaggtagtatctttatagcagtgtgaaaatggactaatccactgcctaagccttttcaagaatttcctcttacytacaagactgaagtccatgcttactaacagctccaatataacttgatccctatcatgctttatgttttctctttttaccatctactttgcacttaatcagcatccacactgacccacttataattatcatgcccaacatgatgttccttgcttttatgtttttgctaagtatcaatacttctccctggaatgctaattctcacatgtgtaaaatttctgtttatcctggaagagtgaaagtttctctgcctctcacttttacttcaactcctatgacatataactacagattgagttattttattcgcttctttgctccatgttcttttcctccataggagactcatttcaggcccatctcttctctcctaagatctggcttctgaaattatcccttgctattgtccacctccattagatatttcccttcagcttccaaatgtgt

SEQ ID NO: 586346 - DNA, 521 bp, Homo sapiens
ctcaggtagtatctttatagcagtgtgaaaatggactaatccactgcctaagccttttcaagaatttcctcttacctacaagactgaagtccatgcttactaacagctccaatataacttgatccctatcatgctttatgttttctctttttaccatctactttgcacttaatcagcatccacactgacccacttataattatcatgcccaacatgatgttccttgcttttatgtttttgctaagtatcaatacttctccctggaatgctaattctcacatgtgtaaaatttctgtttatcctggaagagtgaaagtttctctgcctctcacttttacttcaactcctatgacatataactacagattgagttattttattcgcttctttgctccatgttcttttcctccataggagactcatttcaggcccatctcttctctcytaagatctggcttctgaaattatcccttgctattgtccacctccattagatatttcccttcagcttccaaatgtgt

SEQ ID NO: 586347 - DNA, 616 bp, Homo sapiens
ctttccaacttattttatgaggccagcattggcctaatagcacaaccagataaaggcattaaaagaagcctacagcaactcaagatttagccaatcaagaaatagtgctgaaacaattggatatctaaatgcaaatcaaaaccccaaaccaaaagtattttttgaaatttttaaacattatgttttttaccatataaaatattaactccaaatggatattcctaaatataaagccaaaaattataaagcttctgcaagaaaacacatgagaataatctttctcatcttaaattagrcaaagatttcttagatttaggaccaaaagcatggttcataaaggatacattgataaactgaactttattaaattatgaacagtcttctgttttctggaagacattgttaagaaaacatggacacggccgggcacagtggctcatccttgtaatctcagcactttgggaggccaaggcaggcagatcacctgcggtcaggagttcaaggccagcctggccaacatggtgaaactctgtctctgtgaaaaatacaaaaattagccaggcttgatggcagatgtctctaatcccagctactcgggaggctgaggcaggagaat

SEQ ID NO: 586348 - DNA, 564 bp, Homo sapiens
gtggtgctattgtacatagtatcttttttaaaaaaaattgtatctgaattgttttagtactatgtagaaactttttatatagatctttcatgttgtaattttctacatttaaatatcaatagtctatggaattttttatgtactcaattatttcgtatgaaaataatgaccctataattcctatctttccaattcttataacttttattttttaaaaaaacttcctttgcctgttttctagaatctccagmacaatgatgactaaatataaggacaatgaacagtcttgtcttatctataatgttagctaaaatttgttttgtagattctctttattaggttaagaaaactctgcctttctatttcttgttgctaagcttttaaattaatggagggtgattgattttccttaaaatatgaagataatgatatgacttttctttatttttctgataaaagggtaaatcacatgaatcaatttttgaatattagctgactttgcatttctttaatgtaatttttaaaatatgttattttgaatttgactgctatcattagtttggt

SEQ ID NO: 586349 - DNA, 603 bp, Homo sapiens
tctctctggctacaatttttgctcctccaagtgctaaggaaaaaaatagtttgtactctctgctttctcacaagagaaaatggcatggacctagggtctttagaataatttgttactcctacctcagctctgtgcccacatttctcttgccctttgagcaatggggactccaatctccttccaacaagactcawttcataattttcttttctttttcctttttttttttttttgagacagagtcttgctctgtcacccaggctggagtgcagtggtgtgatctcagctcactgcaacctctgcctcccgggttcaagccattctcccgcctcagcctcccgagtagctgggattacaggcgcccaacaccatgcctggctaatttttgtattttttagtagagatggggtttcccatgttggctaggctggtcttgaactcctgacctcaagtgatccacctgcctcggcctcccaaagtgctgggattacaggcataagcaccacacctggcctcataattttctttctattcacatctccaagggtaatgaaatgtttcctacacttctgttaaaaagaacttctgccatgagaaagaatt

SEQ ID NO: 586350 - DNA, 611 bp, Homo sapiens
atttttttttcagcaatgttttgtagtttccagcataaaaggcttttgcctccttggttaaatttattcctaggtattttattctttttgatgcaattgtaactagaattcttttcttaatttccttttagattattcactgctagtgtatagaaatacaaaaaatttttgtgtgttgattttgtgttctgcaactttgctgacttagtttattagctctaacagtgtgtgtgtgttggggggcctgggkagagtgtgtattctttatgggtttctacataagaattatatcatctttgaatagagattgttttacgtgttcctttcccattgggatgcctcttatttctttttcttgcctgattgttctggtgagaacttctagtactatgttgaatagaaatggtgaaagtgggcatttttctcttgttcttgatcttaggggaaaagcttttgtttttatcaccattgagtatgatgatagctgtgagtttttcctatatcagttttatcatgttgaggaagttcttttctattcctagtttcttgagtgttttgtcatggaacattgttaaattttgtcaaatgcttcttttgcagccactgagatc

SEQ ID NO: 586351 - DNA, 589 bp, Homo sapiens
cattataggccctcaacagatgtttgtgtaattaatgaatagatgaatctcagcattagataggttgatggaattatataattttaatttgtttgctctctacatttgaatgagcttttaattgcttcttcgtaagccctttgaaaacctaagcacaacatttagaattatttgggcttgacgtaaagaagaaagccaaggtaattgaaygagcactgatacctgacccaggttcttttcatattttgtttgagacaacccatgacttgccttctcgggaataaaagaaagttctttaattttatgtgaaaattggcaatatatacttaaataaattatttggaaatttaatgaggaagtattaatctctttaacctttttcagataaaattgtgtctctgccatgggcagaattcagacacttaagtgccttctggaaaaatctatctattctgcctttattaatagaagtaaaattggacccacaggtataaggtacttagagaaaatatgaaattatttagtgttagaagtaggctgacttgaaaaattttgtttgctgttccagaattataagacaccgttttgc

SEQ ID NO: 586352 - DNA, 489 bp, Homo sapiens
ggacacacacacatacacacacacacacacacacacaacaagacacagtagtgttataaagtatacatatcttttccacatgaaagttattttggtttctatgttgttatatttcatttgaatataattcttgccttgacctgctaaattgatttcattaccctctaaaaagtaattacctctgtttgcaagcactagtttgatagaactaccaagttgaattgtctggttgccaaatggaaagtagatgggagggggcaaaactgatagcaaggagctcattctaaggctctccctataatttagattgatgagtggattgataaatttgagktaacagaatttcatgattgattggcaatgggggtggaaaaaagaaggagtcaagaatgatgtaaatttcagcttggcttctggggcaatggtggtgctgaagcttcttggtttcactttcacctgtctctttcggttgactgctctgaaaagtcc

SEQ ID NO: 586353 - DNA, 577 bp, Homo sapiens
agcaagttttgctaagctttatataaatatattaaagcagggaaagaatttgggtctttcctgttaattctgttgcctattcactccttttctactgaatctatatcacattgtttggtcctctgcaactgtgaaaaaaactactcttcagtgaagactgagaaagccaaaagttagaagaaatgttttgggtttaaaaacaattttttttactcccccagaataaagttttttggaggaaaaaagaaataaaatttaaggtgatttcaacttatacagttcaatcttatatttgctgaacttacctaaatccctagggcatcacttttcaatgactgtaaaagacatacagtttcaagctcttaggaaaacatgaacacacttacccggcaaaaggatgaactaccaccgaccgtgggttatttaaatactgaactacygtgcgtctcgttttatcagctagcctcatgacactgatactcttgtaatgagagtctgtccaatagagattctttgaaatccaatcaaaagccaaactttcaacattttccaccctgttagctgcgagaatttctct

SEQ ID NO: 586354 - DNA, 560 bp, Homo sapiens
tttctaaattcccaacagcagaagactggctatgtaaattatggtacrtacatattataaggtaattaaacctgtttgcaaaggaatatttatcgacatattgaaatattttcaatttattgctaattttaaaaataaggccacagatatatagtacagcatttcctattaacagacttaatgaggtttggggaagtgactatgacaatagtcaattctaaatttgacaaaaactaaatgtagcacttccataaaaatttcaatgactttcaagatacaccttttattttacaacagtttagaattacagaaaaattgcaaagatgggatagagatttgaaccataccccacatccaatttctaggattattgacagcttagattatcatgaactcaactccagggcattttccagatttttctgttacacaacctaattctggacaccacgtcacatttagttgtcatgtctccttcggctcctcttggctgtaacgagttctcaaatttaccttgttttttatggccttgacagttttaaggaatacttatcagaaat

SEQ ID NO: 586355 - DNA, 636 bp, Homo sapiens
aaataatttctaatagttaatgtatttataatttgtaagcctccaaatactctgattaaaatggttatagttttatatatgagatgaaaatataaaataataagtaraaaacacataataccatacctatcatgtagcaaatgttcagtaaattttagtttcttcatttttccttcacatagtactgtgtaggataaacacttaagattgaataaaatgtctttaaatcatcttagaagttctatgtcttcctgacatagctttaatttgttattgtttccaaaaataatgaattccaagaagcggtgattaagaagtgtttctataatcatttattgaaggtgtttaaaacattatcaagcatcttggaaatctagttttcatagtttggattttaccagtaataaatatatgtttgttgtacacactctatagaaagtcagtatctcaccccccaaaaatttgaaattattaacactttacaactgctcaaagaaatttcatttgggcaaatattacttaacaaaattgaaatgtagataaaataacaaccttattttgtaactctctttgagttagtaatatgattaactgaattatgctatctttaaaaattgagaaaggaggcagaaaaag

SEQ ID NO: 586356 - DNA, 509 bp, Homo sapiens
ataaccattttgactggtgtgagatgatatctcattgtagttttgatttgcatttctctgatgattggtgatatggagtattttttcatgtttttttggccaattgtatgtcttcttttgagaagtgcctgttsatgtattttgcccacattttaataagattatatgtttttttcttgttgatttctttaagttctttatagatcctggatattagacatttgtctatgcatagttggtgaatattttcacccgtaatgtgggttgtctgtttactctgtttatacttcttttatgtacagaagctctttagtttaattaaattctacttgatagtttttgtttttgttgcaacttcttttgagaacttaatcataaattatttcccaagtttgatgcccagaattgtgttttctacatttccttctaagtttgtaatagtttgagggctttcatttaaactttaacctacttgaggtaatttttgtatgtaacgaaagggaaaggta

SEQ ID NO: 586357 - DNA, 518 bp, Homo sapiens
tattcttttttcaattcctctagttagtgtaacttttaaaagtacactttttaaccttcagtctttgtgatayatctgaatttcccctcttttgtgatatatttgaatttcccctcttttctttatctatgaaaagagtcaaactctgtaaaatatttgaagagatttattctgagccaaatatgagtgatcacagctcatgacacagccctcaggaggtcctgagaacatgtgtccaaggtgggtcagggtgcagcttggttttatacattttagggagacatgaagcttcaatcaaacacatttgagaaatacattggtttgctccagaaaggcgggacaattagaagtggggcagagggtagggggcacttccaggctataggtaaatttaaatattttctggttgacaatctgtggagtttgtctaaagacctggattcagtagaaaggaataataaaagattgtggagacaaaggttcttttgaagtccaatagtggctgcccttagagacaa

SEQ ID NO: 586358 - DNA, 405 bp, Homo sapiens
gaattcaataaaatttttcaataagtgaatgaaagcctgaaaaaatcagttaaatgaataaatgaatgaatgccaccttaactctatggaactataatagatgataaatcacaggcacagtcaagagtctcatctgataaattgcttctacaatacataaccaccacaacttacccataccacaaaaatagaacactttaaagactacccatatggtatctattttgattacccaaacaagatattattactgacttcattgatatggctggtgaaraaaaacttaatttggccttcttcattttataaaactagcacaggggggtttccatcagttgctgttcttaagaataagacatattttgagagaatcttcatgaagaaatctgtgaagtcacgataaat

SEQ ID NO: 586359 - DNA, 590 bp, Homo sapiens
tcaaaagcacagtgagacaccatctctcactagtcagagtggtcattattaaaaagtcaaaaaacaacagatgctagcagggttgcagagaaaagggaatgcttatatgatgctggtgagaatgtaaactagttcagtcactgtggagagcaatatataagtaaagaagtatataatatacttcattatatatagtatatawaatatatatatataacagaagtatatactatatataacagaagtatataatatatatagcagaggtatatataatatatatatcagaagtatataatatacttcagtcactgtggagagcaatatataagtaaagaagttctaccataaagacacatacacttgtatgttcatcacaacactattcacacaatggcaaagacatggaatcaacctagatgctcagcaatggtggcctggataaagaaaatatggcatatatacaccataaaacactacacaaccataaaaaaaaagaatgaaatcatgttttttgcagcaacatggatgctgcttggggccattatcctaaacaaattaatgcaggaacagaaaaccaaataccacat

SEQ ID NO: 586360 - DNA, 590 bp, Homo sapiens
tcaaaagcacagtgagacaccatctctcactagtcagagtggtcattattaaaaagtcaaaaaacaacagatgctagcagggttgcagagaaaagggaatgcttatatgatgctggtgagaatgtaaactagttcagtcactgtggagagcaatatataagtaaagaagtatataatatacttcattatatatagtatatatwatatatatatataacagaagtatatactatatataacagaagtatataatatatatagcagaggtatatataatatatatatcagaagtatataatatacttcagtcactgtggagagcaatatataagtaaagaagttctaccataaagacacatacacttgtatgttcatcacaacactattcacacaatggcaaagacatggaatcaacctagatgctcagcaatggtggcctggataaagaaaatatggcatatatacaccataaaacactacacaaccataaaaaaaaagaatgaaatcatgttttttgcagcaacatggatgctgcttggggccattatcctaaacaaattaatgcaggaacagaaaaccaaataccacat

SEQ ID NO: 586361 - DNA, 590 bp, Homo sapiens
tcaaaagcacagtgagacaccatctctcactagtcagagtggtcattattaaaaagtcaaaaaacaacagatgctagcagggttgcagagaaaagggaatgcttatatgatgctggtgagaatgtaaactagttcagtcactgtggagagcaatatataagtaaagaagtatataatatacttcattatatatagtatatataatatatatatataacagaagtatatactatatataacagaagtatataatatatatagcagargtatatataatatatatatcagaagtatataatatacttcagtcactgtggagagcaatatataagtaaagaagttctaccataaagacacatacacttgtatgttcatcacaacactattcacacaatggcaaagacatggaatcaacctagatgctcagcaatggtggcctggataaagaaaatatggcatatatacaccataaaacactacacaaccataaaaaaaaagaatgaaatcatgttttttgcagcaacatggatgctgcttggggccattatcctaaacaaattaatgcaggaacagaaaaccaaataccacat

SEQ ID NO: 586362 - DNA, 591 bp, Homo sapiens
tttgagaaatagcattcttgaataatttggaataatctattataaatatgtttgagtgagagtgtgtgtgtgttggaagggtggaggagaggtatagtttgcagctgttgtttttgctttctggcttctgctgctgagctgtttgaataaatcctaatggtgacagctgtccagcaattaggmatctctatcttacttataaaataatcttactagaaaataatcttgttttttaatctgtctataatcagcttttaaaatttccataattaattccatggtatgcagtttttaaattgacagataattatatgacggaactacaagaaagaaggcaaactacatttgaaagcatatttttttccccagaaaaccagatataaattagataataaaaccctctttcaatgtccagcaaactgtctttaatgtaagttatagttcttcttggaccagtgctgagatcacagtgtgagttagacataatttattctgtaatatttgctaaataaacatatatacacactgcttttaggaaatgtaaattgagaaatattaaaagctaataatattttctccaaactagagtac

SEQ ID NO: 586363 - DNA, 539 bp, Homo sapiens
atacgtactatattttctctatccattcatcctttgatggacacttaatttgattccaaatcttggctattgtaaatagtgatgcaataaacatggaattgcagatatctcttcaatccactgttttcctttcttttgaatatataccctggcagtaggattgctggattatgtggcagctttatttctagttttctgaggaacttttgtactgttctccatagtaggtgtgctaatttacattcccaccaacagtgtacacgggatcccctttctccacatccttgtcagcactcattatcrtctgtcttttgaataaaagccattttaactggggtaaaataatatctcattgtagttttaacctgcatgtctctgatgattaatgatattgagtatttttttgtatacctgctggccatttgtatgttttcttctgagaaataactgttcagatcttttccccatttttaattgcattatttgatttttttcctattgagttttttaaggtgattttatattctggttattaatcc

SEQ ID NO: 586364 - DNA, 539 bp, Homo sapiens
atacgtactatattttctctatccattcatcctttgatggacacttaatttgattccaaatcttggctattgtaaatagtgatgcaataaacatggaattgcagatatctcttcaatccactgttttcctttcttttgaatatataccctggcagtaggattgctggattatgtggcagctttatttctagttttctgaggaacttttgtactgttctccatagtaggtgtgctaatttacattcccaccaacagtgtacacgggatcccctttctccacatccttgtcagcactcattatcatctgtcttttgaataaaagccattttaactggggtaaaataatatctcattgtagttttaacctgcatgtctctgatgattaatgatattgagtatttttttgtatacctgctggccatttgtatgttttcttctgagaaataactgttcagatcttttccccatttttaattgcattatttgatttttttcctattgagttktttaaggtgattttatattctggttattaatcc

SEQ ID NO: 586365 - DNA, 419 bp, Homo sapiens
gctttgggtcaatgtccaggccagtatctgacctcgaacttctctctaggtcttccacctttacttagcacaggcctgagaacagtccagccaggggtctaggagagaaagtggctgagactgtgtgagacggggatggggcagaggacggatagggtagagggtggattacagtgagtttctggctattgactgctttcacatgagcagctcatttctgtgccaaccatttgactagtaagttggcagaagccctgcctgttggtcacattctggcccatgctacaaggccacctggcaggctcaggctgcagcacggcaggctgtgtgcacacggctatctcccctagtcygtccccagagctgtctgtgcagtcctgagctcccatgtaagccagtgctacttttgtgtgaagaag

SEQ ID NO: 586366 - DNA, 478 bp, Homo sapiens
cttcccacaagtctcctcatcagaaacctccaaattacctagctagctgctttctctgtttacatccgcccaatttgcaatacactctttttcgttcataaatctaatatccatattggtggacttgattctttgacctccacattcatttcttcattattttctgcaccaccgtattgtracatctgtacaatcccattctgaaacatgtgaagataaggttttgctttattaaaatgttaaatgtgtcagacacttgactaacgtgtacaaattccttcttcacaaaagcagccccatggtctcctctctcccatagacactgtttcacagctgttcttcactcacatcagtttgagtatctatcatctctcattttgtctctatgctttcaccttatattatgagttattatcataggcttagcagcctatcttacctattttcctctccaggagacagtactgagcagtaaatt

SEQ ID NO: 586367 - DNA, 605 bp, Homo sapiens
tgcactccagcctggatgacaacagcaagacaccgtctaaaaaaagaaaagaagaagaagaagaagcaagggcaacccaaaayaagagaaaagagaaggaaatttcctgactgtgaagggagaccccaagagtgcagccaagtatagcggcttacagttgaccatcccggatgacccaaacagccttcacaaagcagatgaaattgatgaagtgggatacccactgtgctggaaaaaacagatttcaccactttggggaaaacaaaatatttgggcaggcaaggaaaagtaatcatacataacacactgtgtggttcttgcacagttacaattctgtaaaaaacaagtaaaacctaactaaaaagtaactgtactgggacaattaggagaggagagaggagggtgaactgtgagagcaaggtaaagactgagcaaatgttcatcttccatttatccattcagaattacaattacctaaagttgtcagaaaaagaaaatctgaaagaattttaaaagcagctcaagatagctcgcaggttgaacacacaggtaaaagaaactaggcctatgaattaaagatgaactctcacttgcaaggctggaat

SEQ ID NO: 586368 - DNA, 546 bp, Homo sapiens
agcagatggagcttttcacttgagagccacagaagcaatatatgcatgcagttcaggtacagagatgacatcacccttcacaatagcattacctcaccccctaagcataggaatgagtcacccgatagtcagctgcaaatctcytggtagaaaaaaatgtaggttacggtgatgcattttcacatcccactgatttgttcatgtaagcagctatttgttctgattcgctgctctgcatctcaaacttattgtgtgacttgcttctcccttaagtcattttaaaaagtctaaatttttgtatttattttctttattgttttttccctgttcataatttaaaataaaaggtgctagcaaactcccagagtctatctgtgtaatcataaagcagtttagtaaagtaattccgtttctgtttcttaacaaaacctaagtggtacaatgaataccagtggcacttgcaatcagggacttctatctgaaattaaaatgtgaaaataactttaattttaaagtggaggaaggaatttcatatgagaaaataaa

SEQ ID NO: 586369 - DNA, 616 bp, Homo sapiens
cctgacaatgattttgaagttgcagagttttttatgtcttcttaagacctcacaggaaattctaataccccattttgaaaaagaaccagtgaccaggtgttgaaacttcagtgagtatgtactaaatcagtgcactgtagggatggaaaaaatgagatacatttccttatccatcataagctgacactcccataacaaaagactggttaaaaagagaaaaggataacacatatatttaatcagttttttgtttgtttctattttttttttttttttttttttttggagacagagtctcactctgtcacccaggctggagtgcagtggcacgatctgggctcactgcaagcccagccttccaggttcatgccattctcctgcctcagcctcccgagtagctggggctacaggtgcccgccaccacacccagataatttttttatatatatttttattagagacagggtttcaccrtgttagccaggatggtctcgatctcctgacctcatgatcctgtgatctgcccgcctcctgacctgtgatccgcccgcctcggcctcccaaagtgctgagattacaggtgtgagccaccgcaccaggcctttaatcagtttta

SEQ ID NO: 586370 - DNA, 616 bp, Homo sapiens
cctgacaatgattttgaagttgcagagttttttatgtcttcttaagacctcacaggaaattctaataccccattttgaaaaagaaccagtgaccaggtgttgaaacttcagtgagtatgtactaaatcagtgcactgtagggatggaaaaaatgagatacatttccttatccatcataagctgacactcccataacaaaagactggttaaaaagagaaaaggataacacatatatttaatcagttttttgtttgtttctattttttttttttttttttttttttggagacagagtctcactctgtcacccaggctggagtgcagtggcacgatctgggctcactgcaagcccagccttccaggttcatgccattctcctgcctcagcctcccgagtagctggggctacaggtgcccgccaccacacccagataatttttttatatatatttttattagagacagggtttcaccatgttagccaggatggtctcgatctcctgacctcatgatcctgtgatctgcccgcctcctgacctgtgatccrcccgcctcggcctcccaaagtgctgagattacaggtgtgagccaccgcaccaggcctttaatcagtttta

SEQ ID NO: 586371 - DNA, 559 bp, Homo sapiens
ttgataaagaaaatgatgacatgacagagttggttaaaaaaataattgtaattaaaagagaagagaaaaatcatattttcatatatcaaaattactgtgattttcaaaaatcattaaactcttggttgaattatctcaagagtcctttcctagtctcayagacttgttagtctcatttatcttattcacagaataagaaagaagaatttgctatttgttcaatgaaaacacatacatatcttaggggacagaaagaaatcttagaaattagtctttgattatagtccagaaaggatcttgagaaaatcagccaaatagatggaaagaaagagtaatatagcactctaggttattttctctatttctttttttactgagagtttatgtgtgtgggtttagtatctcccccagcccccaccccatcttggttttccttgattttctgcccaccgttttttttgttttgttttgttttgtttctgctgggagtgggggcagagtctcgctctgttacccaggctggagtgcagtggcacagtcttgacttactgcagcctca

SEQ ID NO: 586372 - DNA, 604 bp, Homo sapiens
tggggcctgttgggggctgggggactaggggagggataacattaggagaaatacctaacgtagatgacagttgatgggtgcagcaaaccaccatggcatgtatatacctatgtaacaaacctgcatgttctgtacatgtatcccagaacttaaagtataataaataaatatgtatatatatatttcattctagtgattatatagaaagcacatgacatctgaaagtgattaaaggagggaatctaatatatcaaatatatcataagtatattttttcatgtaaastttatatatttatgtttatgtatctcatatatataaactttatattaaaatattttaatataagttttttggcttttgtacctcagaatttagggtggaaaaaggagagagtgaatatcatatttgagaatagtttgaaaactaaaatcagaagctacagaaagttacatgtggagtatgtaggagctgctttgagcccagttcttcattctgttatagttctcctaatatttcctcccagggcttcctctgtatcataagactgggaactactcccctgttgagactcgaagcctctccttctggaggaaggctgtgt

SEQ ID NO: 586373 - DNA, 604 bp, Homo sapiens
tggggcctgttgggggctgggggactaggggagggataacattaggagaaatacctaacgtagatgacagttgatgggtgcagcaaaccaccatggcatgtatatacctatgtaacaaacctgcatgttctgtacatgtatcccagaacttaaagtataataaataaatatgtatatatatatttcattctagtgattatatagaaagcacatgacatctgaaagtgattaaaggagggaatctaatatatcaaatatatcataagtatattttttcatgtaaactttatatatttatgtttatgtatctcatatatataaactttatattaaaatattttaatataagttttttggcttttgtacctcagaatttagggtggaaaaaggagagagtgaatatcatatttgagaatagtttgaaaactaaaatcagaagctacrgaaagttacatgtggagtatgtaggagctgctttgagcccagttcttcattctgttatagttctcctaatatttcctcccagggcttcctctgtatcataagactgggaactactcccctgttgagactcgaagcctctccttctggaggaaggctgtgt

SEQ ID NO: 586374 - DNA, 591 bp, Homo sapiens
tcctgcagcaccatgctgttatataggctgaaagaggtttcctcactatgcaagagtcctccttcattaatgcctctttaataaaaactcttctcaaggccgcttcacttccaaaggaagctggagtcattcactgcaaaggccatcaaaaggcatcagatcccattgctcagggcaacgcttatgctgataaggtagccaaaaaagcagttagcattccaacttctgcccctcatggccagtttttctccttctcatmggtcactcccacctacttccccactgaaacttccaccatcaatctcttcccacacaaggcaaatggttctcgaaccaaggaaaatatctccttccagcctcacaggcccattctattctgtcatcattccataacctcttccatgtaggttataagcagctagcccgcctcttagaacgtctcatttcctttccattgtggaaatctatcctcaaggaaataacttctcagtgttccatctgctattctactactcctcagggattgttcaggccccctcccttccctatacatcaagctcggggatttcccctgcccaggactggcaactt

SEQ ID NO: 586375 - DNA, 591 bp, Homo sapiens
tcctgcagcaccatgctgttatataggctgaaagaggtttcctcactatgcaagagtcctccttcattaatgcctctttaataaaaactcttctcaaggccgcttcacttccaaaggaagctggagtcattcactgcaaaggccatcaaaaggcatcagatcccattgctcagggcaacgcttatgctgataaggtagccaaaaaagcagttagcattccaacttctgcccctcatggccagtttttctccttctcataggtcactcccacctacttcccyactgaaacttccaccatcaatctcttcccacacaaggcaaatggttctcgaaccaaggaaaatatctccttccagcctcacaggcccattctattctgtcatcattccataacctcttccatgtaggttataagcagctagcccgcctcttagaacgtctcatttcctttccattgtggaaatctatcctcaaggaaataacttctcagtgttccatctgctattctactactcctcagggattgttcaggccccctcccttccctatacatcaagctcggggatttcccctgcccaggactggcaactt

SEQ ID NO: 586376 - DNA, 597 bp, Homo sapiens
gggcttgtcgtccaagattatcaaggtagtacctctatgagtctgtaagaatcacattatggacttggggtggtccctaaggcagacacagcttagatcacaacatccaagttctttcaaatatctgggaagtgttcccaaaaaggatggctacaaataagcctagaaagtgaagactacaataaacacctaaatattcaacacccagacactgaagaacatctactgacatcaacaccatccaggaaaacatgacctcaccaaaggaagtaaataaggcactaaggaccaatcctggagaaatggggacttttccaacaaagaattcaaagtagctgtgttgaggaaactcaragaaatacaagataacacagagaaggaattcataattctatcacacaaatttaacaaacagattgaaataattaagaagaaccaagcagaaattctggagttgaaaaatgcaataggcatactaagaatgcatcaggactctttaataacagaattgatcaagcagaagaaatcattattgagcttgaaaagaagctatttggaaatacaatcagaggacataaaagaaaaaagaatcataaa

SEQ ID NO: 586377 - DNA, 567 bp, Homo sapiens
actctatgtatcttctaagagaaacaaatggcatgaatcatcagcctaattatagtaatgtcagagcttggtttakcttacagcaacatttattttctgtgcctggctacatctctgtaataattacagagatttggcaatgctgcttatataaccattgaccataaattatagttagaccaaacagctttggaaactgatggcaaagcagctgacatttctaatttactgattctgttgtcattagtgtaaagtaggtggggaggtgaaaagagggtcagggcttaatccttcacttgttgaaattctgcccaccaccataggggacaattacccttcaggaacgattactcagtcttttaacaagagtgacatctgctggcccacatatgcaattcaaactattccatttttataattctttgcaatagcctagcttcatttccacagatggcaaattagctgggtttataattacaaaggacaatatttagcacaatggagtcttatttagttattttaaatgtgtggtttaaacaagatgactctaaatttgtttgcttttca

SEQ ID NO: 586378 - DNA, 589 bp, Homo sapiens
gactttccacacatggcagcagtgaggtgtctgctccctggctagggcagcattgttgagcccccactggagctgggcgtctccctgctctcaaacaaaccaactgtgcacagtggggcagggacggtttcctagaggaagtggggcttaggcygactcagggaagggcagtttcactgataggatctgtttacccgcctgacttctccagcatcaccataagctcacagggctggaacggattcaggtcgcccaggcccagggcatgggaattggaaaacgtttgttgaggtgaatcaaagctagatggaaggccaggcacggtggctcatgcctgtaatcccagcactttgggacacagaggtgggcggatcacttgaggtcaggagttcgagaccagcctggccaacatggtgaaaccccgtctctactaaaaatacaaaaactagctgggcgtggtggcgggcacttgtaattccaactactcaggagactgaggcaggagaatcacttgaacccgggaggcagaggttgcggtgagcccagatggcaccattgcactccagcctgggcgacaagagtgaaactc

SEQ ID NO: 586379 - DNA, 589 bp, Homo sapiens
gactttccacacatggcagcagtgaggtgtctgctccctggctagggcagcattgttgagcccccactggagctgggcgtctccctgctctcaaacaaaccaactgtgcacagtggggcagggacggtttcctagaggaagtggggcttaggctgactcagggaagggcagtttcactgataggatctgtttacccgcctgacttctccagcatcaccataagctcacagggctggaacggattcaggtcgcccaggcccagggcatgggaattggaaaacgtttgttgaggtgaatcaaagctagatggaaggccaggcrcggtggctcatgcctgtaatcccagcactttgggacacagaggtgggcggatcacttgaggtcaggagttcgagaccagcctggccaacatggtgaaaccccgtctctactaaaaatacaaaaactagctgggcgtggtggcgggcacttgtaattccaactactcaggagactgaggcaggagaatcacttgaacccgggaggcagaggttgcggtgagcccagatggcaccattgcactccagcctgggcgacaagagtgaaactc

SEQ ID NO: 586380 - DNA, 616 bp, Homo sapiens
ccatcaacagggcaggtagtagattagccagatttactagtataatgttagacatagaccagtagaacagaatagagagaccagaaataatcttcatttatggtctgttgattttctacaaatgccccaagataatggggaaagcgttttcaacatggtgctgggacaactggatattaacctgcagaaagatgaactgagacctttatctcatatcatatgtgaaaattaayactaaaatgatgaaaagcaaaaatacaaagttagcatcagatgtaggagagtatctttgtgactggggtggggaaggagcttgtgtgtgtgtgtgtgtgtgtgtgtgtgtgtgtgtgtgtgtgtgtgtgtctgtgtgtgtgtgtaagaacaccaaaggcccatgtaatcccagcactttgggaggccgaggcaggcggatcacctgaggttaggagtttgagactagcctggccaacatggtgaaaccctgtctctgttaaaaatacaaaaattagccaggtgtggtcacgctcgcctgtaatcccagcttcttgggaggctgagacaggagaatcgcttgaacctgggaggcagagtttgcagtgaaccgagatcacaccac

SEQ ID NO: 586381 - DNA, 571 bp, Homo sapiens
taacagaaacagaaggttggggttgcattagccaagcacagaggaggaggtgaagtacaatgatctaagccaaggaaatagcatatgcaaagccaggatgatgagaaagtacagcacacgactggaggcttggactgagagtccagggtggggagagataaggatggagaggaaagagaagctggatcctatagaccttataagccctttaaagagtctgcactacatcataagtaagggagagctaccaaacggtttgttttttggttttgttcatttgtttgtttgtttatttgaggcagagtctccctctgtcacccagactggagtgcagtgacatcatcacatgaacgatccattaaaatttttaaaatgtatctgtctttatcctattcyctttcatcttttttagacttttcctattttccatggtagatactcattttcttcctgtctcaccacacagttcactgcagctttgacttcctgggctcaagtgatcctcccgcctcagcctccctagtagctgggactacaagtgcacaccactacgcccggctagttatttatt

SEQ ID NO: 586382 - DNA, 443 bp, Homo sapiens
atttctttctacaaagaaaactccaggcctgatggcttctctggcaaattcttccaaatattaaaaaaaaaaaaaaaatgccaattctacaaaaattccttcagaatttatagaaataataatatattttattaaccaaatatttctaaaatatttttatcttgacatgcaggccgggcgcggtggctcacacctgtaatcccagcactttggcaggcagaggcaggtggatcacctgaggtcgggagttcaagaccaccctgaccaacatggagaaaccctgtctctactaaagatacaaaattagccaggcgcagtggcacatgcctgtaaccccagctactcaggaggctgaggcaagagaatcatttgaacccaggaggcagaggttgcagtgagccgagatcayaccattgcacttcagcctgggcaacaggatcaaa

SEQ ID NO: 586383 - DNA, 544 bp, Homo sapiens
gctgcctgggttgagttaaaggaacttcagtttgtttagtttgttttataaaaattatgcttgctcctggtagagttagaaataaaatttacttaagatatggaaagctgtatttccagagactagaataaaagctctcctaataccctgaatattgaaaatacacacattcattcatattagaagatttctactactagtgtactaataagcaactgtgatattgagtttaccatagcattgtaaaggtcatgtgtgtacaataagtatgtaagcctcaaattgytattatatccccagcaagctaagcagccagatataacttctgttcatattttctaatccttgttttgcctatcaaaatttacttttgcgttaacattctgggatttgggggaaagggaaaatgatacaaataatggttcaaaagcatttcagttatttgacagagaagcctaaatctccaaaatatatttagaaagagaaaaaaattctttcaggacaatttgtgattttattaggaaaaaatgccacttttatgtca

SEQ ID NO: 586384 - DNA, 619 bp, Homo sapiens
tcaaaaccatacaatgcatggaaattaggcaacttggctcctgaatgacttttgggtaaagaacaaaattaaggcagaaattttttaaaaaaattgaaactaacgaaaacagagagacaacaaaacataatctttggggccgggcacagtggctcatgcctctaattgaaatcaggagtttgagaccagcctggccaaaacggtgaaaccctgtctctactaaaaatacaaaaaattagccaggcatggtggcacatgcctgtaatcccagctactcaggaggctgaggcacgagaatcgcttgaacctaggagttggaggttgcagtgagccaagatcacgccattgcagtccaacctgggcaagagagggagactctgactcaaaaaaatatataataataatctttgtgacacagctaaagcagtgtacagagaaaaatttatagcatttaattgcctacatcaagaagttagaaagrtctcaaattaactacctaacatcacacctggaggaactagaaaaaccagagcaaaccaatcccaaaacagcagaaaaaaagaaatgactaaaatcagagcagaactgaaagaaattaagatgtgaaaatccatacaaa

SEQ ID NO: 586385 - DNA, 492 bp, Homo sapiens
aggggggcaagggataaaagactacaaatatggtgcagtgtatactgcttgggtgatgggtgcaccaaaatctcacaaatcaccactgaagaacttacccatgtaaccaaatactacctgtaccccaattacttatggacaaataaaattttaaaaagaacactatgactgtccccagcagcatggacataccataaggtcatacatcctaagccaaggaggctgcctgcctgtcagcctcttaaacagggttccaaggactttcaacctcattatccaagagctggctgtaggtttctcttcttgttgaatgaagggttaaatgaaagtagggtagagaaagtgaattccccagtcattgccttacaatcacctaggagtgtgagatggtcacctraggggcctatcccagtacctggacatgccttccctcttcacatctttcctctccacatggctcttaggaaagtcagtggaatggagaactccaca

SEQ ID NO: 586386 - DNA, 591 bp, Homo sapiens
tttcaccataccatgctacttccataaataaacatctacaaggcaaaaggtgcttgtataatattgcatttaaccctcaaaacaacccttcaaggtaagttccgttgttcctactcargctacgtatccatgtattgcccctcagctgcaaatccacccttcttttccctgccttgtgatgctggagctgtgccctgtcaacgtttcttctttgccggctggcacaatgttatatcttgtcagtagagggcgctagagagacactagaaggggctgcccttttttgttctggtgcttttctgcagaagtcaccagcctcccaatgagtttcactgataccctaatgggcagtttccagcttatgtgccccagtccccagaacctctagagcctctgtgccatacactgggcaatggccacaccctctccaataagttctgaattttagccttgggtttggaggaagtgcagggagccttcttagaagtttgtccttcagtgagtgagtggctcaatcctaggagctgctccctacatctgttataacaagaggcatctgttatacctccattcttcagagacctttccatg

SEQ ID NO: 586387 - DNA, 571 bp, Homo sapiens
ctcatggatatagagagtagaaggatggttaccagaggctgggaagggtagtagagggctgaggggaatgtggagatgattaatgggtacaaaaaaatagaaagaatgaataagacctactatttgatagcacaacgggtcaataataacttagttgtatattttacagtaaacagtgtaattggattgtttgtaactcaaaagatatatgcttgagaggatgggtaccccattctttatgatgtgcttatttcacatggcatgcttgtatcaaaacatcttatgcaccccataaatatatatacttactatgtacccacaaaaatttaaaataaaataaataagcaaaacaaaataaaacaaaaacatggctggaccatggtgcccagatatttggttaaacattatactggatgtttctgtgagggtgtttttggtgacattaacatgtaacattactcatctgcttgtagtcamgcagactgccctccgtaatgtgggtgggtctcatccaatcagttgaaagctggaatagagcaaagtctggccttccctgtgcaaaaaggaattc

SEQ ID NO: 586388 - DNA, 608 bp, Homo sapiens
tttctgtagaacaagtcaacatatatgccaaggatcaggctgaccctttttatgtctcttgaacatcctaccctctagaattcrtgtaatgttgattcacatgctttcccagtggacatttcaatgccatattaatacggggaaacaattccaagtcttcctttgatgatatgaaaagcatggtgctaatcttgttatgtatcctattcaaccacttttcaaaaccttcgactgattaaaaaagaggaagtaaacatttattgagatatatattctgctgtgcactatacgaaaccgttataccctttaccattgaattataacaatctgataaggtaggtcctacagatcccattttagggcgatgaaaattaaggcttaaattgtctaaatagagctaactggaggcagctctgtaacagcaattaagagtgtctagacttctggccaggcacagtggctcactcctgtaatcccagcactttcagaggcaaaggtgggtggatcacttgaggccaggagttcgagaccagcgtggccaacatggtaaaaccccatctctgctaaaaatacaaaaaaaaatgagccagacatggtggactgcaccc

SEQ ID NO: 586389 - DNA, 595 bp, Homo sapiens
ttcttctgcaacaatgatgaaaatgacagagccagttagaatatcaaagattaaacatgaaaagaacctgagaaatcatctcaccttaatctcttaaattatgtagagaaaaattgaatgtcaagaattttgaagggtctgagattttaccctgcctgcaagctaatgcattaccctgtctacagttttgtatgcgctggtagaagacatgagaccacggggtcagaaacaaaagactttactatccaggccacagcaggcaacatgagcttcatgttcatactgatatcctgtttccaagtaccatatggtgatgaggatgtgggcctacatagatactgcacatgcagtagaattgtgttacagtagttgagataccctcagcttaggaaaccctcaatcttatagggagaatgctagcaaacctgcctaatatttckcaggaaggaaaaaattatatttatcatcctggttaggaaacaaatctgtcacctgacctggaaggagatattaggcatataaacagaacaaagatgtgaaagcctcttgcccagatgcccaaaaatatgagagacacatagagaattgtctccca

SEQ ID NO: 586390 - DNA, 511 bp, Homo sapiens
caccagagggtatgagtgctttgctccaccctcatttgacttcagtgttttctacttttcccaatatgatagtcaaaatatgtattttgtttttttcatgtacaccttttaactagagagctctaactttgctatggatactgcccaaatgaaatactctttttttttgtggagtgcttattactatctttcacttatttgaacaatcttattatttaaacacttttcagtagattgtcttgggtcttcttactgatgaaatcctgaaaaccacacaggtaactgagtaagtggggtaaagggcaatacagactaggcctatatgattccatgtggttcagtatgggacttctgtctgctaagagaagactgctaagtgggggagggcaccaaatatctcttcaaaggtaagcactcaacytgagttatggagagactggttatgagaggttcctatgcatccctggatggtgcttgcaccaagcaatccaaacccagaaatggtgtgatt

SEQ ID NO: 586391 - DNA, 580 bp, Homo sapiens
agtggtgcaggccaagcgtggtgactcacgcctgtaatcccagcactttgggaggtcgaggtggcggatcacctgaggtcaggagttcgagaccagcctcaacatggagaaactccgtctctactaaaaatacaaaattagccaggcgtggtggtgcatgtctgtaatcccagctactygggaggctgaggcaggagaattgcttgaacctgggaggcggaggttgcagtgagccaagatcgtgccattgcactccagcctgggcaccaagagcaaaattctgtctcaaaaaaaaaaaaaaaaaaatacaacaacaacaacaaaaaaaaacagtgatgaaaaaatgttttcagctgactatagatagtaaataaaaaaaaaaccttacaaaactctcttaaaagaggatatattgaacataagctattattatttagcaggtaaatgaaaagagtccaaaatgagaataaagaacacagactttggtatctggcagagctactagcttcaaaccttaactatgccatgtacaactagccatgtgcctttgtgtgtatattgtatctctttaaaactaaac

SEQ ID NO: 586392 - DNA, 409 bp, Homo sapiens
gattgcggaagctttttcttgattggttttcattcaccagtgaaatggaaagcaaggcattagctaagattgaagagggaaatgggatccgaagtgaggagaaaggggtgagacactcatctggaagagtgggaaagtgaatgcacaggggaaatggaatgtcattgctggcagcratgagagcctactcaatggtagtggtcatggtcagggttgggtggttgtgtgtttttcccattcaaatccagcttgaggggagcaagtgtagaataggcagagtttgatttaaccaatttggagagtgagagagtaggctaactagagcaacctggaaaaagttttaggatttctgggctgtggccagggcctgtgtggggctgatgatcctgaatttatagtcctaccacac

SEQ ID NO: 586393 - DNA, 409 bp, Homo sapiens
gattgcggaagctttttcttgattggttttcattcaccagtgaaatggaaagcaaggcattagctaagattgaagagggaaatgggatccgaagtgaggagaaaggggtgagacactcatctggaagagtgggaaagtgaatgcacaggggaaatggaatgtcattgctggcagcaatgagagcctactcaatggtagtggtcatggtcagggttgggtggttgtgtgtttttcccattcaaatccagcttgaggggagcaagtrtagaataggcagagtttgatttaaccaatttggagagtgagagagtaggctaactagagcaacctggaaaaagttttaggatttctgggctgtggccagggcctgtgtggggctgatgatcctgaatttatagtcctaccacac

SEQ ID NO: 586394 - DNA, 541 bp, Homo sapiens
attgtttgttttctgtatgttatcacagaataactgctgaactgggggcaaagaagcctaggttttagaattgaccctgctgctaaccagccaaggccttggtttycccattgtccaaggagaggggtgggttatcacgtgttcctctggtgtggtgatttgggcacttgggtggcccaatttttcattgtgtaggactgccccacttaaagcattttaagcatctctggggccctcacagagtccctgcagtgctccccaggattgtaacacccaatcgttcatccctgcccacattcataaatgacccccaaggagggtagtaccatgcctggttaagaatcactaaaaattagatggtatttccaccctttccagaaggtgaggaccccttgttcacaattgactatcaagtatttgtatcacatttaagaagcagatttgtgaaaacacgatgattatggtgcttacatgtcccttctgcgtcacagtgcaaattccgccgtcagtcagaggatcccagctgccctaatgaacggtc

SEQ ID NO: 586395 - DNA, 541 bp, Homo sapiens
attgtttgttttctgtatgttatcacagaataactgctgaactgggggcaaagaagcctaggttttagaattgaccctgctgctaaccagccaaggccttggtttccccattgtccaaggagaggggtgggttatcacgtgttcctctggtgtggtgatttgggcacttgggtggcccaatttttcattgtgtaggactgccccacttaaagcattttaagcatctctggggccctcacagagtccctgcagtgctccccaggattgtaacacccaatcgttcatccctgcccacattcataaatgacccccaaggagggtagtaccatgcctggttaagaatcactaaaaattagatggtatttccacccyttccagaaggtgaggaccccttgttcacaattgactatcaagtatttgtatcacatttaagaagcagatttgtgaaaacacgatgattatggtgcttacatgtcccttctgcgtcacagtgcaaattccgccgtcagtcagaggatcccagctgccctaatgaacggtc

SEQ ID NO: 586396 - DNA, 541 bp, Homo sapiens
attgtttgttttctgtatgttatcacagaataactgctgaactgggggcaaagaagcctaggttttagaattgaccctgctgctaaccagccaaggccttggtttccccattgtccaaggagaggggtgggttatcacgtgttcctctggtgtggtgatttgggcacttgggtggcccaatttttcattgtgtaggactgccccacttaaagcattttaagcatctctggggccctcacagagtccctgcagtgctccccaggattgtaacacccaatcgttcatccctgcccacattcataaatgacccccaaggagggtagtaccatgcctggttaagaatcactaaaaattagatggtatttccaccctttccagaaggtgaggaccccttgttcacaattgactatcaagtatttgtatcacatttaagaagcagatttgtgaaaacaygatgattatggtgcttacatgtcccttctgcgtcacagtgcaaattccgccgtcagtcagaggatcccagctgccctaatgaacggtc

SEQ ID NO: 586397 - DNA, 541 bp, Homo sapiens
attgtttgttttctgtatgttatcacagaataactgctgaactgggggcaaagaagcctaggttttagaattgaccctgctgctaaccagccaaggccttggtttccccattgtccaaggagaggggtgggttatcacgtgttcctctggtgtggtgatttgggcacttgggtggcccaatttttcattgtgtaggactgccccacttaaagcattttaagcatctctggggccctcacagagtccctgcagtgctccccaggattgtaacacccaatcgttcatccctgcccacattcataaatgacccccaaggagggtagtaccatgcctggttaagaatcactaaaaattagatggtatttccaccctttccagaaggtgaggaccccttgttcacaattgactatcaagtatttgtatcacatttaagaagcagatttgtgaaaacacgatgattatggtgcttacatgtcccttctgcrtcacagtgcaaattccgccgtcagtcagaggatcccagctgccctaatgaacggtc

SEQ ID NO: 586398 - DNA, 585 bp, Homo sapiens
atcgtacagatcaagatgaaggcagaaatgagtcattcttggggaatatcagcaacagcagcagtcacctgaaccatctcttcattcctaaactctctttctgcctaactgtacttgaccttcctttcaggaacaattttggcactgcttcttggtcagcctgccctctttaatcttgcctacgtggcctcttcagttttaccccagagtataccattaaccagtttttaaaacttaggaaaaaatagaagagctagctataaggaatacagggtgatggattcctcaatcatatgcatccttccctctttcattctcacatgagttttgcaaaaattttggtcrgagagacattccactacaaattagtggttttttttcttattattacagttgccccttgaacaacacaggggtagggcagtgacacccgcacacacatacagtcgaaaacctgcatatatattttgactccctttaaacttttaatggtctgctgttgactggaagtcttaccaataacatgaacaatcaattaacaaatattttgaatgttatatgtattacatactatattcttacaat

SEQ ID NO: 586399 - DNA, 445 bp, Homo sapiens
ccctacaagaaatgctgcagtgatttattcaagtttaaatagaggcatactagacagtaattcaaaactgcataaaaatataaagttccttggtaaacacatgaacaaataccaaaaccagtattataattttggtttataatttcactttttcttcctttacaggatataaaagcaaaagcgtaaaaaataaatctatattaatgctacacaataggtctgggcacagtggctcacacctgtaatcccagcactgtgggaagccaaggcatgtggatcacttgcgtccaggagtttgagaccagcctgggcaacatggtgaaaccctgtctctaaatacaataataataataataataatmatcatcatcatcatcatcatcatcatcatcatcatcatcatcatcagctagctgtggaggctgaggtgggaggattgcttgag

SEQ ID NO: 586400 - DNA, 552 bp, Homo sapiens
  misc_feature 245: n = A,T,C or G
agtttaaaaatattgttataattttagaatattttagaatattgttagaatttagaatatttatataattttagaatattgttataatggttaccagaaagaaaatatctatagaatatatgcaaaggaaaatgagaaggtaatcaaaaatgtgtcactacaaaaataattaaacataaaggaaggcaagaaggaaggaatgagggacaaagaaaactataatactcacagaaagaaaataacanactaccaatagtgagtcttgccctatcagcaataactttaaatgtaaataggttaaacttcccaatcaaaagacatagattggccaattaaattttttaaaayatgattctactatatgctatctacaggagactcactttagatctaaggacatgcttaggttgaaagtgaaagatggaaaaagatatactataaaaataataaccaaagaaagcaaggatggctaaactaatatgagacaaaataggctttaagtcaaaaactgttacaagacacaaatgttgatattatgtaatgataaaaggg

SEQ ID NO: 586401 - DNA, 581 bp, Homo sapiens
  misc_feature 370: n = A,T,C or G
ctctatttcaaaaaaaaaaaaaaaatagttgcacaatatattaaaatgtaatgtgttatgttaataacataaaggggcatagctctagaagagtaatatttttatatgaaacttaagttggtatcagtttaaaaatattgttataattttagaatattttagaatattgttagaatttagaatatttatataattttagaatattgttataatggttaccagaaagaaaatatctatagaatatatgcaaaggaaaatgagaaggtaatcaaaaatgtgtcactacaaaaataattaaacataaaggaaggcaagaaggaaggaatgagggacaaagaaaactataatactcacagaaagaaaataacanactaccaatagtgagtcttgccctatcagcaataactttaaatgtaaataggttaaacttcccaatcaaaagacatagattggccaattaaattttttaaaatatgwttctactatatgctatctacaggagactcactttagatctaaggacatgcttaggttgaaagtgaaagatggaaaaagatatactataaaaataataaccaaag

SEQ ID NO: 586402 - DNA, 558 bp, Homo sapiens
ttacaacacaggttaatttatgactagccttttttgtttttttagtcagtgagcctcgtttaaacattttatgctgccaaataaagatcatagactatcagtttaggttcttatgtataaggtttccagtaaggcacatagataatttttactttaaaattgtgtggcctcaggtattcatttattcagcaaatatttattgagcaatggctatgtcagccaatatgcaatattaattatctttcatttttaacatggaagacagctctaccctaattttttaaatgtcaagaacactgttacttatccaagtgtaaattctacagtgaagtaaagatgatttcatgttaaagagacttaagcaatcttttcttaagtaagcagtcctttcctgatatgtgcctatttgacaaatatagcacatatgctaatttactttagctacctgacaaaccaagaaaactggtttgatcaattttttaagtattccactagttatttgtgaattgccaygccaaaagaaaataacaagaactgtcttattaaagtaacaccaag

SEQ ID NO: 586403 - DNA, 538 bp, Homo sapiens
tcttaacctctgtgtctactcattttcttcatttcacaaagcagtataaactgttttgtcatgaaaagcattctttttaaaaggtcaaacaagtctccatctttgcatgcttcccttacaactttgggcacagcttggcaaaagcctaggcatctagaatttaatatccataagtgtagtatattctgtatcttttgaaatggccatgtaatatagatatcaatttagttcactatttttatggatttagacatagcttcacaaacatctcagtcttgcagagagaaaaaaattmtctgaattttgccaaaattgcctgtgttgttttattgaatttggtcaagatatgcagggatgacgcatacacatccagtaattgaaccatttgaatgtctggtatggaaaccaaatttttaaaatctggaatcttcaactctgaaaactcgtatcagtgaataggactcagaaagctcaatttgtatgcttttatgagccaaaaagtacgtgggattgtgtcaaagcaggatactgttattta

SEQ ID NO: 586404 - DNA, 535 bp, Homo sapiens
atatttgaaatattttggtaatatttataatgttttatttttatggttatatgagaaaaaaatttcttctctttaagatatatctaacccaaaatagattttttgtaaacaaaaatgaaaacttttaaaggaactttgattctcattgacccctgaaaatgcagacacctttacatactctccttattattcacagaaacattcattacttacatagattcaataagtgtctgattttgcattactcacttttattacaaatggtaaaccccatattaaggaggaataattccaaattcgtatgtgaagtcaatacctacgaagccttttcaagaatattggcctggtacttgtgttcataaggtctcaatctaccagatggtaaaaaggttactcagcagaccaggaactrcaacaaaatttgggaattgctaggaaaaggaattcatccaatttataaatactggagataaaatctggtagagagagttttggggctttgcttcctagtttcaagatagaaatgcactgtctt

SEQ ID NO: 586405 - DNA, 602 bp, Homo sapiens
ttatttgttagttacatatatttagaaataccttcactctctggcttaacttttcactgggtatgcacagatgcatacctagactaaagatacataaatataatctatccctctgattacttctcttttcttcaatttctcccagcactcttgcttgtagagctctggaattttctatgtaatggtcttgcccatttttacaattgttccaaaaatatttgtatggtttttttggttttgtttttgtttttgagagagtttcacccttccacccaggctggagtgcaatggtacaatctcggctcactgcaacctctgcctcccaggcttaggtaatccttccacctcagcctcccgagtagctgggactacaggagtattccatcacccccaactaatttttgtattttttatagagaaagggtttcgccatgttgttcatgctggtctcgaaccactgaggtcaagtagtccaccaacctcagcctaccaaagtgctagaattacaggcgtgagccaccgcatgkggccaatatttgacttttttttatgctaaggtatgtggtaactgatttactttattgttttctattatattatta

SEQ ID NO: 586406 - DNA, 518 bp, Homo sapiens
ttaatgcattctctatcaaaatatcaatgacattcttcacagaaataaaaaaagcaatcctaaaattcatgtggaatcacaaaagatcacgaacagccgaagcaatcttgagcaaaaagaacaaagctggacgcatcacactacctaatttataaatataggaaccaaaactgtagggtcctagcataaaaacagacatagaccaatggagcagaatagagagcccaggaaaaaaattgtgcacctacggacaactggttttcaataaatgtgtgagaacacacattgggaaaaaagtctctttaataaatggtgctgggaaaattggatatctacatgcaaaaaatgagactagacccctacctctcaccatatacaaaagtcaactcraaatggatagaaaggcttaaacataaaacccaaaactatggaactactagacaaaaacatagaggaagtgccttataaaaaaagattttaaataaaacctaaaaagcacaggtgacacaagcaaaaac

SEQ ID NO: 586407 - DNA, 571 bp, Homo sapiens
aaactgtatacctaagatctttatatttcattgaatgtaaagtatacgtcagtgaaatatggcatcttattaataaaaaaaaatacacccggtaataaaagtgttataactgaaatgattgacaggagtgacagtggcaccaagaaggaagcagtcaaacctggtagagagaggccggaaagtctagagacaagaatgaaatctggatctggaaatagcagtaggagattgtacatggaatggagaacgaaacacgaattggggatgtgcatttgggacccaggaatgtgctagcaagcctcaagttagttatctatgagagataatatagccagtagttaacattttgcaacctgccaaattgtctaggttgatatttcagctccacagcttactagctatgagtcttcgggaaagtttcctaacatttctatgcctcacttatcttctttgtaaaacaaggaaaaataatattacttacttcagaaagttgtgaggatmatacactttaatacatgaaaatacagaaaaaaaaatctggctatacttaacattcactaaacattagctg

SEQ ID NO: 586408 - DNA, 591 bp, Homo sapiens
tttgtatgtcttcttttgaaaaatgtctattcagatcttttgcccattttcaaattggattattttattttattttttcctataaagttgtttgagctccttatatattctggttactaatctcttatcagatgggtagtttgaaaatattttctcccattttgtgggttgtctcttcactttctttattgtttcctttccttctcagaatctttttaacttgatgtgatcccatttgtccattttcgctttggttgcytgtgcttgtggggtattgctcaagaaatctttgtccattacaatgtccaggagagtttccccaatgttttcctttagtagtttcatagtttgaggtcatagatttaagtctttaatccattttgatttgcttttgtatatgatgagacttagaggtctagtttcattcttctgcacatggatatccacctttcccagcactatttattgaagagactgccctttccccaatgtatattcttggcacttttgtcaaaaatgagttcactgtagatatgtgaatttatttctgggttctctattctgttccactggtttatgtgtctgttttga

SEQ ID NO: 586409 - DNA, 462 bp, Homo sapiens
accagatgccaaatatgccagcaccttgatctcaaacttggcctccagaaatttaagaaataaatttgtattgttcataaaatacctagcctcaggtattttgttatagtagcacaaatgaattaagacacattttttcccacaatcacctctaaaataaactatttgcatccaaatcctcatctcggggtttgcttctagtggaatctaagcctaggttgtgttatgccattcaggtgcatttaactgttaaaagcagacaggcagagcaacagcccaaaggcataaaccagattcatcagcatccasggttgagtcatgtgacaaccttggcaaatagattataaaatctttgacttgttaagtgcaacagtctttaaatttgtgttgatctatagttaatactgacagaattaatgtagtctgacaattggagaatgagagaatgttaataaataagat

SEQ ID NO: 586410 - DNA, 579 bp, Homo sapiens
aattccagtaccagatggcttcactgaaaaattctaccaaacaggtaaagaataatttgtatcaatccttctttaactcttccaaaaaaaaaatgaagaggaagaaacacttccagactcatttgacaaggccagtattacactgatccaaaaccaccagacaaggatgatacatgaaaataaaattacaggccaatatccctgatgaagacagacgtaaaaactctcaacaaaatactagcaaatcaaattcagtagcacatyaaaaggattatacaccatgataagtggaatttttgctaggatgcaaagatggctcaacatatggaaatcaataaatataatacaacatattaacaaaataaagaataaaaatcatatgatcatctcaatagagccaaaaaaagttgacaaaatttaacatcctttcatgacaaaaattctaaaaaaaaaaaatacagaagaaatgaacctcaacacaataaaagccatatatgacaagcccatggctaacattaatctcaatgatgaaaagctgacagcttccttctttaagaccaggaacaagacaaggatggc

SEQ ID NO: 586411 - DNA, 622 bp, Homo sapiens
cctatgtcagggccactggtgggtatggggcctatctgggacctaggaggacttgactatctccaggattttggtctgtgaggctgtgatgagtgtytgcttcagagttcacaggcagtaggcctgttaccaagtgcaacgacagatgtagcttcctcagggtctctgagggtgtccctgttggatcacagaatggatccctgggctgcctatactgcctagtctgtggctaagatggactggaactgagatacaaggttgtttcaggtccacagctgagaccaagatcttcaagcttgactcctggatcacaaacattcatgtctcccagtaagttcctgattgaggaagaccgctctcagactgtttcagaagggccacagccaatttatagggctcttttaagatccacagtggaactgagatcagggcatcagcctgcaggatatgcctctttccagacctgcaggcaggcagaacagctctctgtcccatcactgagacggggtgagagcaagctccagagccatttaaggatacactgaggtaaagagtcttgcaagcctgccatagagactcatgggtgcatcttccagtgggacctaagcttggcagaaatggt

SEQ ID NO: 586412 - DNA, 601 bp, Homo sapiens
  misc_feature 569, 586, 587, 600: n = A,T,C or G
caaccaccatgttcacagcctgcctagtggaaacatcagtgtgtacttgagatcaggagataaggcttagactctctgacttgcttcttaatagtttgtgcagcattggacaaggtgcttcagctttctgggtcttatttccttttgtataaaatgaagattgtatactatctacttcttagggcttaggtgacaatcaaatgatttaattcctatgaaatgttaagaatattttctagcacataccatgtgctcagtaaatgtcaaccatcagagtgattattatgttgagttatgagagggakttaaagtgacaatatggcattagataaagttctctagtcccactctctgttgtaaaactaagaatctttaggaatacccaaacattttagaaccaggacaggctgcttaactcaaaatcttagagctcagtaacctgaaaacaatagtctacaaagaaacaaagctgcagattttctgggtaagctttcctatagaaacatcttttcaaatctttatatggcagtaggctaacttactctcttttaacaaatcctttgctaatntgcaaagagaaatttcnnctcccaccagggng

SEQ ID NO: 586413 - DNA, 568 bp, Homo sapiens
  misc_feature 346: n = A,T,C or G
tgtactacacatgcctcagtcttatgyatctcagcaacagaagaagacaataatattacctagcacttagggttattgtgagagttaaattatgattcatagaaagcatttatgctagtgcttgacacataatatacattgcggaggcaacaactcatattactattattatcccaatcttactctatatgtcacccaggagagttgatttttgctttaaaaaagtattgtatattttaaaatagctagaagagatgcttttgaatgttctcatcacaaagaaatgataaatgcatgaagtgatagacatggaaaatacacttatttgatcattatacacacatgntagtatcaagatatcaaattgtgccccataaatatatacaattacaatgtttaacttaaacattaactaattaatttttaaaaggatgagaataataataataccaatcatgtctcgcttatagacgacataaagaagccagctccaaagagagatggtctatcttttctctcccagtgtcagtgatggggaaacccagccttgcaggcagcacaaataact

SEQ ID NO: 586414 - DNA, 487 bp, Homo sapiens
ttgtttctaaaatcacctgtactcattgtttctatcccctaaaccacaatatggttactttaaagccatttcctaattacaaawgttccagctatactctacttaaacaaatttacaagaaaaaagcaaacgaccccataaaaaggtggtcaaaggacataaagagacacttttcaaaagaagacatacatgcagccaacaattacatgaaaaaaagctcaacctcactgatcataagagaaatgcaaatcgaaaccacaagataccatctaataccagtcagcattactattattaaaaaaaaataaaaaaataacagatgctggttaggttgtggagaaaaaggaaggcttatccactgttagaaggaatgtaaattagttcagccattgtggaagacagtgtggcaattcctcaaagacctaaagacagaaataacatttatctcagtaatcccatcactaggtatatacccaaaggaatataa

SEQ ID NO: 586415 - DNA, 638 bp, Homo sapiens
ctcatcgatgatagactggataaagaaaatgtggaacatatacaccatggagtactatgcagccatagaaaagaacgaggacatttctttggagggacatggatggagctggaggccattatcctcaacaaactcatgcaagaacagaaaaccaaatatcgcatgttctcacttataaggagaagctaaatgatgagaacacatggacacataaaggggaacaacatgcactggggcctttcaaaagatggagtgtgagaggaaggagaagatcaggaaaaatgatgaatagatactaagctaattacctgggtgatgaaatartctgtacaacaaatgcccacgacacacgtttacctatgtgacaaacctgcacttgtacatctaaacttaaaagttaaacaaagaaacaagagagagagaaagagaatttctagggagctgatacagtttggatatttgtccccacctaaatctcatgttgaattataattcccagtgctggacgtaggtcctggtaggaggttgtttggatcatgggggcagaccctcatggcttggtgctctcttcctgatagtgagttcccatgagatctggtcatttaaaactgtgtgtgtgtcccctcacccaccagctt

SEQ ID NO: 586416 - DNA, 628 bp, Homo sapiens
aagacaatattttgttaggatgtcagttctccccagattgattcaatgcaattctaatcaaaattccagcagcatttttgtagcaaatgacaattataaaatgcacatggaaatacaaagaacctggaatgccaaagcaactttgaaaaagaacaatgttagagactgttaaactaaatttgggctttagaagcctccgtccaagtcctacatagcaaactgcaacctaacttagtacataaacaaattgaaaagcaaataggaatttgcctttgtgacaaatagctgagtctcagtctagtgtcagtcagttgcaggcggccaactgtcaaaattatgttcaataaggcaaacaccatgctggagccaactgggctctttttctctgcctcgcttctgttttctgcacatctcttccctttttctgttagaaatgttatccatgcacatagcagccccagagtctcattgaatttgtcctagttctaggatctgcttgattcatgaatygttctttgtgcaattaaactctactaaatttaatttgcctaaagtttttcttttcacaagacttacactacttgatttcaagacttattatacagctgcaataatctagataatgtga

SEQ ID NO: 586417 - DNA, 503 bp, Homo sapiens
tgctatgttgtaatgagcggyctaaatccacttgggcttgtctcctttcccaaagcatccatggaggtttgatgagctgacctagccggggcctgctgcttacaggctgcttgctgcttgacagccctcattgtcccctgatatacatgagccaacagggcacacggaacttccttttcagggatgcggtctgccatagcaactgaaaattgctataactgtgcgatagtttataactaaactgtgcaatagaaaatctcaaccacagccatgcttgtttttgcccccataatgccgagaatatttatgagcaaattgccaaatacttggtgacttagtgacatccattcagacagaagacagatttaaaggcaggcttcaaacatcttcaggagactattgcctgggaagggaaaaaaggactcctttgagtgttcttatgtttctatctgtgtggttatgtggctacgatatatgtgaagaagagtgcaaacaaaaatgta

SEQ ID NO: 586418 - DNA, 582 bp, Homo sapiens
gtaagaagggccaaggagaacgagcagagcaggatgtttggctgaattccaggcaaagacacagggaccagacatggtgctaaggcagagccttgatctaagagaagacgtcccagctcccagaattgggatataaggtcagggtggggccrgccccaaggttgattttctgctgaacgactagcctaggatccttagactccccgggaggagtggattctctcttaagagcctggagtgtggcccagtgacccacctgtgagggatgcgtggaagaggtggggccagaatattactagagaagttgattcacctgaagaaatcagtcaccttatttatttaggtaaaaaacagtcacaagagaaggtttagctgtaatactctatagtaagcaactgcctgcacagagggaaagtggctttattgttgtggccaagccatctggggcagtgttgtcacagagagggacattctgcatctagagacgaaagggctcagacccttctccagatgccccaaataaccttctccaaagaagtgcaggtcaacatctttctgcttggtctcaggacaacaaaagcg

SEQ ID NO: 586419 - DNA, 400 bp, Homo sapiens
agaaaggaaatcagcctctgatgctattcagatatatctcacggcggttgcaccatggtcagaaaaaacttcctaatattcataatgttgcaatttattcaagttttctttgtcttctaccatgtggtcagatttcatgcccttgtagagaaggttcttatattggaatatggagtttgatataccctaattgtttatgtctagtgtgagagaagtacattaaaatctgtttttgttctctttgtttttcttttcgtccatgtctattttacctttcattacttactgggttttttaataacagatgttactagtttatttagtgccctgatattaataattgtcacattccattaggaattacaayttttagtattaaaacaattgtcttatttaatgc

SEQ ID NO: 586420 - DNA, 314 bp, Homo sapiens
agataatagagccttggacctgagaggaactgacttctcactcttaaggcttcgtgaggaggaaaaagagggtcagtggcaccttttcttccttcctcaargagtatcaagatgacaaaagaaatgggggcagaggtaaaaggaagaacaaatcctaaagcagcaaactggggagttttcaaaaaggtcgataaagttttatattattctcagcagaaatcatgccaacaaaaaaggaagtagacagaggaacgaacatataattaaaaggagcttctgtggactaaaagaaattccatagtagaaacaggatc

SEQ ID NO: 586421 - DNA, 314 bp, Homo sapiens
agataatagagccttggacctgagaggaactgacttctcactcttaaggcttcgtgaggaggaaaaagagggtcagtggcaccttttcttccttcctcaaagagtatcaagatgacaaaagaaatgggggcagaggtaaaaggaagaacaaatcctaaagcagcaaactggggagttttcaaaaaggtcrataaagttttatattattctcagcagaaatcatgccaacaaaaaaggaagtagacagaggaacgaacatataattaaaaggagcttctgtggactaaaagaaattccatagtagaaacaggatc

SEQ ID NO: 586422 - DNA, 540 bp, Homo sapiens
caggaaaaacagttttaattattagtgattccaagtcaaaaggttgaaaaaaaaatggaaatgatgttttggagatttatagccagatacacgatgaaattaaaaatatttggtattcagtccagataacaaataaaaaataaaatctcaaaaataattmtctaaaatctaataacaggtgtactataattttattctaaaacacgattttttctctacttccacctccacttctaccaaagatgtctatgttaagactaatttggttgcaaaataaggttagtctttggtgtgattatttacatagtttatttatacagattatttacatggtttagcaagaatagtgattggtattacaggctctttttaaagtctgctttgctgaaactttttataagaaatctcaaattagacttctttttaaagcatctcaagactaggaaaccaagtcaaagatatgaccttgaaatctccctgcaatatctgtagtatctggatgaattcctctctgcttgaggttctcaaaatatcctgacg

SEQ ID NO: 586423 - DNA, 570 bp, Homo sapiens
tctaaaggatatgggtttaggccaaaagcccatcatatagattattgtttttcttctcccaagtactttggaaaaactaagtctcatttggcatgcagtgcctctcagcaaggtcatggttcttctgccgtggtgcctggggcagttaaggtaagaattgtgtttcaaaaaaatacctcagacactgttaagaataagataacgtggtgaaaccccgtctctactaaaaatacaaaaaaattagccaggcatggtgatgggcgcctgtagtcccagctactcgggaggctgaggcaggagaatggcatgaacccgggaggtggaggttgcagtgagccgagatcgtgccactgcacyccagcctgggcgacagagcgagacttcatctcaaaaaaaaaaaaaaaaagagtataagacagctggttagacaggatgacatgggaatattcagagctttggtcaagaaatcagaccaatgagtcagtaagaaagggtcattgaattactccattttcacactgctataaaaaacttccctgagaatgggtaatttctaaagaggtttaactg

SEQ ID NO: 586424 - DNA, 589 bp, Homo sapiens
aatttgtggattagtttattggttttctttctgtcccattggtctatttgtgtattttatgccagtaccatgttgttttgattagtgtagatttgtagtatttttgaaatcaattagtgtgatatatccagctttattccttttgatcaaaattgctttggctattgaaggtcttctgtggttctctatgaatcttaggatttctttctatgtccatggtatgtatacatttacctatgtaacgaacctgcacttcctacacatgtgtccttgagcttaaaataaaagttggaaataaaaaaattaaaaatgtgggaaatattttaaaatgcaatgagaattttsataggaaccacattgaatctgtagatttctttgggtagtaggggcatttcagtagtattaattcttttaatccatgaacaccggatatctttctatttgtttgtgttgtcttcagtttctttcatcaatgttctatagttttcagtggacagacctttcacctccttggttacatttcttgccaagtatttcatttttattgatgctattatatgtggaattgctagattgatttattttttga

SEQ ID NO: 586425 - DNA, 580 bp, Homo sapiens
agaccttttttgttgtatgagacagagtctcgctcttattgcccakgctggattgcaatggcacgatcttggttcactgtggcctccgcctcccgggttcaagcgattctcttggcctcagcctcccaagtagctgggattacaggcatgtgccaccatgcccagctaaattttgtatttttagtggagatggggtttcaccatgttggccaggctggtttcgaactcctgacctcaggtgatctggcctcctcggcctcccaaagtgctgggattacagatgtgagccaccatgtccagcatgtttcagacctttaaagtgtcagactaagttaatcttcccgagatccagacaagggaaggcctggctgcatcaagcagattctctgcaaatgcaagttttctccaaaaaagacagctttgcagggctgcttcttttggctctctgaacagccatctgaaaatatgacaaatatattttggggtgaaatatttttatttccctcattcgtgttgctggaactggagcactgtcagtttctataatggcatcttacatggcattaaaataattggaatc

SEQ ID NO: 586426 - DNA, 580 bp, Homo sapiens
agaccttttttgttgtatgagacagagtctcgctcttattgcccaggctggattgcaatggcacgatcttggttcactgtggcctccgcctcccgggttcaagcgattctcttggcctcagcctcccaagtagctgggattacaggcatgtgccaccatgcccagctaaattttgtatttttagtggagatggggtttcaccatgttggccaggctggtttcgaactcctgacctcaggtgatctggcctcctcggcctcccaaagtgctgggattacagatgtgagccaccatgtccagcatgtttcagacctttaaagtgtcagactaagttaatcttcccgagatccagacaagggaaggcctggctgcatcaagcagattctctgcaaatgcaagttttctccaaaaaagacagctttgcagggctrcttcttttggctctctgaacagccatctgaaaatatgacaaatatattttggggtgaaatatttttatttccctcattcgtgttgctggaactggagcactgtcagtttctataatggcatcttacatggcattaaaataattggaatc

SEQ ID NO: 586427 - DNA, 580 bp, Homo sapiens
agaccttttttgttgtatgagacagagtctcgctcttattgcccaggctggattgcaatggcacgatcttggttcactgtggcctccgcctcccgggttcaagcgattctcttggcctcagcctcccaagtagctgggattacaggcatgtgccaccatgcccagctaaattttgtatttttagtggagatggggtttcaccatgttggccaggctggtttcgaactcctgacctcaggtgatctggcctcctcggcctcccaaagtgctgggattacagatgtgagccaccatgtccagcatgtttcagacctttaaagtgtcagactaagttaatcttcccgagatccagacaagggaaggcctggctgcatcaagcagattctctgcaaatgcaagttttctccaaaaaagacagctttgcagggctgcttcttttggctctctgaacagccatctgaaaatatgacaaatatattttggggtgaaatatttttatttccctcattcgtgttgctggaactggagcactgtcagtttctataatrgcatcttacatggcattaaaataattggaatc

SEQ ID NO: 586428 - DNA, 343 bp, Homo sapiens
gtggagtcccaatcattctgggtgttagtatccctcacctcttattaaaggtccaggttaatcttttggaaaatttccatcaccttctgtcttagtccattttatgttgctataaaggaatacctgagattgagtaattattaagaaataaggttaggctgggcacggtggctcacgtctgtaatcccaacactttgggagtctgaggcaggaggatcacctgmggtcagaagttcgagaccagcctggccaacatggtaaaaccctgtctctactaaaaacacaaaaattagctgggtgtggtggcatgtgcctgtaatcccagctactcgggaggctgaga

SEQ ID NO: 586429 - DNA, 601 bp, Homo sapiens
ccggttgctttaaattaaagaaaactgaaagccctcagaaataagcctcacaagcaaggtctctctctgatctttcttctgtctctctgattctctttctttctgaagcacaagaagggagacagtctctctgggatttccttatctgactaagaaagcttctttccaaaagaaatgcaattgttttagtatcctcttccctgggaatctcattcaataaccaggaaatattaactaccagagtagagaagaggctgagagtcttccccatatccaggcagactttttatctatttttctgtggcagctcaaagagaatacctggaaagctttatctgcgtaataagaccatctttgttcaccatgatgtcctgccatctctcccagaactcagaggawgtttgttgcaggccattggtttctgggctcatttatttcccttgaaaatcatgtactcctatacttcccatctcagcttcctctatgaaaaaaatatataagcatctagacctcactgggttattgggtaatcattctgctgtgacttccccatgtttatgcatgttaagtaattttttaacattttatttatgttttttga

SEQ ID NO: 586430 - DNA, 572 bp, Homo sapiens
atcaacagaattcttttctgaagatagagaagttgattatgaagttaatctgaaaaaaaaagtaaagatagcaagaaagctgcgaaggttaatactgaatgtcaacttgattggattgaaggatgcaaagtattgatcctgggtgtgtctctgaggktgatgccagaggagattaacatttgagtcagcgggctggaaatggcagacccacccttaatctgggtgggcaccatctaatcaggtgccagcacagctagaatataaagcagacagaaaaatgtgaaaagatgagactggcctagccccacaacctacatctttctctcgtgctggatgctttctcccttgaacatcggactcctcgttcttcagtctggggactcagactggctctccttgctcctcagcttgcagatgtcctattgtgggaccttgtgatcatgtgagttaagaattagttaatgggtgcagcacaccaacatggcacatgtatacatatgtaacaaacctgcatgttgtgcacatgtaccctaaaacttaaagtatgataataataaaatttaaaaaaaaga

SEQ ID NO: 586431 - DNA, 577 bp, Homo sapiens
gtttgattattgcagtcacataaaaataaaaatttaaaggtatgcagatttgaaaggaagaagtaaaactgtccctgttcatagttgacatgatcatctatgtagatcgtaaggaaggcatctacaaaaagctacaagaactagtaagtttaccaaggtcataggctacatggtcattatacatgaattaattaggtataaatacatgacatagtataaaacgcattagaaacaaaaagaaattttcatttttaaaagtactgtttataacaattattttaaaataaaatactgaaggataaatctaacaaaataggtacagtatttatacactgaaaactataaaacatttctgagtaaaattaaagatactctgtttaaatggagagatatcatatgctcatggtttaaaagacaccacaktgctaaggtatcagttctcccctaaaagaccttacatatttaacacaatctcatgcaaaaatcttaccaggcatttttatggaaattgtaaactgcatgtaaattttgtatggaaaaatcaaaggatataaaatagccagaacaatttttaaaa

SEQ ID NO: 586432 - DNA, 577 bp, Homo sapiens
gtttgattattgcagtcacataaaaataaaaatttaaaggtatgcagatttgaaaggaagaagtaaaactgtccctgttcatagttgacatgatcatctatgtagatcgtaaggaaggcatctacaaaaagctacaagaactagtaagtttaccaaggtcataggctacatggtcattatacatgaattaattaggtataaatacatgacatagtataaaacgcattagaaacaaaaagaaattttcatttttaaaagtactgtttataacaattattttaaaataaaatactgaaggataaatctaacaaaataggtacagtatttatacactgaaaactataaaacatttctgagtaaaattaaagatactctgtttaaatggagagatatcatatgctcatggtttaaaagacaccacattgctaaggtatcagttctcccctaaaagaccttacatatttaacacaatctcatgcaaaaatcttaccaggcatttttatggaaattgtaaactgcatgtaaattttgtrtggaaaaatcaaaggatataaaatagccagaacaatttttaaaa

SEQ ID NO: 586433 - DNA, 569 bp, Homo sapiens
atattttaaaatgaagaaataaagcaacattttaaatgtgtgatttttgttaagatacttgccattagtgagagttagggtgggacatatcagtaacgaatccgattgccactatggctctgcccccccaccatctttcctctgggaggatgttggggccaacttacgattgcaacctgtgtgtgtgtttatcctttgtttggatacrtgttactaggtgccccactcttggccagcaattccagtgcctgggtggtttgcctgagcaaagtgcctgagtggctaggaatgtagagatagggctttgacccagagcacagggatgataaggtttactatagtgtaaggattagaatgaaggttctcttctgcttcagaagtgggaagaggaagcaacacaggatgggatctctatctggttctaggtctcaggctttctccagcccgttttgccaacttacaagcaactaaccaccactaaacttcctctccctggagaaggaaaaatttcactcacttgtgagtgagaagatctgcatccagatcctttctgtgccatgattagctgt

SEQ ID NO: 586434 - DNA, 569 bp, Homo sapiens
atattttaaaatgaagaaataaagcaacattttaaatgtgtgatttttgttaagatacttgccattagtgagagttagggtgggacatatcagtaacgaatccgattgccactatggctctgcccccccaccatctttcctctgggaggatgttggggccaacttacgattgcaacctgtgtgtgtgtttatcctttgtttggatacatgttactaggtkccccactcttggccagcaattccagtgcctgggtggtttgcctgagcaaagtgcctgagtggctaggaatgtagagatagggctttgacccagagcacagggatgataaggtttactatagtgtaaggattagaatgaaggttctcttctgcttcagaagtgggaagaggaagcaacacaggatgggatctctatctggttctaggtctcaggctttctccagcccgttttgccaacttacaagcaactaaccaccactaaacttcctctccctggagaaggaaaaatttcactcacttgtgagtgagaagatctgcatccagatcctttctgtgccatgattagctgt

SEQ ID NO: 586435 - DNA, 610 bp, Homo sapiens
ttggtggcttttgtgtggtgttgggcctgtgggggcacagaagacaagagttaggctttgggaccctccacctagattcaagagtaggtatggaaacacctggatgtccaggcaggagtctgctgcaggagtgaagctctcatagagaacctctgtgagggcagtgcaagaggaaatgtgaggttggaacccccacacagaatccccaatgggacactgcctagttggrctgtgagaagagggccaccgtcctccagaccccagaatggtagatccacagacagcttgcactgtgtgcctggaaaagccacaggtactcaatgccagcccatggaagcagccacaggagttgaaccctgtagagtcacaagggtggagctgcccaaggccatggaagcccaagccttgcattagggtggcctggatgtgagacatggaatcaaaggacattattttggagcttttttaatgcatgccctgctgggttacagacttgcatggggcctgtggcccatttgttttggccaatttctcccgtttgcaatggaaacatttacccaatgcctatactcccattgtatcttggaagtaacaaactttttttttattt

SEQ ID NO: 586436 - DNA, 507 bp, Homo sapiens
aagaaaaagaaaatcatcatgtscaaataggatagcataattcaagacgtctgaaaatagggctcatgccaagaacacaaaagatagcccaacattagaaaagtttccaatgggagtcattacatcagtaagtcaaaggaaaaatttataaaatcaccttaatagatatctaactggtaattaatcaagtttgatgtcgttcccaatttttaaaaatcagtagcatagaaagatactttcttaatatggcaagaattatttgaaaccaataggaaacatcttaattaatagtgaaaacttagagctagtttcactaagacaataaaggaaaggctttaagaagtagaaactctaagactcaaccacaaaatagaagactgatagaggagattttatacataaaaatgtgaattttttgaagaaggaaaaaacaatgaacttcaaagaaaagtgacaatttgggaaacccatctgcaatatatctgatatcaaaagattactgtcctc

SEQ ID NO: 586437 - DNA, 566 bp, Homo sapiens
  misc_feature 509: n = A,T,C or G
gggtttcaccctcctcaattgctaaatttaaaaagtagatggccgggcacagtggttcacacctgtaatcccagcattttgggaggccaaggcaggtggatcacttgagaccaggagttcaagacctgcctggacaacatgatgaaacatcgtctctactaaaaatataaaaattagccaggtgtggtggtgcgtgcctgtagtcccagctacttgggaggctgaggccagagaatcacttgagctggagaagcagaggktgcagtgagccgagaccatgccaccggactccagtttgggcaacagaatgagactatgtctcaaaaaataaattaaataaatttaaaaacataaaaataaaaagtagatagttgtaagtggtgttggggtgtgggcacagagaaaggtgaggaaaagcagcaggcagcattgtgggcagacttctggtgcagtcctaatttcatctttaaaagcctgtgacggtaagcaagtcaatttctaacctcacntttcttctctggaaaagggccttacagcacctaccataagaaacaaaaggagggagg

SEQ ID NO: 586438 - DNA, 641 bp, Homo sapiens
tcatggttctgcaggctgtacaagaggcatagtgtcagcatctgcatagcttctggtgaaggcttcatactgcttctactcatggtggaaggggaaggggagccaccatacagagatcacatgataacaaagaggmaagagagaggatgaggtgccagtcttcaccagttcgtgcaagaactaagagtcagtgagaacacactcactcctgggagaatggcaccaagtcattcatgagggatacatccccatgattcaaacacctcccaacaggccccacctccaacattgggtgccaaatttcaacatgagatttggagggtcaaatagccaaactatcagagaccaatctgactttcatagaaactttaagttggcaattttgatcttttttttttttttcatttttaaagccttaagtgccatcaaaagtggtcactccataccacactcttcataattatcattactcacaaactggttgtattagtccatttttatgctgctgataaagacatacctgagactgggtaatttgtatagaaaaagaggtttactggactcacagtaccacgtggctagggaggcctcacagtcatggtggaaggcaaaagacacatcttacatggcagcaggcaaga

SEQ ID NO: 586439 - DNA, 641 bp, Homo sapiens
tcatggttctgcaggctgtacaagaggcatagtgtcagcatctgcatagcttctggtgaaggcttcatactgcttctactcatggtggaaggggaaggggagccaccatacagagatcacatgataacaaagaggaaagagagaggatgaggtgccagkcttcaccagttcgtgcaagaactaagagtcagtgagaacacactcactcctgggagaatggcaccaagtcattcatgagggatacatccccatgattcaaacacctcccaacaggccccacctccaacattgggtgccaaatttcaacatgagatttggagggtcaaatagccaaactatcagagaccaatctgactttcatagaaactttaagttggcaattttgatcttttttttttttttcatttttaaagccttaagtgccatcaaaagtggtcactccataccacactcttcataattatcattactcacaaactggttgtattagtccatttttatgctgctgataaagacatacctgagactgggtaatttgtatagaaaaagaggtttactggactcacagtaccacgtggctagggaggcctcacagtcatggtggaaggcaaaagacacatcttacatggcagcaggcaaga

SEQ ID NO: 586440 - DNA, 611 bp, Homo sapiens
aacttaaaagtgaagagaaaaataaaattgaaaaaaaaagagaacaaaatatccaagaactctgggacaactaaaaaagatataccatgaacgtaataggaatgccagaagaaaaagacataaagaaaggggaagaagcaatatttaaagcaataacgactgggaatttcctccaaattaatgtcagacagcaaaccacagatacagaaaactcaaaagatcagcgagcaggataaatgcaaaaaagcaaaacagaaaaacaaaatgaaaacccctacaccgaggcataccatattcaaacttcagaaacaaaaaaaaawttttttggaaagaaggcagaagaaaataaaaagcaccttacttacaaaggaacaaagataagaattacatccaacttcttcccagaagccaggcaagcaagaagagagtggcgtgaaatacttaaagtgttgagagaaaaaaagaacaccaacctagaattttgtacgccatgaaattatcctctaaaagtggaagagaaataaagactttctcagacaaacaaaaattgagggcctttgttgccagtagactgagaaatgttaaaataagttgttcagaaagaaggaaaa

SEQ ID NO: 586441 - DNA, 609 bp, Homo sapiens
agctgggtgtggtggcatgcagctgtgatcccagctacttgggaggctgaggcacaagaattgcttgaacccagaaggtggaggttgcagtgagccaagattgcaccactgcactccagcctgagtgacagagtgagaccctgtctcaaataaataatgtgtatatatattttttctaggttctagatatatatatatatatatwatatatatatatatatacatacacatatacatatatataaatagattttcttcaagtggccaattttcaaacatatatatatatgtgtatatatatctagaacctagaaaaaaaatatacatatatatatgtatgtgagtgtgtgtatgtgtgtgtgtgtgtgtatacatatatattctaggtttgaagaagcttcccaggctgactatgacatctattggtagcagccggactgcattcagaaattcctcttgtgtggtgccattctgctgtttctggttatatgtgttcatgggaacagttcccagtgggatggaaaatattctttcctgggaatcaccttgggcaatttacttcacctttggactttaaaaatctctaatgaaaagaagtgggactaaatt

SEQ ID NO: 586442 - DNA, 609 bp, Homo sapiens
agctgggtgtggtggcatgcagctgtgatcccagctacttgggaggctgaggcacaagaattgcttgaacccagaaggtggaggttgcagtgagccaagattgcaccactgcactccagcctgagtgacagagtgagaccctgtctcaaataaataatgtgtatatatattttttctaggttctagatatatatatatatatattawatatatatatatatacatacacatatacatatatataaatagattttcttcaagtggccaattttcaaacatatatatatatgtgtatatatatctagaacctagaaaaaaaatatacatatatatatgtatgtgagtgtgtgtatgtgtgtgtgtgtgtgtatacatatatattctaggtttgaagaagcttcccaggctgactatgacatctattggtagcagccggactgcattcagaaattcctcttgtgtggtgccattctgctgtttctggttatatgtgttcatgggaacagttcccagtgggatggaaaatattctttcctgggaatcaccttgggcaatttacttcacctttggactttaaaaatctctaatgaaaagaagtgggactaaatt

SEQ ID NO: 586443 - DNA, 542 bp, Homo sapiens
agcgtgcagcaaagagttaacacagcaggcctgctttasaaaggcctgcttgcaagggtggcccttggctggtgtctgggaacttggctttcaagacagtttccaccaccctgactgctaagggtaactcgtgatgcataaactacatgtgccaacaatacaatttatgctttctccctgaaactctggaattttagtacatgctaagcagctggtgcctatgtgaccagcccccaataaaaaccctgggcactgagtttctaacgagcttgcctgtcaaacagcatttcacatgtgttgtcacagctcattggggaggaattaagtacatcctgtgtgacttcactgggagacgacttggaagcttgtcctgtttcctccctactttgctccatgcaccttttccctttgcagattttgctttatagtgtttcactgtaataaatcttagccatcagtacaactgtattctgtgtcctgtgaatcttcctagtaaatcaaacctggggatggtcttggggattcctgagacagcaagactc

SEQ ID NO: 586444 - DNA, 542 bp, Homo sapiens
agcgtgcagcaaagagttaacacagcaggcctgctttagaaaggcctgcttgcaagggtggcccttggctggtgtctgggaacttggctttcaagacagtttccaccaccctgactgctaagggtaactcgtgatgcataaactacatgtgccaacaatacaatttatgctttctccctgraactctggaattttagtacatgctaagcagctggtgcctatgtgaccagcccccaataaaaaccctgggcactgagtttctaacgagcttgcctgtcaaacagcatttcacatgtgttgtcacagctcattggggaggaattaagtacatcctgtgtgacttcactgggagacgacttggaagcttgtcctgtttcctccctactttgctccatgcaccttttccctttgcagattttgctttatagtgtttcactgtaataaatcttagccatcagtacaactgtattctgtgtcctgtgaatcttcctagtaaatcaaacctggggatggtcttggggattcctgagacagcaagactc

SEQ ID NO: 586445 - DNA, 542 bp, Homo sapiens
agcgtgcagcaaagagttaacacagcaggcctgctttagaaaggcctgcttgcaagggtggcccttggctggtgtctgggaacttggctttcaagacagtttccaccaccctgactgctaagggtaactcgtgatgcataaactacatgtgccaacaatacaatttatgctttctccctgaaactctggaattttagtacrtgctaagcagctggtgcctatgtgaccagcccccaataaaaaccctgggcactgagtttctaacgagcttgcctgtcaaacagcatttcacatgtgttgtcacagctcattggggaggaattaagtacatcctgtgtgacttcactgggagacgacttggaagcttgtcctgtttcctccctactttgctccatgcaccttttccctttgcagattttgctttatagtgtttcactgtaataaatcttagccatcagtacaactgtattctgtgtcctgtgaatcttcctagtaaatcaaacctggggatggtcttggggattcctgagacagcaagactc

SEQ ID NO: 586446 - DNA, 594 bp, Homo sapiens
ggagacacctcccagcaggggtcgacagacacctcatacaggagagctcyagctggcatttggggggtgcccctctgggctcaagcttccagaggaaaaaataggcagcaatctttgctgttctgcagcctccactgctgatacccaggcaaacagggtctggagtagacctccagcaaactccagcagacctgcagcagaggggtctggctgctagaaggaaaacgaacaaacagaaaggaacagcatcaacatcaacaaaaaggatgtccactcaaaaaccccaggtgaagatcaccaacatcaaagaccaaaggtagataaatccacgaagatgaggaaaaaacagcacaaaaaggctgaaaattccaaaaaccagaatgcctcttctcctccaaaggatcataactccttgccagcaagggaacaaaactggatggagaatgagtttgacgaattgacagaagtaggcttcagaaggtgggtaataacaaactcctccaagctaaaggagcatgttctaacccaatgcaaggaagctaagaaccttgaaaaaaggttagaggaattgctaactagaataaccagtttaga

SEQ ID NO: 586447 - DNA, 470 bp, Homo sapiens
acaccagggctttgaacattcccaggccctcatacaggtatcaaggtttacgaggaagaaactggtcctagccttagcccaaatccttaaacctttatataaactccatgccctgacctcctcacwgcagacataactagatagaacaccgttgtctcttgctgtttgttgcaaagattgctacagccttctctgtgcctaagtttttctaatcaatgctttggatggatcaaaaagaaaaaaaagaatttataactaaaaggaaaatattgtgtactatatattatatatagcatatataatatataatctgtataaaatacatgtaacatataatccattgtatgttatatgtaatttttatggaaatacaacaaattataagtataataattatgtatgttacatatatatatattttttcacgtttttaacttgaggtttaagtacctgtgatctttttttttttt

SEQ ID NO: 586448 - DNA, 493 bp, Homo sapiens
aggagagtctcgatctcctgacattcttatctgcctgcctcagcctccgaaagtgctgggattacagatgtgagccaccacacctagcctcaatttttatttatttatttatttgagacagagtctagctccgttgcccaggctraagtgcagtggtatgaacatggcccactgcagtcttgatctcctaggctcaagtgatcttctcacctcagcctcccatgtttccaggaccacagggatgcgtcatcatgcctgactaatttttaaaaaactttttggagagacaagggcttgccatgttgtccagtctggtcttgaaatcctgggctcaaatgatcctcgtgtcttggcctcctaaatgttgagattacaggcacgagccactgtgccttgcctcataactttttaaatggtcgaaatcataaaataccctttagcttcactaaacttttttgttttttttttgggcctgataatgttcctgttgtat

SEQ ID NO: 586449 - DNA, 555 bp, Homo sapiens
gtaaatttggggcaaaatattttagactgggcaatttataaacaatcgaaatttttactcacagttctagaggctgggaaggtccagatcaagtagccagaagattctgtgtcttgtgaagtcccatttctcatagatggtgttcttctatgtttcttcacatagtggaaggggcaaacaatctcctttgagtttctttttacaagggtataatcccattcattagggctctgccctcatgacctagtcacctactaaaggcccagctcttattattgttgcactggagattagctttctacatatgaattttgggaggacgcaaatattcagaccatagcagggagaaaaaatagtatcttttccttactcattgcaagtttcatggctgatacctctataaggaaacacagagcaaaaagagaaaagcataacaaatttatttaatatargttttatgagacactgaaatcttcagacagacccaaagccacggggaaattattattatttttttgagagagtctcactcttgtcgcccagcctggagtgcaa

SEQ ID NO: 586450 - DNA, 583 bp, Homo sapiens
agcattaaaaaaaaccctggccaggcgtagtggctcacatctgtaatcccagcactttgagaggccgaaatgggtggatcacctgaggtcgggagttcgagaccagactgaccaagatggagaaaccctgtctctactaaaaatacaaaattagctgggtgtggtgtcgcatgcatataataatcccagctattcgtgatgctgaggcagtagaatcacttgaacccaggaagcagagattgctgtgagccaagatcacaccactgcactccagcctgggcaaaaaagagtgaaactctgtctcaaaaaaaaaaaaaaaaaaggaaatcttcattcattcacttgtttcaaaaacttgtgagggctaatcttaatcttaatattgaagcttttaaattatcttgtgtttcaaaratctctgagaaaattatttcctttaacaatgttatccccatgtttaaaaacataaaatctgtatattgagcatacttaccaaatattgatttgaaccattattattgcttctaataaaactctcattaatatcttttatatgttgaatgtgtttgtcttgcaggtggta

SEQ ID NO: 586451 - DNA, 418 bp, Homo sapiens
aagttatatatttattgaggatttggagggtcatggctgtgggatatgatgaggtttctctttaaataacctgatcaatcttttattctttaattcatagtacccccctccttttctccttttctcctttttgcctttgttagatgccaggcatgccacagtaccaggtataatcagtaccagctcacattcctttccttatttggaaagaggactaactttctagctcattacagacaccccttaccctttcctctccactttcttttacgtgcccaccttatctaaaaaaagcaaatgtttagccaaccgggattagtttaggttgtatgacccaaccccagccaatggggaargggtacaggggcaggacttgcgtcaggaataaaggctctcgtgcccccttgttcaggtgtgc

SEQ ID NO: 586452 - DNA, 630 bp, Homo sapiens
tcaactatatgccaataaattggaaaacctagaataaatggatacattcttagacacatacaacctgagcagaccaatagcaagtaacaagatcaaagccataataaaaagtctcccagcaaaagaaagcccaggacccaatggcttcactgctgacttttaccaaatatttaaaaaagaactaacaccaatcctactcgaactctcccaaaaaatagagtacagaggaatactttcaaactaattcaataargtcagtattatcctgataccaaaaccagacaaagacacatcaaagaaagaaaaatataagccaatacccctgataaacattgatggaaaaatcctcaacacaatcctagcaaaccaaattcaacaatacattagaaagatcattcattataaccaggtgggatttatcccagagatgcaaggacaattcaacatatgcaaatcaatcaatgtgatacatcatatcaacagaatgaaagacaaaaaccatatgatcatttcaattgatgctgaaaaagcattggataaaattcaacatcccttcatgacaaaaaccctcaaaaaactcggtatagaggtaacatacctcaacacaataaaagccacatatgacaaacc

SEQ ID NO: 586453 - DNA, 566 bp, Homo sapiens
acatacctcaacacaataaaagccacatatgacaaacccacagctagtatcacagtgaatgaggaaaaactaaaagccttttctctaagatctggaacatgacaaggatacccattttcaccaccattattcaatataatgctggaattcctagctagagcaatcagacaatagaaaaaaaaaggcacccaaattagaatgagagaagtcaaattatccttgttagcagattatatgatttcatatttgtaaaaatctaaagattccaccaaaaacctattagaactgatcaacaaatttagtaaaattgcaggatacaaaattaacatacaaaaataatagcatttctatatgccaacagtgaccaatctgaaaaagaaatttaaaaactagtctcatttataatagctatgaataaaataaaatacccaggaatgaacttaaccaaaaaagtaaaatatctttacaatgaaaactataaaagaatgatgaaagaaatggaagatgacacagaaatatggaaagatattccatgttcayggaatagaagaatcaatattgttaaa

SEQ ID NO: 586454 - DNA, 600 bp, Homo sapiens
ctaatttttctatttttagtagagactggattttgccatgttggccaggctggtctcgaactcctggcckcaactgatctgcccaactcagcctcccaaagtgctgggattacaggcataagccatcatgtgcggttgttcaactgttgtttattatgcaagatgtgggtaaaagcttttctctcttatgaactggtgtgatcttattaggcagagagagcaatttaaactttcactttttcccttcatcaccaagtggcttagatctaagttgtggtatcaatacttatgttcacttgtatctagttctctatttctgattaaaaagattacaattcccggctcctgagctggttttttgaaaggatcaacaaaattgatagaccgctagcaagactaataaagaagaaaagagagaagaatcaaatagatgcaataaaaaatgataaaggggatatcaccaccgatcccacagaaatacaaaaactaccatcagagaatattacaaacacctctatgcaaataaactagaaaatctagaagaaatggataaattccttgacaaatacaccctcccaagactaaaccaggaagaagttg

SEQ ID NO: 586455 - DNA, 600 bp, Homo sapiens
ctaatttttctatttttagtagagactggattttgccatgttggccaggctggtctcgaactcctggcctcaactgatctgcccaactcagcctcccaaagtgctgggattacaggcataagccatcatgtgcggttgttcaactgttgtttattatgcaagatgtgggtaaaagcttttctctcttatgaactggtgtgatcttattaggcagagagagcaatttaaactttcactttttcccttcatcaccaagtggcttagatctaagttgtggtatcaatacttatgttcacttgtatctagttctctatttctgattaaaaagattacaattcccggctcctgagctggttttttgaaaggatcaacaaaattgatagaccgctagcaagactaataaagaagaaaagagagaagaatcaaatagatgcaataaaaaatgataaaggggatatcaccaccgatcccacagaaatacaaaaactaccatcagagaataytacaaacacctctatgcaaataaactagaaaatctagaagaaatggataaattccttgacaaatacaccctcccaagactaaaccaggaagaagttg

SEQ ID NO: 586456 - DNA, 500 bp, Homo sapiens
ggagaaaagggagagccagaatatttctccctttccttctctgatttgggtactgtcttagtctattttgtgctgttttaacagaataccacttagtctattttgtgctgttataacagaaccctattttgtgctgttgtaccagaatataacataatcttgtgctgttatacagamtcggtcatgtataataaagagaaaattatttctcacagttctggagcctgagaagtccaagaccaaggtgttagcatctgatgaggacctacttgccatgtcataacatggtgaagagcaaagggagtggaaggcggggactgaagctgcccttttataatgaaccaactccagcaatgacagcattaatcaattcatgaggttggagccctcatagcctgatcacctcttaagttcccacctcttaatattgctatgattaagcttcaacacaagtttgagagaagaaaaatgtttaaaccataacaggcagcgcgcctgac

SEQ ID NO: 586457 - DNA, 606 bp, Homo sapiens
catatggctccatctgtcaatgagatagcaagaggttttacagagacttctgggacagggtcaaattctccttcccactggcctcagtattgaaaaggcacaggagtaggagccaccattaagattactcgagcacagaggaggaacaaaaggagaaaaaggcttcatagtggaggtaacatgagttgcgtcttgatgactaatttagtaggcaaacaaagtaggggagaagagaactccatgaagagggaagagtgtgaacaagggctaggaggattcagacagcatagagtgtttcatggaaatagaacatcctggctgaagggaaaggagcatgtggaggtaggatgagagatgagacaggagcaggcctcaggcctaattatgaaaagccttgtaagccacgtaggtgactttggaattgagggctctgggaagggcayagtcaggctttattttttgtttttgtttttgtgttttgttttgttttgttttgttttttgttttagaaagatcactctggctactccctggtggaatgactagaggagtcttgcatagtctatattcatcttaaatagccttcaagaccacagactatgaggg

SEQ ID NO: 586458 - DNA, 412 bp, Homo sapiens
ctggatctgctgaaggaagagagatgataaactctaaagggtttgcaggacctggaatatggagacatgcctcggggtagatcctgaaggtgctggatcaaggaggatagaaagctgggtaaaagataatgagtcattatggggcattcttcccttcctgttaaataagattcaacatccygttaagtgcctcaggtgccagtcctgatatgctgctggggtgcttggaaaaatgactcacattgagtgaagtagggatggcaaactgaaggatcaaaaagctcagagtaatgggaatgatcaagtggatctactatatatggtaaggcaggatgcggtggctcacgcctgtaatcccagcactctgggaggctgagaggggtggatcacctgaggtcaggagttagagacc

SEQ ID NO: 586459 - DNA, 623 bp, Homo sapiens
agatcacctcatttgcagttgtaccctaatcaagccacttttgagtaaccacacattttgttctaaacaaaagagattatttgcttcccttctggcccaaagtcagattcttcttcctagtatgaactttcagcactttattttgattagttaagagaagtccaaaaatccatgctaaatatcaagataattcttagccttggcaattcaaaacaattaaaacttacgatgtttcctatggaggagttaagaaattaatctacttttcctaagtacagggaaaaaaacctgtcttcaatgcaaacttcaacagaatctacatctcaggaagaagatggggactgaaccacttagagcatctccagtcctcattacagaacactgtagtagtaagatgataatttaacataagaaaactgccttcctggattttccttgagaagtgattaatatgtaagagtggacaactcagggtttcacttctaccttctccatttgatgactctcagaatgaccagatataccatgcacggtgatggagaacaagaaccatagtttgaaatcagaacaatgggattccacccggcactsgtacctattaaatctcttcgaatctcagtttt

SEQ ID NO: 586460 - DNA, 578 bp, Homo sapiens
gtatttttagtagagacagggtttcaccatgttagccaggatggtctcgatctcgtgactttgtgattcgtccaccttggcctccgaaagtaaagtgctgggattacaggtgtgagccactgcgcccggccgctccggtctacattttatatctctactcttaagaggcagtatggtacaaggttaaaagtaagggacttctgagccagattatcttcattttaatcctggttctaccagttatttctgtgtgaccttgggcaagttatgtaacttctctgtgcctcagattgtttataagggagataataaaaatccttacagcatatagagttggtgaagttaaatgtggtgaaagttaaatgaataaataaagcatccacactagtacatgacccaaattaagtgtcatataagtgttgccgcattgcagttctcctcagtracggcctgtgacctgccatttctgtcggctcttaccaaggctcggtgccgccccgggcctctgctccattgtcatagtaatgtttgcactctgctagtcacctgtaaatatacatatttaggatcctaaaacc

SEQ ID NO: 586461 - DNA, 447 bp, Homo sapiens
gtttgcattgtgataaaagtgctgacatgagaagatagatatgtttatgtgtatgtgtgtataaatatctataaatatgtatataatctgtatatgaaagctccaatttcaactgttacttgagtgataatatatctgatatttgagaaatttctctgtaccttaagaaaaatctgaaatgtagttgcaatgtaaaaatagttcttgttctgactactcaaatgttattttaatcatgtcgttttacttattgaaggtatgctttttctatctaaaagcatgaattatgagaaacatttctcttgagaaagaaaaagacatctttctttcccccatcaccttagcaccacaagctgtgttgggcaggtgaatrgggccatcctgcatcgttctttcttccttggctgtgcctttgctgggtggccaggtaggcagcctcagctagag

SEQ ID NO: 586462 - DNA, 566 bp, Homo sapiens
ccagctggttctgggaaccctcctggcctgggcttccagactccccctgagtcagcacccagtgccacattgaaagaggcagcaggcaaccctgggcaaagacccttgagtctgacttctctttatgccactcaaccctagaacaaagatcattttcctgtcattactctccttgctcttaacaaacacacacactttaaatgaacgatacattttagatcatcagcaggccayttgtaattaaagtatggtgctggatacagcacgcggtatcatctttgatccttatagccaccctgtaaggtctacattctccccatttcagagattttcacttagactcagcgttttagcaacttgccgaagatcacaatgtaaatggcaaagttgggtttgtctcatgggtttaaagccaaaacccatgatccagccatgatcctgtgctgccttcctcttggaaaccccctacttgactatagactcctgtccctgccatcctttcctcttcggaaccaccaacatattctcctgtaatccagctgctcatggagtcaacaacttcttca

SEQ ID NO: 586463 - DNA, 611 bp, Homo sapiens
atttaagtttcagatatatatcctttttcaaaagaagtgaaacattaaagtcactacattagcctccctccagatacaagcactgtcataagtttgcttamtgttttcaatatttttgtataaatatgtatccattaatatagtgtttcgtgttttaaactttacgtaagtggtatcaaactgtacttaccttcatgcaatttgcactcatctatgttgtactttttttgcttctagaagttctctttggttctaattcaactatgctagcttgtcttgtacttctttaaacatagtaagaaaactttttccaataatacccaaatctgaagtctttggatatgttactgctgaagtttctatcacttctcactcctggttccttgtttccctgtatgcttttttttttttttccatgagttcacttttttaaattatagttcttcaaggcctaggatgcaggtgtgttcttccataaagggctattttgcctctgccaggtgcctggaggcagtaccagtttgagaccactttaaaatggcttggagcttattgaaatacccaggtgatgtgatttcagcttcaagtcctcaaggacaatttgtggtgac

SEQ ID NO: 586464 - DNA, 611 bp, Homo sapiens
atttaagtttcagatatatatcctttttcaaaagaagtgaaacattaaagtcactacattagcctccctccagatacaagcactgtcataagtttgcttaatgttttcaatatttttgtataaatatgtatccatkaatatagtgtttcgtgttttaaactttacgtaagtggtatcaaactgtacttaccttcatgcaatttgcactcatctatgttgtactttttttgcttctagaagttctctttggttctaattcaactatgctagcttgtcttgtacttctttaaacatagtaagaaaactttttccaataatacccaaatctgaagtctttggatatgttactgctgaagtttctatcacttctcactcctggttccttgtttccctgtatgcttttttttttttttccatgagttcacttttttaaattatagttcttcaaggcctaggatgcaggtgtgttcttccataaagggctattttgcctctgccaggtgcctggaggcagtaccagtttgagaccactttaaaatggcttggagcttattgaaatacccaggtgatgtgatttcagcttcaagtcctcaaggacaatttgtggtgac

SEQ ID NO: 586465 - DNA, 611 bp, Homo sapiens
atttaagtttcagatatatatcctttttcaaaagaagtgaaacattaaagtcactacattagcctccctccagatacaagcactgtcataagtttgcttaatgttttcaatatttttgtataaatatgtatccattaatatagtgtttcgtgttttaaactttacgtaagtggtatcaaactgtacttaccttcatgcaatttgcactcatctatgttgtactttttttgcttctagaagttctctttggttctaattcaactatgctagcttgtcttgtacttctttaaacatagtaagaaaactttttccaataatacccaaatctgaagtctttggatatgttactgctgaagtttctatcacttctcactcctggttccttgtttccctgtatgcttttttttttttttccakgagttcacttttttaaattatagttcttcaaggcctaggatgcaggtgtgttcttccataaagggctattttgcctctgccaggtgcctggaggcagtaccagtttgagaccactttaaaatggcttggagcttattgaaatacccaggtgatgtgatttcagcttcaagtcctcaaggacaatttgtggtgac

SEQ ID NO: 586466 - DNA, 646 bp, Homo sapiens
atggtgaattgaagcacttggttattaggggtgttctgtctccctggaggttctagcaccatttccaacagacattctgtgcattcatgagtgtttccgggcttcaaagacaagacatggcacccacattcacctggggccaagagcagagatgtgtccaacacttactgacttctggacacagctccaatgaacccctctctcatgggtatccacaggaggggccccacgaaaaaaaggggcatgtgttcttacatttttttttttttttttttttgagacagagtctcactctgtcacctaggctggagtgcagtggcacgatctcagctcactgcaacctctgcctcccgggttcaagcgattctcctgcctcagcctcctgcgtagcctgggattacaggcatgtgccaccatgctaggctaatttttggtatttttagtagagacggagtttcaccatgttggccwggctggtctcaaactcctgacctcaggtgatccgcccgcctcggcctcccaaagtgctggagttacaggcatgagctaccacgccccgccgtttttcttctatttctactaaacatttttaaattgcggcatgaaggaatgctgatattaataactattatctgtgtgctgggaa

SEQ ID NO: 586467 - DNA, 568 bp, Homo sapiens
tcaaaaaaaaaaaaaaaaaaaaaaaaccggctaaaactgtgtcaaaatgttcttaaggagcctatggtctccacggtgctaaaaagagcctggtgctgggccgactggcagggctgagcatcctcctgccccctcgccactgatgtttactaagcactctgagccaatgagacccccagcagcagaaagggcacaaggtggcgccagggcagcagggccagatctttctcatgcacctcgacctcttgcagactttcttcgtgagatgtactactcatttcaaaactgctttgcagggctcccctatgtattcggggggcccacggcacactcaggctggaratccttcctcactgcgctcaagatggcctcagccagacaccagttacccagctgaaagtcacaatccctcccagaagtctcccaacactagtgctgaccagaggtggggctctcaggctaggagtttcacacacaatgacaggctgctgggggacattgcaggaccccttttcctctcctctccatgctagaagccagccctaggcagctgcagttactccctgtg

SEQ ID NO: 586468 - DNA, 500 bp, Homo sapiens
gtattatgtttgtttttggtagattacaaaattatatgatcactccaaaaattaccttgccctttatagtaaaaccttccattgtaaacttctggcaatcactgatctgtgttcctctagcattgcttttttttcagaattttatacaaatggaatcgttcagkctgtagcctttgagtctggctactttcatgtactgtatcaacagttattcctttttattgccaaatagtaatccattgtataaatactacatggtttgcttattggtttgtcattggaggaatatggactattttcactttttggtaaattataagtggattggaattcacaaagtgctttttgtctgagcataggttttcatttcacttgtgcaaatgactaagggtgtaggattgctgagtcacatggtccgtgtacgtttgactttatcagaacctgccaaattgtcttccaaagtgctgtgccacttctgtttctttaataaatacaggggt

SEQ ID NO: 586469 - DNA, 500 bp, Homo sapiens
gtattatgtttgtttttggtagattacaaaattatatgatcactccaaaaattaccttgccctttatagtaaaaccttccattgtaaacttctggcaatcactgatctgtgttcctctagcattgcttttttttcagaattttatacaaatggaatcgttcaggmtgtagcctttgagtctggctactttcatgtactgtatcaacagttattcctttttattgccaaatagtaatccattgtataaatactacatggtttgcttattggtttgtcattggaggaatatggactattttcactttttggtaaattataagtggattggaattcacaaagtgctttttgtctgagcataggttttcatttcacttgtgcaaatgactaagggtgtaggattgctgagtcacatggtccgtgtacgtttgactttatcagaacctgccaaattgtcttccaaagtgctgtgccacttctgtttctttaataaatacaggggt

SEQ ID NO: 586470 - DNA, 500 bp, Homo sapiens
gtattatgtttgtttttggtagattacaaaattatatgatcactccaaaaattaccttgccctttatagtaaaaccttccattgtaaacttctggcaatcactgatctgtgttcctctagcattgcttttttttcagaattttatacaaatggaatcgttcaggctgtagcctttgagtctggctactttcatgtactgtatcaacagttattcctttttattgccaaatagtaatccattgtataaatactacatggtttgcttattggtttgtcattggaggaatatggactattttcactttttggtaaaytataagtggattggaattcacaaagtgctttttgtctgagcataggttttcatttcacttgtgcaaatgactaagggtgtaggattgctgagtcacatggtccgtgtacgtttgactttatcagaacctgccaaattgtcttccaaagtgctgtgccacttctgtttctttaataaatacaggggt

SEQ ID NO: 586471 - DNA, 632 bp, Homo sapiens
tacatcttaaaaatgatttctgatccacgttgaataatgatggcctataaatattttttcttgcacttgccttgttgggttttgatatcaaggttatttttattttaaccttataaaatgaactggggagtcttctttttttattctctcagtttgtgttagtggcagagttttttttgtttggttggttggtttctctttttcttgtatgtttcatggaactttttggtgaaggcacttgggcctggaaatttctttatggsaagttttttcattactgattcaatatatttaatctatgtaagatttttttctactttttgagtcaattttgattttttttttccaaaaattcatatctcaccaagtatggtggcttatgcctgtaatcccagcactttgggaggctcaggtgggaggaccacttgactacagtagttcaagaccagcctgggcaatatagtgagactccatctctgcaaaaaaaaaataaaaattagcttggtgtggtggtgggtgcctgtagtgtgagctacttgggaggctgaggtgggaggatcatttgagccaggaaggtcgagactgcagtgagctgtgattgtgccctgcactccagcctgggcgacagaatg

SEQ ID NO: 586472 - DNA, 632 bp, Homo sapiens
tacatcttaaaaatgatttctgatccacgttgaataatgatggcctataaatattttttcttgcacttgccttgttgggttttgatatcaaggttatttttattttaaccttataaaatgaactggggagtcttctttttttattctctcagtttgtgttagtggcagagttttttttgtttggttggttggtttctctttttcttgtatgtttcatggaactttttggtgaaggcacttgggcctggaaatttctttatggcaagttttttcattactgattcaatatatttaatctatgtaagwtttttttctactttttgagtcaattttgattttttttttccaaaaattcatatctcaccaagtatggtggcttatgcctgtaatcccagcactttgggaggctcaggtgggaggaccacttgactacagtagttcaagaccagcctgggcaatatagtgagactccatctctgcaaaaaaaaaataaaaattagcttggtgtggtggtgggtgcctgtagtgtgagctacttgggaggctgaggtgggaggatcatttgagccaggaaggtcgagactgcagtgagctgtgattgtgccctgcactccagcctgggcgacagaatg

SEQ ID NO: 586473 - DNA, 632 bp, Homo sapiens
tacatcttaaaaatgatttctgatccacgttgaataatgatggcctataaatattttttcttgcacttgccttgttgggttttgatatcaaggttatttttattttaaccttataaaatgaactggggagtcttctttttttattctctcagtttgtgttagtggcagagttttttttgtttggttggttggtttctctttttcttgtatgtttcatggaactttttggtgaaggcacttgggcctggaaatttctttatggcaagttttttcattactgattcaatatatttaatctatgtaagatttttttctactttttgagtcaattttgattttttttttccaaaaattcatatctcaccaagtatggtggcttatgcytgtaatcccagcactttgggaggctcaggtgggaggaccacttgactacagtagttcaagaccagcctgggcaatatagtgagactccatctctgcaaaaaaaaaataaaaattagcttggtgtggtggtgggtgcctgtagtgtgagctacttgggaggctgaggtgggaggatcatttgagccaggaaggtcgagactgcagtgagctgtgattgtgccctgcactccagcctgggcgacagaatg

SEQ ID NO: 586474 - DNA, 632 bp, Homo sapiens
tacatcttaaaaatgatttctgatccacgttgaataatgatggcctataaatattttttcttgcacttgccttgttgggttttgatatcaaggttatttttattttaaccttataaaatgaactggggagtcttctttttttattctctcagtttgtgttagtggcagagttttttttgtttggttggttggtttctctttttcttgtatgtttcatggaactttttggtgaaggcacttgggcctggaaatttctttatggcaagttttttcattactgattcaatatatttaatctatgtaagatttttttctactttttgagtcaattttgattttttttttccaaaaattcatatctcaccaagtatggtggcttatgcctgtaatcccagcactttgggaggctcaggtgggaggaccacttgactacagtagttcaagaccagcctgggcaatatagtgagactccatctctgcaaaaaaaaaataaaaattagcttggtgtggtggtgggtgcctgtagtgtgagctacttgggakgctgaggtgggaggatcatttgagccaggaaggtcgagactgcagtgagctgtgattgtgccctgcactccagcctgggcgacagaatg

SEQ ID NO: 586475 - DNA, 584 bp, Homo sapiens
gtgtgcagtgacacagtctcggcttactgcaacctctgtctcccaggttcaagcaatcctcccacctcagcctcccgagtagctgggattacaggcacacaccaccatgcccagctaatttttttttttttggtatatttaatagagatggggtttcatcatgttggacaggctggtcttgaactcctgacctcaagtgatccgcctgcctcagcctcccgtagtgctaggaatgcaggtgtaagtgaccatgcacagcctcggccttctctaatgacatcagagaagacagcagccctgcccctgactcaggacaagcttgctacaggaaatgaggtcaacagacgmgcagctggccaccaggcagagcaaagccactcatttactccactagtatttactgtgtaccctctagaggccagatcctggggagcagtttcggagcaggcacagaaacacaaggcaggatccttgacttcagggacctcactgcagggtacctcatcaaatctgcttacacagtccgggtatcaagcaccatctagaagtgatttcagtgtgggcctctaaaagacagagagaaa

SEQ ID NO: 586476 - DNA, 506 bp, Homo sapiens
gattacgccaagagttcctaaccctatggccttaggctgcttcagccaatgagagcccagccagagatcagaaggagggaagagggtgaggtttgggtacttacttatttattgcctggctgcctccctgcaaggttggctcaggctggctttgtccctggacacagtcccaccctgcccttccaaaatggccaactctgtgtgcgtctctcttctcatctaaactgttccctcctttgttgttatgggccaggtgggtaaaggctggggtgctactaagccctgggtcactaggtttcccactgtgrctctcctgtaccccacctttctaaatgaaccctccttaagcaaccctttttttaggccccccacctttcctatcagggcggtaactagtacagacaccagcagttcctggatcttcttttcccagccatcctcgggggtctgtggaaaaagacaaattactattcagtggaaccgaagaatgattccacccgaagaaa

SEQ ID NO: 586477 - DNA, 665 bp, Homo sapiens
ataagtttcttatgttactgctcaggagatacttacgataagatacatggcaaatctgataatcaaagtagaggacagaaatagagacttgaaatgaatgaggctttcactttgtattgtatttgatttcttcttagaatgtaatcatgaactaattgtgtaattaaaattttaattgatagaagttggccaccagatctccacattggcataaatgatatctctccttagtgttagaaatgaaactgtgagtctcaaaggttttgatgtggaagagaataaagatcttcagagatctctggtctagcctttctctggaatctgtcctgagtgaggagcatttatcctttgcttgaaacacttccagggacaaggagctcatcattgctaaagcagcttctattatacaggaaaagcaaacaatatggtttagtggaaaaagtacattctttagaggcaaacagcctgaggcttaactcttggtcctaaccatgaaaacttagccctggtttcctaatctgtgraatggggttaagatgcctccctcaggcgtctgccattgctgggcttgagtaggtaaacaaagtggatggggaagctcgaactgggtggagcccaccacagctcagcaaggcctgctgcctctgtagactccacctctgtga

SEQ ID NO: 586478 - DNA, 706 bp, Homo sapiens
gagaacaaaggacacatcagagaggagggaaatgacactgaagtttgaaccagctcaggagaggtgaaaaaaacttacacgtgaaagaggattttccagtcacccatccctctgcagcctttcctgggtaaagtcaaagcctggcacagccacagccaatggcctgcactgccccctgcaggcagaaatccttcagcagtgacgatggacttcccctagttccccgcacagctttgcagggagcaagcctgtcgtgggaatggtttccagaactcctccccaggccactcayctgacaccctcgcctgcaggtacaggaccaccagttctgtcgccctaggaacgtgtcccctgtacctggcaccagaagtaaatgggaatggaggggaaaaaaggcttaaatatacagagccagaagttaaatctgtgaaaaaatctttaagtcatcaaatatatacaattaattccacaatctggaattctcactggcatttagtcaaaatggaagttctcgactctcaagaatatattcaagaacacagagtattcagctgtaaatgcaacaattctttctttgttgatgggaattgggtgaaatatgatctttcagatttgctgtttgaaaagtacaatcctgtagcaacactacaaacaatgagtagtcagtatctgaagttgtatggcttcagaatcacatacaacgatc

SEQ ID NO: 586479 - DNA, 706 bp, Homo sapiens
gagaacaaaggacacatcagagaggagggaaatgacactgaagtttgaaccagctcaggagaggtgaaaaaaacttacacgtgaaagaggattttccagtcacccatccctctgcagcctttcctgggtaaagtcaaagcctggcacagccacagccaatggcctgcactgccccctgcaggcagaaatccttcagcagtgacgatggacttcccctagttccccgcacagctttgcagggagcaagcctgtcgtgggaatggtttccagaactcctccccaggccactcatctgacaccctcgcctgcaggtacaggaccaccagttctgtcgccctaggaacgtgtcccctgtacctggcaccagaagtaaatgggaatggaggggaaaaaaggcttaaatatacagagccagaagttaaatctgtgaaaaaatctttaagtcatcaaatatatacaattaattccacaatctggaattctcactggcatttagtcaaaatggaagttctcractctcaagaatatattcaagaacacagagtattcagctgtaaatgcaacaattctttctttgttgatgggaattgggtgaaatatgatctttcagatttgctgtttgaaaagtacaatcctgtagcaacactacaaacaatgagtagtcagtatctgaagttgtatggcttcagaatcacatacaacgatc

SEQ ID NO: 586480 - DNA, 706 bp, Homo sapiens
gagaacaaaggacacatcagagaggagggaaatgacactgaagtttgaaccagctcaggagaggtgaaaaaaacttacacgtgaaagaggattttccagtcacccatccctctgcagcctttcctgggtaaagtcaaagcctggcacagccacagccaatggcctgcactgccccctgcaggcagaaatccttcagcagtgacgatggacttcccctagttccccgcacagctttgcagggagcaagcctgtcgtgggaatggtttccagaactcctccccaggccactcatctgacaccctcgcctgcaggtacaggaccaccagttctgtcgccctaggaacgtgtcccctgtacctggcaccagaagtaaatgggaatggaggggaaaaaaggcttaaatatacagagccagaagttaaatctgtgaaaaaatctttaagtcatcaaatatatacaattaattccacaatctggaattctcactggcatttagtcaaaatggaagttctcgactctcaagaatatattcaagaacacagagtattcagctgtaaatgcaacaattytttctttgttgatgggaattgggtgaaatatgatctttcagatttgctgtttgaaaagtacaatcctgtagcaacactacaaacaatgagtagtcagtatctgaagttgtatggcttcagaatcacatacaacgatc

SEQ ID NO: 586481 - DNA, 616 bp, Homo sapiens
ctggctgccaaggttggacccacctttagctacaaacccagaggcttacagtcagtttagagctgaatccttagcagcggtttcagtcacccctgatgaatgcacgtcttctctcacatccaaactagaaagacacagaagaaataagattgatgccttgtcaccacactggaggtgagctgtaattcacatgtgtgctgggcagacaatgaaacaagacctgcagataaatcatctaagagcacatagggaaagactggatgctgtggagccggagggtctgggttcatgcactagcatcagtattctgtaactgagcaacctcaaccagtttggtaagctatttgagcctcagtttcctcatctgtaaagtgagatgatgatgataatacatccagattagrcacagaatgtgaagtgctttgaaaatgatcatcccccttcccttggctcctcttgtgtgagagagcttggaatttaagataaatggagagcctttctctactgttagctctgtatccatggatccaggaagttagaggcagcagatgttacagaaacgtccatttgtaaataaaacagagtgcaatgtattccacagtcaaagagtttaggt

SEQ ID NO: 586482 - DNA, 460 bp, Homo sapiens
aaaaaaaaaaaaagaaaaagaggagtctgtgccatccttaggtgtactttcattttggaggaagagggagggaagacacagggasaggtgtctggtctcttcctgaaagccagtgaagcagggtatgattatgtcttaaccttaagtctggataaagtctcagagagagagatttggggtccctaaatttcccatttctgtcccactcctgagctctaaaaaagttatacctgtgtgtattttcttctacctttgtttacatcaaagtaacatgtatgtgttaaacatacattatgaaacacaggcttctaatgaaaatcagcagtctctaaatagcttcaccagaacccaatccaaccagccttaattaaaccaatgcctggaggccaccattttcaactatgttagctgttcctttgcttggctacgtccatgtgtctgattaatgctgctaatcctt

SEQ ID NO: 586483 - DNA, 460 bp, Homo sapiens
aaaaaaaaaaaaagaaaaagaggagtctgtgccatccttaggtgtactttcattttggaggaagagggagggaagacacagggacaggtgtctggtctcttcctgaaagccagtgaagcagggtatgattatgtcttaaccttaagtctggataaagtctcagagagagagatttggggtccctaaatttcccatttctgtcccactcctgagctctaaaaaagttatacctgtgtgtattttcttctrcctttgtttacatcaaagtaacatgtatgtgttaaacatacattatgaaacacaggcttctaatgaaaatcagcagtctctaaatagcttcaccagaacccaatccaaccagccttaattaaaccaatgcctggaggccaccattttcaactatgttagctgttcctttgcttggctacgtccatgtgtctgattaatgctgctaatcctt

SEQ ID NO: 586484 - DNA, 460 bp, Homo sapiens
aaaaaaaaaaaaagaaaaagaggagtctgtgccatccttaggtgtactttcattttggaggaagagggagggaagacacagggacaggtgtctggtctcttcctgaaagccagtgaagcagggtatgattatgtcttaaccttaagtctggataaagtctcagagagagagatttggggtccctaaatttcccatttctgtcccactcctgagctctaaaaaagttatacctgtgtgtattttcttctacctttgtttacatcaaagtaacatgtatgtgttaaacatacattatgaamcacaggcttctaatgaaaatcagcagtctctaaatagcttcaccagaacccaatccaaccagccttaattaaaccaatgcctggaggccaccattttcaactatgttagctgttcctttgcttggctacgtccatgtgtctgattaatgctgctaatcctt

SEQ ID NO: 586485 - DNA, 458 bp, Homo sapiens
aaaaaaaaaaaaagaaaaagaggagtctgtgccatccttaggtgtactttcattttggaggaagagggagggaagacacagggacaggtgtctggtctcttcctgaaagccagtgaagcagggtatgattatgtcttaaccttaagtctggataaagtctcagagagagagatttggggtccctaaatttcccatttctgtcccactcctgagctctaaaaaagttatacctgtgtgtattttcttctacctttgtttacatcaaagtaacatgtatgtgttaaacatacattatgaaacacaggcttctaatgaaaatcagcagtctctaaatarcttcaccagaacccaatccaaccagccttaattaaaccaatgcctggaggccaccattttcaactatgttagctgttcctttgcttggctacgtccatgtgtctgattaatgctgctaatcc

SEQ ID NO: 586486 - DNA, 458 bp, Homo sapiens
aaaaaaaaaaaaagaaaaagaggagtctgtgccatccttaggtgtactttcattttggaggaagagggagggaagacacagggacaggtgtctggtctcttcctgaaagccagtgaagcagggtatgattatgtcttaaccttaagtctggataaagtctcagagagagagatttggggtccctaaatttcccatttctgtcccactcctgagctctaaaaaagttatacctgtgtgtattttcttctacctttgtttacatcaaagtaacatgtatgtgttaaacatacattatgaaacacaggcttctaatgaaaatcagcagtctctaaatagcttcaccagaacccaatccaaccagccttaattaaaccaatgcctggaggccaccattttcaactatgttagctgttcctttgyttggctacgtccatgtgtctgattaatgctgctaatcc

SEQ ID NO: 586487 - DNA, 510 bp, Homo sapiens
gcattctgaaaatggaaaaaaaaatcccagaatctttatattgggttacagagggaactctgaagatgagacagctggaaaccggtttttaaaaaccattctgctgtggctggtgccatttgaatgtaatttacatgcatataaaagtgttcctttagaaaaaaggagatcctgaggccagataaaatttgcatttatttcccccgtgctttcttaactcctaaaattgcttctggacatttctccttctgttcaagaccacagaacacggctcaataaacatccygtgctcttcttccaccccggggtcctgtgaccttccttctctgcttgcaatctccctccctcctcccactcccacctcttcctggttttactcttaacgaacagacatggttgattctgttcagttgtttattaattttttttccattttctattcaaggccactccctttttttttctcctttaagtttggagttccttttggccacctaatgaactcctata

SEQ ID NO: 586488 - DNA, 517 bp, Homo sapiens
tgggctaacgtgctgtcttcctctttccagtgcgccggtccaaggcggctgatgaggagaggagccgccgagcccagcgcgcccgggacgagtaccgacaycactcgctccgtgctatccagaagggcacggtcgctggcctcagctccatgttccgggagcttggccagagccatgagcaggaggcaagactctaccaccacctccccgacccgggtctgccgcagccccttgccctgccggtcaggtgggtccaggctccgtgttggtgtggttggggcaagggccttggattagggcatgggacaccggggtccccgtcccgggtctgccccagatttgctgtgtagtttggggctagcatttcccctctggacttcagccctagtctagggtaggagagggaggagagatgtgggagttggagatttgtaataactttggagttctgggagctttgacctttttaaggtcaaggattcctttgagaatctgaagaaagcggtgtaccttcttc

SEQ ID NO: 586489 - DNA, 631 bp, Homo sapiens
gattttacacttcaaattctccacatgtctggtaattttagcttgctttagggataaggggaggatttaagtgaaagccctttaaataggaattaaactcatttgcacaatggagacccagagatctctcctgcgagcacgatgaggcattttatagaatttaacccttcaaatattgttttatttctttgctttccctccctatggaattattcatcaagatgaactctaagccaaatcgagagataccaagaactatacagcttccaaaaatactctgctcgtattcaaaagatagtagccagttttgcaactcagagtgctaggatttaggaaaggatggatgcccatcatttgaaagaccactaatattgctctttagctaagtagacaggsaatgtgagccttctgaaaattgacaacctgcaaaacagaggtcctaagggcacacaccatagaaagcttgtctagcagctcttctcccttcactgaacacagggccaaatgcctaaccctgcatcagtccaatctagcttgcctagagaccaagtgatgggctctaaaaccttctgctaaattagcagatatttctggttggtagacaggtgaacaggtcagcaggtagcatgga

SEQ ID NO: 586490 - DNA, 551 bp, Homo sapiens
aatgcaggttgttatagggactaaggtttgacagtaatggaatctacagtctttctccttggtgattagggcagataccagcatggaattrcaggttcaatttacttttcatggagtaggaatagattctgaacgtatcttcaaggcatgaactcagtgattacataagctgtgctcaatattctgcacactcatatctcaggatgaacacaatttggatcatttaaaatgtctataatgatataaatattgaattatatagaggaaaagtaaagccatcttgagagataagttaaatctacatgtgggtccccacaaaggggaagctccatcaaccagatgaggacggctgctctcagtgtggtcccacagcagcgcccatgtgctgtcagagtggatgatggtggtgtgaggaaagagccagccggggccctgcatctgagccatggagccacctgcaaagcccccaagggcagagatggtcctgcagctccccctagtcagcagcccaggtaatccggccaaggcaggacaattgacatggtgcaggt

SEQ ID NO: 586491 - DNA, 549 bp, Homo sapiens
ctcactctgttggcccagctggagtgcagtggcaccacctcggctcactgcaacctccgcctccgggttcaagtgattctcctgcctcagccaagtagctgggataacagggggccgccatcacacctggctaatttttagtagagatggggtttcaccatgttggccagactagtctcgaactcccaacctcaaaggatccacatgtctcggcctcccatttgctcccttttctggtctcattcctccctgtcctccgtttttccctaggtacagttgcatggcaatcatccttttcccacaagccttgcctgttctggtgtgtctctgtgctttgaaggtgcaattcttctgctgagaggccccttctgcacccattcatctaacaaactggtcatcctgcatcacccactctactgttgtagctatccctcactaagcttcagcctccctactgcatgctcccccagtacttcaccttacctgtgacagcgtgattcccatcacatcaccattagtggaccmcatgtctcctttgtcttttgcttt

SEQ ID NO: 586492 - DNA, 632 bp, Homo sapiens
cagtgcttatccctattgaggctcracgatttttgtctttggtcagtgagagcctctgggttcagaattgcagctgagttctttaaatgtggtcctggtagtcttccgcagctccctcactctccgggtttccttactctccggcctcccttactctccggtatgatgtgatgattcagtgtcattgtgggcatctcatgcccagatcaggaatcgctatttctttgtggagccttagcttgttttagtggaaaatgttattttaaggccacgatactgccatatttaaaaatagatatgtacaattatttcttgattcttttccactttagctattatttgttgttttactactgaaagcaacattttgcgctcattgaagctttcccaccctcctcccagcaaaacatttagtacttacaatgttaagattaggccaaaattcacaactgaattttttgtgtgctgtaattatatccatctatttatttatttatatttgagacggagtctccctctgttgcccagcctgcagtgcaatggtgtgatctcagctcattgtaacctctgcctcctgggttcatgccattctcctgcctcaacctcctaagtagctgggagtacaggcatgc

SEQ ID NO: 586493 - DNA, 469 bp, Homo sapiens
ttagacatggggttcgcatgtctcagatggccccgaaggtactgatccaggctctggtgctcctggaaggcaagactcagattctgctccatctcctcccatctctgggcgrgtctctggcatctctggcccatgagggtcaatctgtgtggaggggacaagctctgagcacgtgtgggtctgaggttcctcttccatgcagggctgaggtctcctgctcctccccagcttcctgtcccggcctgtagtccttcccctccactcccttcctcttttctgctcacacaggaagccctggaagctgttcctcagacatgccgctgctgctactgctgcccctgctgtgggcaggtgagtggctgtggggagaggggtgtcgggctggccgagctgaccctcgttcccacaggggccctggctatggatccgaatttctggctgcaagtgcaggagtcagtgacggtacagg

SEQ ID NO: 586494 - DNA, 469 bp, Homo sapiens
ttagacatggggttcgcatgtctcagatggccccgaaggtactgatccaggctctggtgctcctggaaggcaagactcagattctgctccatctcctcccatctctgggcgagtctctggcatctctggcccatgagggtcaatctgtgtggaggggacaagctctgagcaygtgtgggtctgaggttcctcttccatgcagggctgaggtctcctgctcctccccagcttcctgtcccggcctgtagtccttcccctccactcccttcctcttttctgctcacacaggaagccctggaagctgttcctcagacatgccgctgctgctactgctgcccctgctgtgggcaggtgagtggctgtggggagaggggtgtcgggctggccgagctgaccctcgttcccacaggggccctggctatggatccgaatttctggctgcaagtgcaggagtcagtgacggtacagg

SEQ ID NO: 586495 - DNA, 631 bp, Homo sapiens
gtgtctgtgggtgtctgtcttgctcatcctcagtatctacaacagtgattggcatgtagcaggggttcactccctatctgtggagtaaataaaaacatgtttcaggcaacagctcagcatgtgagagtactgctgaatccaggctgcacaggctacaaggttgcatgtgagaaagtgtgtgtgcgtgtgtgtgtgtgtgtgtttgcgtgtgtgtaggggtggccatggggagtccatattcccagggaagccagttcatcctcagggcatttgttttagagatgaagtctctgggaagaggaggtggtgataacaggagtgtgactttccaggaaatcccacaggtgtctgggcactacctccttggtctgcttagaaaggggtcttgactggtcaaggctggttttctgccctgggagctgggatccagggcaattccttcccccattcttttagttcttttcgtgactgaccttcttttcagaagaggagtcctttttacttccctggcaggacaggaatcctagaattcagcactggtagaggctgaggccacaactggccttcattgtacatatgaggaaactgaggcccagcawgggggttgactgcatacaagatctccctgtgc

SEQ ID NO: 586496 - DNA, 631 bp, Homo sapiens
gtgtctgtgggtgtctgtcttgctcatcctcagtatctacaacagtgattggcatgtagcaggggttcactccctatctgtggagtaaataaaaacatgtttcaggcaacagctcagcatgtgagagtactgctgaatccaggctgcacaggctacaaggttgcatgtgagaaagtgtgtgtgcgtgtgtgtgtgtgtgtgtttgcgtgtgtgtaggggtggccatggggagtccatattcccagggaagccagttcatcctcagggcatttgttttagagatgaagtctctgggaagaggaggtggtgataacaggagtgtgactttccaggaaatcccacaggtgtctgggcactacctccttggtctgcttagaaaggggtcttgactggtcaaggctggttttctgccctgggagctgggatccagggcaattccttcccccattcttttagttcttttcgtgactgaccttcttttcagaagaggagtcctttttacttccctggcaggacaggaatcctagaattcagcactggtagaggctgaggccacaactggccttcattgtacatatgaggaaactgaggcccagcatkggggttgactgcatacaagatctccctgtgc

SEQ ID NO: 586497 - DNA, 539 bp, Homo sapiens
cttcctcgggctcctacccttttgtagtgttcacttctgtatctttgttcctcctgcttggaatgcctcctccttcagggactgcatttatttttcactgttgtgtcctcagaaccaaacacagtgcctggcacataggtgctcaagtgtttttctttctttttcttttttatttatttatttttttttgagatggagtctcactctgttgcccaggctggagtgcagtggtgcaatctcggctcactgcaacctccatctgctgggttcaagcaattctcctgcctcagcctcccgagcagctgggactacaggtacgtgccaccatgcccgggtwttttttttttttttgtatttttagtagagacagggtttcaccatgtttgccaggctggtcttgaactcctgatctcgtgatctgcccgcctcggcctcccaaagtgctgggattacaggtgtgagacaccgtgcccggcaagtgttttttgactaactgactgactaaatggatgaatgaacaagttaatccttccccagct

SEQ ID NO: 586498 - DNA, 622 bp, Homo sapiens
gctggtcttgaacttgtgacctcaagtgatctgcctgccttggcctcccaaagggctgggattacaggcatgagccaccgtgcctggccttaggcttagcagtattctaatgagcacatcccaggtacttaacaataacactcctggacctgggccttgtttgaagctggcagcatcatctctacactgttggaccagatagaagacatggaatatgccaaagcctttgagtccttgtcttcctgcatcgaccctgaacttccagcagaaagcctcgagttagatgcatgtacatttttcctttggagaaatagacagttttgtggctagctttatgatgatcaaaggtcagctgggctgagcrtggggttctccaggtagcattttggacatggtttggttaggagagtagagaatggaaaatgagaaaaggaaatagtctgtaagaggggcttcttcattcaaagtattgattggctctgcattcctcatggtgggattcctttaatggactgatgtgtttcctgggaagtgggctcagagtgcgcaggttatgctctaacttttgtgtccaagatgtggaggcggagccatggcttgtgcctttgggatattggcagcc

SEQ ID NO: 586499 - DNA, 630 bp, Homo sapiens
cattatttcaggggaaaaaagcctttgtgatttagaaatgattcttgtgtgagcactgcctttaaataacaatgggttgaaagaaagagcttgttgcttcatcatccccgttgctctgggggaaaaactttgaatattagatcagagtctcatctgcatctaattagacatgcctaccactcatcccggaatatcaactctgtcctcattgtgaaatggggcagattatttgaaatccagctttgaattgattttttacccaacagaagatcattttgcttctaaccaaagcgttgagttgaacttgacgacatcayggtcattttgcgtcttcagtgtatttggtgttgggggaaaaccaaccctgctgctcctctactgaagtggaatttgtgtctaccaaatgagagctggagcagccgtttcacagctccggggctccctttctggatcggggggagaggctctagaggagcatgtgatttctgcagatgtctgcctgtaggagacagaactagacaccagcaaaacaaacctggctgaggctggttgttcgtgtggcccaggttaactgggtgattaatctccatttgataaacagggggtcagccctgagccggagcatgagag

SEQ ID NO: 586500 - DNA, 651 bp, Homo sapiens
acgagtcatttagttttcttatgagtatgagtatgttcctgaagaataggttcatgagaatattcatatttcatatactcaagaagaatacattcttaatcatatctaaacaaagtgtgtcttcaatattgttttaatttaatatactcaaattaatttaatatactcaaaataaatgtttcaacaaaattgttggcacactagaaaatttattacattcagtgaattagtcattcaaaaaattgctccttcagggaactgatttttgatgacttggtctgttttcaatgcggactgaaattagtggggcaggattagggytgggatgagggtggtgggatctggaaacaatacagaatggctctcgttgagaatgaagtgagggcagcctaggacatagtgcctgtgtccattgctggggccagcctgcaggaaaaggggtgctataataagcctagataaatggaggcattgggcttgaggctacttatttatatcctgctaaaactcaaattgctctgaaaataaatagtgaggctggatctgtagaagattaaatgagttgacccagctgtgggagaactggggcaggcagaagctggggaaacaggaatgggggcgagacattccactgagcaggccaaatttatg

SEQ ID NO: 586501 - DNA, 403 bp, Homo sapiens
tggccttgtggatttggggtaagaagagcatatcaatgtcagtgctcccagcattagtaggtacacagggcatggcagctgctccacttgtgccctgtggcttgtgggccaagaaaactacttccaggcatgccctaggtgatggagagaatacaaaggaatgtccttctgcctcctgccttcttgccttgcatcctagctggccccacrgcttgtgatagtctttagatttggtggccactgcatggacaaggagcctactgtaggacatctgcactgcagggactctaaactcggttatgagagggtgtcattccctgctctagaccccatcgctgaggtgttgctgagagggctgggctgggaggcctgcgtttccttggccaccactcctgtccctggt

SEQ ID NO: 586502 - DNA, 631 bp, Homo sapiens
taagccgtaccctaagattataaactgcaargatgtgcaaagttggctaagggctggtgtatttggcagggctctatacttatacattgtcacttttttttttttggagacagagtcttcctttgtcgcccaggctagagtgcagaggcgtgatctcagctcattgcaacctctgcctcacaggttcaagtgattctcctgcctcagcctcccgagtagctgaaatcacaggtgcatgccaccatgcccggctaattttttgtatttttaatagagacagggttacactatattggcaggctggtctcgaaatccagacctcaagtgatccgtctgcctcggcctcccaaagtgctaggattatagccgtgagccactgcatctggccaattgtcacttttattacataaatattacatgtttattgcagaaaaaattaaataacacaaatagactaaagattaattataaattaaaaacatctataacatcaccttccagagataacacttttaacctctctctgtgtatgtatacacacactccacacacataatctttttaacacttagtggattgtggactcctttccaagtcgtgaaacagacatttatgttgtcaagtactgagc

SEQ ID NO: 586503 - DNA, 258 bp, Homo sapiens
attcctgcctacagattggggttccgggatatttgttgagcgtttacgataggcgttaatgttgcccaaaagaatyacttaaacaccaaaatgtagtagacgagaatccagatgagacacttgtcgcaaacattaaagatgaattttttttacagccatgaaagcaatttaatgataattagggtccagtgagtctttgaggaggacttttccatgggaaggtggggagtaggtttcagtaagagtgagaactgtaaa

SEQ ID NO: 586504 - DNA, 578 bp, Homo sapiens
ctgttgcccaggctggactgcagtggcgcgatctcggctcactgcaagctccacctcctgggttcacgccattctcctgcctcagcctcccgagtagatgggactacaggtgcccgccaccatgcccggctatttttttttttttttagtacagacggggtttcactgtgatagccaggatggtctcgatctcctgaccttgtgatccgcccgcatcagcctcccaaagtgctgggattataggtgtgagccaccgcgcccrgcctatatgaatttttttcaagtgcttaaagtgaagagagtttaaatcaaagcatctcttgtaatgatctaaggaacacagccaagtggaataggaatgtacatgttttgaaatatgaatggctaaattggattaattaacagatgcaagaccttacatacttaatatttttgtggtgagaacacttacgatttactctgttagcaattttcaggaaacacatttgtgctttcaataccagcaggctgaagctattatttgcacaagctgatttatttaaagctgtttaaataatagaaccaaaaaagtctgtgca

SEQ ID NO: 586505 - DNA, 425 bp, Homo sapiens
acatatacaccatggaatactattcagccacaaaaaggaacaaaataatggcattcacagcaacctggatggagttggagatcattattctaagtgaaataactcaggaatggagaaccaaatattgtacatcctcacttataagtgggagctgcrctatgaagatacaaaggcacaagaatgatacaatggattttggggacttaggggaaaggatgcaggggatgagggataaaaaaccatacattgggtacagtgtacactgctccagtgaagggtgcaccaaaatctcagaagtcactgctaaagaccttatccttgtaaccaaaagccatctgctccccaaaaactattgaaataaaataaaatataaaaagaaagagaaagaaaagaaaatagttccaatttatcatgccaaattgttt

SEQ ID NO: 586506 - DNA, 536 bp, Homo sapiens
aaaatttggaattggacagaaaattaaagtcatctttctagcttcctgaacacaaaagtaaatttaactcacaaagccaaaaaaaaagaataacatcactaccaattacaactataataaaattagaatcaaatgaaaatgatggattacaagtgtgaaataaattcactacatcatctgtaatagataatatttagtttatgaaataatttaaaatattaattaggacaactatattgaaacatgacacaaagatataggcaagcagcttatgaaagcattcaaattagattataaaaaggaattaaaattttaagtaaaataaaaaagagaaaaagataatacatggygttaatgccaatgtggagaaacaattactttcataagcctagtggtacaactaatttaaagggcaatttcataatggtactttgtagaaatattttttatcatagtcttattttaaaaagaaatgacagaaaataatttaaatatcctccagcttgataaatacattaaaacagaaaccatcatta

SEQ ID NO: 586507 - DNA, 429 bp, Homo sapiens
caaacaaacaaaataatcaatagaaaatcctactacctgaaatagaccaagctgggaataagcattgaattttattctgcctgtatccatgggccactttgttagttactattagtaacacagatctcttctttttaggaataattggaataattaaaggggcaagagtcatgtcatataacctagttgtttcattgcactagggattattataatttcactcttcactacttttttctaggatattttttctaattcttatctctagatgtaaatcattcccagatcaaggtgctcatactataattgagtaaaaaaaagtcttatctggttgagcacttgarcactgtttcgtgggtgctttatgttgttggtcctatctgttccagcttgcctgcttctatccatttttcttctttgaatacccaa

SEQ ID NO: 586508 - DNA, 350 bp, Homo sapiens
tggttaaaaataactcattaggttagcctactggctctcagggggaagagattatacaaaggcatgaatttctggaggagggaatgagggcaaagaactctgaaaagtytctcttccacaatctgaagaacttctagaaagtagaaggaagcaatattgcttagggatggacaacttggcactggttatgtgttccaagtgaggtaaccttgttcccaggaataaagagaaccagatgactgtaaacatttccctaaactgaaatgcactgttgtatgttcacctgaaatgaatggtgtaagctgaatatgagatttttgacaaaataaaaattttgctgtgttctcaga

SEQ ID NO: 586509 - DNA, 350 bp, Homo sapiens
tggttaaaaataactcattaggttagcctactggctctcagggggaagagattatacaaaggcatgaatttctggaggagggaatgagggcaaagaactctgaaaagtttctcttccacaatctgaagaacttctagaaagtagaaggaagcratattgcttagggatggacaacttggcactggttatgtgttccaagtgaggtaaccttgttcccaggaataaagagaaccagatgactgtaaacatttccctaaactgaaatgcactgttgtatgttcacctgaaatgaatggtgtaagctgaatatgagatttttgacaaaataaaaattttgctgtgttctcaga

SEQ ID NO: 586510 - DNA, 350 bp, Homo sapiens
tggttaaaaataactcattaggttagcctactggctctcagggggaagagattatacaaaggcatgaatttctggaggagggaatgagggcaaagaactctgaaaagtttctcttccacaatctgaagaacttctagaaagtagaaggaagcaatattgcttagggatggacaacttggcactggttatgtgttccaagtgaggtaaccttgttcccaggaataaagagaaccagatgactgtaaacatttccctaaactgaaatgcactgttgtatgttcacctgmaatgaatggtgtaagctgaatatgagatttttgacaaaataaaaattttgctgtgttctcaga

SEQ ID NO: 586511 - DNA, 582 bp, Homo sapiens
aggagggaccattcagaggatgcttcccaccagttcaagtgacagtgtcagaaccaaagcgcatattgtaggaaatcaaacaatggcctccaagttccatttctacccagggatgaacaaatcaacatcaatcttggtaacacaactgccactgatggtgccttactcttctctcatgacatggcacaattgatagcaaacataaaatttgttcttgtttaaggatttatatccactaatatggtaacatagtagtggttccatagttctaacctgtttatcaatccagttaatcttttactatcttgcaatctgttaatgaaactgtttttctttgttttataatttcaacttttagagtcaggggtacatgtgcaggtttgttacatcactaaattgcgtgacactgagctttggggtacaaatgattcccatcacccaggtagtgagctaaatacctactaaataggtagtttttcagcccttgcctcgctccctctctcccttctctggtagtccccagtgtctttagttgccatcwttatttatgtccacatgcccaactgtgtgttcttaactaaa

SEQ ID NO: 586512 - DNA, 603 bp, Homo sapiens
ttgggtatggaggtttcttgaagacctagaacatagaagaatgcctagttaaaaaaaaaaatcaatgaaactacgagttttaggccaaatctgagaaaagaccaaagatgactatgtttgggactgaagtaaacatatcaagttagaactctcatcacatgtttgactcaaattgtggagcaaaatagtaaataaaatataaaaatgaaaatgaagatacgtgaaattcaaatgtcrcaacttgcctattatttattttagtgcatttttttgtgcttttcccagtttggtgttaggtggccttaagttctcagtaatgacacttatcaaataggaacttagtgttactcacctttatccattcccccaacactcaacaaattgcctttgctatatccctatgagatgagcagatcaaatattccccgtgagttaatgaaaactgattcaaccaaatggcgaagtcagagactatcgggggccatggagacactctgggccatttttatgaggtagtctaggctcatcttcatgagggaactgaggtcttggggggtgggggttacccaaataggttcacagaagaaccagaaataaaacctg

SEQ ID NO: 586513 - DNA, 603 bp, Homo sapiens
ttgggtatggaggtttcttgaagacctagaacatagaagaatgcctagttaaaaaaaaaaatcaatgaaactacgagttttaggccaaatctgagaaaagaccaaagatgactatgtttgggactgaagtaaacatatcaagttagaactctcatcacatgtttgactcaaattgtggagcaaaatagtaaataaaatataaaaatgaaaatgaagatacgtgaaattcaaatgtcacaacttgcctattatttattttagtgcatttttttgtgcttttcccagtttggtgttaggtggcmttaagttctcagtaatgacacttatcaaataggaacttagtgttactcacctttatccattcccccaacactcaacaaattgcctttgctatatccctatgagatgagcagatcaaatattccccgtgagttaatgaaaactgattcaaccaaatggcgaagtcagagactatcgggggccatggagacactctgggccatttttatgaggtagtctaggctcatcttcatgagggaactgaggtcttggggggtgggggttacccaaataggttcacagaagaaccagaaataaaacctg

SEQ ID NO: 586514 - DNA, 565 bp, Homo sapiens
ttgcccacgctgattctgaactcctgttctcaagcaatcctcctgcctggtcttcccaaacttttgggcttacagctgtgagtcactgaccccagcttgtattcttttgattttaaaaaaatattctgaatgtgatccaccaaattaatttcaccatccactaataggtagcaacctgaatgaaaaatactgttataaactttacacaaaaccagagattataaacatttgcttccaaggagagaggtaaaaggtacttgtttgctctgatgggccctgtttccttcagtgccaggaagagtggctctcagacctttcttctggcatccctcatgtatgcagtgttggttattattttcaaggccttggtaaccaaatgcccctagtgtgaccagtcagactgacagtccatatctgtaatatggtggtaagtttcctttgcatgtctttctttctggcatcttagaacttttacctaggaaattttctttttgcttgaagtacatcattaagaattttcastgaaggcagattcttaaagtttttgttttccagaagagatctt

SEQ ID NO: 586515 - DNA, 323 bp, Homo sapiens
  misc_feature 291, 292, 293, 294, 295, 296, 297, 298, 299, 300, 301, 302,303, 304, 305, 306, 307, 308, 309, 310, 311, 312, 313, 314,315, 316, 317, 318, 319, 320, 321, 322, 323: n = A,T,C or G
atattgttaaagatgtattattctttagtatcattgtatcagatagctattgccacagtgatgctacatacatacaggcatagcattggcccaggcagctctgctttaggctgtagatgtgtagccggctgttctgctgccgttctgcctcacctgcctcattctgggacccaggctggagggtgtgtttctctcgtggtgttgatagaaacctaggagagaaccagtgaagattgggacccataatttagtctactataatgataaatraaattattcccaaagttgaannnnnnnnnnnnnnnnnnnnnnnnnnnnnnnnn

SEQ ID NO: 586516 - DNA, 651 bp, Homo sapiens
taggttaaaacagcatactgataaaaaacacatatactttgatgcagagatgtacgataatcatgaattagaattagcatcctgatttagttttctaccaaaaaccctaagtgaacacagaatctatttaaaaccaaagaaaacaaaaaaatcttgtgtttacttaatagtcattgaaaagaattactacaaatttctagaatttaaaaaggttaaaaattttaaagtgttgcctaactatacttagcatacaatagtttaccaaaatatccatgcatttgcagcaattgaaaaaaatcttaaaacataagcaagtattagtatacatatgaaactaatccaaagccaactgtgattagttcctgtaaggaaagttaacaattgccaagaatggaaggtgactagagttgcatctagtttgcctgtgttcaagcatgatactagataaaattaaataaaaactgttactctatgggtagctaacactataaaatctaagaccattcatatggctgaaaacaacccatccccagccaccatyaatgcaaagggcaaaaaattagaaacagaaaaaacttctatatgcaacctgttctgatctattaatgtaaagaacaacttctggctaaaggagtttaataaagtaagcca

SEQ ID NO: 586517 - DNA, 651 bp, Homo sapiens
taggttaaaacagcatactgataaaaaacacatatactttgatgcagagatgtacgataatcatgaattagaattagcatcctgatttagttttctaccaaaaaccctaagtgaacacagaatctatttaaaaccaaagaaaacaaaaaaatcttgtgtttacttaatagtcattgaaaagaattactacaaatttctagaatttaaaaaggttaaaaattttaaagtgttgcctaactatacttagcatacaatagtttaccaaaatatccatgcatttgcagcaattgaaaaaaatcttaaaacataagcaagtattagtatacatatgaaactaatccaaagccaactgtgattagttcctgtaaggaaagttaacaattgccaagaatggaaggtgactagagttgcatctagtttgcctgtgttcaagcatgatactagataaaattaaataaaaactgttactctatgggtagctaacactataaaatctaagaccattcatatggctgaaaacaacccatccccagccaccatcaatgcaaagggcaaaaaattagaaacagaaaaaacttctatatgcaacctgttctgatctaytaatgtaaagaacaacttctggctaaaggagtttaataaagtaagcca

SEQ ID NO: 586518 - DNA, 489 bp, Homo sapiens
aaataaagaatatttcattttttaacattttaggaaacaaaatgaatatgcttttaaaacataaaaagccagaatccctcaatttataccaccaatctgactgtcttacatattcatttatccctgtagtttcattctttgctcatttaatacatgagcaagactgacatacaacacataaaatgagaacatctcaatatcatggttttttttgtttttttgtttttttttttttttttggagacaaagtctcactcagtcaggctggagtgcagtggcatgatttcagctcactgctacctccatctcctgtgctcaagcgatccwcctgcctcaacctcctgagtagctgctaattataggcacgcaccaccacgcccggctcatttttgtattttcagtagaaacagggtttcaccacattggccaggctggtctcgaactcctgagctcaagtgatctgcccacctcaacctcccaaagtgctgg

SEQ ID NO: 586519 - DNA, 489 bp, Homo sapiens
aaataaagaatatttcattttttaacattttaggaaacaaaatgaatatgcttttaaaacataaaaagccagaatccctcaatttataccaccaatctgactgtcttacatattcatttatccctgtagtttcattctttgctcatttaatacatgagcaagactgacatacaacacataaaatgagaacatctcaatatcatggttttttttgtttttttgtttttttttttttttttggagacaaagtctcactcagtcaggctggagtgcagtggcatgatttcagctcactgctacctccatctcctgtgctcaagcgatccacctgcctcaacctcctgagtagctgctaattataggcacgcaccaccaygcccggctcatttttgtattttcagtagaaacagggtttcaccacattggccaggctggtctcgaactcctgagctcaagtgatctgcccacctcaacctcccaaagtgctgg

SEQ ID NO: 586520 - DNA, 489 bp, Homo sapiens
aaataaagaatatttcattttttaacattttaggaaacaaaatgaatatgcttttaaaacataaaaagccagaatccctcaatttataccaccaatctgactgtcttacatattcatttatccctgtagtttcattctttgctcatttaatacatgagcaagactgacatacaacacataaaatgagaacatctcaatatcatggttttttttgtttttttgtttttttttttttttttggagacaaagtctcactcagtcaggctggagtgcagtggcatgatttcagctcactgctacctccatctcctgtgctcaagcgatccacctgcctcaacctcctgagtagctgctaattataggcacgcaccaccacgcccggctcatttttgtattttcagtagaaacagggtttcaccayattggccaggctggtctcgaactcctgagctcaagtgatctgcccacctcaacctcccaaagtgctgg

SEQ ID NO: 586521 - DNA, 489 bp, Homo sapiens
aaataaagaatatttcattttttaacattttaggaaacaaaatgaatatgcttttaaaacataaaaagccagaatccctcaatttataccaccaatctgactgtcttacatattcatttatccctgtagtttcattctttgctcatttaatacatgagcaagactgacatacaacacataaaatgagaacatctcaatatcatggttttttttgtttttttgtttttttttttttttttggagacaaagtctcactcagtcaggctggagtgcagtggcatgatttcagctcactgctacctccatctcctgtgctcaagcgatccacctgcctcaacctcctgagtagctgctaattataggcacgcaccaccacgcccggctcatttttgtattttcagtagaaacagggtttcaccacrttggccaggctggtctcgaactcctgagctcaagtgatctgcccacctcaacctcccaaagtgctgg

SEQ ID NO: 586522 - DNA, 419 bp, Homo sapiens
ctctgtcacccaggctggtgtgcagtggtgcaatcatggctcactgcagcctcaacctcccggggctcaagcagtccttccacctcrgcctcctgagtagctgggaccacaggtgcacaccatcacacccggctaatttttgtatttttagtagagatggggttttgccatgttgcccaggttggtcttgaactcctgaccgcaagtgataaattttttttatgtgatgttagctaatgagacatttgtagtaaccttctagcttatggtggctctttttctattgactcacttgtatatgcggagatggcattgtctgtgtaccatttgttgaaatgagggaaaggaaggaagtgagataacatttattgggagcctgttgtcttcaaggaacttcatgtatgttttctcatttaata

SEQ ID NO: 586523 - DNA, 419 bp, Homo sapiens
ctctgtcacccaggctggtgtgcagtggtgcaatcatggctcactgcagcctcaacctcccggggctcaagcagtccttccacctcagcctcctgagtagctgggaccacaggtgcacaccatcacacccggctaatttttgtatttttagtagagatggggttttgccatgttgcccaggytggtcttgaactcctgaccgcaagtgataaattttttttatgtgatgttagctaatgagacatttgtagtaaccttctagcttatggtggctctttttctattgactcacttgtatatgcggagatggcattgtctgtgtaccatttgttgaaatgagggaaaggaaggaagtgagataacatttattgggagcctgttgtcttcaaggaacttcatgtatgttttctcatttaata

SEQ ID NO: 586524 - DNA, 419 bp, Homo sapiens
ctctgtcacccaggctggtgtgcagtggtgcaatcatggctcactgcagcctcaacctcccggggctcaagcagtccttccacctcagcctcctgagtagctgggaccacaggtgcacaccatcacacccggctaatttttgtatttttagtagagatggggttttgccatgttgcccaggttggtcttgaactcctgaccgcaagtgataaattttttttatgtgatgttagctaatgagacatttgtagtaaccttctagcttatggtggctctttttctattgastcacttgtatatgcggagatggcattgtctgtgtaccatttgttgaaatgagggaaaggaaggaagtgagataacatttattgggagcctgttgtcttcaaggaacttcatgtatgttttctcatttaata

SEQ ID NO: 586525 - DNA, 529 bp, Homo sapiens
taaaaatatgaatttatttttatttataaaaatattctgaaaaatatcaacagaagcccttattgataggtttttggtttcgtcattataagttttattggactttttttacttttattttttttatttgagacaaggtcttactctgtcacccaggctggtgtgcagtggtgcaatcatggctcactgcagcctcaacctcccggggctcaagcagtccttccacctcagcctcctgagtagctgggaccacaggtgcacaccatcacacccggctaatttttgtatttttagtagagatggggttttgccatgttgcccaggttggtcttgaactcctgaccgcaagtgataaattttttttatgtgatgttagctaatgagacatttgtagtaaccttctagcttatggtggctctttttctattgactcacttgtatatgyggagatggcattgtctgtgtaccatttgttgaaatgagggaaaggaaggaagtgagataacatttattgggagcctgttgtctt

SEQ ID NO: 586526 - DNA, 419 bp, Homo sapiens
ctctgtcacccaggctggtgtgcagtggtgcaatcatggctcactgcagcctcaacctcccggggctcaagcagtccttccacctcagcctcctgagtagctgggaccacaggtgcacaccatcacacccggctaatttttgtatttttagtagagatggggttttgccatgttgcccaggttggtcttgaactcctgaccgcaagtgataaattttttttatgtgatgttagctaatgagacatttgtagtaaccttctagcttatggtggctctttttctattgactcacttgtatatgcggagatggcattgtctgtgtaccatttgttgaaatgagggaaaggaaggaagtgagataacatttattgggagcctgttgtcttcaaggaacttyatgtatgttttctcatttaata

SEQ ID NO: 586527 - DNA, 428 bp, Homo sapiens
tcattcaataatttcacagccttttcaccaggagtagtttccatctttaagaaaccactttcttgggtcatctgtaaggaacaactcctaatctgtgcaagttttatcatgagattgcagcaattcagtcacatcttcaggctccacttctaattctcttgctgtttccactacatctgcagtaacttcctccacttgagtcttgaacctctcaaagtcatccatgagagttggagtcaacttcttccaaacacctgttcatgttgatattttgacttcctctcatgaattatgaatgttcttaatgacatccacggtggtgaaatctttccaraaggttttcagtttattttgcccaaatctgctacaggaatcactttttttttttttgagacagagtctctctttgtcggcctggctggagtgca

SEQ ID NO: 586528 - DNA, 335 bp, Homo sapiens
tcagtatgtgtgtgtgtgtgtgcaccacacatattgccctggcatcttatttatttctctcattaccagtgcatacctacctatcatgttaaaacaagaaarggagaaaagtggactttatatgtaacactttagaggcatagtggaatgtatattattattaacaaattagatagcaaagcattatatttgttatgctagaagactatggctgtgctaaaagaatataatatatgtcaacattgccagactgggcacttctcacaatattcccaaccaacaggaataaaactaaaggtcagaaaaaaaaaagtaaattaaaacaaaattttatc

SEQ ID NO: 586529 - DNA, 524 bp, Homo sapiens
aaactttaaaaaagactattagcctttcagcragagtaattgctctaaaagttaaggacattgggagtaatatcaagtcattttggaaagaagggtgaatgatttttcatggttttcttaggcttttgatggatgaataggtgttaccagtactgttcagttgttacatattccagaagtcagtgctgagtttgaagtgattgaagaattagtatttatgcatagtctatgtgaaacaactacaagagaaaatattttcagaaaagttgagcaaacactaacttagtacaacctgaagtggaatccgctaagatgcgttacagttgatagtggcaaaaataactgtggagcagaaagacttgagttggacaaatttacaaagcttgttaaatgtcaggtgtttaaagcctgattatttattgtattatttattagcaggtactttgcagaaaatatttaaatctgtcatgttttagtgaactattatataatagtgtcagcagtgattttgacttgcatttgtg

SEQ ID NO: 586530 - DNA, 543 bp, Homo sapiens
gtctatgtggttaatttttgaacttgtccacagtttcttgaagggaagtctatttctgcagctaaatctcatgttctgtatgtgtgcatttattctattttttcataattttaaatcttcatcctccctaattatttttatactttatttactgagagatatattaaatatcctactagaagcatggatttgtctgtctcctcatctgtcaacttttgctttttgaggctgtacttgggtgcatatgattcaaaaaaatacatctttttttttaatttgaacttttatcaaaatgaaatgttttccttcatttatgtatgctttcaacattatgtatgatatagctatagtaactttggttagactttgcactgtgtatctttcacgtgtgtgtgtgtgtgtgtatttttttttccactgtgctgcccaggctatagtgcaggggctgttcacagacgtgtctgtggctcmctgctgccttaaactcctgggctcaaatgatcctcctacctcagtctttagagtgatgtgtgccaccactgc

SEQ ID NO: 586531 - DNA, 481 bp, Homo sapiens
tactttcttcttttcctcttccttttcttttttcttttcctttctttttctttcttgtattctccttccttccttctttctttcctcttttgcttccttccytcctccctcccttcctttctccctcccttcttttcttttctttctcaatttcttgctttctttccttttttctcccttcctccctccctcctgttcttcctccctcccttcctttcctccttttaccatccttccttccctccttctcctctttattttctttggttctctgcattcctcccttttaccattctctcttcctcctttccttcctcccttcctcctttctttctttccttctttctttcttgtgttcttgctttcttttttctcgctttctgcctttctccctccctccctccttccctcccttccttccttctctcatttcctcgttttctttcttctttctttctttccttccttccttctttccttc

SEQ ID NO: 586532 - DNA, 481 bp, Homo sapiens
tactttcttcttttcctcttccttttcttttttcttttcctttctttttctttcttgtattctccttccttccttctttctttcctcttttgcttccttccctcctccctcccttcctttctccctcccttcttttcttttctttctcaatttcttgctttctttccttttttctcccttcctccctccctcctgttcttcctccctcccttcctttcctccttttaccatccttccttccctccttctcctctttattttctttgkttctctgcattcctcccttttaccattctctcttcctcctttccttcctcccttcctcctttctttctttccttctttctttcttgtgttcttgctttcttttttctcgctttctgcctttctccctccctccctccttccctcccttccttccttctctcatttcctcgttttctttcttctttctttctttccttccttccttctttccttc

SEQ ID NO: 586533 - DNA, 481 bp, Homo sapiens
tactttcttcttttcctcttccttttcttttttcttttcctttctttttctttcttgtattctccttccttccttctttctttcctcttttgcttccttccctcctccctcccttcctttctccctcccttcttttcttttctttctcaatttcttgctttctttccttttttctcccttcctccctccctcctgttcttcctccctcccttcctttcctccttttaccatccttccttccctccttctcctctttattttctttggttctctgcattcctcccttttaccattctctcttcctcctttccttcctcccttcctcctttctttctttccttctttctttcttgtgttcttgctttcttttttctcgctttctgcctttctccctccctccctccttccctcccttccttccttctctcatttcctcsttttctttcttctttctttctttccttccttccttctttccttc

SEQ ID NO: 586534 - DNA, 571 bp, Homo sapiens
tcttgtcttgtctgctgccatgtgagacgtgcctttcaccttctgccatgattgtgtggcctacccagacatgtggaactgtgcgtctattaaacctctttcttctggaaattacccagtcttgggcatgtctttaccggtggtgtgaaaatggactaatacagtagcacacctcatacggctgaacaaaatggggaagacsagtggggagcaagagagagaaaaggggtctgtgggactccagcctttattgggcccagaacattacccaaatatgttttcctcggggctctagtcagtggggtgagtgccagcaggcatatttcttggctcctgctgcaactgagcaggtcactctggcgtttgggagctgtccatgtgtgctttgaggtctgtggagtgagtcaggtaggttgtatccaatggttccatagctggtagtcaccaggaggaggcaactgtgtagggtcaatatctgggccagccacactgaggaactgtgaggaattgtcaagggaatctcaacccagctaccatatgagagagttcaacttacgttcaatgtgaatgc

SEQ ID NO: 586535 - DNA, 571 bp, Homo sapiens
tcttgtcttgtctgctgccatgtgagacgtgcctttcaccttctgccatgattgtgtggcctacccagacatgtggaactgtgcgtctattaaacctctttcttctggaaattacccagtcttgggcatgtctttaccggtggtgtgaaaatggactaatacagtagcacacctcatacggctgaacaaaatggggaagacgagtggggagcaagagagagaaaaggggtctgtgggactccagcctttattgggcccagaacattacccaaatatgttttcctcggggctctagtcagtggggtgagtgccagcaggcatrtttcttggctcctgctgcaactgagcaggtcactctggcgtttgggagctgtccatgtgtgctttgaggtctgtggagtgagtcaggtaggttgtatccaatggttccatagctggtagtcaccaggaggaggcaactgtgtagggtcaatatctgggccagccacactgaggaactgtgaggaattgtcaagggaatctcaacccagctaccatatgagagagttcaacttacgttcaatgtgaatgc

SEQ ID NO: 586536 - DNA, 571 bp, Homo sapiens
tcttgtcttgtctgctgccatgtgagacgtgcctttcaccttctgccatgattgtgtggcctacccagacatgtggaactgtgcgtctattaaacctctttcttctggaaattacccagtcttgggcatgtctttaccggtggtgtgaaaatggactaatacagtagcacacctcatacggctgaacaaaatggggaagacgagtggggagcaagagagagaaaaggggtctgtgggactccagcctttattgggcccagaacattacccaaatatgttttcctcggggctctagtcagtggggtgagtgccagcaggcatatttcttggctcctgctgcaactgagcaggtcactctggcgtttgggagctgtccatgtgtgctktgaggtctgtggagtgagtcaggtaggttgtatccaatggttccatagctggtagtcaccaggaggaggcaactgtgtagggtcaatatctgggccagccacactgaggaactgtgaggaattgtcaagggaatctcaacccagctaccatatgagagagttcaacttacgttcaatgtgaatgc

SEQ ID NO: 586537 - DNA, 571 bp, Homo sapiens
tcttgtcttgtctgctgccatgtgagacgtgcctttcaccttctgccatgattgtgtggcctacccagacatgtggaactgtgcgtctattaaacctctttcttctggaaattacccagtcttgggcatgtctttaccggtggtgtgaaaatggactaatacagtagcacacctcatacggctgaacaaaatggggaagacgagtggggagcaagagagagaaaaggggtctgtgggactccagcctttattgggcccagaacattacccaaatatgttttcctcggggctctagtcagtggggtgagtgccagcaggcatatttcttggctcctgctgcaactgagcaggtcactctggcgtttgggagctgtccatgtgtgctttgaggtctgtggagtgagtcaggtaggttgtatccaatggttccatagctgktagtcaccaggaggaggcaactgtgtagggtcaatatctgggccagccacactgaggaactgtgaggaattgtcaagggaatctcaacccagctaccatatgagagagttcaacttacgttcaatgtgaatgc

SEQ ID NO: 586538 - DNA, 611 bp, Homo sapiens
tgtttcagtatcttcacattctctccctgtccttttgttttgctcytatatggtggccttgagtctttcctctggcttttcaaacctagtaagactaagacactaaaataactttgcccgtggtttggtaatgccttctaaagcacgtcctaagctctcgtgcatacaggggtctcctttgagctctatgcttttgagatctcatatacctaaattccagtactccaaatcagtactgctcagttttagttactaagtttaaaaatgtattttaatagcaagttagtttagtgcactcttacttctttctttgctgctggtatacgtgtatattcccttaaatgaatcttggaatttatttaaaaattttaaattatactaatgaaactgtatattgttgtggattcataggtgattttggaaagaatttgtctttatgatactaaatcctttttatccaagaatcatatgggcctttatttttattccagtctatatttatatcactgagtaaatatagagaaatgtagatacatacagctgtagtcatagatagatacaaatatagatataacatgttaaatctatatctattgcatataacatgtata

SEQ ID NO: 586539 - DNA, 611 bp, Homo sapiens
tgtttcagtatcttcacattctctccctgtccttttgttttgctcctatatggtggccttgagtctttcctctggcttttcaaacctagtaagactaagamactaaaataactttgcccgtggtttggtaatgccttctaaagcacgtcctaagctctcgtgcatacaggggtctcctttgagctctatgcttttgagatctcatatacctaaattccagtactccaaatcagtactgctcagttttagttactaagtttaaaaatgtattttaatagcaagttagtttagtgcactcttacttctttctttgctgctggtatacgtgtatattcccttaaatgaatcttggaatttatttaaaaattttaaattatactaatgaaactgtatattgttgtggattcataggtgattttggaaagaatttgtctttatgatactaaatcctttttatccaagaatcatatgggcctttatttttattccagtctatatttatatcactgagtaaatatagagaaatgtagatacatacagctgtagtcatagatagatacaaatatagatataacatgttaaatctatatctattgcatataacatgtata

SEQ ID NO: 586540 - DNA, 611 bp, Homo sapiens
tgtttcagtatcttcacattctctccctgtccttttgttttgctcctatatggtggccttgagtctttcctctggcttttcaaacctagtaagactaagacactaaaataactttgcccgtggtttggtaatgccttytaaagcacgtcctaagctctcgtgcatacaggggtctcctttgagctctatgcttttgagatctcatatacctaaattccagtactccaaatcagtactgctcagttttagttactaagtttaaaaatgtattttaatagcaagttagtttagtgcactcttacttctttctttgctgctggtatacgtgtatattcccttaaatgaatcttggaatttatttaaaaattttaaattatactaatgaaactgtatattgttgtggattcataggtgattttggaaagaatttgtctttatgatactaaatcctttttatccaagaatcatatgggcctttatttttattccagtctatatttatatcactgagtaaatatagagaaatgtagatacatacagctgtagtcatagatagatacaaatatagatataacatgttaaatctatatctattgcatataacatgtata

SEQ ID NO: 586541 - DNA, 561 bp, Homo sapiens
cttattttagcattgaatattttcacaattattgtattatctaataataatgtaactgttaaaaatatttaaaattttacctttgaattattttattttgaatttaaattcctttaagtatgatagtaaatttctattttatgctttctctatgaatatgcaaattaatctatccatttctctatctctatgtagtaacatatgaaaatcaagcctctytttttttaatagacatatacacgtttgcatatagaatatcagattctttatagcatttaaaatctttaaagacacgaatattaccttttaacaaatatattttagcatgtactgagaatcccctatttattgtttatttggagtaatcaatatgattattaatattattggatcaccaaatttggaatcacactttcatcctcaaggtagatatttgttttttttttttttttttgccaatttcttgtcttactgtttcaaatactgttggatattatttttattttatttggcattttagtatcaatatttgtaagtgatgtactctacaattttttcttc

SEQ ID NO: 586542 - DNA, 561 bp, Homo sapiens
cttattttagcattgaatattttcacaattattgtattatctaataataatgtaactgttaaaaatatttaaaattttacctttgaattattttattttgaatttaaattcctttaagtatgatagtaaatttctattttatgctttctctatgaatatgcaaattaatctatccatttctctatctctatgtagtaacatatgaaaatcaagcctctttttttytaatagacatatacacgtttgcatatagaatatcagattctttatagcatttaaaatctttaaagacacgaatattaccttttaacaaatatattttagcatgtactgagaatcccctatttattgtttatttggagtaatcaatatgattattaatattattggatcaccaaatttggaatcacactttcatcctcaaggtagatatttgttttttttttttttttttgccaatttcttgtcttactgtttcaaatactgttggatattatttttattttatttggcattttagtatcaatatttgtaagtgatgtactctacaattttttcttc

SEQ ID NO: 586543 - DNA, 508 bp, Homo sapiens
ttgatttacattctggtgcaagctctttaccttgccacaaaccagcagcagagttgacatgragtattggaccaatgatcccactctccaaaaaataatagtcctttattctgaagacgttattattcactcataatacctcattaactttctttttttctaaacattgtaataatagattataagtatattgtttatgagttcagcagatatttattgatcacatagtttgtgcacagccctgtatcttattttgcaggagttgcaaagctggctcagaaattaatcttgcctttaggaagtctaccataaacccgcaagaggaaataagtgaaaatctaaataaatgtgttgaatatatgcagtgattgtttgcaatagtgttatagcttggttccaaagatttcaatatagacagatgtttccttttgctgagctgctaccagaataggacagaattaattatctttttggaaatagagtcttattctgatgcccaggttggagt

SEQ ID NO: 586544 - DNA, 508 bp, Homo sapiens
ttgatttacattctggtgcaagctctttaccttgccacaaaccagcagcagagttgacatggagtattggaccaatgatcccactctccaaaaaataatagtcctttattctgaagacgttattattcactcataatacctcattaactttctttttttctaaacattgtaataatagattataagtatattgtttatgagttcagcagatatttattgatcacatagtttgtgcacagccctgtatcttattttgcagkagttgcaaagctggctcagaaattaatcttgcctttaggaagtctaccataaacccgcaagaggaaataagtgaaaatctaaataaatgtgttgaatatatgcagtgattgtttgcaatagtgttatagcttggttccaaagatttcaatatagacagatgtttccttttgctgagctgctaccagaataggacagaattaattatctttttggaaatagagtcttattctgatgcccaggttggagt

SEQ ID NO: 586545 - DNA, 554 bp, Homo sapiens
ctgggttaagagtttttcttctcaagtaacctgtattatattaagatgatattaactgaaataatcagatagatgaatgcatcataaagctaattctaagatatctgtcctcagccaaaagcagaaaagggatacacataacttccacataaaacatccacccccatttttttggttattcttaaaagctcataatgtatacaatgataaaatttattgtttcaaattagggtttttgaaattgaaatattagtttaaacatatttgcttaacacaactttaaagttaataagaagacactgcatattacagaagagttaaatacttcaaaaagtgggaaaaattttaaaagctttcatttgagtaggagtaaacacagacacactaagaatctagttggatacacttaaatcatgtcttttaagaacataagaacakattatttgcttcctctttagtccaaaaccttggtgtaattatagtccatatttgaaactaacagaagtatactcagcttcttaaaagttttatttcaagaacagtaaaagaacttc

SEQ ID NO: 586546 - DNA, 545 bp, Homo sapiens
tatatcaaggttagtatcctacctggcatctctccaatactgggttaagagtttttcttctcaagtaacctgtattatattaagatgatattaactgaaataatcagatagatgaatgcatcataaagctaattctaagatatctgtcctcagccaaaagcagaaaagggatacacataacttccacataaaacatccacccccatttttttggttattcttaaaagctcataatgtatacaatgataaaatttattgtttcaaattagggtttttgaaattgaaatattagtttaaacatatttgcttaacacaactttaaagttaataagaagacactgcatattacagaagagttaaatacttcaaaaagtgggaaaaattttaaaagctttcatttgagtaggagtaaacacagacacactaagaatctagttggatacacttaaatcatgtcttttaagaacataagaacagattatttgcttcctctttagtccaaaaccttggtgtaattwtagtccatatttgaaactaacagaagt

SEQ ID NO: 586547 - DNA, 417 bp, Homo sapiens
tttccagtacctgccagctgacaaaacgttacttaccaggtaaaaaccactaccaaaaatcagaatcacagaagrgctatcagtaaaattattaatgccacaaattaacatgatgttaacagctgaattatgcatcaaaagagtatttatataatcacagcaaataactcaaatcttttacatcactagtaaactcaaaaaagatagcaaaaagcaataacattaaatttcattattgatctactagctttaactatttaatactagtacacttagttttgattactttgaaattgaaacaaaacaataatcttttcttttaatgactttttcagttataggaaagatgatattaaaagaaaatatacaactatagcttagctacaggtataaaattgttttaaagatatgtaattt

SEQ ID NO: 586548 - DNA, 417 bp, Homo sapiens
tttccagtacctgccagctgacaaaacgttacttaccaggtaaaaaccactaccaaaaatcagaatcacagaagggctatcagtaaaattattaatgccacaaattaacatgatgttaacagctgawttatgcatcaaaagagtatttatataatcacagcaaataactcaaatcttttacatcactagtaaactcaaaaaagatagcaaaaagcaataacattaaatttcattattgatctactagctttaactatttaatactagtacacttagttttgattactttgaaattgaaacaaaacaataatcttttcttttaatgactttttcagttataggaaagatgatattaaaagaaaatatacaactatagcttagctacaggtataaaattgttttaaagatatgtaattt

SEQ ID NO: 586549 - DNA, 417 bp, Homo sapiens
tttccagtacctgccagctgacaaaacgttacttaccaggtaaaaaccactaccaaaaatcagaatcacagaagggctatcagtaaaattattaatgccacaaattaacatgatgttaacagctgaattatgcatcaaaagagtatttatataatcacagcaaataactcaaatcttttacatcactagtaaactcaaaaaakatagcaaaaagcaataacattaaatttcattattgatctactagctttaactatttaatactagtacacttagttttgattactttgaaattgaaacaaaacaataatcttttcttttaatgactttttcagttataggaaagatgatattaaaagaaaatatacaactatagcttagctacaggtataaaattgttttaaagatatgtaattt

SEQ ID NO: 586550 - DNA, 503 bp, Homo sapiens
acagcaaataactcaaatcttttacatcactagtaaactcaaaaaagatagcaaaaagcaataacattaaatttcattattgatctactagctttaactatttaatactagtacacttagttttgattactttgaaattgaaacaaaacaataatcttttcttttaatgactttttcagttataggaaagatgatattaaaagaaaatatacaactatagcttagctacaggtataaaattgttttaaagatatgtaattktgctattgaattaaactgaaaacataaatatcaactcatgattttgaaaaaaaaatcttttttatgtttggttttggtaaaaggagagacaaataagtcagaagaacagaaaatacagaaataggcaaactttcccatattcaattagtttttgaccaaggggccaagataattcaagagagcaataaataatcttttagaatgatgctggaactgccaaataattcatatggaaaacaaag

SEQ ID NO: 586551 - DNA, 503 bp, Homo sapiens
acagcaaataactcaaatcttttacatcactagtaaactcaaaaaagatagcaaaaagcaataacattaaatttcattattgatctactagctttaactatttaatactagtacacttagttttgattactttgaaattgaaacaaaacaataatcttttcttttaatgactttttcagttataggaaagatgatattaaaagaaaatatacaactatagcttagctacaggtataaaattgttttaaagatatgtaattttgctattgaattaaactgaaaacataaatatcaactcatgattttgaaaaaaaaatcttttttatgtttggttttggtaaaaggagagacaaataagtcagaagaacagaaaatacagaaataggcaaactttcccatattcaattagtttttgascaaggggccaagataattcaagagagcaataaataatcttttagaatgatgctggaactgccaaataattcatatggaaaacaaag

SEQ ID NO: 586552 - DNA, 507 bp, Homo sapiens
  misc_feature 1, 2, 3, 4, 5, 6, 7, 8, 9, 10, 11, 12, 13, 14, 15, 16, 17,18, 19, 20, 21, 22, 23, 24, 25, 26, 27, 28, 29, 30, 31,32, 33, 34, 35, 36, 37, 38, 39, 40, 41, 42, 43, 44, 45,46, 47, 48, 49, 50, 51, 52, 53, 54, 55, 56, 57, 58, 59,60: n = A,T,C or G
  misc_feature 61, 62, 63, 64, 65, 66, 67, 68, 69, 70, 71, 72, 73, 74, 75,76, 77, 78, 79, 80, 81, 82, 83, 84, 85, 86, 87, 88, 89,90, 91, 92, 93, 94, 95, 96: n = A,T,C or G
nnnnnnnnnnnnnnnnnnnnnnnnnnnnnnnnnnnnnnnnnnnnnnnnnnnnnnnnnnnnnnnnnnnnnnnnnnnnnnnnnnnnnnnnnnnnnnnngtagtggtggtggtagtggtggtggtggtggtagtggtagtggtggtggtggtggtggtggtggtggtggtggtagtagtggtggtggtggtggttgtggttttagtggtgatggtggtggtggtggtagtgrtggtgttatgcacaggggggataatacagcagaggcattaagcttgaaatcaggaaagagctctggagttatccttgagctgtgttttgaaggttgagtagcagtttgctattggaggaggtagaggttacttttcaggcagagggagcagcatgtgcaaaggctctgagatgtgagagtttgttaatgaagaaatttggtagggctggaagctcagtgagcttggtgcgagagagtcaagagatgaggctttagaagtagtatgggttttaagtcat

SEQ ID NO: 586553 - DNA, 513 bp, Homo sapiens
ggatctcactatattgtccaggttggtctcaaactccttgactcaagggatccaggacaggataacaggcrtgagtcaccacacctggctatgtgcatgaacttttaagacaaatacaaggctccacaaaagttaaggttttcccacctaatttccaggggatcttttggtgcaaggatgagaaacccttaaaagtacacagacaactccaaagattcaagagagttcatttgggctgagccagcccactgggcagactgaccttcaaacaaggcccacccatgacatacaccagatggctctccaagaatctctccagttctcagggtcgctaaggtactggacagagctaggaaagcaaacccatttgcttcttcctgcacgaacccccttgaggtcaagaacccacaatcagatgaggatggagtagctcaccctcagtcaacagtccagactcaaggtggtataatgtcttaaccaagggtgtgggactccaggtctgaatcccaactc

SEQ ID NO: 586554 - DNA, 280 bp, Homo sapiens
atgatttctgaaaatagtggaatcgagtttgaatctagtaagtacatataaataaatgtcttaaaactcctcttatgttagctaattaagaaatattattgtaatagacattagaaaatattttaataaattgaatgcatttcacaygctaagaaaatgatcttacttgcatttgatagttcaattagatacatatatacctataggtagtttaaaatatttctaataaccttatatacttttaaaaaagcattgatatctgtttgcactatctggtcta

SEQ ID NO: 586555 - DNA, 280 bp, Homo sapiens
atgatttctgaaaatagtggaatcgagtttgaatctagtaagtacatataaataaatgtcttaaaactcctcttatgttagctaattaagaaatattattgtaatagacattagaaaatattttaataaattgaatgcatttcacatgctaagraaatgatcttacttgcatttgatagttcaattagatacatatatacctataggtagtttaaaatatttctaataaccttatatacttttaaaaaagcattgatatctgtttgcactatctggtcta

SEQ ID NO: 586556 - DNA, 265 bp, Homo sapiens
gaaggaatggaatggaacggagtggagtggaatggaaagggaaggaatggaatggaacagagtggagtggagtgaagcggaatggaatgsaatggaatggaatggaatggaatggaatggaatggaatggtgaaatgaaatgtgagctgagattgtgcactgcactccagcctgggtgacctagtgagatcctgtcaaaagaaaggaatggaattgaatggatttaaaatggaatggaatggaattgaatggatttaaaatggaa

SEQ ID NO: 586557 - DNA, 265 bp, Homo sapiens
gaaggaatggaatggaacggagtggagtggaatggaaagggaaggaatggaatggaacagagtggagtggagtgaagcggaatggaatgcaatggaatggaatggaatggaatggaatggaatggaatggtgaaatgaaatgtgagctgagattgtgcactgcactscagcctgggtgacctagtgagatcctgtcaaaagaaaggaatggaattgaatggatttaaaatggaatggaatggaattgaatggatttaaaatggaa

SEQ ID NO: 586558 - DNA, 403 bp, Homo sapiens
ggctaaggcaggagaattacttgaacccaggaggcagaggttgtagtgaaccragattgcaccactgcactccagcctgggtgacacagtgaggctctgtctttccaaaaaaaaaaaaaaaaaaaaagatgtccacattcaaatccctgaatctaggaatatattactttacatagccaaaggggccttgggagtaaggattgtgagatgggcagaggagcgtgtatcatccaggtgggcacaatggaatcaatcacaagcgtccttataagcgggaagaagaagcgtcagactcaggcgatacgaagatggaagtggtgattgcagtgatacacgatcaaaagccaaggtatgtggaaagccgtcagcagaaggaagaggcatggaaacgggctctccccta

SEQ ID NO: 586559 - DNA, 403 bp, Homo sapiens
ggctaaggcaggagaattacttgaacccaggaggcagaggttgtagtgaaccaagattgcaccactgcactccagcctgggtgacacagtgaggctctgtctttccaaaaaaaaaaaaaaaaaaaaagatgtccacattcaaatscctgaatctaggaatatattactttacatagccaaaggggccttgggagtaaggattgtgagatgggcagaggagcgtgtatcatccaggtgggcacaatggaatcaatcacaagcgtccttataagcgggaagaagaagcgtcagactcaggcgatacgaagatggaagtggtgattgcagtgatacacgatcaaaagccaaggtatgtggaaagccgtcagcagaaggaagaggcatggaaacgggctctccccta

SEQ ID NO: 586560 - DNA, 403 bp, Homo sapiens
ggctaaggcaggagaattacttgaacccaggaggcagaggttgtagtgaaccaagattgcaccactgcactccagcctgggtgacacagtgaggctctgtctttccaaaaaaaaaaaaaaaaaaaaagatgtccacattcaaatccctgaatctaggaatatattactttacatagccaaaggggccttgggagtaaggattgtgagatgggcagaggagcgtgtatcatccaggtgggcacratggaatcaatcacaagcgtccttataagcgggaagaagaagcgtcagactcaggcgatacgaagatggaagtggtgattgcagtgatacacgatcaaaagccaaggtatgtggaaagccgtcagcagaaggaagaggcatggaaacgggctctccccta

SEQ ID NO: 586561 - DNA, 595 bp, Homo sapiens
tattttccaaaaaaagaaaaaaaaaaagacaaaaacccaaaacaaatgggatgtgatgtacattttccatgttattttatacatgagctatctttccaatactgaagttggtttagcaagaaaagaattaaagacktcaaagtgcaagccaagagccaaaaccactctcaacagcccaaggttgtgaacgtatttaattttccctttccctgggaagtcatttcttggatcattgacttactattattctgtaaaacagtggtagcccctgccttcctctgcttgctgccaagagtatgatccagcagtggggtctgaagagtttatgtttattggattttaatgacttagttaacaaaggtcattcctaaaagtaatagaaaactaagggtgtggaaacagaacggaaaagactgactcgagggttatttctagtagttccttggtgttgtccttagatacatgtttaatccttaaaagcaattatgaaggagtcttcctcataaccaatttactgatgctatattcaactatacttgtaaaatgttattttagacctctcagtaacaaaaggaacagggcttaaaatatgtta

SEQ ID NO: 586562 - DNA, 595 bp, Homo sapiens
tattttccaaaaaaagaaaaaaaaaaagacaaaaacccaaaacaaatgggatgtgatgtacattttccatgttattttatacatgagctatctttccaatactgaagttggtttagcaagaaaagaattaaagacttcaaagtgcaagccaagagccaaaaccactctcaacagcccaaggttgtgaacgtatttaattttccctttccctgggaagtcatttcttggatcattgacttactattattctgtaaaacagtggtagcccctgccttcctctgcttgctgccaagagtatgatccagcagtggggtctgaagagtttatgtttattggattttaatgacttagttaacaaaggtcattcctaaaagtaatagaaaactaaggstgtggaaacagaacggaaaagactgactcgagggttatttctagtagttccttggtgttgtccttagatacatgtttaatccttaaaagcaattatgaaggagtcttcctcataaccaatttactgatgctatattcaactatacttgtaaaatgttattttagacctctcagtaacaaaaggaacagggcttaaaatatgtta

SEQ ID NO: 586563 - DNA, 595 bp, Homo sapiens
tattttccaaaaaaagaaaaaaaaaaagacaaaaacccaaaacaaatgggatgtgatgtacattttccatgttattttatacatgagctatctttccaatactgaagttggtttagcaagaaaagaattaaagacttcaaagtgcaagccaagagccaaaaccactctcaacagcccaaggttgtgaacgtatttaattttccctttccctgggaagtcatttcttggatcattgacttactattattctgtaaaacagtggtagcccctgccttcctctgcttgctgccaagagtatgatccagcagtggggtctgaagagtttatgtttattggattttaatgacttagttaacaaaggtcattcctaaaagtaatagaaaactaagggtgtggaaacagaacggaaaagactgactcgagggttatttctagtagttccttggtgttgtccttagatacatgtttaatccttaaaagcaattatgaaggagtcttcctcataacsaatttactgatgctatattcaactatacttgtaaaatgttattttagacctctcagtaacaaaaggaacagggcttaaaatatgtta

SEQ ID NO: 586564 - DNA, 366 bp, Homo sapiens
aatggaacggagtggagtggagtsgagtgaagcggaatggaatggaatggaatggaatggaatggaatggaatggaatggtgaaatgaaatgtgagctgagattgtgcactgcactgcagcctgggtgacctagtgagatcctgtcaaaagaaaggaatggaattgaatggatttaaaatggaatggactggaatggagtggagtggattagagtggattatcatggagtggagtggagtggagtggaatagaatggtgtggtatggattcttatggaatggaatggaatggagtgcagtggagtggagtggggtgtagtggagtggagtggaatggagtggaatggaatgggatggaatggaatg

SEQ ID NO: 586565 - DNA, 366 bp, Homo sapiens
aatggaacggagtggagtggagtggagtgaagcggaatggaatgsaatggaatggaatggaatggaatggaatggaatggtgaaatgaaatgtgagctgagattgtgcactgcactgcagcctgggtgacctagtgagatcctgtcaaaagaaaggaatggaattgaatggatttaaaatggaatggactggaatggagtggagtggattagagtggattatcatggagtggagtggagtggagtggaatagaatggtgtggtatggattcttatggaatggaatggaatggagtgcagtggagtggagtggggtgtagtggagtggagtggaatggagtggaatggaatgggatggaatggaatg

SEQ ID NO: 586566 - DNA, 366 bp, Homo sapiens
aatggaacggagtggagtggagtggagtgaagcggaatggaatggaatggaatggaatggaatggaatggaatggaatggtgaaatgaaatgtgagctgagattgtgcactgcactgcagcctgggtgacctagtgagatcctgtcaaaagaaaggaatggaattgaatggatttaaaatggaatggactggaatggagtggagtggattagagtggattatcatggagtggagtggagtggagtggaatagaatggtgtggtatggattcttatggaatggaatggaatggagtgcagtggagtggagtggggtgkagtggagtggagtggaatggagtggaatggaatgggatggaatggaatg

SEQ ID NO: 586567 - DNA, 499 bp, Homo sapiens
gtggaatggagtggagtggaatggaaagggaaggaatggaatggaacggagtggagtggagtggaatggaacggagtggagtggagtggagtgaagcggaatggaatggaatggaatggaatggaatggaatggaatggaatggtgaaatgaaatgtgagctgagattgtgcactgcactgcagcctgggtgacctagtgagatcctgtcaaaagaaaggaatggaattgaatggatttaaaatggaatggactggaatggagtggagtggattagagtggattatcatggagtggagtggagtggagtggaatagaatggtgtggtatggattcttatggaatggaatggaatggagtgcagtggagtggagtggggtgtagtggagtggagtggaatggagtggaatggaatgggatggratggaatggagtggagtggaaaggtgtagaatggagtggaatggaatggagtgcagtggactggagttgagtggagt

SEQ ID NO: 586568 - DNA, 533 bp, Homo sapiens
  misc_feature 1: n = A,T,C or G
ngaattcaatggagtggagtggaatggagtggagtggaatggaaagggaaggaatggaatggaacggagtggagtggagtggaatggaacggagtggagtggagtggagtgaagcggaatggaatggaatggaatggaatggaatggaatggaatggaatggtgaaatgaaatgtgagctgagattgtgcactgcactgcagcctgggtgacctagtgagatcctgtcaaaagaaaggaatggaattgaatggatttaaaatggaatggactggaatggagtggagtggattagagtggattatcatggagtggagtggagtggagtggaatagaatggtgtggtatggattcttatggaatggaatggaatggagtgcagtggagtggagtggggtgtagtggagtggagtggaatggagtggaatggaatgggatggaatggaatggagtggagtggaaaggtgtagaatggagtggaatggaatggagtgcagtggaytggagttgagtggagtggattgaagttgagtg

SEQ ID NO: 586569 - DNA, 533 bp, Homo sapiens
  misc_feature 1: n = A,T,C or G
ngaattcaatggagtggagtggaatggagtggagtggaatggaaagggaaggaatggaatggaacggagtggagtggagtggaatggaacggagtggagtggagtggagtgaagcggaatggaatggaatggaatggaatggaatggaatggaatggaatggtgaaatgaaatgtgagctgagattgtgcactgcactgcagcctgggtgacctagtgagatcctgtcaaaagaaaggaatggaattgaatggatttaaaatggaatggactggaatggagtggagtggattagagtggattatcatggagtggagtggagtggagtggaatagaatggtgtggtatggattcttatggaatggaatggaatggagtgcagtggagtggagtggggtgtagtggagtggagtggaatggagtggaatggaatgggatggaatggaatggagtggagtggaaaggtgtagaatggagtggaatggaatggagtgcagtggactgragttgagtggagtggattgaagttgagtg

SEQ ID NO: 586570 - DNA, 525 bp, Homo sapiens
tggaatggaatcaaatcgaatggaatgggaaggaatggaattgactrgagtggggtggggtggagtggaatggaatgcaatggaatggaatggaatggaatggtgaaatgaaatgtgagctgagattgtgcactgcactgcagcctgggtgacctagtgagatcctgtcaaaagaaaggaatggaattgaatggatttaaaatggaatggaatggaatggagtggagtagagtggattatcatggagtggagtggagtggagtggagtggaatggtgtggtatggattcttatggaatggaatggaatggagtgcagtggagtggagtggggtgtagtggagtggagtggaatggagtggaatggaatgggatgggatggaatggagtggagtggaaaggtgtagaatggagtggaatggaatggagtgcagtggactggagttgagtggagtggattgaagttgagtggagtggattggagtgcagtggaatggagtggaatggaatggggtggaatggaattc

SEQ ID NO: 586571 - DNA, 525 bp, Homo sapiens
tggaatggaatcaaatcgaatggaatgggaaggaatggaattgactggagtggggtggggtggagtggaatggaatgcaatggaatggaatggaatggaatggtgaaatgaaatgtgagctgagattgtgcactgcactgcagcctgggtgacctagtgagatcctgtcaaaagaaaggaatggaattgaatggatttaaaatggaatggaatggaatggagtggagtagagtggattatcatgsagtggagtggagtggagtggagtggaatggtgtggtatggattcttatggaatggaatggaatggagtgcagtggagtggagtggggtgtagtggagtggagtggaatggagtggaatggaatgggatgggatggaatggagtggagtggaaaggtgtagaatggagtggaatggaatggagtgcagtggactggagttgagtggagtggattgaagttgagtggagtggattggagtgcagtggaatggagtggaatggaatggggtggaatggaattc

SEQ ID NO: 586572 - DNA, 203 bp, Homo sapiens
ttacagaattatatatctttcaagtatttagaagagtgttgaaattaagcctgcatccccacgattttcagcggtgctgatgcctaataaactcaactccttgcatgccaaaattggcttaaagcccacycgttacccaagctacacttcaagcatcaaggctcaaaaatgtaattttaaatatgcaagagtttgaggaattc

SEQ ID NO: 586573 - DNA, 541 bp, Homo sapiens
aagcccactcgttacccaagctacacttcaagcatcaaggctcaaaaatgtaattttaaatatgcaagagtttgaggaattcaytactcacactttcttgaacagtctatccaagtgcatcaagcacaatgtgagtaaataaattttgaccaaaggattgatagtaatgttgaatacatttaataatagatctaagattaaaaggtgagagtgagggtgagaagagtgtatgaatgcttcgtgttatgacaaagagaatgtagcacccaggtcctacctgcttggttgcattgccagtgcccacggtaggctattttatccaggtttttaggtttttatattttgttttgtttttttattttcttttcaggagagttagtccaagaccaataactccataactggtagatttggaagatttcaatagtgcttaacattttgtacatagctttataacagttttcttttcctttttttctgagagattcttttcaatataccccatcatggttgaactcaaagtcattgcttatataaaatc

SEQ ID NO: 586574 - DNA, 541 bp, Homo sapiens
aagcccactcgttacccaagctacacttcaagcatcaaggctcaaaaatgtaattttaaatatgcaagagtttgaggaattcattactcacactttcttgaacagtctatccaaktgcatcaagcacaatgtgagtaaataaattttgaccaaaggattgatagtaatgttgaatacatttaataatagatctaagattaaaaggtgagagtgagggtgagaagagtgtatgaatgcttcgtgttatgacaaagagaatgtagcacccaggtcctacctgcttggttgcattgccagtgcccacggtaggctattttatccaggtttttaggtttttatattttgttttgtttttttattttcttttcaggagagttagtccaagaccaataactccataactggtagatttggaagatttcaatagtgcttaacattttgtacatagctttataacagttttcttttcctttttttctgagagattcttttcaatataccccatcatggttgaactcaaagtcattgcttatataaaatc

SEQ ID NO: 586575 - DNA, 541 bp, Homo sapiens
aagcccactcgttacccaagctacacttcaagcatcaaggctcaaaaatgtaattttaaatatgcaagagtttgaggaattcattactcacactttcttgaacagtctatccaagtgcatcaagcacaatgtgagtaaakaaattttgaccaaaggattgatagtaatgttgaatacatttaataatagatctaagattaaaaggtgagagtgagggtgagaagagtgtatgaatgcttcgtgttatgacaaagagaatgtagcacccaggtcctacctgcttggttgcattgccagtgcccacggtaggctattttatccaggtttttaggtttttatattttgttttgtttttttattttcttttcaggagagttagtccaagaccaataactccataactggtagatttggaagatttcaatagtgcttaacattttgtacatagctttataacagttttcttttcctttttttctgagagattcttttcaatataccccatcatggttgaactcaaagtcattgcttatataaaatc

SEQ ID NO: 586576 - DNA, 626 bp, Homo sapiens
cttgctctgttgcccaggctggagttcagtgacacaatcttggctcactgccgcctccaccttccaggctcaatggttctcctccctcagcctcccgagtagctgggattacaggtacgcatcaccacacccagctaatttttggatttttagtagagactaggttttaccatgttggctaggctaggctagtctcaaactcctgagttcaggtgatccacccacttcagtctcccaaagtgctgggatttcaagtgtgagccaccagggcsagcctagatatattctagaagcgaataatagtaaaatataatgtaaattgtttaaaattaatctgtatatgaaatgttttctaggactttcctgccagaaaagtaggaatagaatggcagaaggaaagaggttccttctacaagcaggcacacatcctatttcactttatcctgtgatcagtctcataaccatctcctggtatgaagtgctaaaactgtgctttaagaataacttaagtcctttatgtacaaactaaagcatgagagcctgaaccttggaaaccaagaaattccaaaaagccttatgtgtgagactgggtgccacagatcttggcagaaattactgcttattct

SEQ ID NO: 586577 - DNA, 541 bp, Homo sapiens
aagcccactcgttacccaagctacacttcaagcatcaaggctcaaaaatgtaattttaaatatgcaagagtttgaggaattcattactcacactttcttgaacagtctatccaagtgcatcaagcacaatgtgagtaaataaattttgaccaaaggattgatagtaatgttgaatacatttaataatagatctaagattaaaaggtgagagtgagggtgagaagagtgtatgaatgcttcgtgttatgacaaagagaatgtagcacccaggtcctacctgcttggttgcattgccagtgcccacggtaggctattttatccaggtttttaggtttttatattttgttttgtttttttwttttcttttcaggagagttagtccaagaccaataactccataactggtagatttggaagatttcaatagtgcttaacattttgtacatagctttataacagttttcttttcctttttttctgagagattcttttcaatataccccatcatggttgaactcaaagtcattgcttatataaaatc

SEQ ID NO: 586578 - DNA, 608 bp, Homo sapiens
aagagaaaggaagaggatgaaaagtaaaaaggaggaggagggggagggaggaagaaagaaatgtgaaaagaatgaatggtaaagtttttaacaacataatttaaccttctagaatatgaatgttggtstatttgatgatgtcccacagattccttagtctctgctcattttttatctgtttctcagagtcgatattttccattttcttatcttcaagctcatgacttcttctgtgtgtgcaaatatactcttaaatccccctggtgattttttaattttcatcattgtagttttccactccagaatttctgttatctctttgttgatagtcctactttttaatatttttttctgattcctttatttctttgtttctgttttccttttgacatttgagtatcattaagatagttgttttaaagtctttgtctagtaagtttgatatctgggtttccttagagatattttctgtcaatttattttgttcctttgaatgagccatactttcccattcttcgtatgccttgtaactttttgaaaactggacattataagaattataattactatgtggttactctgtatatcagacccccccctacaaacac

SEQ ID NO: 586579 - DNA, 608 bp, Homo sapiens
aagagaaaggaagaggatgaaaagtaaaaaggaggaggagggggagggaggaagaaagaaatgtgaaaagaatgaatggtaaagtttttaacaacataatttaaccttctagaatatgaatgttggtctatttgatgatgtcccacagattccttagtctctgctcattttttatctgtttctcagagtcgatattttccattttcttatcttcaagctcatgacttcttctgtgtgtgcaaatatactcttaaatccccctggtgattttttaattttcatcattgtagttttccactccagaatttctgttatctctttgttgatagtcctactttttaatatttttttctgattcctttatttctttgtttctgttttccttttgacatttgagtatcattaagatagttgttttaaagtctttgtctagtaagtttgatatctgggtttccttagagatattttctgtcaatttattttgttcctttgaatgagccatactttcccattcttcgtatgccttgtaactttttgaaaactggacattataakaattataattactatgtggttactctgtatatcagacccccccctacaaacac

SEQ ID NO: 586580 - DNA, 636 bp, Homo sapiens
tccctgtgtgtatgtctccctctactcaaattttttctttttataaggacatcagtcatatggaattcaggctcatctgattttatcttaacttgatcacctgcaaagaacctatttcctaatgaggtcatattcagtggttaggatttcagcatctatatagaggaaacaatttagctcctatctgtgtatacatgattgtaatagctatgtcttccraaagcgttgacccccttattactacaatataaatttttaaaatcctattcacctttttaatagtctatatcgtgtgttatgagtataatgagttcagtgttcttatgattgctctttgcatgatattttttatcatctttttactttcaatccattagtatccttgcatctccgggtatattgggatcacttgttttaatccagtccgacaatctctgcctctttattggactttaatctgctcacatttaatattataattggtataattctatttatgtctgccattttacagtttgttttctatatttcccaaatatttttctttatttctttattttgcaatgaatgaatattttctaaaacagggaactttagattactaatgaattattttactatatatttttgagaatt

SEQ ID NO: 586581 - DNA, 633 bp, Homo sapiens
gtattacccaccatagcttttgcaccatgtaacaatttttgcttcaattgttaaacattattttggaaactcaaggaacagtaaagtctgttttattgcccatatttttactatttgtttgttctttcttccttcaggatgttctragaatccttctttttatcattctcctttctggttcaataacttttctcactattcttttggtgtagttttgtctcatgactaatttttagttctcattcatctcacaatttcttgatttccctttcattactaatggatgtttttgctggatatagaattctttgttgtcggttcttttaggacttgcaaaaatgttatgctgctttgttctggcctccatggtttcaggtgagaaatctgctgtcatttgagttgtttttcatctgtggataaggtgtcatttctcttatttatctcaaggtttttaagtttagtcattagttttcagaagtttatgatatatattagcattgatttatttatgtgtatcctcttaggatttattcaatttcttgaatctgtgggtcttcgaataattgttcagctgcatcatgttccttttctgagactccagtgacaggaatgttgcatcatttattatattcc

SEQ ID NO: 586582 - DNA, 616 bp, Homo sapiens
attattttggaaactcaaggaacagtaaagtctgttttattgcccatatttttactatttgtttgttctttcttccttcaggatgttctgagaatccttctttttatcattctcctttctggttcaataacttttctcactattcttttggtgtagttttgtctcatgactaatttttagttctcattcatctcacaatttcttgatttccctttcattactaatggatgtttttgctggatatagaattctttgttgtcggttcttttaggacttgcaaaaatgttatgctgctttgttctggcctccatggtttcaggtgagaaatctgctgtcatttgagttgtttttcatctgtggataaggtgtcatttctcttatttatctcaaggtttttaagtttagtcattagttttcagaagtttatgatatatattagcattgatttatttrtgtgtatcctcttaggatttattcaatttcttgaatctgtgggtcttcgaataattgttcagctgcatcatgttccttttctgagactccagtgacaggaatgttgcatcatttattatattcccacaagtgtctttaatgcctttttttaaaaaaaatatgt

SEQ ID NO: 586583 - DNA, 633 bp, Homo sapiens
gtattacccaccatagcttttgcaccatgtaacaatttttgcttcaattgttaaacattattttggaaactcaaggaacagtaaagtctgttttattgcccatatttttactatttgtttgttctttcttccttcaggatgttctgagaatccttctttttatcattctcctttctggttcaataacttttctcactattcttttggtgtagttttgtctcatgactaatttttagttctcattcatctcacaatttcttgatttccctttcattactaatggatgtttttgctggatatagaattctttgttgtcggttcttttaggacttgcaaaaatgttatgctgctttgttctggcctccatggtttcaggtgagaaatctgctgtcatttgagttgtttttcatctgtggataaggtgtcatttctcttatttatctcaaggtttttaagtttagtcattagttttcagaagtttatgatatatattagcattgatttatttatgtgtatcctcttaggatttattcaatttcttgaatctgtgggtcttcgaataattgttcagctgcatcatgttcyttttctgagactccagtgacaggaatgttgcatcatttattatattcc

SEQ ID NO: 586584 - DNA, 414 bp, Homo sapiens
tatatgaaatgttttctaggactttcctgccagaaaagtagraatagaatggcagaaggaaagaggttccttctacaagcaggcacacatcctatttcactttatcctgtgatcagtctcataaccatctcctggtatgaagtgctaaaactgtgctttaagaataacttaagtcctttatgtacaaactaaagcatgagagcctgaaccttggaaaccaagaaattccaaaaagccttatgtgtgagactgggtgccacagatcttggcagaaattactgcttattcttaattcttattgttcctttctaacacttcaacttataatgccaatatctacctcagcctaaagacaagctctagaatcacttgtgttacttattacatttcttttaaaaaactcatgaattacac

SEQ ID NO: 586585 - DNA, 620 bp, Homo sapiens
gctggtttagttggtgctttcaattgctgcttctgataaactcctttagctagaataaattgatgaggattttggcatgtggcattagagatggttattaattttgtcctcttatttgcattgctcaatgtagtaaatactagctgtatatggctacttaatttcaaattaattacaatgaaatatacttaaatattgaattttttagtcactgttggttcattattgaatatcttcagctaagatttcccatctaaatacactaagaggtggtttagttaactggtcgtccacaaatattgaygctgttgttaactcctgatatattctctgcaaatagaatattcatgagcctcctcctgaaaccagtagcctagagataattttataaatgggacacaagctggaaatctatactctttcagtttttgaaatattagcttcccagtgaataaaatcaaattcataagatatgttaggacagtttaactcaagatgttcaaaactgaaatgacacattctacaatatgtgataaaaccaccccctaacaacttaaagcaaaacagggattgaccttaaagacctgccttttcctcatcccccagccaatcagttttca

SEQ ID NO: 586586 - DNA, 620 bp, Homo sapiens
gctggtttagttggtgctttcaattgctgcttctgataaactcctttagctagaataaattgatgaggattttggcatgtggcattagagatggttattaattttgtcctcttatttgcattgctcaatgtagtaaatactagctgtatatggctacttaatttcaaattaattacaatgaaatatacttaaatattgaattttttagtcactgttggttcattattgaatatcttcagctaagatttcccatctaaatacactaagaggtggtttagttaactggtcgtccacaaatattgatgctgttgttaactcctgatatattctctgcaaatagaatattcatgagcctcctcctgaaaccagtagcctagagataattttataaatgggacacaagctggaaatctatactctttcagtttttgaaatattagcttcccagtgaataaaatcaaattcataagatatgttaggacagtttaactcaagatgttcaaaactgaaatgacacattctacaatatgtgataaaaccaccccctaacaacttaaagcaaaacagrgattgaccttaaagacctgccttttcctcatcccccagccaatcagttttca

SEQ ID NO: 586587 - DNA, 620 bp, Homo sapiens
gctggtttagttggtgctttcaattgctgcttctgataaactcctttagctagaataaattgatgaggattttggcatgtggcattagagatggttattaattttgtcctcttatttgcattgctcaatgtagtaaatactagctgtatatggctacttaatttcaaattaattacaatgaaatatacttaaatattgaattttttagtcactgttggttcattattgaatatcttcagctaagatttcccatctaaatacactaagaggtggtttagttaactggtcgtccacaaatattgatgctgttgttaactcctgatatattctctgcaaatagaatattcatgagcctcctcctgaaaccagtagcctagagataattttataaatgggacacaagctggaaatctatactctttcagtttttgaaatattagcttcccagtgaataaaatcaaattcataagatatgttaggacagtttaactcaagatgttcaaaactgaaatgacacattctacaatatgtgataaaaccaccccctaacaacttaaagcaaaacagggattgaccttaaagacctgcctttkcctcatcccccagccaatcagttttca

SEQ ID NO: 586588 - DNA, 268 bp, Homo sapiens
aacctttgactataggtcacaatcttactttggttcctgtatttgaatttatgctaataaagtyctacagctaaaatagattatataaacttatctacatttttactagtattctggtgtcatttaaaattatgtaatgaaatcaaattttaatttggattattgttatctgagttaaggatctaaatttttaattttcttataaatattacataattatttctgaaccatatattgactaatctgccctttatatgatgtgcattat

SEQ ID NO: 586589 - DNA, 268 bp, Homo sapiens
aacctttgactataggtcacaatcttactttggttcctgtatttgaatttatgctaataaagtcctacagctaaaatagattatataaacttatctacatttttactagtattctggtgtcatttwaaattatgtaatgaaatcaaattttaatttggattattgttatctgagttaaggatctaaatttttaattttcttataaatattacataattatttctgaaccatatattgactaatctgccctttatatgatgtgcattat

SEQ ID NO: 586590 - DNA, 345 bp, Homo sapiens
tatatgaaatgttttctaggactttcctgccagaaaagtaggaatagaatggcagaaggaaagaggttccttctacaagcaggcacacatcctatttcactttatcctrtgatcagtctcataaccatctcctggtatgaagtgctaaaactgtgctttaagaataacttaagtcctttatgtacaaactaaagcatgagagcctgaaccttggaaaccaagaaattccaaaaagccttatgtgtgagactgggtgccacagatcttggcagaaattactgcttattcttaattcttattgttcctttctaacacttcaacttataatgccaatatctacctcag

SEQ ID NO: 586591 - DNA, 542 bp, Homo sapiens
tattgtctcaactgtgtgcaaccactacttataaaaaatgatataagaaatgcagtctgaaatctgaattctaaataacaatgtagggccattatccctctgggacccttagggtcaaaataagagaaaagagatgaatggtgggttggaagtaagtcaatgatccttgtcaattttttgtatctgtcaagaaaagcatctgcttgaggacatccattttcctgcttctgagttacagaataataggtgcctatcctgaatgtaacattccctgacacggactctgtgtctatgctgcttaggtggtttgtgcatgagaaagtgtttaacatctgaaaatggagacaatccttagagaaagatacatatgaattttaaaaggaaatatacctacgatagaaatgaaacaaatagcataaatatctagctgtattttgtctttttggtaactgttacaatatatacattttcaaacaactaagttcagcactgacttcgggagaatctagataaaactgaaytgacatataataagcatgggt

SEQ ID NO: 586592 - DNA, 345 bp, Homo sapiens
tatatgaaatgttttctaggactttcctgccagaaaagtaggaatagaatggcagaaggaaagaggttccttctacaagcaggcacacatcctatttcactttatcctgtgatcagtctcataaccatctcctggtatgaagtgctaaaactgtgctttaagaataacttaagtcctttatgtacaaactaaagcatgagagcctgaaccttggaaaycaagaaattccaaaaagccttatgtgtgagactgggtgccacagatcttggcagaaattactgcttattcttaattcttattgttcctttctaacacttcaacttataatgccaatatctacctcag

SEQ ID NO: 586593 - DNA, 315 bp, Homo sapiens
caatgtttagtcttttctccctcatccccctcccaccctttcccctgggtccccagagtcaattgtatcattcttatgcctttgcatcttcatagctttgctcccacctataagtgagaacatatgatatttggttttccattcctgagttacttcacatagaactagtctccaattccatccagattgctgcaaatgccattattttgttcctttttatggctgagtagtattccatgctacatatataccacattktctttatccattcgttcactaatgggcatttgaactgattccatattttttcagttg

SEQ ID NO: 586594 - DNA, 490 bp, Homo sapiens
tacatatcttacaataaagtgactgttaagcctacagttctggagttcagaagccttaaatgagactcacagggctaacatcaagttttgggcagggctgcagtctttctgagggctctgtggcagagtctatgtactttatttttttcagcatgcagaggccacctttatttcttggaacatgacctcgttcttatatcttttttgtttttttttttttgagatagagtctccttctgtcgcccargctggagtgcagtggcacgatctcagctcactgcaacctctgtctcccgggttcaagcgattctcctgcctcagcttcctgagtagcttggactacaggcacgtgataccatgcccagttaattttttgtacttttagtagggatggggtttcaccatgttagccaggatggtctcgaactcctgacctcgtgatccacccaccccggcctcccaaagggctgggattaggcgtgagccaccg

SEQ ID NO: 586595 - DNA, 430 bp, Homo sapiens
caggaaaacacatcagtgccctcgaggggaaaagcgtaaacattttaattgctgtacatggtgacacaaatccatgttgttaatctaagtggaaggggctgaagcacgaaacgtaattcaaagagtttacttgagccaaaatgaggacagctgcctggaagaaacagacccaagtatccttggatatgaactccatttggagctttgcaacaagcagtttcttaaaggcaaaaaagggataagaagtgggatgatgcaaagaggtttgtcacaaattmtcattggcttatggaaatcacatttattagtgactggctatacactgttacactattattgggtgtggattgtagtgtctggtgtggcattattgattaatttatagctactgtggcaacagcaagcagcctagatgaacacacagctcaaa

SEQ ID NO: 586596 - DNA, 430 bp, Homo sapiens
caggaaaacacatcagtgccctcgaggggaaaagcgtaaacattttaattgctgtacatggtgacacaaatccatgttgttaatctaagtggaaggggctgaagcacgaaacgtaattcaaagagtttacttgagccaaaatgaggacagctgcctggaagaaacagacccaagtatccttggatatgaactccatttggagctttgcaacaagcagtttcttaaaggcaaaaaagggataagaagtgggatgatgcaaagaggtttgtcacaaattatcattggcttatggaaatmacatttattagtgactggctatacactgttacactattattgggtgtggattgtagtgtctggtgtggcattattgattaatttatagctactgtggcaacagcaagcagcctagatgaacacacagctcaaa

SEQ ID NO: 586597 - DNA, 430 bp, Homo sapiens
caggaaaacacatcagtgccctcgaggggaaaagcgtaaacattttaattgctgtacatggtgacacaaatccatgttgttaatctaagtggaaggggctgaagcacgaaacgtaattcaaagagtttacttgagccaaaatgaggacagctgcctggaagaaacagacccaagtatccttggatatgaactccatttggagctttgcaacaagcagtttcttaaaggcaaaaaagggataagaagtgggatgatgcaaagaggtttgtcacaaattatcattggcttatggaaatcacatttattagtgactggctatacactgttacactattattgggtgtggattgtagtgtctggtgtggcattattgrttaatttatagctactgtggcaacagcaagcagcctagatgaacacacagctcaaa

SEQ ID NO: 586598 - DNA, 580 bp, Homo sapiens
taaggaggaagagattatatgtagagagggggattagaaaaaaactttgcagaggatttacaagatgaatacattttaacagatgaaaatagaggtagagatggcagtattttcaataaaggaaccagctctctttcattcatttgaaaacaaattgttaagcatctaccctgcctgaggtaaaaagtggctaaaataaataaacatgctttctgaattccagaaactttcttttcctttttttttttttttttaaattttactttaagttccaggatgcacgtgcagaatgtgcaggtttgttacataggtatacctgtgccatggtggtttgctttatctatcaatccatcatctagattttaagccctgcatgcattatctatttgtcctaatgctctcccttcccttgcccccaacctgccgactggccccagtgtgtgttgttcccctccctgtgtccgtgtgttctcattgttcaactcccacttacagmgatagttggttttctgttcctctgttagtttgctgaggatgatggcttctagcttcatccatgtccctgcaaaggacatgatct

SEQ ID NO: 586599 - DNA, 573 bp, Homo sapiens
aagtctacagaagcaaatttctctaccttgagcgtagtctttcccctactcaaatatcaccagtcatgatttctgaacagaggtaatcaacctagaatgaaatcattagggtggatttaattcaatatgactggtccttacaaaaaagggaaatttggacctagaaacagacactcacacagacagaacgccatgtgaagaaaagcagacatggagtgatgcttctacaagtcaaggaatgccaaagatcacattaaaccagcagaaactgagagaggcatgcatcagattctttctcactgcctcagaaggaagcaaacttgctgacacctttatcttggacatttaggctccagaactgtgagacaatatatttctgttgtttatgtcactctttagtggtactttgctatggcatacgtgtrcataacttttgtgccacaaatagatcagtttgcatatatatgtagaaatatatttcaatgtatgtgcattagaaatatatatgcgttagaaatatatttctacatatatgtaaattatatatattctgtatataaaattaaacaaatt

SEQ ID NO: 586600 - DNA, 182 bp, Homo sapiens
gtcagactggttgtctgctctcaaaccctgtctcctgataagatgttatcaatgacaatgtgygcccaaaacttcattagcaattttaatttcgccctggtcctgtgatctcaccctgcctccatttgccttgtgatattttattaccttgtgaagcatgtgatctctgtgacccacaccct

SEQ ID NO: 586601 - DNA, 182 bp, Homo sapiens
gtcagactggttgtctgctctcaaaccctgtctcctgataagatgttatcaatgacaatgtgtrcccaaaacttcattagcaattttaatttcgccctggtcctgtgatctcaccctgcctccatttgccttgtgatattttattaccttgtgaagcatgtgatctctgtgacccacaccct

SEQ ID NO: 586602 - DNA, 182 bp, Homo sapiens
gtcagactggttgtctgctctcaaaccctgtctcctgataagatgttatcaatgacaatgtgtgcccaaaacttcattagcaattttaatttcgccctggtcctgtgatctcwccctgcctccatttgccttgtgatattttattaccttgtgaagcatgtgatctctgtgacccacaccct

SEQ ID NO: 586603 - DNA, 617 bp, Homo sapiens
ccaaatctaatatcctcacatttcaaagcacaatcccaagagtcccccaaagtcttaacttattccatcagtcactcaaaagtccaagtgcaaagtcttatctgaggcaaggcaattctcttttgcctatgagcctgtaaaatcaaaagcaaggtaggtacttccaagatacaatgggagtacagacattggataaataatactattccaaatgggagaaattggccaaaataaagggactacaggccccatgcaactccaaaattcaacagggcaatcattaaatcttaaagctccaaaatgatctcctttgactgcattcttataaccaggtygcactgatgcaagaggtatgttcccatggttttagagagctctgcccctgtggttttacaggatacagcctacctcctggctgctttcatgggctggcattgagggtctgcagcttttctaggcacaaggtgcaagctgttggtagatctaccattctggggtctggaggatgtggccctcttctcatatctccactaggcagtgccccagttaggactctgtgtgtaggctccaaccccacacttcccttctgcactgccctagcagaagttctccatgag

SEQ ID NO: 586604 - DNA, 543 bp, Homo sapiens
tatttagcactcattttatgttttctaattataaatataatgtattctcatattctcaaggtaatgaatttgcaaattttaaattagtaggaagagtaaaaggaactaagatcccactgtccaaaggtaatcattattcaggttctgctcttttccttccatttgattctctgatattttcttcatgggtgccacttataacccactttgtgtttcagtcagtgtctatacatacagactgaatgataccaatgtctcatagaaactaagtttaatcaaatcaagaaactaagtttaatgccagtctatatcaatgtaccgtttccttctagctaaatatttaggcttttccaaattttgttaacataaataactccaaaratatttttgttaacattttttcttagtgttattttcctaaggtagactttaaaaatttactataataaattataaaaaatgatcattttaaggttccttatagttgtaatatttgcaaataatataagttatcacaactctctagttatttctgcttgatat

SEQ ID NO: 586605 - DNA, 543 bp, Homo sapiens
tatttagcactcattttatgttttctaattataaatataatgtattctcatattctcaaggtaatgaatttgcaaattttaaattagtaggaagagtaaaaggaactaagatcccactgtccaaaggtaatcattattcaggttctgctcttttccttccatttgattctctgatattttcttcatgggtgccacttataacccactttgtgtttcagtcagtgtctatacatacagactgaatgataccaatgtctcatagaaactaagtttaatcaaatcaagaaactaagtttaatgccagtctatatcaatgtaccgtttccttctagctaaatatttaggcttttccaaattttgttaacataaataactccaaaaatatttttgttaacattttttcttagtgttattttcctaaggtagactttaaaaatttactataayaaattataaaaaatgatcattttaaggttccttatagttgtaatatttgcaaataatataagttatcacaactctctagttatttctgcttgatat

SEQ ID NO: 586606 - DNA, 543 bp, Homo sapiens
tatttagcactcattttatgttttctaattataaatataatgtattctcatattctcaaggtaatgaatttgcaaattttaaattagtaggaagagtaaaaggaactaagatcccactgtccaaaggtaatcattattcaggttctgctcttttccttccatttgattctctgatattttcttcatgggtgccacttataacccactttgtgtttcagtcagtgtctatacatacagactgaatgataccaatgtctcatagaaactaagtttaatcaaatcaagaaactaagtttaatgccagtctatatcaatgtaccgtttccttctagctaaatatttaggcttttccaaattttgttaacataaataactccaaaaatatttttgttaacattttttcttagtgttattttcctaaggtagactttaaaaatttactataataaattataraaaatgatcattttaaggttccttatagttgtaatatttgcaaataatataagttatcacaactctctagttatttctgcttgatat

SEQ ID NO: 586607 - DNA, 300 bp, Homo sapiens
aaaatcataaaaacaattacattctcttaagcaaatgrggttatcacctcagtgagttgtggctactttttcaggttgtttacctatcagagattttgactggaaaatgagatctggagcttcagatactcagggtaattgtttgtttttccctcattaatatgagaacaaattctaaagttgtaaaagttatgttaatagagattccaagcccatgaactctaagcgagatggccatgcaatccatgttttctagatccatgttgcctatttctttagcctgattttaatatctaacct

SEQ ID NO: 586608 - DNA, 557 bp, Homo sapiens
ccattgtgtatatacatatataccatattttctttatctgttcatttgatgatggacatttagattgtttctactttttggctattgtgaataattctgcaatgaacatgggaatgcaaatatcacttcaaggtcttgttttcaattattttggaaaaatgcccacaagtgggattgctgcatcctatggtaggtctattttttaatgttttgaggaccctccatactgttttccataatggctctatcattttacattcctactgacagtacatagggttccaattcaatttcccacaacttcatcagtacttgctattttctttttttaaaaatggtcatacagttatgaggtgataaatcctattgtgattttaattagcatttccctgataattaatgatgttgagtatcttttcatatccytgttggtcatttgcatgtcttcctgaaaaatatctatttaagaacttggccattttaaaattgggttatttgtttatttgcttttgaattataggtgtttcttatatattttggatattaagctcttagca

SEQ ID NO: 586609 - DNA, 581 bp, Homo sapiens
gcaagtttcttggggaagtgaattctaaacagaatttgatatatttgtttatttagcactcattttatgttttctaattataaatataaygtattctcatattctcaaggtaatgaatttgcaaattttaaattagtaggaagagtaaaaggaactaagatcccactgtccaaaggtaatcattattcaggttctgctcttttccttccatttgattctctgatattttcttcatgggtgccacttataacccactttgtgtttcagtcagtgtctatacatacagactgaatgataccaatgtctcatagaaactaagtttaatcaaatcaagaaactaagtttaatgccagtctatatcaatgtaccgtttccttctagctaaatatttaggcttttccaaattttgttaacataaataactccaaaaatatttttgttaacattttttcttagtgttattttcctaaggtagactttaaaaatttactataataaattataaaaaatgatcattttaaggttccttatagttgtaatatttgcaaataatataagttatcacaactctctagttattt

SEQ ID NO: 586610 - DNA, 581 bp, Homo sapiens
gcaagtttcttggggaagtgaattctaaacagaatttgatatatttgtttatttagcactcattttatgttttctaattataaatataatgtattctcatattctcaaggtaatraatttgcaaattttaaattagtaggaagagtaaaaggaactaagatcccactgtccaaaggtaatcattattcaggttctgctcttttccttccatttgattctctgatattttcttcatgggtgccacttataacccactttgtgtttcagtcagtgtctatacatacagactgaatgataccaatgtctcatagaaactaagtttaatcaaatcaagaaactaagtttaatgccagtctatatcaatgtaccgtttccttctagctaaatatttaggcttttccaaattttgttaacataaataactccaaaaatatttttgttaacattttttcttagtgttattttcctaaggtagactttaaaaatttactataataaattataaaaaatgatcattttaaggttccttatagttgtaatatttgcaaataatataagttatcacaactctctagttattt

SEQ ID NO: 586611 - DNA, 616 bp, Homo sapiens
cccattgcatattctacaaaaaaagtgtaccaaacttgctgaataaaaacaaaggtttaactttgtgagatgaatccacacattgcaaagcattttcacagatagcttgttactagtttctatcttgcaatatttgttttttaaatataggcctccatgggctccaaaatgtccctttgtagattctacaaactgagtgtttacaacctgctgaaycaaaacaagggttcaactctgtgagatgaatccatatatcacaaagcatttttacagatagtttgttttcagtttttattgggggatattttgtttttcattataggcctcaaaggtctcagaaatatcttcttttagattctactaagagagtgttagcaaactgctgtatataaacataggtttaagtctttgaggtaaatacacacattgcaaacattttcagatatagcttatttctagattttgtcacaagatatttggtttttcactagaggcgtcaatgggttcagaaatgttccctcatagattatacaaaaagtgtgtctccagtctgctgaatcaaaaaaaaaaaaaaggtttagctctgtgagataaatccacacattgcaagctaatg

SEQ ID NO: 586612 - DNA, 587 bp, Homo sapiens
tttcaatataggcttcaatggaccctaaaatgccctctcttaaattttacagaaacagtgtttgcaatgcgctgtatataaacaaaagttttcctctgtgagataaatctacacacacaaagcattttcacagatcccttgtttctagttttcatcataaaatatttgatttttcactataggcctcagtgggctccaaaatgtcccttcatagattctacaaaaaaagtatttccatccttctgaatcaaaactaargttttactctctgtgatgaatttacacattgcaaagcattttcatagatagcttgtttctagtttttattgtgggatatttggttttttattataggcctaaaagggctcagaaatttcttcttttagattctactaaaagagtgtttccaaattgcactataaaaaccaagtttacttctgtgcaataaatcaacatatcacaaagaatattcacagatagcttgtttctagtttttatcacaggatattgtgtttttcactaaagcctcaatgggctttgaaatgtccctctgtagattttataaaaagagtgtttttaacctgctg

SEQ ID NO: 586613 - DNA, 507 bp, Homo sapiens
agtttctgagcatgcttctgtttagcttttctgtgaagattatcccgtttccaacgaaatcttcaaagaggcccaaacatccacttgcagatgccacagaaagagtgtttggaaactgctgtttgaaaaggaaccttcaactctgtgagttgaatgcagtcatcacaaacaagtttctgacaatgcttctctctagtttttacgtgacgataattcgttttcsaccacaggcctgaaagctctccaaatgtccacttgcagaccctacgaaaagcatgtttctcatctgctctatgaaaagcaacgtgaaactctgtgagttgaacacaaacatcacagagaagtttctgagaatgcttctgtttagtttttatgtgaagatattcccgtttccaaagacaacttctaagaggaccacatatccacttgcagattccacaaaaagagagattcaaaactgctctatccataggagggttcaacgctttgagttgaatgcaagcatcc

SEQ ID NO: 586614 - DNA, 523 bp, Homo sapiens
tcacacatcacaaaatattttcacagatattttgtttctagtttttatcacaggatattaggtttttctctataggcctcagtggtctctgaaatgttcctttatagattctacaaaaagagtgtttccaacctactgattcaaaacaaaagtttaactccatgagacgaatccacayatcgcaaagcattttcacagataacttgtttcaagtttttatgatggggtattttgttttccactgcaggcctcaattgacttcaaaatatccctttgaatgttctcaaaaagagcgtttttgacttgctgtaacaaaacaaaggtttaactttgtgagataaatccacacattggaaagtattttcacagatagcttgtttcctgtttttacagcagaatattcaattttacaaatataggtctctatgggctgcaaaaggccgcttcatagattctacaagagttttcccaacttctgaatcaaaacaattttaactctgtcagttgaatccacacagcacaa

SEQ ID NO: 586615 - DNA, 582 bp, Homo sapiens
aatttgaacttgttttgggggttaaatattataaattcttcaatctgtccaaattatgttttatagtgttatatgaattagtttttgatatttatgcacaagaaagcaaaagcaagaagaaaaacattttttccctcagttttcaaaaggaaccaacttaatgagtgtattagtttacaacgactgccataagaaactactacaaattgggtggtttaaaatgacagtagtttgttttctaacatttttgaggctagaagtttgaagtcaaggtgtcagcagggccacaatcccttcgaagtctctaggggaggatccttccttgtctcttccatattctggtggctcttggtcttccctggcttgtggcaatagacctttgttctctgtctccatcttcacatggctttctcccagttgtctctgtgtgtcttcttattttctgttatgaagacagacatttgtcatttgatttarggcccatcctaaatccatccaaatcattggatttagggcccatcctaattcaggataatttcatcttgagatacttaccttaattacatctgcaaaaatccttat

SEQ ID NO: 586616 - DNA, 563 bp, Homo sapiens
  misc_feature 538, 539, 540, 541, 542, 543, 544, 545, 546, 547, 548, 549,550, 551, 552, 553, 554, 555, 556, 557, 558, 559, 560, 561,562, 563: n = A,T,C or G
gataaatcatatgattatgcttatcaacactgctaccaatgtgttgatcccttcacattctcaaaaattactaagcaccccaaagaacttttgtgtaygtagatatgttggtatttaccataggagaacttaaaactgagaaatttaaaaagtatgtgttaatgaattcatttaaaaataataatagaacgggttcagtggctcacacctgtaatcccagaactttcagagcctaaggcgagtggatcacttgatgtcacaagtttgagaccagcctgggcagcatggtgaagccctgtctctaccaaaaaattcaaaaaaatttagctgcatataatcccagctgctcagctacttgggagggtgaggtgggcggatcacttgagccagggaggtggaggttgcagtgagctgagatggcaccactgcactccagcctgggcaatagagccagaccttgtctcaaaataaatacataaataacaatagtaaagccattacatattaacataaataatacattttaatgaaaacaaannnnnnnnnnnnnnnnnnnnnnnnnn

SEQ ID NO: 586617 - DNA, 563 bp, Homo sapiens
  misc_feature 538, 539, 540, 541, 542, 543, 544, 545, 546, 547, 548, 549,550, 551, 552, 553, 554, 555, 556, 557, 558, 559, 560, 561,562, 563: n = A,T,C or G
gataaatcatatgattatgcttatcaacactgctaccaatgtgttgatcccttcacattctcaaaaattactaagcaccccaaagaacttttgtgtatgtagatatgttggtatttaccataggagaacttaaaactgagaaatttaaaaagtatgtgttaatgaattcatttaaaaataataatagaacgggttcagtggctcacacctgtaatcccagaactttcagagcctaaggcgagtggatcacttgatgtcacaagtttgagaccagcctgggcagcatggtgaagccctgtctctaccaaaaaattcaaaaaaatttagctgcatataatcccagctgctcagctacttgggagggtgaggtgggcggatcacttgagccagggaggtggaggttgcagtgagctgagatggcaccactgcactccagcctgggcaatagagccagaccttgtctcaaaataaatacayaaataacaatagtaaagccattacatattaacataaataatacattttaatgaaaacaaannnnnnnnnnnnnnnnnnnnnnnnnn

SEQ ID NO: 586618 - DNA, 417 bp, Homo sapiens
cttagtaggttatatgtgtctaggaatttatccatttttttctaggttattcaatatgttggataataattgtttatagcgttcttttataatcctttgcatttctgtagtgtattttaatgtctcctctttcatttctgattttatttgtttgaattttctttcctttattcttggtctagctcaacatttgttgattttgttattatttcaaaacaccaacctttagttgagctgttctattgttagatagaatagaatagaaygttctatttcaacaataaaatgttgagcagttctattgtttttctactttgtatttcacttatttctgctctgattattattttcctccttttagtaactctgtgcttagtttcttcttattttgtgtgtcttaaggtacaatgttatagg

SEQ ID NO: 586619 - DNA, 525 bp, Homo sapiens
caagaatatctcaaggactaatgagatcactggatcatttaaaccattatttcctgttttgaaatgtaaaaatactttagtaatctaatttttaaataagataaaccaaagtaagtttaaaataactttttttcattcaaaatatttgtttgaaatgctcagtttttcctggaggaaaaaaatttttttgactttgctgccacctcatggctaaggcagtaattagaaatagttcttcaggctcttacagaactacagttgcagaagaaaaaataayccatggagaagtcatagtaaatatgagctttgccttgctcatgtagtaattttatttcatttgttctttagtccaagttcgatagtcccatctttgacttacaagttcatttcagtcattgtatgtcatagttttcttgttgcctttctcatctttcttggcagcttttggactagataattctacaaagtcattgttcttagtcaataagcaataataatctcactgcagaaatcgtgtttgtatca

SEQ ID NO: 586620 - DNA, 566 bp, Homo sapiens
ctctttttcaatgtttaaaccgtcagtccctccccctaacccaccacgtttrcatctgcatatttggaaaggaaagtaaacagagaaacagcttagttcaatatttaacactgcaaagtaacacctataatgtctgattccgccaaaaaaaatttaaaaaaaggaaaagaaacaaggaaacaagcttctgagggatgagctatagattatgatcaaaattccactctggaaaaatatttcaagaactgttccttccgaagggggcttcttttttgtcaccactttcttctctaaggtggaagattcatttatttccccaaaaatcttagtctgattaatacaaaaacatttttctaagctgaaacaataatcttaagcattttgtgtatgcttgtgtgtatgtcataaaggcatcttaaaataaactagatctggataataattatatgtgaatatttgctcagaattggctttataaatgagaaatggctttaaaaattggctcacatagaataaattttaaatttgcccactctgttgtgtacattcccaactgtcatgcttat

SEQ ID NO: 586621 - DNA, 508 bp, Homo sapiens
agggagaccctgtctaaaaaaaaaaaaaaaagaaagaaagagaaaagaaaaagaaactgccaatgtgcttgtagcattttgtattcttaacatcagtatatgaaatcatattccaattattctgcatcctcactgtcacaaactattgtgctggtgtgtagcggtatttttatttatcaatctaatttattatctctctcctctctagagtgaagggatcattagggtagggaatttagcctgttttcattactgctttcacagtgcccagatcaattcctggcacaragtaggtgttcaataaatatttgttaaacaaatgaatgaattttgaatgattatctcctctactcagagctaaaaatcgaactgagactcagaaagctttattgcttgcccaagtgaaagagctaaggtaaaccccaagacatctaatgctttgtcgaacactcaacactgcactgcgttgtgggtcactggtttgtacaaattcattttatgattaata

SEQ ID NO: 586622 - DNA, 601 bp, Homo sapiens
tatgggtctgcttctatatatactaaaacatataatggaaataaataacatagaaaaatttgcctaaagaataaaggtatcagcctcttagcagactctgctggaatctgtagccacatcaaaaaaataccattatgagagtgaaatcagaacccacaatagtgagaagatatttaaaacacataaaactaacaaaggacttatttccataacatgtaaagaacttctacaaatcaataaaagctcattaaaaatatgactttggtaggcacttcctagaagagaatatccaaatggccaaagsgatatgcaaagttactcaatttcattggtaatcaagaaatataaattaaaacaataagatataattacataccttaagagaatggctaatgttaaaagaatggaattaccaagtgttagtaaggatgcaaaaaaacataagttctcacactttattggtgggaatgtaaatatgtaccccaattttggaaatctatttggcattatctaccaaaactgaaaatatgcatgtcctatgactcagcaattgataatttcattcatcggtatgagaaatgcatatgtataccaaaagaca

SEQ ID NO: 586623 - DNA, 601 bp, Homo sapiens
tatgggtctgcttctatatatactaaaacatataatggaaataaataacatagaaaaatttgcctaaagaataaaggtatcagcctcttagcagactctgctggaatctgtagccacatcaaaaaaataccattatgagagtgaaatcagaacccacaatagtgagaagatatttaaaacacataaaactaacaaaggacttatttccataacatgtaaagaacttctacaaatcaataaaagctcattaaaaatatgactttggtaggcacttcctagaagagaatatccaaatggccaaagcsatatgcaaagttactcaatttcattggtaatcaagaaatataaattaaaacaataagatataattacataccttaagagaatggctaatgttaaaagaatggaattaccaagtgttagtaaggatgcaaaaaaacataagttctcacactttattggtgggaatgtaaatatgtaccccaattttggaaatctatttggcattatctaccaaaactgaaaatatgcatgtcctatgactcagcaattgataatttcattcatcggtatgagaaatgcatatgtataccaaaagaca

SEQ ID NO: 586624 - DNA, 604 bp, Homo sapiens
catcatctttcatattttcactgacttcaagcttatgcttcaaacttaccaatttaaagcagctcatccatgttcccagttgaaaatatagtttcaaattatacaaagagaatagaagatgacattaaaaataacaaatgtgggctggatgcggtggctcattcctgtaatcccagcactttgggaggctggtgcgggtggatcacgaggtcaggagttcgagaccagcttggccaacatggtgaaaccccgtctctactaaaaatacaaaaaattagctggctgtggtggcaggtgcctgtaatcccagctactcaggaggctgaggcaggagaatcgcttgaaccagggaggcagaggttgcagtgagccaagactgtgctacagcactgcagcctggccaacagagtgagactctgtctcaaaaaaaaaaagtgaaattttagcagctttgttactggggagttgattgcaataggaaggagaattaattaawcatcatcacattcatctaaacaaattaatatatttattatatttattaagtacagtagccaaagtaggttgaacttatttgtgggcattaaaagttttttgtatgagc

SEQ ID NO: 586625 - DNA, 521 bp, Homo sapiens
tgaacaagggataatgtgaaaacatgaataagccaataacaagttctgaaattgaatcggtaattttaaaaaaacctaccaaccaaaaaaagccctgaaccaggcggattcacagctgaattctactagagttacaaagaagaactggtaccaatcctactaaaactcttccaaaaaattgaggatgaggggaggcttctcactaacatattatacaaagtcatcatcatccttataccaaaatctggcagagacacaaaaacagaaaacttcaggctaaactccctgatgaacatagacacaaaatcctcaacaaaatactagcaaactgaattcagcagcacatcaaaatctaattcactatgagaaaagtgggcttcattcctggaatgcaaggttggttcgacatacacaattcactagatatgattcaycgcataaacagaatcaaaatcaaaaccatatggttatctcgatagatacagaaaaggccttcaagagaatcccaaatcccttcatga

SEQ ID NO: 586626 - DNA, 490 bp, Homo sapiens
gcagtctaatttagacaagaaaacaaagttgtaaatgctgtataatgaaagctgtgatacaggtgtgcacaagaaactgtgggcacacccagggttgtcatttacccactttttcacaaattttaatgtgactaccaatcacctggaatattgtttaaaatgtagacttagtaggcctcaggcatagtcagaccatgaggatgtcgtgtaaaatgttttgggtttgagaaccaaactttgagtagcagttatctaaaccacgaggtgaaagagaggatcagggtagcttccctggaggaggcgattcttgagctagctcttgtgagttgggttggagttagctaggcrgaaaagcagaggggacagtattctaggcagagatagcaggacgtgcttaaatatatcattgacacaggtttagtgtttatttatttatttatttatttgtctgagacagagtctcactctgtcccccagggtggagtgcagt

SEQ ID NO: 586627 - DNA, 528 bp, Homo sapiens
gagtcaaagaactcctgtatcttttgaccagaaggcaaacatattttagtaaaaacaaaataatacaaaaagacagaaatgaattttgaaagagtataaatgaaataattgatggaggttttaaaaacacaaacaaagaaaagaggcagttgaaaagttattagtttgggaaaaaataaaattcattccatatgatttgtatttgtgaagtgaaaaaacttaatatcttaatcatattgtagagatgaaaaactatatgtgtgtttttaatcatgtatatgaaaataatatattagaaaaataacatatctactttaatctgcagaacagccccatgaagtagatgtcattctcattttccaatcacaaaatagaaactctaaaattgtcatggcytagatttcacccaagggcccctgactttaagcctagtgttttttctattacactacaactgctgtctgaagaaaaagaaatgtcttgaagtgaatgtcacccaaattttgatggcacatttatcaccttaaa

SEQ ID NO: 586628 - DNA, 669 bp, Homo sapiens
ctgtggcattttgttataaaagggaatgaataagagtggcaggctgggtagtggtatcaagagagttcttttatttaagattggtaaatttaatagtattgtatgctaataaaagtgataaaatacagaaaaaaagatttgatgatatagaagagaaagaggagaattggtagagttgtgctcttgagtagatgtgaagagataggttctttctagtgcacaagtagaaggctgactttggctatttcatcaatagtaatgaacaggaaggcagagtatgtggatgcatgtagcaatctatagaagttcttttttgattgtttcaaatttcttagggaartaaaaggcacatcagcatatgagagtgagggtcagaaaggatgtgctgaaggcttgaggagagaagaataagtgtgaaatagtcatcaagtgagaatgattggactaggaaagtgtagtatgatgaacctgcaacacaaagggctcacttgaggtatgtggtcatgaatttatgtgagaccagttagtgtggttacatgttttccttcagcttcagttcatcagtgcggtacagagtaaagtgttggattctcacagggttgtggttttgccaagcaagtacacgacatgagagaagagcaaataagttgagggtacacaaaagggagt

SEQ ID NO: 586629 - DNA, 556 bp, Homo sapiens
ctgttggacagtgctgatacagaacatcaacagagaggttaaaacatttgttcaaggtcatacatatagataattgcagaactcggatgctttgattcttaatttgatgttctttctatgactgcctctcaatacccagaatccaataattaattcgattttaaagggtgtcataaaatcataaacaatattggcctcccatcactcaacttgcctcaaaaacattattgttcacaaaggtgttttcaaaaacacttaacttcaatgtttcaatagctaatgggtattacagtgaattttaaagcctcattctgaatgtattaatattttgctgcatttctccaaataacattaattaaagagtttctacatactcaggaagcattatattgccttttctaatatcattagtacaaagatgtattctacaagtacagaaatgagacaatctataaaccctacaaytaattattaggcaactttttattttaatagtagatcaactgaaatatgtggtagcagttacataatcacaaaatggtaagttttgagaaaa

SEQ ID NO: 586630 - DNA, 614 bp, Homo sapiens
tttaataattatgaaatgatttcaaaatgaaaatataaaaatgaggtatccatatagtttctttaaattgacagtgaaattgagataccctttttaagtactcatggttgagtggtacaactgctcatttgcccacctctggcaaagcaggaaaatttctaattccagggctgggtcaattagaccatctgccgcttccaatagggtagcagagtcaggcaaggctgaactccacagggcaaggsgcaaaggcaagactaagtacacaacaatttgggagggttgtgggaggcagattcagtaggcatagaggtggcagtatgaggagtgagcttaacaaatatttggtcatcactcttaatactcatgcctgcaatttaaaaaatgaccctaaaaaatagcaatgctttatatttctatctttctggattgtatgatgggtaaaatatacattagatgttcataaacaaaatttaaaaaatctttatatcatacattcacaaaaaagcaatacaaatataagaattataattttaaaatcttcccaatatttcctgtgattagcagtaataaatatggagttttctatataatatgattaagtcatgtctttg

SEQ ID NO: 586631 - DNA, 614 bp, Homo sapiens
tttaataattatgaaatgatttcaaaatgaaaatataaaaatgaggtatccatatagtttctttaaattgacagtgaaattgagataccctttttaagtactcatggttgagtggtacaactgctcatttgcccacctctggcaaagcaggaaaatttctaattccagggctgggtcaattagaccatctgccgcttccaatagggtagcagagtcaggcaaggctgaactccacagggcaaggcscaaaggcaagactaagtacacaacaatttgggagggttgtgggaggcagattcagtaggcatagaggtggcagtatgaggagtgagcttaacaaatatttggtcatcactcttaatactcatgcctgcaatttaaaaaatgaccctaaaaaatagcaatgctttatatttctatctttctggattgtatgatgggtaaaatatacattagatgttcataaacaaaatttaaaaaatctttatatcatacattcacaaaaaagcaatacaaatataagaattataattttaaaatcttcccaatatttcctgtgattagcagtaataaatatggagttttctatataatatgattaagtcatgtctttg

SEQ ID NO: 586632 - DNA, 480 bp, Homo sapiens
ctgactgtgttgagggatacatctaattggagacaactgaagtgaaatcattaacttgaatgtattcttagaaaatgagtcagtgacaatgatgtgattttgattagcaaattcctgacattgtatatgtgccattgcaagctatggcaaagtaacaattgagtggaaaagaggagtttctasccgggtgtggtggcgcgtgcctgtggttccagccacttgggaggctgaggtgggaggattgcttgagcctaggaggcagagattgcagtgagctgaggtcgtgtcactgcactccagcctgggtgacagagtgagaccacatctcaaaaaaaaaaaaaaaaaaaaaaaaaagacaatgcaaaagagaaggagtttgaatacttggtgaaaatacggcaggttaacaattctctttatctgagtggctgaaatagaagtaactcagagtaatattttaataaagcccttagcactggc

SEQ ID NO: 586633 - DNA, 611 bp, Homo sapiens
agtttatagaattttcaaggtggaatttaaatttcaggtattatcaatataattcatattatcaattatggattttaaaaaaagatgttttctcattttaaattttgttcagtatatttatattgtatcattgttctttccattgagagagaaaacttaactgtttattcttttagtaacagaaaggattatgagatttattatgttttcctcacagagctgatagtatatgggaaatcttctattccctccttgggaattttggcattacaataaaaatgtaaagcattactaatttaaagcatcttaaatgtgtacatttctcctaactagataaatacctacaaaaataccacaataaatcccatgaaatttaaccttacttattatagtaaataaatacttttgctatctataaactaaaagatcagattccacaaaagcaaaatatttgctrtataatccagtgtacattaattatgaatttacaaatttatatttggagtacatttgtagcttaaaaattttggatgtataatatttgttagatatttttataggcagttttgctttgttaaatcattcttcctttcctttaaaataaaataatg

SEQ ID NO: 586634 - DNA, 542 bp, Homo sapiens
atgtctaacttcagttagatgagttgattacttttcatacaccattgactaaaggaaacctaattttacacgtaattcaaggggatctgtgagtaagaacatttttaaattaaagcaacacatgtgcatggaaaatcattcaaacagtttgatggcaaaaaaatcagtggaaaccagaaactttttttttccttccacagaccttggtcctgtttttcagagttaggcaggttttatcatactcttttttttactatatgctattctcttgaactgtaaataatattatataatcacctaatttgttttatcagttttaagtaatatcccttgactttttatgaacgatagagaatatagctcatttaccctactttcttttcttttttcttttttcttttttttttttttttttttgagacggagtctcactccctcacccaggctggagtgcagtggcgctatctcggctcactgcaagctccrcctcccgggttcacgccattctcctccgccagcctcctgaatagctgggactacag

SEQ ID NO: 586635 - DNA, 502 bp, Homo sapiens
aacttgatgtctaactactgtggatatattttgtcakttattaacattcccctttcaggttaatatcaagtcaacaaaaatttggagttctcttgaccctttccccaatgtgtaaattagtaatataatgtcaatattcagacaggcaaataaactaagctccctttgatgaaaacgacatgcagtaacgcttccctactgagaatcatcttagtttgtgaaatcataatctggaatggctatatctgcaaaatacattaaaagaaagaaaatatgaaaaacataatctacaatacttttatgtatatctaatcattttatatttcttttttattatactacttgaaatacatacataaaggataaagagtttcaacaaatctcaaaaaggaaacctaattatgtataatattctgactgattttgtttgcttaccaaattgaaattgaaaagaaaaaatacagcactctataaaaaaataaaatgatttcaaaatataatt

SEQ ID NO: 586636 - DNA, 492 bp, Homo sapiens
ttttaaaataggagaaaaacwaataattaaagtacatatttctggaagtcttttttaggtgacttatactaccaggaatggatttaccactaaatattggttttgcctaattcagcattgctatgtaatttgatggaagtataactccatagacaaagagatttggtcctaacatagcttgtattttatatgtatatacactatttctatttaaatttctgtgtagtcatgttttacccttttaaaatgaagattagttttattatgtattttcttttgtctataaacattcagtgaattcacactgaaaactgattatgaacagatagtctgctaggcactaaggaaacacatatgaaaaactaagtcctcctctgccctcaatatgctcacaagactacagttactgaagcctgacctcaaaacctagctaacaaagtccttgaatcaggtgatagttcagaataccattcatgctctctcccaagagta

SEQ ID NO: 586637 - DNA, 396 bp, Homo sapiens
gacccaatagaattaaatttaaaataaaaaacaaaaccaaaactacaatgaaatccccaaatatttagatataataaacttctaatgatgccttgtagcaaatagtaaatcaaaagataaattagaaagtattttggtctggataaaaataaaaacactacaacttcaggattcctttggagaaatacgaagtttttaatgtttgtattagaaaaaggagaaatgtctaaaattaatgacacaaatgtctacctgaaaaagtgaaaagaaaaccaaattaaacaagaagtagaaagtaaaatatagagaaaaactaaaattttataaagacataacagaaatacaaaaggaaaagatgaaatttaaaackgattctttgataaaaggaataaactg

SEQ ID NO: 586638 - DNA, 543 bp, Homo sapiens
  misc_feature 249: n = A,T,C or G
cagatttatacatatagttaaaatctttttttttaaatagcaagtcaattcatcagggaaagtatcagctttgaagaaatggaagagttttcaaagcaagaaatgtaaaacagttgggtatttataagcaatagaaaaacaaatttgattcatagcttgcaaaatatataaacattaataaaaagccaacctgaatgtattgagatcttagatataaacataagataaatctttgtgaccttagttganacaaataartgctgtatatgacattaaacatttaatatgtaaaataaaatattaacttgaacttcttcaaaagtgaaaatttttactcttttttaaaaattattatactttaagttcagaatgtgcagaatgtgtaggtttgttacataggtatatacatgccatggtggtttgctgcacccttcaacccatcatctattttaggtatttctcctaatgctatccctccccaagccccccaccccctgacaggccccagtgtgtgatgttcccttccctgtgtccatgtgttct

SEQ ID NO: 586639 - DNA, 543 bp, Homo sapiens
  misc_feature 249: n = A,T,C or G
cagatttatacatatagttaaaatctttttttttaaatagcaagtcaattcatcagggaaagtatcagctttgaagaaatggaagagttttcaaagcaagaaatgtaaaacagttgggtatttataagcaatagaaaaacaaatttgattcatagcttgcaaaatatataaacattaataaaaagccaacctgaatgtattgagatcttagatataaacataagataaatctttgtgaccttagttganacaaataagtgctgtatatgacattaaacatttaatwtgtaaaataaaatattaacttgaacttcttcaaaagtgaaaatttttactcttttttaaaaattattatactttaagttcagaatgtgcagaatgtgtaggtttgttacataggtatatacatgccatggtggtttgctgcacccttcaacccatcatctattttaggtatttctcctaatgctatccctccccaagccccccaccccctgacaggccccagtgtgtgatgttcccttccctgtgtccatgtgttct

SEQ ID NO: 586640 - DNA, 573 bp, Homo sapiens
tatatctgtagatcaaacaaggtttagatcacttatgatgcctaactggttttgtctgctcagaaattcttcaggcctggactccattttaatttactttaatgattgttactttaaatttggattaaacagtggattcatatgtactgagtgaaaaaaaaatggaaatagatgttataaaatttatttgaaatcattcagccaggatgttttaaacagcataaattagcagaattaccaaaaacacattttgaaaaaaccttgaagcaattttaatgtattgcaaaatgtgaaggagactagtaggacaaaaacttaaaggttgagtttgagataygatgcagggttttttgctccttagcccagctaggcctaagttctgaagaagtaggcacatggacgctcaaagagtaagtgtagtagaatttatttagtgaaaggaaagctctcagcaaagagaggggtcctgacatcaagttcttggttgcccccttaacagttgaatacaagggcattttttttcttgagacagagcctcactctgttgccaaggctggagtgcaatggcgtgat

SEQ ID NO: 586641 - DNA, 573 bp, Homo sapiens
tatatctgtagatcaaacaaggtttagatcacttatgatgcctaactggttttgtctgctcagaaattcttcaggcctggactccattttaatttactttaatgattgttactttaaatttggattaaacagtggattcatatgtactgagtgaaaaaaaaatggaaatagatgttataaaatttatttgaaatcattcagccaggatgttttaaacagcataaattagcagaattaccaaaaacacattttgaaaaaaccttgaagcaattttaatgtattgcaaaatgtgaaggagactagtaggacaaaaacttaaaggttgagtttgagatacgatgcagggttttttgctccttagcccagctaggcctaagttctgaagaagtaggcacatggacrctcaaagagtaagtgtagtagaatttatttagtgaaaggaaagctctcagcaaagagaggggtcctgacatcaagttcttggttgcccccttaacagttgaatacaagggcattttttttcttgagacagagcctcactctgttgccaaggctggagtgcaatggcgtgat

SEQ ID NO: 586642 - DNA, 578 bp, Homo sapiens
gatcaaacaaggtttagatcacttatgatgcctaactggttttgtctgctcagaaattcttcaggcctggactccattttaatttactttaatgattgttactttaaatttggattaaacagtggattcatatgtactgagtgaaaaaaaaatggaaatagatgttataaaatttatttgaaatcattcagccaggatgttttaaacagcataaattagcagaattaccaaaaacacattttgaaaaaaccttgaagcaattttaatgtattgcaaaatgtgaaggagactagtaggacaaaaacttaaaggttgagtttgagatacgatgcagggttttttgctccttagcccagctaggcctaagttctgaagaagtaggcacatggacgctcaaagrgtaagtgtagtagaatttatttagtgaaaggaaagctctcagcaaagagaggggtcctgacatcaagttcttggttgcccccttaacagttgaatacaagggcattttttttcttgagacagagcctcactctgttgccaaggctggagtgcaatggcgtgatcttggctcactatac

SEQ ID NO: 586643 - DNA, 578 bp, Homo sapiens
gatcaaacaaggtttagatcacttatgatgcctaactggttttgtctgctcagaaattcttcaggcctggactccattttaatttactttaatgattgttactttaaatttggattaaacagtggattcatatgtactgagtgaaaaaaaaatggaaatagatgttataaaatttatttgaaatcattcagccaggatgttttaaacagcataaattagcagaattaccaaaaacacattttgaaaaaaccttgaagcaattttaatgtattgcaaaatgtgaaggagactagtaggacaaaaacttaaaggttgagtttgagatacgatgcagggttttttgctccttagcccagctaggcctaagttctgaagaagtaggcacatggacgctcaaagagtaagtgtagtagaatttatttagtgaaaggaaagctctcagcaaagagaggggtcctgacatsaagttcttggttgcccccttaacagttgaatacaagggcattttttttcttgagacagagcctcactctgttgccaaggctggagtgcaatggcgtgatcttggctcactatac

SEQ ID NO: 586644 - DNA, 573 bp, Homo sapiens
tatatctgtagatcaaacaaggtttagatcacttatgatgcctaactggttttgtctgctcagaaattcttcaggcctggactccattttaatttactttaatgattgttactttaaatttggattaaacagtggattcatatgtactgagtgaaaaaaaaatggaaatagatgttataaaatttatttgaaatcattcagccaggatgttttaaacagcataaattagcagaattaccaaaaacacattttgaaaaaaccttgaagcaattttaatgtattgcaaaatgtgaaggagactagtaggacaaaaacttaaaggttgagtttgagatacgatgcagggttttttgctccttagcccagctaggcctaagttctgaagaagtaggcacatggacgctcaaagagtaagtgtagtagaatttatttagtgaaaggaaagctctcagcaaagagaggggtcctgacatcaagttcttggttgcccccttaacrgttgaatacaagggcattttttttcttgagacagagcctcactctgttgccaaggctggagtgcaatggcgtgat

SEQ ID NO: 586645 - DNA, 342 bp, Homo sapiens
tctagtttgtttagggtttttatcataaagcaatgctggattttactgaatgtttttatgcatctattgagatgatcatacgtatttggtttttaattctgtttataaaatacatcacatttattaccttgcgtatgttgagtcatccttgcctccctgggatgagactcacttgattatagtgaattgtctttttgatatgcttttggatttgatttgccagtatctgttaagaatttttgcgtatgtctttatcagagatgttcatttgyagttttctttttttatgatatgcctttttctggttttggtatcagggtgatactggcttcatagaatgag

SEQ ID NO: 586646 - DNA, 583 bp, Homo sapiens
atgtgcacccaatacaggagcacccagattcataaagcaagttcttagagacttacaaagagacacggagtctcacacaataacagtgggagatttcaacactccactaacagttattagacagatcaccaaggcagaaaattaaaaaacatattcaggacctgaactcaacattagatcaaatgtatctgattgacttctacagaactctcyactcaaaaacaacagaatatacattcttctcatcaccacatggcacatactctaaaatcagccacataattggacataaaacaacgcttagcaaatgtaaaagaaccgaattcttaccaaacacactcttggacaacagtgcagtaaaaataaaagttgagactaagaaaatcactcaaaaccatacaattacatggaaattaaacaacatgttcctgaatgacttttgggtaaataatgaaattaaggcagaaatcaagaagttctttgaaaataatgtgaacaaagatacaacataccagaatctctgggacacaggtaaggcaatgataagagggaaattcatagcactacctgcccacatcaaaaa

SEQ ID NO: 586647 - DNA, 526 bp, Homo sapiens
tatttattcctttaccactgacaactctctctcggctcttctattcaatcatgttactgatagacgctttgctttttgtttttgttgtttaacctgattgttatagcttattttatgaatttctgttcttcttttaattttacaacaattttactatttctccttacatgtttataagtcatatggagactccttctcatctaccctgaccccagaatattaaaacttttcagagtttcaggattaattccattatatggacatgattccttgagataggaaaaactgattggattgtgacattagacttatcagaatctaagatcttacaaaatataaagctttactagtaatttcacgaactcaggtaatcattaggcataggcaaatcagagaattatttagatctcttaatctgattctttagatccttggttctgtcattagatactcccttgcccaggcagatagatgagacttctagagaggtatgcmgacaatttatttacatggagatacctgtctc

SEQ ID NO: 586648 - DNA, 292 bp, Homo sapiens
cacacaacacctcatcccacaccaacatgagctcacaatctaaaattacaacacacacacacaaaaacacaataggcaagaacaagagaaatgacacccagaagaatgaataccatgtgcaaaataargatgtttaaaatgttcaaataaataaaagataaaattagaaaattgaggaataacactcttaaaagataccaggaagatttgaatttgaaaaagaaccaaataaaatatagtgtgtgtgtgtgtgtgtgtgtgtgtgtgtgtgtgtgtgtgtgatattagactg

SEQ ID NO: 586649 - DNA, 521 bp, Homo sapiens
aattatatatagatttaccttttaacctaatatctttacttctaagaattataccaaaaatttgctagcaaaaattataaaatttaatcattatgaataggcgcaataattgtgactttttataatagcaaaaaactggaagtgatctaaatgtccatcggtaggagactggttgaataaactgtagtacacacacgtaacagagctgtaaggatgaatgggaaaaatctatctaatgttaccgagtgatctccagtaagtaaaaagaaggaaaatggagaacaatttttattgtatggtgtttttggtgttacatgtggaaaggtggaaatattatatgcatgtgctaaggcattttgctcttttttaaaaaagaaacaatggaagcatcaactaaaaactaattttaaaaaatggttaccygtagaagaaagggaagagggataaatttcaggatggaagtaagactttgtaaatgtagctttttatatgattgttaaatcaaaattatataaggtttg

SEQ ID NO: 586650 - DNA, 595 bp, Homo sapiens
gtgaggctaataatatgcctrctcttaaggttgtggggaaaattcagtgtgataatattaacatatcaaatgcttagttcagtggctggtacgttataggcaagtaaatataggtggtgattgttgttattaggaaggataccacactcaaagctagcaagctggatcaacaaaaacaaattttgccagggcgggaggcagaaaatagaaaccaagactaaaaaataagttttctatattctatgtgcctattattttttatatacaacattaaagaacattaatgggcacctaattgctacctaattgtacttgttaatgctggaattggaccagaaagaccagaaagatttattgattcatttggtatttattaatttaatactctctgctagacagaacctgagactgtgcagttgtaccaccattaatctataacctagatactcatcatacactctttgtatatgtcagtagatgatagtgactatttctataatttaaagtgacaaaatagtctttagaaagtttgtgttagtacactcaaatcttttttagagattcacaaaatgatatatttttcttgtttctcagg

SEQ ID NO: 586651 - DNA, 595 bp, Homo sapiens
gtgaggctaataatatgcctgctcttaaggttgtggggaaaattcagtgtgataatattaacataycaaatgcttagttcagtggctggtacgttataggcaagtaaatataggtggtgattgttgttattaggaaggataccacactcaaagctagcaagctggatcaacaaaaacaaattttgccagggcgggaggcagaaaatagaaaccaagactaaaaaataagttttctatattctatgtgcctattattttttatatacaacattaaagaacattaatgggcacctaattgctacctaattgtacttgttaatgctggaattggaccagaaagaccagaaagatttattgattcatttggtatttattaatttaatactctctgctagacagaacctgagactgtgcagttgtaccaccattaatctataacctagatactcatcatacactctttgtatatgtcagtagatgatagtgactatttctataatttaaagtgacaaaatagtctttagaaagtttgtgttagtacactcaaatcttttttagagattcacaaaatgatatatttttcttgtttctcagg

SEQ ID NO: 586652 - DNA, 595 bp, Homo sapiens
gtgaggctaataatatgcctgctcttaaggttgtggggaaaattcagtgtgataatattaacatatcaaatgcttagttcagtggctggtacgttataggcaagtaaatataggtggtgattgttgttattaggaaggataccacactcaaagctagcaagctggatcaacaaaaacaaattttgccagggcgggaggcagaaaatagaaaccaagactaaaaaataagttttctatattctatgtgcctattattttttatatacaacattaaagaacattaatgggcacctaattgctacctaattgtacttgttaatgctggaattggaccagaaagaccagaaagatttattgattcatttggtatttattaatttaatactctmtgctagacagaacctgagactgtgcagttgtaccaccattaatctataacctagatactcatcatacactctttgtatatgtcagtagatgatagtgactatttctataatttaaagtgacaaaatagtctttagaaagtttgtgttagtacactcaaatcttttttagagattcacaaaatgatatatttttcttgtttctcagg

SEQ ID NO: 586653 - DNA, 595 bp, Homo sapiens
gtgaggctaataatatgcctgctcttaaggttgtggggaaaattcagtgtgataatattaacatatcaaatgcttagttcagtggctggtacgttataggcaagtaaatataggtggtgattgttgttattaggaaggataccacactcaaagctagcaagctggatcaacaaaaacaaattttgccagggcgggaggcagaaaatagaaaccaagactaaaaaataagttttctatattctatgtgcctattattttttatatacaacattaaagaacattaatgggcacctaattgctacctaattgtacttgttaatgctggaattggaccagaaagaccagaaagatttattgattcatttggtatttattaatttaatactctctgcyagacagaacctgagactgtgcagttgtaccaccattaatctataacctagatactcatcatacactctttgtatatgtcagtagatgatagtgactatttctataatttaaagtgacaaaatagtctttagaaagtttgtgttagtacactcaaatcttttttagagattcacaaaatgatatatttttcttgtttctcagg

SEQ ID NO: 586654 - DNA, 572 bp, Homo sapiens
ttaacaattataaaataattttaaaatawtttcaaacaaataaaccagaaacaaaagaaatgcaattgtgtcaaggttagaaaaaagatactttatttgttctaattgcttaaacaggctacttacctgtttaattttcacaggaatcaatgacttgacctcttcgtgaattctagaatgtagaaaatttatctgacctcaaaagcatggggaaaatcaattttgaaattttttcttagatcaggtaaatgtattacattgaaactgaagacgcatctatctgtctgtctttttccgacttgacccaactaaaaaacaagtaaattgaattaagagctgggcagtgaaagaggggccgctgtggcatcaagaattatttgaaagcacattctctttctttggggatattggggaagcggtagcaattctcccttagcaacatttcctggggtccttcattttttacatgaaaaaattattcatcctttaaaagcatttaatctggaaccacgtttgctctgtattttcatatgcatctaatcgacaagaacttttattaccgagagcagtat

SEQ ID NO: 586655 - DNA, 378 bp, Homo sapiens
aaagtgagtagtttctttccgcagtatggccgtcccaacaagtgtctgagtctggctaactctagggtttttatatgcacagaatggagaaagtgtatgctaactggtacacacgcagccatggsgaggcctgcagtgcccaggctgtatgtgctgaagggtgcgcccacaggcctgtgcaagctgtcctcagcccctccgccatccctcctgcactcattggcacccaaagtccagacgggggtgagtcagtggggatctggtgtgtcagcacaccccaagagtgtgcatacctgaccaggttgcgacagtgtccagacttggccacaactttgctccgcactggagcaggcactggaagcagggagaggccagtga

SEQ ID NO: 586656 - DNA, 378 bp, Homo sapiens
aaagtgagtagtttctttccgcagtatggccgtcccaacaagtgtctgagtctggctaactctagggtttttatatgcacagaatggagaaagtgtatgctaactggtacacacgcagccatggcsaggcctgcagtgcccaggctgtatgtgctgaagggtgcgcccacaggcctgtgcaagctgtcctcagcccctccgccatccctcctgcactcattggcacccaaagtccagacgggggtgagtcagtggggatctggtgtgtcagcacaccccaagagtgtgcatacctgaccaggttgcgacagtgtccagacttggccacaactttgctccgcactggagcaggcactggaagcagggagaggccagtga

SEQ ID NO: 586657 - DNA, 516 bp, Homo sapiens
agttaggtttagggaactttcagagtaattgcaaaaacatcaggctggagaatgctaggtagagtcaagtaattaaaattttagaaacatgctaattgtccaacttgttaagtaaaatcaatacatactttgctcaccttcgttacacatacttttaagcctcagctattgggatacttttcatttacacattcaaacaaaaagtagggaaatctatcrtaatgaatttcaatatattttcttttcttaacaatttctgcaatttgtttacttatctaatgaaccaaaaattgaggagaagagagggaagatttaatatattttataggatcttgacctcctttttatgtatatgcttgctcttcttagttctaaaacatatgtgatgctttctttgaaacataataaaactatgacaaacaatataacctgtattattttttagtttatatgcatatgtataaactaaatttttaggtatgtgcttgttcttcgttctaaaacatatgtgatact

SEQ ID NO: 586658 - DNA, 516 bp, Homo sapiens
agttaggtttagggaactttcagagtaattgcaaaaacatcaggctggagaatgctaggtagagtcaagtaattaaaattttagaaacatgctaattgtccaacttgttaagtaaaatcaatacatactttgctcaccttcgttacacatacttttaagcctcagctattgggatacttttcatttacacattcaaacaaaaagtagggaaatctatcataatgaatttcaatatattttcttttcttaacaatttctgcaatttgtttacttatctaatgaaccaaaaattgaggagaagagagggaagatttaatatattttataggatcttgacctcctttttatgtatatgcttgctcttcttagytctaaaacatatgtgatgctttctttgaaacataataaaactatgacaaacaatataacctgtattattttttagtttatatgcatatgtataaactaaatttttaggtatgtgcttgttcttcgttctaaaacatatgtgatact

SEQ ID NO: 586659 - DNA, 570 bp, Homo sapiens
gacaatgtgaaatggccaatcttccaccattttcttttcattcttctttagatatttttcctgggcccagactacctttcctcaccatctgtaataaagtataggtcagaggggctgcgattgaagaggaggtggggctttcagtgttcaaaagagattaaaggaggtacgtacatatggaggcatgagaaagaaagcccagtaggacctttgccacacagggattgaagctgtgggttcctcaggggtatatataaggggtgtcctcctaatgtttacattatcctgaaatgagacctgagtttacattattcatggctctgtgtttrtctgtgagtgtatgagcactggtgaggatagaaacgaaccacctccctcatcactacttattacaaatgtcttcatggttggtatcagataagattatcctaaatcccattttgttcatgatagttctgtttatatgtgttgtcccagtgtgtttagtagcatgccattcttctcaaaagtgtcacaataggctgataaattataagatcaccttagtattagggaataatcagaaagcct

SEQ ID NO: 586660 - DNA, 474 bp, Homo sapiens
taagctgattatccacaaatacgtaagtggtaattctctgtttaattctctttcttttccttttgggtggagcctttgaggaatccccttggcctgcatctcatcatttatgaaatttctaagtgtgtgtcraatgtaaatatgagccaagtcctgtagattcctgacagtgattccttacagatttgtagtggtgagggttagatttaattttatataaggtttgaataattgttaagcttatgtaacctgatctgaatttgcacttcctctatgaaaacttcacttatctaataaggaaatcaaatgctttgtagacctatttaccttacttttgttgcaatcactgttgctgggttgctgtatatatattccgggcaatatatgagtgcaataacaatacaaaatattgagtaatttagctttttaaaatcccacaaattttatgaaattttacagccctgctacttttgc

SEQ ID NO: 586661 - DNA, 632 bp, Homo sapiens
ggaataagctgattatccacaaatacgtaagtggtaattctctgtttaattctctttcttttccttttgggtggagcctttgaggaatccccttggcctgcatctcatcatttatgaaatttctaagtgtgtgtcgaatgtaaataygagccaagtcctgtagattcctgacagtgattccttacagatttgtagtggtgagggttagatttaattttatataaggtttgaataattgttaagcttatgtaacctgatctgaatttgcacttcctctatgaaaacttcacttatctaataaggaaatcaaatgctttgtagacctatttaccttacttttgttgcaatcactgttgctgggttgctgtatatatattccgggcaatatatgagtgcaataacaatacaaaatattgagtaatttagctttttaaaatcccacaaattttatgaaattttacagccctgctacttttgcttttgaatctcttgccaaaagacacgagtaaaatatctgcttctctcatagagattttaagagcacagcaagtgaattattaaaataggaagtatgtacttaatacaactctttatatggaccctttacattttcagtattttaaaaaatgagg

SEQ ID NO: 586662 - DNA, 632 bp, Homo sapiens
ggaataagctgattatccacaaatacgtaagtggtaattctctgtttaattctctttcttttccttttgggtggagcctttgaggaatccccttggcctgcatctcatcatttatgaaatttctaagtgtgtgtcgaatgtaaatatgagccaagtcctgtagattcctgacagtgattccttacagatttgtagtggkgagggttagatttaattttatataaggtttgaataattgttaagcttatgtaacctgatctgaatttgcacttcctctatgaaaacttcacttatctaataaggaaatcaaatgctttgtagacctatttaccttacttttgttgcaatcactgttgctgggttgctgtatatatattccgggcaatatatgagtgcaataacaatacaaaatattgagtaatttagctttttaaaatcccacaaattttatgaaattttacagccctgctacttttgcttttgaatctcttgccaaaagacacgagtaaaatatctgcttctctcatagagattttaagagcacagcaagtgaattattaaaataggaagtatgtacttaatacaactctttatatggaccctttacattttcagtattttaaaaaatgagg

SEQ ID NO: 586663 - DNA, 632 bp, Homo sapiens
ggaataagctgattatccacaaatacgtaagtggtaattctctgtttaattctctttcttttccttttgggtggagcctttgaggaatccccttggcctgcatctcatcatttatgaaatttctaagtgtgtgtcgaatgtaaatatgagccaagtcctgtagattcctgacagtgattccttacagatttgtagtggtgagggttagatttaattttatataaggtttgaataattgttaagcttatgtaacctgatctgaatttgcacttcctctatgaaaacttcacttatctaataaggaaatcaaatgctttgtagacctatttaccttacttttgttgcaatcactgttgctgggttgctgtatatatattccgggcaatatatgagtgcaataacaatacaaaatattgagtaatttagctttttaaaatcccacaaattttatgraattttacagccctgctacttttgcttttgaatctcttgccaaaagacacgagtaaaatatctgcttctctcatagagattttaagagcacagcaagtgaattattaaaataggaagtatgtacttaatacaactctttatatggaccctttacattttcagtattttaaaaaatgagg

SEQ ID NO: 586664 - DNA, 418 bp, Homo sapiens
agaaatgcagaattctagattcatctggaagatattgttgaagggaaaagcaactttcaggagagtatgtatggactgctatttgtataaaattgcaaaaacagaccaaagaacactatccattcttcatggacatgcacactgggtattaaacatggatgggaagacacacattgacttcagaatagtggggagggaggcggtaactggrctagaaaagggacatataactcgaggttcagcatgaacattatggctgaatccgtagttttcttcccttaaactctggagcaaatgcatccaaaatctaccacgtttgaattttaactgggaggtacatgaaagtttgatatcattttcctttgcgcaatcctgtgtgtttgtaatattgaggcatattttttaaacacttgacaca

SEQ ID NO: 586665 - DNA, 418 bp, Homo sapiens
agaaatgcagaattctagattcatctggaagatattgttgaagggaaaagcaactttcaggagagtatgtatggactgctatttgtataaaattgcaaaaacagaccaaagaacactatccattcttcatggacatgcacactgggtattaaacatggatgggaagacacacattgacttcagaatagtggggagggaggcggtaactgggctagaaaagggacatataactcgaggttcagcatgaacattatggctgaatccgtagttttcttcccttaaactctggagcaaatgcatccaaaakctaccacgtttgaattttaactgggaggtacatgaaagtttgatatcattttcctttgcgcaatcctgtgtgtttgtaatattgaggcatattttttaaacacttgacaca

SEQ ID NO: 586666 - DNA, 436 bp, Homo sapiens
ttcattaaagtctacccattagagaattttattaattattgtagtgcatttctgtaaaattgtaccaccacacaccacagggcaatgattcaaaatgcctggtcttcacacatgcacagtcamagttgaacattgtagttatttagaaaaattcttttctagtgttatatcaatgttccaaacaagattttatgggtaaatatttctcccattctagttttgcaattccatgttaactgtatttttattttacgttacattccttgacattgatttatagaatttttggttttacttaagtattattttggatgacaatgtgcagcaacttttaatgtacagtttatgtcaatgtgcagtttaattacaatatgaatcagccatatatttattcacaattcaagttgtataaaccatgaaatctaagcaaactaac

SEQ ID NO: 586667 - DNA, 436 bp, Homo sapiens
ttcattaaagtctacccattagagaattttattaattattgtagtgcatttctgtaaaattgtaccaccacacaccacagggcaatgattcaaaatgcctggtcttcacacatgcacagtcacagttgaacattgtagttatttagaaaaattcttttctagtgttatatcaatgttccaaacaagattttatgggtaaatatttctcccattctagttttgcaattccatgttaactgtatktttattttacgttacattccttgacattgatttatagaatttttggttttacttaagtattattttggatgacaatgtgcagcaacttttaatgtacagtttatgtcaatgtgcagtttaattacaatatgaatcagccatatatttattcacaattcaagttgtataaaccatgaaatctaagcaaactaac

SEQ ID NO: 586668 - DNA, 436 bp, Homo sapiens
ttcattaaagtctacccattagagaattttattaattattgtagtgcatttctgtaaaattgtaccaccacacaccacagggcaatgattcaaaatgcctggtcttcacacatgcacagtcacagttgaacattgtagttatttagaaaaattcttttctagtgttatatcaatgttccaaacaagattttatgggtaaatatttctcccattctagttttgcaattccatgttaactgtatttttattttasgttacattccttgacattgatttatagaatttttggttttacttaagtattattttggatgacaatgtgcagcaacttttaatgtacagtttatgtcaatgtgcagtttaattacaatatgaatcagccatatatttattcacaattcaagttgtataaaccatgaaatctaagcaaactaac

SEQ ID NO: 586669 - DNA, 436 bp, Homo sapiens
ttcattaaagtctacccattagagaattttattaattattgtagtgcatttctgtaaaattgtaccaccacacaccacagggcaatgattcaaaatgcctggtcttcacacatgcacagtcacagttgaacattgtagttatttagaaaaattcttttctagtgttatatcaatgttccaaacaagattttatgggtaaatatttctcccattctagttttgcaattccatgttaactgtatttttattttacgttacattccttgacattgatttatagaatttttggttttacttaagtattattttggatgacaatrtgcagcaacttttaatgtacagtttatgtcaatgtgcagtttaattacaatatgaatcagccatatatttattcacaattcaagttgtataaaccatgaaatctaagcaaactaac

SEQ ID NO: 586670 - DNA, 539 bp, Homo sapiens
aaaataagagacatacagcactacaaacgcatacagttttgacatcagcccaggctttggttagagctcccaattcaaataattcattagcaaatcttgtaactrgctagcagacgagcaatgaagcccaagccatgaaaattgtgatgatgatgatgatgatgattaattttttttaaacagagagaaaggctagacttacagggtgaccaataatgctggtttatccaagaaggggattcccaagacacagggctgtcagtgctaaaccaggtaagtcataggcaaactggaatgagttggtcaatccaacttagtgtcagtccttcactcaaatctagccctctcagttaattaacttgtattttctcatctgtaaaagtaggagtgacaaagcgttgttattaaaataaaataaaataaaataagaaaattgcccatcagattgcctgacacttacctagtaggtgctcaataaattatggctattattagtagaagaaaagcactctgtgtaccccagtacaccctattgacac

SEQ ID NO: 586671 - DNA, 539 bp, Homo sapiens
aaaataagagacatacagcactacaaacgcatacagttttgacatcagcccaggctttggttagagctcccaattcaaataattcattagcaaatcttgtaactggctagcagacgagcaatgaagcccaagccatgaaaattgtgatgatgatgatgatgatgattaattttttttaaacagagagaaaggctagacttacagggtgaccaataatgctggtttatccaagaaggggattcccaagacacagggctgtcagtgctaaaccaggtaagtcataggcaaactggaatgagttggtcaatccaacttagtgtcagtccttcactcaaatctagccctctcagttaattaacttgtattttctcatctgtaaaagtaggagtgacaaagsgttgttattaaaataaaataaaataaaataagaaaattgcccatcagattgcctgacacttacctagtaggtgctcaataaattatggctattattagtagaagaaaagcactctgtgtaccccagtacaccctattgacac

SEQ ID NO: 586672 - DNA, 524 bp, Homo sapiens
tgtttagtatttcttcataattacatgtaagttatacaatttttggccgaattgtataaaaagtgatgctatgttctaatggcatcctatcaggacatatacaatatccatttatcctatgctgttttaacttttataagataatgtctgactcctctattgtaaaattaactattaaatatttggtattaatatgtagtctgtggagataactttggaattatgtaaatattctattccttatcaaatgttcacttactagttttaggatccagtgatgagtcttccttgaatcagtttttatkataatgattgcacaatgatcctaactctatcatttcttctatgcttattagttggcatcttactacaaggtagagttttccattctgccccagttatttatttattcatgcatttattcatgcatttattcatatcagcacagacttgtgaatttctattttattcagtggattatatctgttattagcattatttgttttgatgcttaaattatccca

SEQ ID NO: 586673 - DNA, 289 bp, Homo sapiens
ctgtaaattgattggataggagagtaagggagaaggagatactaagaatggattctaagtgtttgccaagaacaactrgctggatggccttgtccttgagggtacacttacggtgactagagttaagtcttactatactgacatttatgtggaaatcatagcagagatgtcgagcaggcagtaagttatatgggtctgggactctgaggcttctgtgctgagaatgtggaagtaagaatcaacagagagtacttaactgaagccatgcttatgtataagatcacctgta

SEQ ID NO: 586674 - DNA, 582 bp, Homo sapiens
gggagaattgcctgagaaaggagtgccttctcaactatagatttcaggcaaaaatatttttaaatccctctaaattaaaagatattacaaaaagagcagacaacttgtagaaaagtaaacacaattagctaataaacttatttttaaggttcaactttagtaaaaatcaaagatgtacaaaataatacaataaaacactatttttgcctgtcaatgtaattgtaatggcaatacacaatgcaggtgatggtgcagtraagtgtacacaaccattacactgatgaaagtataaactgatgtaatcctcctagagcaattaataactacctaccaagaccctaaaaatattcagacagattgatctagtaattccactctgggaacctatttcatggaaacaataggggatattctagaaaatttatgtatgttaatattcatcagcaatatttaaatcacaattaatttgcacaaatcaacattctattatatgcaaataatgaaaatactaagcaatgttaataaaaaataatgtatataaagaattataatgaaagagcaaatatatttatcatatataaa

SEQ ID NO: 586675 - DNA, 578 bp, Homo sapiens
aaatgttaatagtgataatggaattatgcattaaacttattttcctttttatacttttctatatttttcatgtttttgcagaaagcataataatcacaaaaaaagtattatactcagaaaaacaggattttttaattttaaaatgaggactatctagggatttctgtgttccttagtctctcttacttccatcttcacccatcctttgagggtggtagtcctaatgtattcatattaatagtttgcttagagacatttgtgttgacattatttccagaataagacaaagccttaaattacacacacatacacacacagagtactgcttttggtttgctttctgyggtcttgtttttcttcaagttttataaggaagtttccagtttctctctcattgttggactgcattggaagaaacagaaagagtatgggtgggcaaagatgggagtttacatttactgcctgctacatacagggcaagagtaggagttttacaaaaaacaaggtccagagtcaagtatgtagccacacatctagtaaaagctggagacaaaattcactccagtcagtttggtctc

SEQ ID NO: 586676 - DNA, 587 bp, Homo sapiens
gtcaccaaacatgaagacatttccaagagatccaggattccattccaaagaaaagcaccttttccttttaccttgctgtctacccaccttcagaggcgcattctaaacgttgcctctgcagagggtgactacattaaacatttcaaaaataaccatactggatgttgtgataccctagagaactgcagatttttccccaaataagaaaatgtagctcttyagagcatatctgagaaaccaaatatctgcttaaacccttctgtcacagacactgacactactcaaaatgaacttttctcaaacattagatataggtctttaccatctagctgagatgtcagggcactagagagtctctatctaaagagataattaagaaagaaatatccagagtttgcacagtttctgacagtgacatcaaccacccattgaaatgctctctttgccagatctgtccattcattcaataaataaatattcaataaaaacacctgcatatagaacacccatgtggcaagcaaagtgagaaataaaaaagtagtttaaaaatagaccttgccttcaaaaactaagacatatataaccct

SEQ ID NO: 586677 - DNA, 515 bp, Homo sapiens
ggctgaactttttgtccccaagccccacacctgctgagagatgagtttgctgaagagggcccaggcagtgtcaaaagtctggagtgaactggataccataagtggctcctacaccaaagtccttgagactgttacattctttagacctgaacccacaacattccctgcctggggagcagtttaacaaagtactgacttgtgtgcccctacgttgctaaccccatgtaagtcctaagttgagcacattggcagtttcaatggaataaaatggcatgtgcacttccttctgctatttttctcctgagaaaataaaagcatgccaaaattaaatatcccttagcacttgtacccagacagctgagtggactatttactagctaacattcatggtctgctttgtaatcgcttgactctgtcttagtttcttgggggtcgatgcttcaatcatctgttctctcccyccacaactgaagtctgatggaactttaaaactgggggagcccctggagagaagc

SEQ ID NO: 586678 - DNA, 515 bp, Homo sapiens
ggctgaactttttgtccccaagccccacacctgctgagagatgagtttgctgaagagggcccaggcagtgtcaaaagtctggagtgaactggataccataagtggctcctacaccaaagtccttgagactgttacattctttagacctgaacccacaacattccctgcctggggagcagtttaacaaagtactgacttgtgtgcccctacgttgctaaccccatgtaagtcctaagttgagcacattggcagtttcaatggaataaaatggcatgtgcacttccttctgctatttttctcctgagaaaataaaagcatgccaaaattaaatatcccttagcacttgtacccagacagctgagtggactatttactagctaacattcatggtctgctttgtaatcgcttgactctgtcttagtttcttgggggtcgatgcttcaatcatctgttctctccccycacaactgaagtctgatggaactttaaaactgggggagcccctggagagaagc

SEQ ID NO: 586679 - DNA, 610 bp, Homo sapiens
ggtttgtcatatttaccagttttatctatttagcaaacttttttttgacagtgtataaagttttcaacaattgatattggaaggttggtagggcctaggaaggttgcaaggaacttacatgcttcccctgctgttgagtgttcctctcatttccattttgtttcatctaagctatctaatagaggctcagtaaattcttagagagttgtaaaatcaagttagatgaacatgtgtttgaaggataggcagggttctctatgtggagagaatacgtggaagccagtggaagactgcctggaacaaatagaagaatggagacagggtgagcctggtgtattgggagaagtggggaggctgcgttgactggagtacaagtcagactggtacagatgttggtgaaatcttggggagcacagacctgcatcctsctttactcctgttttccccataggtgaacacatccagctcccaggtggatcgtttggttataccagaagagaaccacttggggtatgtgtgggaataggagcatggaactacccctttcagattgcctcttggaagtcggctccagcattagcctgtggtaagaatgaattatccctccatt

SEQ ID NO: 586680 - DNA, 620 bp, Homo sapiens
ccataagaagtctgattagaaagcaccaacttcaaagcctcagggtatgagtgatagagtgtgctatatattctcactttaaaaaggtgatggcagaattttgaggatggtttcatgttttattttagccatttcatatttgtcattattgttatcatgggcatcattttcttcattatcattcgaattattattttgcttagagtggtcaatgatatggagaaaagaccattaaaagtcattaccatccattatcagacatccttctgataaaactagtctcagaatagggacttctgttccctttcatctgcttttattgagctcctgctgtgtttccacccacgttgactaytttgtaataaggagaacaaaaaaaaagacaaagtccaactttagagagctcacacactctagttgaggagatgggatgagaagagaatcaccacatacccatgaggaggctgtaatatagagcttgacagcctggactattaggctttacactggttgaattcaaatcctgactgccactcaatagctctgtgatgcagagcaagttactaacctcccctgccccagtttcctcatctgttaaatgaaggtaagaacagtaatta

SEQ ID NO: 586681 - DNA, 620 bp, Homo sapiens
ccataagaagtctgattagaaagcaccaacttcaaagcctcagggtatgagtgatagagtgtgctatatattctcactttaaaaaggtgatggcagaattttgaggatggtttcatgttttattttagccatttcatatttgtcattattgttatcatgggcatcattttcttcattatcattcgaattattattttgcttagagtggtcaatgatatggagaaaagaccattaaaagtcattaccatccattatcagacatccttctgataaaactagtctcagaatagggacttctgttccctttcatctgcttttattgagctcctgctgtgtttccacccacgttgactactttgtaataaggagaacaaaaaaaaagacaaagtccaactttagagagctcacacactctagttgaggagatgggatgagaagagaatcaccacatacccatgaggaggctgtaatatagagcttgacagcctggactattaggctytacactggttgaattcaaatcctgactgccactcaatagctctgtgatgcagagcaagttactaacctcccctgccccagtttcctcatctgttaaatgaaggtaagaacagtaatta

SEQ ID NO: 586682 - DNA, 481 bp, Homo sapiens
gtggctgaatagatttaaaaaaaaaagacctaatgattagctgcctataaaaactcttcacctataaagacacacatagactaaaaataaagggatggaaaaagatattctaatggaaaccaaaaaagagcaaaagtagctatatacttatatcagataaaatagattttaagactaggtgtgatggctcatgcctgtaatcccaacactttgggaggccraggcaagaggaacccaggagttgcttgagcccaggagttcaagaccagcctggacaatacagcaagatgctatctccacagaaaaagaaaaaaaagaggccaggcgcagtggctcacacctgcaatccgagcacttcgggaggccaaggtgagtggatcatctgaggtcaggagttcaagacaagcctagccaacatggcgaaaacccatctctattaaaaatacaaatattaggctgggctcggtggctcatgcctgta

SEQ ID NO: 586683 - DNA, 530 bp, Homo sapiens
tttatgtttccaacttcaggtgccagatgtgacatccagatgacccagtctccatcctccctgtctgcatctgtaggagacagagtcaccatcacttgccgggcgagtcagggcattagcaataatttaaattggtatcagcagaaaccagggaaaactcctaagctcctgatctatgctgcatccagtctgcaaagtgggattccctctcggttcagtgacagtggatctgggacagattacactctcaccatcagcagcctgcagcctgaagattttgcaacttattactgtcaacagagtgacagtaccyctcccacagtgttacaagtcataacataaaccccaaggaagcagatgcatgaggctgggctgccccaatgctccttctggtgcctctgtctgctgagggaagttctcaaactcagtcaggtttggaaagtcatagggagattttcctagaggaggccagggaggttcctctgaaccctaagcctctttcatcctcatccccagcagaaaagacgtga

SEQ ID NO: 586684 - DNA, 530 bp, Homo sapiens
tttatgtttccaacttcaggtgccagatgtgacatccagatgacccagtctccatcctccctgtctgcatctgtaggagacagagtcaccatcacttgccgggcgagtcagggcattagcaataatttaaattggtatcagcagaaaccagggaaaactcctaagctcctgatctatgctgcatccagtctgcaaagtgggattccctctcggttcagtgacagtggatctgggacagattacactctcaccatcagcagcctgcagcctgaagattttgcaacttattactgtcaacagagtgacagtacccctcccacagtgttacaagtcataacataaaccccaaggaagcagatgyatgaggctgggctgccccaatgctccttctggtgcctctgtctgctgagggaagttctcaaactcagtcaggtttggaaagtcatagggagattttcctagaggaggccagggaggttcctctgaaccctaagcctctttcatcctcatccccagcagaaaagacgtga

SEQ ID NO: 586685 - DNA, 530 bp, Homo sapiens
tttatgtttccaacttcaggtgccagatgtgacatccagatgacccagtctccatcctccctgtctgcatctgtaggagacagagtcaccatcacttgccgggcgagtcagggcattagcaataatttaaattggtatcagcagaaaccagggaaaactcctaagctcctgatctatgctgcatccagtctgcaaagtgggattccctctcggttcagtgacagtggatctgggacagattacactctcaccatcagcagcctgcagcctgaagattttgcaacttattactgtcaacagagtgacagtacccctcccacagtgttacaagtcataacataaaccccaaggaagcagatgcrtgaggctgggctgccccaatgctccttctggtgcctctgtctgctgagggaagttctcaaactcagtcaggtttggaaagtcatagggagattttcctagaggaggccagggaggttcctctgaaccctaagcctctttcatcctcatccccagcagaaaagacgtga

SEQ ID NO: 586686 - DNA, 646 bp, Homo sapiens
agcagcctgcagcctgaagattttgcaacttattactgtcaacagagtgacagtacccctcccacagtgttacaagtcataacataaaccccaaggaagcagatgcatgaggctgggctgccccaatgctccttctggtgcctctgtctgctgagrgaagttctcaaactcagtcaggtttggaaagtcatagggagattttcctagaggaggccagggaggttcctctgaaccctaagcctctttcatcctcatccccagcagaaaagacgtgacaatgactgtcctgactgaataaagaagagagataagtccagctgaggagtctgtgttatgggataatcggaatttgtacagcaaaagagaagctattctcagtatttcaaggagaaattattcaagttgaataaattagagtctaaaccacagtctttctgaagcctatggagtgttattcatgaagcaggtactagacacaggggattctcaggtgttacttcagaagccagggttcacctgcccctggtggtatgtgctgaacaccgtgtgatgatcctcagtcctgtctgggaagcccagagctgggggtgctgatgctctcagctgcctgcagcacatctccaggtgattctccagtccacaccta

SEQ ID NO: 586687 - DNA, 598 bp, Homo sapiens
cagcagcctgcagcctgaagattttgcaacttattactgtcaacagagtgacagtacccctcccacagtgttacaagtcataacataaaccccaaggaagcagatgcatgaggctgggctgccccaatgctccttctggtgcctctgtctgctgaggraagttctcaaactcagtcaggtttggaaagtcatagggagattttcctagaggaggccagggaggttcctctgaaccctaagcctctttcatcctcatccccagcagaaaagacgtgacaatgactgtcctgactgaataaagaagagagataagtccagctgaggagtctgtgttatgggataatcggaatttgtacagcaaaagagaagctattctcagtatttcaaggagaaattattcaagttgaataaattagagtctaaaccacagtctttctgaagcctatggagtgttattcatgaagcaggtactagacacaggggattctcaggtgttacttcagaagccagggttcacctgcccctggtggtatgtgctgaacaccgtgtgatgatcctcagtcctgtctgggaagcccagagctgggggtgctgatgc

SEQ ID NO: 586688 - DNA, 530 bp, Homo sapiens
tttatgtttccaacttcaggtgccagatgtgacatccagatgacccagtctccatcctccctgtctgcatctgtaggagacagagtcaccatcacttgccgggcgagtcagggcattagcaataatttaaattggtatcagcagaaaccagggaaaactcctaagctcctgatctatgctgcatccagtctgcaaagtgggattccctctcggttcagtgacagtggatctgggacagattacactctcaccatcagcagcctgcagcctgaagattttgcaacttattactgtcaacagagtgacagtacccctcccacagtgttacaagtcataacataaaccccaaggaagcagatgcatgaggctgggctgccccaatgctccttctggtgcctctgtctgctgagggaagttctcaaactcagtcaggtttggaaagtcatwgggagattttcctagaggaggccagggaggttcctctgaaccctaagcctctttcatcctcatccccagcagaaaagacgtga

SEQ ID NO: 586689 - DNA, 598 bp, Homo sapiens
cagcagcctgcagcctgaagattttgcaacttattactgtcaacagagtgacagtacccctcccacagtgttacaagtcataacataaaccccaaggaagcagatgcatgaggctgggctgccccaatgctccttctggtgcctctgtctgctgagggaagttctcaaactcagtcaggtttggaaagtcatagggagattytcctagaggaggccagggaggttcctctgaaccctaagcctctttcatcctcatccccagcagaaaagacgtgacaatgactgtcctgactgaataaagaagagagataagtccagctgaggagtctgtgttatgggataatcggaatttgtacagcaaaagagaagctattctcagtatttcaaggagaaattattcaagttgaataaattagagtctaaaccacagtctttctgaagcctatggagtgttattcatgaagcaggtactagacacaggggattctcaggtgttacttcagaagccagggttcacctgcccctggtggtatgtgctgaacaccgtgtgatgatcctcagtcctgtctgggaagcccagagctgggggtgctgatgc

SEQ ID NO: 586690 - DNA, 495 bp, Homo sapiens
ttcttttgttggttttggggtttctggatttggctgctaaatatgattagatcccaaaatgctaaggactctacttttaatagtgtagagaacattgacagttcttggcatgaaaggtttaaagagctatgcaaaacaaattcattcgacactaatgaatcatcgctcatgagaggcaaggagtttagtgactctgtacctaatacccttgacaaacaccttgcaaaatagatttgtgaggagagcgcctgcatctttgaagagccctgtaaaggctcttctctgtatgtcagwtctaatggtgagaactgcagtcactcagttacaaaagttaaatacaatttggaataattggatcctgaagtggcaggggccaagtggtagcactcaaccctcaaaggcatggtgggtgtagctaccgtaatgggcagaaaagacaaagcagcaatctgaacagtctgactcatgtagagctctggcattggctaactaatc

SEQ ID NO: 586691 - DNA, 274 bp, Homo sapiens
agaactgcagtcactcagttacaaaagttaaatacaatttggaataattggatcctgaagtggcaggggccaagtggtagcactcaaccctcaaaggcayggtgggtgtagctaccgtaatgggcagaaaagacaaagcagcaatctgaacagtctgactcatgtagagctctggcattggctaactaatcacagtgttcctagaagtgaaactgacaggaaaactaatgcattcctacttaatttatgtaaggaggaaacttaaggtcaaaca

SEQ ID NO: 586692 - DNA, 573 bp, Homo sapiens
atcttctccagttaactactctccttttgagagacagctcttgtcytatactgggcttttgtggaaactgaacatttgactatgagtcaacaagtcaccacgcgacctgaactgcctatcgtgaactgggtgctttctgactcatgtagccataaagtgggtcatgcacagcagcattgcatcatcaaatggaaatggtgtataagtgattgggctcaagcaggtcctggggggcacaagtaagttacatgaggaagtggctcaaatgcccaccctgccaccctgctttctctcccatggcctgcactgatgacctcatggggacttgcctttgagcagttaacacaggaagggaggactagggtctggttcacagatggttctccacaataggcaggtaccgcccaaaagtggacagctgaagcactacagcccctttctaggacatccctgaaggagagtggtgaaggaaaatcttcccagtgggcagaacattgagcagtgcacctgattgtgcactttgcatggaaggagaaatttccagatgtgcggttatatactgattcatgggct

SEQ ID NO: 586693 - DNA, 573 bp, Homo sapiens
atcttctccagttaactactctccttttgagagacagctcttgtcttatactgggcttttgtggaaactgaacatttgactatgagtcaacaagtcaccaygcgacctgaactgcctatcgtgaactgggtgctttctgactcatgtagccataaagtgggtcatgcacagcagcattgcatcatcaaatggaaatggtgtataagtgattgggctcaagcaggtcctggggggcacaagtaagttacatgaggaagtggctcaaatgcccaccctgccaccctgctttctctcccatggcctgcactgatgacctcatggggacttgcctttgagcagttaacacaggaagggaggactagggtctggttcacagatggttctccacaataggcaggtaccgcccaaaagtggacagctgaagcactacagcccctttctaggacatccctgaaggagagtggtgaaggaaaatcttcccagtgggcagaacattgagcagtgcacctgattgtgcactttgcatggaaggagaaatttccagatgtgcggttatatactgattcatgggct

SEQ ID NO: 586694 - DNA, 573 bp, Homo sapiens
atcttctccagttaactactctccttttgagagacagctcttgtcttatactgggcttttgtggaaactgaacatttgactatgagtcaacaagtcaccacgcgacctgaactgcctatcgtgaactgggtgctttctgactcatgtagccataaagtgggtcatgcacagcagcattscatcatcaaatggaaatggtgtataagtgattgggctcaagcaggtcctggggggcacaagtaagttacatgaggaagtggctcaaatgcccaccctgccaccctgctttctctcccatggcctgcactgatgacctcatggggacttgcctttgagcagttaacacaggaagggaggactagggtctggttcacagatggttctccacaataggcaggtaccgcccaaaagtggacagctgaagcactacagcccctttctaggacatccctgaaggagagtggtgaaggaaaatcttcccagtgggcagaacattgagcagtgcacctgattgtgcactttgcatggaaggagaaatttccagatgtgcggttatatactgattcatgggct

SEQ ID NO: 586695 - DNA, 504 bp, Homo sapiens
tgatgcactagcaaaatgtttgctttctgttcccacgacattaggttctgctttactagtcatcttagctccagagggaagaacgttgctaccaggagacacaataaggattccattaaactggaagttaagatggccacttggacgctttggggtcctcctacctttaagtcaacaagctaagaatggagttacagtgttggcggcagtgattgacccagactatcaagatgaagtcagtccrctactccacaacggaagtgaggaagagtatgcatggaatataggagatccattagggcatctcttggtattatcatgcactctgattaagttaaatgggaaactatacccaatccaggtaggactacaaatggtccagatcctctccgggtcacgacctgctgagctgcttgctgaaggcaaagggaatacagaatgaatagtggaagaaagtagttatcaataccagctacgaccacctgaccagctgcagaaatgagg

SEQ ID NO: 586696 - DNA, 504 bp, Homo sapiens
tgatgcactagcaaaatgtttgctttctgttcccacgacattaggttctgctttactagtcatcttagctccagagggaagaacgttgctaccaggagacacaataaggattccattaaactggaagttaagatggccacttggacgctttggggtcctcctacctttaagtcaacaagctaagaatggagttacagtgttggcggcagtgattgacccagactatcaagatgaagtcagtccactactccacaacggaagtgaggaagagtatgcatggaatataggagatccattagggcatctcttggtattatcatgcactctgattaagktaaatgggaaactatacccaatccaggtaggactacaaatggtccagatcctctccgggtcacgacctgctgagctgcttgctgaaggcaaagggaatacagaatgaatagtggaagaaagtagttatcaataccagctacgaccacctgaccagctgcagaaatgagg

SEQ ID NO: 586697 - DNA, 504 bp, Homo sapiens
tgatgcactagcaaaatgtttgctttctgttcccacgacattaggttctgctttactagtcatcttagctccagagggaagaacgttgctaccaggagacacaataaggattccattaaactggaagttaagatggccacttggacgctttggggtcctcctacctttaagtcaacaagctaagaatggagttacagtgttggcggcagtgattgacccagactatcaagatgaagtcagtccactactccacaacggaagtgaggaagagtatgcatggaatataggagatccattagggcatctcttggtattatcatgcactctgattaagttaaatgggaaactatacccaatccaggtaggactacaaatggtccagatcctctccgggtcacsacctgctgagctgcttgctgaaggcaaagggaatacagaatgaatagtggaagaaagtagttatcaataccagctacgaccacctgaccagctgcagaaatgagg

SEQ ID NO: 586698 - DNA, 503 bp, Homo sapiens
tgcagaaatgaggactggaactatcatgagtatttccttcttcttttgttaaaaacatgtttgtgcatgtatgcacttgtactaagaaaatatcttcatttcatttcccttttctttatcaggtgacatagatttgctcacctcatatcagcatttaagtattgtttactttatgtaatagtatttgggttggggattggtgcatttccagttgtaggaaggatagtttattatgttggggtaattatgacctaactattgtctgtattttaagattatgtatgatctcaggagatgtgygtgggttcaagttcacaaggggtgggcttatgatggtttataatgagtgtcaacttgattggattgaaggatgtaaagtattcatcctgggtgtgtctgtgagggtgttgccaaaaaaagattaacatgtgagtcagtgggctgggaaaggcagacccacccttaatctgtgtgggcacaatccaatcagctgccaacccagc

SEQ ID NO: 586699 - DNA, 503 bp, Homo sapiens
tgcagaaatgaggactggaactatcatgagtatttccttcttcttttgttaaaaacatgtttgtgcatgtatgcacttgtactaagaaaatatcttcatttcatttcccttttctttatcaggtgacatagatttgctcacctcatatcagcatttaagtattgtttactttatgtaatagtatttgggttggggattggtgcatttccagttgtaggaaggatagtttattatgttggggtaattatgacctaactattgtctgtattttaagattatgtatgatctcaggagatgtgcgtgggttcaagttcacaaggggtgggcttatgatggttwataatgagtgtcaacttgattggattgaaggatgtaaagtattcatcctgggtgtgtctgtgagggtgttgccaaaaaaagattaacatgtgagtcagtgggctgggaaaggcagacccacccttaatctgtgtgggcacaatccaatcagctgccaacccagc

SEQ ID NO: 586700 - DNA, 503 bp, Homo sapiens
tgcagaaatgaggactggaactatcatgagtatttccttcttcttttgttaaaaacatgtttgtgcatgtatgcacttgtactaagaaaatatcttcatttcatttcccttttctttatcaggtgacatagatttgctcacctcatatcagcatttaagtattgtttactttatgtaatagtatttgggttggggattggtgcatttccagttgtaggaaggatagtttattatgttggggtaattatgacctaactattgtctgtattttaagattatgtatgatctcaggagatgtgcgtgggttcaagttcacaaggggtgggcttatgatggtttataatgagtgtcaacttgattggattgaaggaygtaaagtattcatcctgggtgtgtctgtgagggtgttgccaaaaaaagattaacatgtgagtcagtgggctgggaaaggcagacccacccttaatctgtgtgggcacaatccaatcagctgccaacccagc

SEQ ID NO: 586701 - DNA, 587 bp, Homo sapiens
aagttcttcagttttggaactctggctggctctttttgctcctcatccagcagatggcctattgtgagacttggtgattgtgtgagttaatacttaataaacttcctgtattagmcagtgacatctagagggacagaactaacaggatatatacatatatatatacacacacacatacatatatatatgcacacacacacacacatatatatatttatttataaaggggagtttattaacttacaggatcataagttacacaatgggctgtctgcaaactgatgagaaaggagagccatggagtccaatgtttgagggcaggaagaaaccagcatgggagaaagatgtaggctgggaggctaggccagtctctccttttcaaatttttctgcctgatttatatttgctggcagcagattagattgtgcccaccagattaagggtgggtctgccttccccagcccactgactcaaatgttaatctctttcggcaacactctcacagacacaccctggatcaatacttcatatctctcaatcctatcaagttgacactcattattaaccatgtcactccctttcatata

SEQ ID NO: 586702 - DNA, 395 bp, Homo sapiens
atatatacatatatatatacacacacacatacatatatatatgcacacacacacacayatatatatatttatttataaaggggagtttattaacttacaggatcataagttacacaatgggctgtctgcaaactgatgagaaaggagagccatggagtccaatgtttgagggcaggaagaaaccagcatgggagaaagatgtaggctgggaggctaggccagtctctccttttcaaatttttctgcctgatttatatttgctggcagcagattagattgtgcccaccagattaagggtgggtctgccttccccagcccactgactcaaatgttaatctctttcggcaacactctcacagacacaccctggatcaatacttcatatctctcaatcc

SEQ ID NO: 586703 - DNA, 468 bp, Homo sapiens
gagggacagaactaacaggatatatacatatatatatacacacacacatacatatatatatgcacacacacacacacatatatatatttatttayaaaggggagtttattaacttacaggatcataagttacacaatgggctgtctgcaaactgatgagaaaggagagccatggagtccaatgtttgagggcaggaagaaaccagcatgggagaaagatgtaggctgggaggctaggccagtctctccttttcaaatttttctgcctgatttatatttgctggcagcagattagattgtgcccaccagattaagggtgggtctgccttccccagcccactgactcaaatgttaatctctttcggcaacactctcacagacacaccctggatcaatacttcatatctctcaatcctatcaagttgacactcattattaaccatgtcactccctttcatatatatatgta

SEQ ID NO: 586704 - DNA, 468 bp, Homo sapiens
gagggacagaactaacaggatatatacatatatatatacacacacacatacatatatatatgcacacacacacacacatatatatatttatttataaaggggagtttattaacttacaggatcataagttacacaatgggctgtctgcaaactgatgagaaaggagagccatggagtccaatgtttgagggcaggaagaaaccagcatgggagaaagatgtaggctgggaggctaggccagtctctccttttcaaatttttctgcctgmtttatatttgctggcagcagattagattgtgcccaccagattaagggtgggtctgccttccccagcccactgactcaaatgttaatctctttcggcaacactctcacagacacaccctggatcaatacttcatatctctcaatcctatcaagttgacactcattattaaccatgtcactccctttcatatatatatgta

SEQ ID NO: 586705 - DNA, 468 bp, Homo sapiens
gagggacagaactaacaggatatatacatatatatatacacacacacatacatatatatatgcacacacacacacacatatatatatttatttataaaggggagtttattaacttacaggatcataagttacacaatgggctgtctgcaaactgatgagaaaggagagccatggagtccaatgtttgagggcaggaagaaaccagcatgggagaaagatgtaggctgggaggctaggccagtctctccttttcaaatttttctgcctgatttatatttgctggcagcagattagattgtgcccaccagattaagggtgggtctgccttccccagcccactgactcaaatgttaatctctttcggcaacactctcacagacacaccctggatcaatacttcatatcyctcaatcctatcaagttgacactcattattaaccatgtcactccctttcatatatatatgta

SEQ ID NO: 586706 - DNA, 468 bp, Homo sapiens
gagggacagaactaacaggatatatacatatatatatacacacacacatacatatatatatgcacacacacacacacatatatatatttatttataaaggggagtttattaacttacaggatcataagttacacaatgggctgtctgcaaactgatgagaaaggagagccatggagtccaatgtttgagggcaggaagaaaccagcatgggagaaagatgtaggctgggaggctaggccagtctctccttttcaaatttttctgcctgatttatatttgctggcagcagattagattgtgcccaccagattaagggtgggtctgccttccccagcccactgactcaaatgttaatctctttcggcaacactctcacagacacaccctggatcaatacttcatatctctcaatcctatcaagttgacastcattattaaccatgtcactccctttcatatatatatgta

SEQ ID NO: 586707 - DNA, 357 bp, Homo sapiens
gatcataagttacacaatgggctgtctgcaaactgatgagaaaggagagccatggagtccaatgtttgagggcaggaagaaaccagcatgggagaaagatgtaggctgggaggctaggccagtctctccttttcaaatttttctgcctgatttatatttgctggcagcagattagattgtgcccaccagattaagggtgggtctgccttccccagcccactgactcaaatgttaatctctttcggcaacactctcacagacacaccctggatcaatacttcatatctctcaatcctatcaagttgacactcattattaaccatgtcactcccyttcatatatatatgtatatagtcc

SEQ ID NO: 586708 - DNA, 492 bp, Homo sapiens
aatttatgttttgtccattcattttctgcaaacatttagagggcaaataggaagtttccctttataacgtggtggctcacgcctgtaatcccagcactttgggaggccgaggtgagccgatcacctgagkttgggagtttgagactagcctgaccaacatagagaaacctcgcctccactaaaaaaaatacaaaattagcagggtgtggtggtgtgcacctgtgatcccagctactcaggaggctgaggcaagagaattgcttggacctgggaggcggaggttgcagtgagcccagattttgccactacactccagcctgggtgacaagagcgaaactccatctcaaaaaaacaaaacgaaacaaaaacaaacaaaaaaacacctactgcctcactgaattaaaggcgtgttcagcagtttctttgttatttcaaagagtggcatctgcttcagcagggtcagtttttaatgtgtttgttttgtttcttttt

SEQ ID NO: 586709 - DNA, 558 bp, Homo sapiens
tgtcttaagacaacaactttaacccgttgcttagcctaggtgtaatccacagaggatcttgtctgtctaaaatgcccctctagccacatccttcccctgctcagatcttgtcattggctcccatgaactgaagttgaagtttaagctccttaggacagcatacacgcccttctatgayatgttcccagaacatatttactggtttatctcataccatggcccactttgtattttacacttttgaaatacagaaagtcattacattctaccaataatactaagatagtatatgcctaaaagcctttggcaatattttgtcttttgttgagaattctcttagcttattttgtcacgtgtttaactccttatgtcctttcatgactcacatgtcaagacttcaggaaaccttctctaactcccaggctgggctgagtgacccttttctgggtaagtaatgaactctaatcatactcttcatagcacttaccatactaatttgaagtctgaagtattccattgtctgcctcactttacttagacaaaggaaccatgtcctag

SEQ ID NO: 586710 - DNA, 558 bp, Homo sapiens
tgtcttaagacaacaactttaacccgttgcttagcctaggtgtaatccacagaggatcttgtctgtctaaaatgcccctctagccacatccttcccctgctcagatcttgtcattggctcccatgaactgaagttgaagtttaagctccttaggacagcatacacgcccttctatgatatgttcccagaacatatttactggtttatctcataccatggcccactttgtattttacacttttgaaatacagaaagtcattacattctmccaataatactaagatagtatatgcctaaaagcctttggcaatattttgtcttttgttgagaattctcttagcttattttgtcacgtgtttaactccttatgtcctttcatgactcacatgtcaagacttcaggaaaccttctctaactcccaggctgggctgagtgacccttttctgggtaagtaatgaactctaatcatactcttcatagcacttaccatactaatttgaagtctgaagtattccattgtctgcctcactttacttagacaaaggaaccatgtcctag

SEQ ID NO: 586711 - DNA, 558 bp, Homo sapiens
tgtcttaagacaacaactttaacccgttgcttagcctaggtgtaatccacagaggatcttgtctgtctaaaatgcccctctagccacatccttcccctgctcagatcttgtcattggctcccatgaactgaagttgaagtttaagctccttaggacagcatacacgcccttctatgatatgttcccagaacatatttactggtttatctcataccatggcccactttgtattttacacttttgaaatacagaaagtcattacattctaccaataatactaagatagtatatgcctaaaagcctttgscaatattttgtcttttgttgagaattctcttagcttattttgtcacgtgtttaactccttatgtcctttcatgactcacatgtcaagacttcaggaaaccttctctaactcccaggctgggctgagtgacccttttctgggtaagtaatgaactctaatcatactcttcatagcacttaccatactaatttgaagtctgaagtattccattgtctgcctcactttacttagacaaaggaaccatgtcctag

SEQ ID NO: 586712 - DNA, 523 bp, Homo sapiens
aattctcttagcttattttgtcacgtgtttaactccttatgtcctttcatgactcacatgtcaagacttcaggaaaccttctctaactcccaggctgggctgagtgacccttttctgggtaagtaatgaactctaatcatactcttcatagcacttaccatactaatttgaagtctgaagtattccattgtctgcctcactttacttagrcaaaggaaccatgtcctagtctcattctggcctcaggacttcagcctgggcgacagtgggagactgtgtgtcaaaaaaaattgctaatgattgaagcctaatactgaagattctggtttattaataattagtctgggtgttaattgagctccccaagtgattactcatgtaggacttcaaaccaataatttagaaccttgtgactcaaaatctgggcaaaaataagcagcatcagtatcacctgggagcagcttcaggtctcactttagatttactctgaatcgaaatattatatttttattaaaaaaattaa

SEQ ID NO: 586713 - DNA, 523 bp, Homo sapiens
aattctcttagcttattttgtcacgtgtttaactccttatgtcctttcatgactcacatgtcaagacttcaggaaaccttctctaactcccaggctgggctgagtgacccttttctgggtaagtaatgaactctaatcatactcttcatagcacttaccatactaatttgaagtctgaagtattccattgtctgcctcactttacttagacaaaggaaccatgtcctagtctcattctggcctcaggacttcagcctgggmgacagtgggagactgtgtgtcaaaaaaaattgctaatgattgaagcctaatactgaagattctggtttattaataattagtctgggtgttaattgagctccccaagtgattactcatgtaggacttcaaaccaataatttagaaccttgtgactcaaaatctgggcaaaaataagcagcatcagtatcacctgggagcagcttcaggtctcactttagatttactctgaatcgaaatattatatttttattaaaaaaattaa

SEQ ID NO: 586714 - DNA, 523 bp, Homo sapiens
aattctcttagcttattttgtcacgtgtttaactccttatgtcctttcatgactcacatgtcaagacttcaggaaaccttctctaactcccaggctgggctgagtgacccttttctgggtaagtaatgaactctaatcatactcttcatagcacttaccatactaatttgaagtctgaagtattccattgtctgcctcactttacttagacaaaggaaccatgtcctagtctcattctggcctcaggacttcagcctgggcgacagtgggagactgtgtgtcaaaaaaaattgctaatgattgaagmctaatactgaagattctggtttattaataattagtctgggtgttaattgagctccccaagtgattactcatgtaggacttcaaaccaataatttagaaccttgtgactcaaaatctgggcaaaaataagcagcatcagtatcacctgggagcagcttcaggtctcactttagatttactctgaatcgaaatattatatttttattaaaaaaattaa

SEQ ID NO: 586715 - DNA, 246 bp, Homo sapiens
aggaaccatgtcctagtctcattctggcctcaggacttcagcctgggcgacagtgggagactgtgtgtcaaaaaaaattgctaatgattgaagcctaatactgaagattctggtttattaataattagtctgggtgttaattgagctccccaagtgattactcatgtaggacttcaaamcaataatttagaaccttgtgactcaaaatctgggcaaaaataagcagcatcagtatcacctgggagc

SEQ ID NO: 586716 - DNA, 523 bp, Homo sapiens
aattctcttagcttattttgtcacgtgtttaactccttatgtcctttcatgactcacatgtcaagacttcaggaaaccttctctaactcccaggctgggctgagtgacccttttctgggtaagtaatgaactctaatcatactcttcatagcacttaccatactaatttgaagtctgaagtattccattgtctgcctcactttacttagacaaaggaaccatgtcctagtctcattctggcctcaggacttcagcctgggcgacagtgggagactgtgtgtcaaaaaaaattgctaatgattgaagcctaatactgaagattctggtttattaataattagtctgggtgttaattgagctccccaagtgattactcatgtaggacttcaaaccaataatttagraccttgtgactcaaaatctgggcaaaaataagcagcatcagtatcacctgggagcagcttcaggtctcactttagatttactctgaatcgaaatattatatttttattaaaaaaattaa

SEQ ID NO: 586717 - DNA, 275 bp, Homo sapiens
aatgcttgagaagtagatatttgatcataacatttcaaaatckactggataacctagaattgaaaaatagcctacaggttgaaaaactcctgtagtgaagaaagaaaataactaatatacagtgacaatataaatattataagtatttattttattatcgccctgaaatttgataatacaaacatgtaatatctacatatcatccatatatcaggtcagaaaaaatcaatacattcttcaaaaatttagcataacagaaaatgcactctctctcc

SEQ ID NO: 586718 - DNA, 275 bp, Homo sapiens
aatgcttgagaagtagatatttgatcataacatttcaaaatcgactggataacctagaattgaaaaatagcctayaggttgaaaaactcctgtagtgaagaaagaaaataactaatatacagtgacaatataaatattataagtatttattttattatcgccctgaaatttgataatacaaacatgtaatatctacatatcatccatatatcaggtcagaaaaaatcaatacattcttcaaaaatttagcataacagaaaatgcactctctctcc

SEQ ID NO: 586719 - DNA, 504 bp, Homo sapiens
gaggtgtgaaatttagaggtcaaacgaaacacctagcattgttagggcagcctcccacaacaaagaatcctctggtcctaaaggtaagtagcaccaaggttgagaaaccataatctagacagtaaacactatgtagctattccaagtgctcaggaaaacacatcagtgccctggagaggaaaagtgtaaacattttaattgctgtacatggtgacacaaawtcatgttgttaatctaagtggaaggggctgaagcacaaaacgtaattcaaagagtttacttgatccacaatgaggacagctgcctggaagaaacagacccaagtatccttggatatgaactccctttggagctttgcaacaagcagtttcttaaaggcaaaaaagggtccagaagtgggatgatgcaaagaggtttgtcacaaattctcattggcttatggaaataacatttattagtgattggctatacactgttacactattattgggtgtggattatagt

SEQ ID NO: 586720 - DNA, 504 bp, Homo sapiens
gaggtgtgaaatttagaggtcaaacgaaacacctagcattgttagggcagcctcccacaacaaagaatcctctggtcctaaaggtaagtagcaccaaggttgagaaaccataatctagacagtaaacactatgtagctattccaagtgctcaggaaaacacatcagtgccctggagaggaaaagtgtaaacattttaattgctgtacatggtgacacaaaaycatgttgttaatctaagtggaaggggctgaagcacaaaacgtaattcaaagagtttacttgatccacaatgaggacagctgcctggaagaaacagacccaagtatccttggatatgaactccctttggagctttgcaacaagcagtttcttaaaggcaaaaaagggtccagaagtgggatgatgcaaagaggtttgtcacaaattctcattggcttatggaaataacatttattagtgattggctatacactgttacactattattgggtgtggattatagt

SEQ ID NO: 586721 - DNA, 357 bp, Homo sapiens
ataaatatacggatttttcaaagtgattttaagctattaggaatcagttaaatgttgggggattttgtctgagaatgggctaaaggagaatgtcccttttgccttctgaagtttccctgaaaatcactaataggaggcagataaatagtagaaaaggcatacaggtttckgcaatgtgtgtacactggagcccttagaacgaagacccagacacacgatgcgtgcagaagcttatctaccacatgaagtttacagaaagaatggggtcttggatcacagggaaaaaaaaaaaaaggttatgtgagaaaacgaccctgactagcaacagtggacttattacataggtggaacctcact

SEQ ID NO: 586722 - DNA, 357 bp, Homo sapiens
ataaatatacggatttttcaaagtgattttaagctattaggaatcagttaaatgttgggggattttgtctgagaatgggctaaaggagaatgtcccttttgccttctgaagtttccctgaaaatcactaataggaggcagataaatagtagaaaaggcatacaggtttctgcaatgtgtgtacactggagcccttagaaygaagacccagacacacgatgcgtgcagaagcttatctaccacatgaagtttacagaaagaatggggtcttggatcacagggaaaaaaaaaaaaaggttatgtgagaaaacgaccctgactagcaacagtggacttattacataggtggaacctcact

SEQ ID NO: 586723 - DNA, 357 bp, Homo sapiens
ataaatatacggatttttcaaagtgattttaagctattaggaatcagttaaatgttgggggattttgtctgagaatgggctaaaggagaatgtcccttttgccttctgaagtttccctgaaaatcactaataggaggcagataaatagtagaaaaggcatacaggtttctgcaatgtgtgtacactggagcccttagaacgaagacccasacacacgatgcgtgcagaagcttatctaccacatgaagtttacagaaagaatggggtcttggatcacagggaaaaaaaaaaaaaggttatgtgagaaaacgaccctgactagcaacagtggacttattacataggtggaacctcact

SEQ ID NO: 586724 - DNA, 357 bp, Homo sapiens
ataaatatacggatttttcaaagtgattttaagctattaggaatcagttaaatgttgggggattttgtctgagaatgggctaaaggagaatgtcccttttgccttctgaagtttccctgaaaatcactaataggaggcagataaatagtagaaaaggcatacaggtttctgcaatgtgtgtacactggagcccttagaacgaagacccagacacacgatgcgtgcagaagcttrtctaccacatgaagtttacagaaagaatggggtcttggatcacagggaaaaaaaaaaaaaggttatgtgagaaaacgaccctgactagcaacagtggacttattacataggtggaacctcact

SEQ ID NO: 586725 - DNA, 573 bp, Homo sapiens
ctcagtacatgctaaaatatatttgttaaaaggcaatattcatgtctttaaagattttaaatgctataaagagtctgatattctataggcaaacatgtgtatgtccattagaagaagagaggtctgattttcatatgttactacatagagatagagaagtggatagattaatttgcatatgcatagagaaagcataaaatagaaatttactatcatattaaaggaattttaattcaacaataaaataattcaaaggtaaaattttaaatatttttaacaggtacattattaatattagataatatttataattgtgaaaatattcmatgctaaaataagatgcaatgtctaaacatcagtattaaaactagtataaatatttgcttgtttatacaaggaaaattcaagctcgacctaaaattatataggaaataaaataaaaattttaagggagctctttaataacataaacatatatatatatacacacacacatataacatgtatatatgttatatgggatatagatttaacatgttatatctatatttgtatctataactacagctgtat

SEQ ID NO: 586726 - DNA, 573 bp, Homo sapiens
ctcagtacatgctaaaatatatttgttaaaaggcaatattcatgtctttaaagattttaaatgctataaagagtctgatattctataggcaaacatgtgtatgtccattagaagaagagaggtctgattttcatatgttactacatagagatagagaagtggatagattaatttgcatatgcatagagaaagcataaaatagaaatttactatcatattaaaggaattttaattcaacaataaaataattcaaaggtaaaattttaaatatttttaacaggtacattattaatattagataatatttataattgtgaaaatattcaatgctaaaataagatgcaatgtctaaacatcagtattaaaactagtataaatatttgcttgtttatacaaggaaaattcaagctcracctaaaattatataggaaataaaataaaaattttaagggagctctttaataacataaacatatatatatatacacacacacatataacatgtatatatgttatatgggatatagatttaacatgttatatctatatttgtatctataactacagctgtat

SEQ ID NO: 586727 - DNA, 530 bp, Homo sapiens
gggatatagatttaacatgttatatctatatttgtatctataactacagctgtatgtatctacatttctatatatttactcagtgacataaatatagacaggaataaatataaagacacatgattcttggataaaaaggatttagtatcataaagacaaattctttccaaattcacttatgaattcacaacaatatacagtttcattagtataatttaaaatttttaaataaattccaagattcatttaaaggaatatacatgtatacaagcagtcaagaaagaagcaagagtgcactaaactaacttgctattaaaatacatttttaaacttagtaactgaaactgagcagtactgatttgcaatactggaatttaggtatatgggatctcaaaagcacagagctcaaaggagacccctgtatgcaygagagcttaggatgtgctttagaaaatattaccaaaccacgggcaaagttactttagtgtcttagtcttactaggtttgaaaagccagagaaaagactcaag

SEQ ID NO: 586728 - DNA, 534 bp, Homo sapiens
agaaaatattaccaaaccacgggcaaagttactttagtgtcttagtcttactaggtttgaaaagccagagaaaagactcaagaccaccatataagagcaaaacaaaaggacagggagagaatgtgaagatactgaaacattttacgtaaagttgtataaaacatcytttaaagaaaatgtaaagtttaggatatacatcaaaatcagcagagccactaaataaataaataggcattgtaaaacagcaagagaaaatttaaatggatttctaaaaaatattgacacctatgatttttaaaatatgtttaagaaatcccgtatttcacagggcagcctttcacaacacagatatgttaggacataaaggtccttctgtttttaatttactagagtttatagggttacaaatgtcttctacccttgtcttttgtctgatgatgaaaaaattttcataagcatgtatttctgaatgcctgatggattgacatatataatatgctgctagtattaaaatatgtgacggaaaacacatcc

SEQ ID NO: 586729 - DNA, 534 bp, Homo sapiens
agaaaatattaccaaaccacgggcaaagttactttagtgtcttagtcttactaggtttgaaaagccagagaaaagactcaagaccaccatataagagcaaaacaaaaggacagggagagaatgtgaagatactgaaacattttacgtaaagttgtataaaacatcttttaaagaaaatgtaaagtttaggatatacawcaaaatcagcagagccactaaataaataaataggcattgtaaaacagcaagagaaaatttaaatggatttctaaaaaatattgacacctatgatttttaaaatatgtttaagaaatcccgtatttcacagggcagcctttcacaacacagatatgttaggacataaaggtccttctgtttttaatttactagagtttatagggttacaaatgtcttctacccttgtcttttgtctgatgatgaaaaaattttcataagcatgtatttctgaatgcctgatggattgacatatataatatgctgctagtattaaaatatgtgacggaaaacacatcc

SEQ ID NO: 586730 - DNA, 440 bp, Homo sapiens
aaacagcaagagaaaatttaaatggatttctaaaaaatattgacacctatgatttttaaaatatgtttaagaaatcccgtatttcacagggcagcctttcacaacacagatatgttaggacataaaggtccttctgtttttaatttactagwgtttatagggttacaaatgtcttctacccttgtcttttgtctgatgatgaaaaaattttcataagcatgtatttctgaatgcctgatggattgacatatataatatgctgctagtattaaaatatgtgacggaaaacacatccaatcttctcactgtttacataaattctaggtttctcctatttacctcaagcacgtatggagcgaattcttaccttttaatattgccatggcattcacattgaacataagttgaactctctcttatggtagctgggttcagattcc

SEQ ID NO: 586731 - DNA, 440 bp, Homo sapiens
aaacagcaagagaaaatttaaatggatttctaaaaaatattgacacctatgatttttaaaatatgtttaagaaatcccgtatttcacagggcagcctttcacaacacagatatgttaggacataaaggtccttctgtttttaatttactagagtttatagggttacaaatgtcttctacccttgtcttttgtctgatgatgaaaaaattttcataagcatgtatttctgaatgcctgatggattgacatatataatatgctgctagtattaaaatatgtgacggaaaacrcatccaatcttctcactgtttacataaattctaggtttctcctatttacctcaagcacgtatggagcgaattcttaccttttaatattgccatggcattcacattgaacataagttgaactctctcttatggtagctgggttcagattcc

SEQ ID NO: 586732 - DNA, 530 bp, Homo sapiens
tcctccaacctgttccgtcccacaacatgtgggagttcaagatgagatttggctggggacacagctaaaccctcttctcagctaccctcttctctctggatctgtgagtaataaarccacttctgtgatttcccatgtttggtcctgtggcctccatgtgtctgagctgacctacactggaacctaactctcctcctggccagggtctctgagagtggctcttgtcagaaatacacagtacacaggtcaggcaacagtcaccaggcatctcctagtctcaacagatgttctgtgagagggaggcctggtcgtggggtgcacacctggccactgctggggtaaggaagtgtcctgtgaaaggcacatgttaagcatccacaatgccctgaccagaaccccagaaaggcagggctccaattgacagtcactctccagagacaaacctcaagccctaactggaggaaaagaaaacaatgtaaaaagttgaatttatcttactatttcaatgatccagtaaagacattttatgc

SEQ ID NO: 586733 - DNA, 530 bp, Homo sapiens
tcctccaacctgttccgtcccacaacatgtgggagttcaagatgagatttggctggggacacagctaaaccctcttctcagctaccctcttctctctggatctgtgagtaataaaaccacttctgtgatttcccatgtttggtcctgtggcctccatgtgtctgagctgacctacactggaacctaactctcctcctggccagggtctctgagagtggctcttgtcagaaatacacagkacacaggtcaggcaacagtcaccaggcatctcctagtctcaacagatgttctgtgagagggaggcctggtcgtggggtgcacacctggccactgctggggtaaggaagtgtcctgtgaaaggcacatgttaagcatccacaatgccctgaccagaaccccagaaaggcagggctccaattgacagtcactctccagagacaaacctcaagccctaactggaggaaaagaaaacaatgtaaaaagttgaatttatcttactatttcaatgatccagtaaagacattttatgc

SEQ ID NO: 586734 - DNA, 530 bp, Homo sapiens
tcctccaacctgttccgtcccacaacatgtgggagttcaagatgagatttggctggggacacagctaaaccctcttctcagctaccctcttctctctggatctgtgagtaataaaaccacttctgtgatttcccatgtttggtcctgtggcctccatgtgtctgagctgacctacactggaacctaactctcctcctggccagggtctctgagagtggctcttgtcagaaatacacagtacacaggtcaggcaacagtcaccaggcatctcctagtctcaacagatgttctgtgagagggaggcctggtcgtgggrtgcacacctggccactgctggggtaaggaagtgtcctgtgaaaggcacatgttaagcatccacaatgccctgaccagaaccccagaaaggcagggctccaattgacagtcactctccagagacaaacctcaagccctaactggaggaaaagaaaacaatgtaaaaagttgaatttatcttactatttcaatgatccagtaaagacattttatgc

SEQ ID NO: 586735 - DNA, 530 bp, Homo sapiens
tcctccaacctgttccgtcccacaacatgtgggagttcaagatgagatttggctggggacacagctaaaccctcttctcagctaccctcttctctctggatctgtgagtaataaaaccacttctgtgatttcccatgtttggtcctgtggcctccatgtgtctgagctgacctacactggaacctaactctcctcctggccagggtctctgagagtggctcttgtcagaaatacacagtacacaggtcaggcaacagtcaccaggcatctcctagtctcaacagatgttctgtgagagggaggcctggtcgtggggtgcacacctggccactgctggggtaaggaagtgtcctgtgaaaggcacatgttaagcatccacaaygccctgaccagaaccccagaaaggcagggctccaattgacagtcactctccagagacaaacctcaagccctaactggaggaaaagaaaacaatgtaaaaagttgaatttatcttactatttcaatgatccagtaaagacattttatgc

SEQ ID NO: 586736 - DNA, 444 bp, Homo sapiens
atcttactatttcaatgatccagtaaagacattytatgcctgtacaccacatattttcttcgattgtggatttattttagatagaattttatgtctggctttcactttagcctggtccctacctcaagcataaggtaaagattttccatgggttcttttctggtactactacctgccagtgtggagtcatgtcctagtctatcttgagggaattcccctgttcattattgtcagagtgagactgttaagtcttgatttccctggacaacttcactgcatgacttttaatatgattttttaatataccctttactgggcaataaattatatagttatctgagtaagagatatggtcaggaagaggcattgcctcattcaacttttctctttggtgaactcgcatatgttctcctcacccgccagtcacctctaaaccgtattgtt

SEQ ID NO: 586737 - DNA, 444 bp, Homo sapiens
atcttactatttcaatgatccagtaaagacattttatgcctgtacaccacatattttcttcgattgtggatttattttagatagaattttatgtctggctttcactttagcctggtccctacctcaagcataaggtaaagattttccatgggttcttttctggtactactacctgccagtgtggagtcatgtcctagtctatcttgagggaattcccctgttcattattgtcagagtgagactgttaagtcttgatttccctggacaacttcactgcatgacttttaatatgattttttaatataccctttactggrcaataaattatatagttatctgagtaagagatatggtcaggaagaggcattgcctcattcaacttttctctttggtgaactcgcatatgttctcctcacccgccagtcacctctaaaccgtattgtt

SEQ ID NO: 586738 - DNA, 596 bp, Homo sapiens
ctgatttttatttgtattatatatattttttgagatagggtctttctttgttgcccaggctggggtgtagtggtgcaatcactgcttactgcagattcaacctccccagctcaagcaatccttccaccttggcctcccaaatagccaggacaacaggtgcacatcaccatgcccaccttttttttttaacttttgatagagactgggtcttgctatgttgcccagattgctcttgaactcctgggctcaaggaatcctctcatttcagcctcttcaactgctggtattacaagcatgagccaccatatgggctggaagctgatttttaaaatactgagatcatatagatgacagcacctgaaaaatagacaacaccaagctttatgttaaaaggtgtgagggtatcaatattkttgtggctattggggaggaaaatattagtaaaaccagtgagttaaagctgttgctttaaactttggctttaattcaacaaatgttctctgtggtgatagtacgtatgtaaccatgctatgcccattcacagatgcagtagagggaagaatttctcaaagacaactgttctaagattgaaatta

SEQ ID NO: 586739 - DNA, 596 bp, Homo sapiens
ctgatttttatttgtattatatatattttttgagatagggtctttctttgttgcccaggctggggtgtagtggtgcaatcactgcttactgcagattcaacctccccagctcaagcaatccttccaccttggcctcccaaatagccaggacaacaggtgcacatcaccatgcccaccttttttttttaacttttgatagagactgggtcttgctatgttgcccagattgctcttgaactcctgggctcaaggaatcctctcatttcagcctcttcaactgctggtattacaagcatgagccaccatatgggctggaagctgatttttaaaatactgagatcatatagatgacagcacctgaaaaatagacaacaccaagctttatgttaaaaggtgtgagggtatcaatatttttgtggctattggggaggaaaayattagtaaaaccagtgagttaaagctgttgctttaaactttggctttaattcaacaaatgttctctgtggtgatagtacgtatgtaaccatgctatgcccattcacagatgcagtagagggaagaatttctcaaagacaactgttctaagattgaaatta

SEQ ID NO: 586740 - DNA, 596 bp, Homo sapiens
ctgatttttatttgtattatatatattttttgagatagggtctttctttgttgcccaggctggggtgtagtggtgcaatcactgcttactgcagattcaacctccccagctcaagcaatccttccaccttggcctcccaaatagccaggacaacaggtgcacatcaccatgcccaccttttttttttaacttttgatagagactgggtcttgctatgttgcccagattgctcttgaactcctgggctcaaggaatcctctcatttcagcctcttcaactgctggtattacaagcatgagccaccatatgggctggaagctgatttttaaaatactgagatcatatagatgacagcacctgaaaaatagacaacaccaagctttatgttaaaaggtgtgagggtatcaatatttttgtggctattggggaggaaaatattagtaaaaccagtgagttaaagctgttgctttaaactttggctttaattcaacaaatgttctctgtggtgatagtaygtatgtaaccatgctatgcccattcacagatgcagtagagggaagaatttctcaaagacaactgttctaagattgaaatta

SEQ ID NO: 586741 - DNA, 596 bp, Homo sapiens
ctgatttttatttgtattatatatattttttgagatagggtctttctttgttgcccaggctggggtgtagtggtgcaatcactgcttactgcagattcaacctccccagctcaagcaatccttccaccttggcctcccaaatagccaggacaacaggtgcacatcaccatgcccaccttttttttttaacttttgatagagactgggtcttgctatgttgcccagattgctcttgaactcctgggctcaaggaatcctctcatttcagcctcttcaactgctggtattacaagcatgagccaccatatgggctggaagctgatttttaaaatactgagatcatatagatgacagcacctgaaaaatagacaacaccaagctttatgttaaaaggtgtgagggtatcaatatttttgtggctattggggaggaaaatattagtaaaaccagtgagttaaagctgttgctttaaactttggctttaattcaacaaatgttctctgtggtgatagtacgtatgtaaccatgctawgcccattcacagatgcagtagagggaagaatttctcaaagacaactgttctaagattgaaatta

SEQ ID NO: 586742 - DNA, 547 bp, Homo sapiens
ttagagactgctgtgaattattatggtaataattggataacctagaaaaaaacaaattactggaaatatacaacaaacaacactgaatcaaaaagaaatacaaaatatgaacaaatctatagctagtaaggtgtttaaattagtamtcaaaaatcttccaacaaagaaaatctcaggtgcagatgactttactagagaattctgccaacatttaaggaagaattaatgccaatatttctcaaacattcctaaaaagttaaagaagaaagaactattctaaactctttttgtgaagctagtataaccctaatatcaaagccagacaatggtgctacaagaaaaaaaattaaatattcctaatgaatgtagatgcaaaatcctcaacaaataccagtaaattgaattcaacagcactataaagtatcatccaccataattatgatggatttgttcctggaatgcaagaagggttcaacatgtgcaaatcaatataatatgccacattaacaaaataactcaaataacgtgttcatctccgtagatggag

SEQ ID NO: 586743 - DNA, 547 bp, Homo sapiens
ttagagactgctgtgaattattatggtaataattggataacctagaaaaaaacaaattactggaaatatacaacaaacaacactgaatcaaaaagaaatacaaaatatgaacaaatctatagctagtaaggtgtttaaattagtaatcaaaaatcttccaasaaagaaaatctcaggtgcagatgactttactagagaattctgccaacatttaaggaagaattaatgccaatatttctcaaacattcctaaaaagttaaagaagaaagaactattctaaactctttttgtgaagctagtataaccctaatatcaaagccagacaatggtgctacaagaaaaaaaattaaatattcctaatgaatgtagatgcaaaatcctcaacaaataccagtaaattgaattcaacagcactataaagtatcatccaccataattatgatggatttgttcctggaatgcaagaagggttcaacatgtgcaaatcaatataatatgccacattaacaaaataactcaaataacgtgttcatctccgtagatggag

SEQ ID NO: 586744 - DNA, 547 bp, Homo sapiens
ttagagactgctgtgaattattatggtaataattggataacctagaaaaaaacaaattactggaaatatacaacaaacaacactgaatcaaaaagaaatacaaaatatgaacaaatctatagctagtaaggtgtttaaattagtaatcaaaaatcttccaacaaagaaaatctcaggtgcagatgactttactagagaattctgccaacatttaaggaagaattaatgccaatatttctcaaacattcctaaaaagttaaagaagaaagaactattctaaactctttttgtgaagctagtataaccctaatatcaaagccagacaatggtgctacaagaaaaaaaattaaatattcctaatgaatgtagatgcaaaatcctcaacaaataccagtaaattgaattcaacagcactataaagtatcatccaccataattatgatggatttgttcctggaatgcaagaagggttcaacatgtgcaaatcaatataatatgccacattaacaaaataaytcaaataacgtgttcatctccgtagatggag

SEQ ID NO: 586745 - DNA, 510 bp, Homo sapiens
atcatcttatatattaaaaaaaccctaaagattcaacaaaaagctcttggaactaataaaattaattcagcaaagttgcaggattcaaagtaaagattcaaaaaaacacaaacagcaaacattctgaaaaggaaattaagaaaacaatccatttgcaatggcatcaaactgaataaaatactttggaataaacttagccggtgggggaaagacttgtacactgaatactgcaaaatattgctgaaagaaattaaggaagacacaaataaatggaaagccatctcatttttgtgaattcaaagaatatttttaaattctaatactagccaaagmaatttacagatttgatgtaatcccttggaattgtataaattccaatgataattttagagaaatagaaaggacaattctaaaatccatatggaaccacaacggaccctgaatatccaaaacaatcctaagaaagagaaacagttagaggcctcacattttctgactttgaaatatact

SEQ ID NO: 586746 - DNA, 317 bp, Homo sapiens
taaacccacatgcatatagtcaaatgatctttgaygagggtgccaaaactatacaatggagaaaggataatttcttcaacaaatattgttgggaaaactggatatccatatgcaaaagaatgaaagtgaaccgttatcttaaaactgttcacaaatgttaactccaaatggattgaagacttaaatgtaagaactaaagctgtaaaactacaagaaaacataaagaaaggctttatcacattggtcgtggcaataattccttggatttgataccaaaagcacaggcaacaaaagcaaaaataggttagggtgattac

SEQ ID NO: 586747 - DNA, 564 bp, Homo sapiens
taatattcttatgtgagaaatagtggagggaatgagaggtggtcagccttaaactgccatttgctctctgtatcagggctcagggactttcagactctccagggattccttacagtttttacattcgtttctcagttgcaaacataatctcttcactctatgagaactctagatctgaatccttgttatgagtcaggagtcctctctagtttactctcttgtcagtaactagacttgaaatgttttgatattaattgatatagtaataagattggttagagaaatagcaaagagagagcatccccatcctatgaccatatcagcaccagaagagaaaaacacatctacacagtttttcccttggcataggtcytggtattctgttagggaacaggttatgaaggaaatacaaagggtctttgtacttactttcagaatgtattttctttaacatgaaaagaatccaaggcctttttgcttctaattgctttttgtgtatctactaccatcccttgctaaattattgataggtttcctcaaatctcggcatgatgtcctacattc

SEQ ID NO: 586748 - DNA, 564 bp, Homo sapiens
taatattcttatgtgagaaatagtggagggaatgagaggtggtcagccttaaactgccatttgctctctgtatcagggctcagggactttcagactctccagggattccttacagtttttacattcgtttctcagttgcaaacataatctcttcactctatgagaactctagatctgaatccttgttatgagtcaggagtcctctctagtttactctcttgtcagtaactagacttgaaatgttttgatattaattgatatagtaataagattggttagagaaatagcaaagagagagcatccccatcctatgaccatatcagcaccagaagagaaaaacacatctacacagtttttcccttggcataggtcctggtattctgttagggaacaggttatgaaggaaatacaaagggtctttgtacttactttcagaatgtattttctttaacatgaaaagaatccaaggcctttttgcttctaattgctttttgtgtrtctactaccatcccttgctaaattattgataggtttcctcaaatctcggcatgatgtcctacattc

SEQ ID NO: 586749 - DNA, 458 bp, Homo sapiens
tctgaccatctgaatctgaatyggactatagtggatggactgatgctaccctgcagccttacttccttaactttgtttccccaggccctaatataaaccccaggaaaacaggcatacagctgtatgcatttggcagattactatccatttcattgttcagttgttctggaaaggcaccgaatgcaactgtagcctggaaacatttggaaaaatggtactgttcctgatatctttgtttcttcctaggtgacagttgaaggtgactttcctttgtacagttctgcctgctgttagcaattttccaaaattaaataccatattttgtgtttgataggcacagctgtgtctgttaccaagggcaagcccacttgcacaacactctgtgttcatttatatactgagaactttatttagaacccagttttacagaaaaaaatcaagttgggtgaaccaatttt

SEQ ID NO: 586750 - DNA, 458 bp, Homo sapiens
tctgaccatctgaatctgaatcggactmtagtggatggactgatgctaccctgcagccttacttccttaactttgtttccccaggccctaatataaaccccaggaaaacaggcatacagctgtatgcatttggcagattactatccatttcattgttcagttgttctggaaaggcaccgaatgcaactgtagcctggaaacatttggaaaaatggtactgttcctgatatctttgtttcttcctaggtgacagttgaaggtgactttcctttgtacagttctgcctgctgttagcaattttccaaaattaaataccatattttgtgtttgataggcacagctgtgtctgttaccaagggcaagcccacttgcacaacactctgtgttcatttatatactgagaactttatttagaacccagttttacagaaaaaaatcaagttgggtgaaccaatttt

SEQ ID NO: 586751 - DNA, 593 bp, Homo sapiens
gcttgaactgagttgacattggtagttattatggactgcaaatccctcaaattcatatgatgaaatcctaactctcaatgtattggtattaggaggtaaacctttgggaggtaattaggtcatgaagatgaaaccctcaccaaaggaaagtagtgcccttctagaaagagatacaagagagatttttctctcctccatgtgaggataaaataagacagccatctgtaaaccaggaagacagccttcaccragaacccaaccatgctgactccctgatttcagatttacagcctacggatctgtgaaaaacaaatgtttattgttttactcgctcaatctgtgttttccgttatagcagcccacattgactaagaaaatactaaaccctttatttgatagataaagatagtatcagacaaggtatcatatgagtaaaaacctaagatttatgtgtgatcattttacattggagcagctactgaaacttgagacaaaaccactagctaacatcagtatgtcaacccaaaacatttgggacagtaatgaagatacagcaaatgaattgttttaatatataatcaaggcaaagttat

SEQ ID NO: 586752 - DNA, 542 bp, Homo sapiens
tcattttacattggagcagctactgaaacttgagacaaaaccactagctaacatcagtatgtcaacccaaaacatttgggacagtaatgaagatacagcaaatgaattgttttaatatataatcaaggcaaagttatcctcagaattataggaaaaaatccactaaatttggcttatgagaaatkcatggttcattgtataccttgatactgggcttaaagcagcaatcctaattccagatctaccttcaagtctgggtcagtgttctcaaatgctgccagtttcatgtcaggaccagcttaatattgaaggtaactgagcattgctaatgtctgactggagctgaaagaggccaaaagcagggttataactttgggaaaactgacctggtgttaacttccatgccttccatttcaaacgggaaggtatcacaattagaagctattaacagtcttatctaataaattgtggataatttcttttttttttttctttttttttaagagtcagggtctcactctgtcacctaggctggagtgcag

SEQ ID NO: 586753 - DNA, 542 bp, Homo sapiens
tcattttacattggagcagctactgaaacttgagacaaaaccactagctaacatcagtatgtcaacccaaaacatttgggacagtaatgaagatacagcaaatgaattgttttaatatataatcaaggcaaagttatcctcagaattataggaaaaaatccactaaatttggcttatgagaaatgcatggttcattgtataccttgatactgggcttaaagcagcaatcctaattccagatctaccttcaagtctgggtcagtgttctcaaatgctgccagtttcatgtcaggaccrgcttaatattgaaggtaactgagcattgctaatgtctgactggagctgaaagaggccaaaagcagggttataactttgggaaaactgacctggtgttaacttccatgccttccatttcaaacgggaaggtatcacaattagaagctattaacagtcttatctaataaattgtggataatttcttttttttttttctttttttttaagagtcagggtctcactctgtcacctaggctggagtgcag

SEQ ID NO: 586754 - DNA, 325 bp, Homo sapiens
gattagcacattgtcaataaatatttactaagctgaactgaaagtttttattatgcataaatactaagatgtccatgtccatggtcatgcaggacagcagaagataattttttttaccagtgtatctattgctaacaattgcttcaaggtcaggagccaactcatgtattagacatgtaaatcttgtgaaaatattcrtattggaaacagcatgtagcaagtgcaaacagaactaaataaatcctttaatttatcacagccccttcgaagtatgaattcttcttctagcattacatcaaatttgataaaatccaaaaatatttta

SEQ ID NO: 586755 - DNA, 325 bp, Homo sapiens
gattagcacattgtcaataaatatttactaagctgaactgaaagtttttattatgcataaatactaagatgtccatgtccatggtcatgcaggacagcagaagataattttttttaccagtgtatctattgctaacaattgcttcaaggtcaggagccaactcatgtattagacatgtaaatcttgtgaaaatattcgtattggaaacagcatgtagcaagtgcaaacagaactaaataaatcctttaatttatcacagycccttcgaagtatgaattcttcttctagcattacatcaaatttgataaaatccaaaaatatttta

SEQ ID NO: 586756 - DNA, 558 bp, Homo sapiens
gtcattttcacaatattgattctacccatccatgagcgtggtatgtatttccatttgtttgtgttgtctatgatttctgtcagcagtgttttgcagttttccttatagaggtctatcaccttcttggttaagtatattactaaatttttttgttgttatatttttgtggcattttgcagctattgttaaagrggttgagttcttgatttgattctcagcttggttgctgttggtgtatatcagcgctactgatttgcatacattaattttgtatcctgaaactttactgaattcatttaccagttttagaagcattttggatgagtctttaaggttttctaggtataagatcatatcatcagcaaacaagaacactttgacttcctttttactgatttggatgccctttatttttcttttgtctgattgctctggctaggacttccagtactatgctgaatacaagtggtgaaagtgggcatctttgtcttattccagttctcacggggaatgctttcaacttttccccattaagtataatgttggctgtgagtttgt

SEQ ID NO: 586757 - DNA, 558 bp, Homo sapiens
gtcattttcacaatattgattctacccatccatgagcgtggtatgtatttccatttgtttgtgttgtctatgatttctgtcagcagtgttttgcagttttccttatagaggtctatcaccttcttggttaagtatattactaaatttttttgttgttatatttttgtggcattttgcagctattgttaaaggggttgagttcttgatttgattctcagcttggttgctgttggtgtatatcagcgctactgatttgcatacattaattttgtatcctgaaactttactgaattcatttaccagttttagaagcattttggatgagtctttaaggttttctaggtataagatcatatyatcagcaaacaagaacactttgacttcctttttactgatttggatgccctttatttttcttttgtctgattgctctggctaggacttccagtactatgctgaatacaagtggtgaaagtgggcatctttgtcttattccagttctcacggggaatgctttcaacttttccccattaagtataatgttggctgtgagtttgt

SEQ ID NO: 586758 - DNA, 558 bp, Homo sapiens
gtcattttcacaatattgattctacccatccatgagcgtggtatgtatttccatttgtttgtgttgtctatgatttctgtcagcagtgttttgcagttttccttatagaggtctatcaccttcttggttaagtatattactaaatttttttgttgttatatttttgtggcattttgcagctattgttaaaggggttgagttcttgatttgattctcagcttggttgctgttggtgtatatcagcgctactgatttgcatacattaattttgtatcctgaaactttactgaattcatttaccagttttagaagcattttggatgagtctttaaggttttctaggtataagatcatatcatcagcaaacaagaacactttgacttcctttttactgatttggatgccctttatttttcttttgtctgattgctctggctaggacttccagtactatgytgaatacaagtggtgaaagtgggcatctttgtcttattccagttctcacggggaatgctttcaacttttccccattaagtataatgttggctgtgagtttgt

SEQ ID NO: 586759 - DNA, 592 bp, Homo sapiens
tggtgctgagaagaatgtatattctgttgatttrggtggagggttctgtagatgtctgttaggtctgcttggctcagagctgagttcaattcctggatatccttgttaactttctgtctcgttagtctcttaacactcataccatctcccttaccccccgtactccaagcatagatactattatccaacttttaagtatgaaaaaactgaaggctgcttagggcttaaaggtttaaattaaggctatgatttggatccagatctgcctgtctctaaagcatgagcttttcaacattacaataggctgtctcacttttcactgatatcagagtaaccttttttaaaccatgatgctgaacatattccatttccctgcataagtggattgcaactagtgtaggtttaagttcaaacttcttaccaggacatcaaagtttttaattacctgactctcacctgcatttctggcctgttgtattttcaatcactttctcaatgacttcttatattgcaggttaatcaggaatatataatcagcctgcctagaacatgactccatgtcttgcctatgttagactctcagcctggaaac

SEQ ID NO: 586760 - DNA, 638 bp, Homo sapiens
ggttatttgtgtctctatctccttccgttctgctcttagttatttcttgccttctgctagcttttgaatgtgtttactcttgcttctctagttcttttaactgtgatgttagggtgtcaattttagatctttcctgctttctcttgtgggcatttagtgctatacatttccctctacacacttctttaaatatgtcccagagattctagtatgttgtgtctttgttctcattggtttcaaagaacatctttatttctgccttcattttgttatgtacccagtagtcattcaggagcaggtttttcagtttccatgtagttgagcagttttgagtgagtttcttaatcctgagttctagtttgattgcactgtggtctgagagacagtttgttataatttctgttcttttacatttgctgaggaatgttttacttccaactatgtggtcaattttggaataagtgcgatgtggtgctgagaagaatgtatattctgttgatttgggtggagrgttctgtagatgtctgttaggtctgcttggctcagagctgagttcaattcctggatatccttgttaactttctgtctcgttagtctcttaacactcataccatctcccttaccccccgtactccaag

SEQ ID NO: 586761 - DNA, 638 bp, Homo sapiens
ggttatttgtgtctctatctccttccgttctgctcttagttatttcttgccttctgctagcttttgaatgtgtttactcttgcttctctagttcttttaactgtgatgttagggtgtcaattttagatctttcctgctttctcttgtgggcatttagtgctatacatttccctctacacacttctttaaatatgtcccagagattctagtatgttgtgtctttgttctcattggtttcaaagaacatctttatttctgccttcattttgttatgtacccagtagtcattcaggagcaggtttttcagtttccatgtagttgagcagttttgagtgagtttcttaatcctgagttctagtttgattgcactgtggtctgagagacagtttgttataatttctgttcttttacatttgctgaggaatgttttacttccaactatgtggtcaattttggaataagtgcgatgtggtgctgagaagaatgtatattctgttgatttgggtggagggttctgtagatgtctrttaggtctgcttggctcagagctgagttcaattcctggatatccttgttaactttctgtctcgttagtctcttaacactcataccatctcccttaccccccgtactccaag

SEQ ID NO: 586762 - DNA, 627 bp, Homo sapiens
agttttgagtgagtttcttaatcctgagttctagtttgattgcactgtggtctgagagacagtttgttataatttctgttcttttacatttgctgaggaatgttttacttccaactatgtggtcaattttggaataagtgcgatgtggtgctgagaagaatgtatattctgttgatttgggtggagggttctgtagatgtctgttaggtctgcttggctcagagctgagttcaattcctggatatccttgttaactttctgtctcgttagtctcttaacactcataccatctcccttaccccccgtactccaagcatagatactattatccaacttttaagtatgaaaaaactgaaggctgcttagggcttaaaggtttaaattaaggctatgatttggrtccagatctgcctgtctctaaagcatgagcttttcaacattacaataggctgtctcacttttcactgatatcagagtaaccttttttaaaccatgatgctgaacatattccatttccctgcataagtggattgcaactagtgtaggtttaagttcaaacttcttaccaggacatcaaagtttttaattacctgactctcacctgcatttctggcctgttgtattttc

SEQ ID NO: 586763 - DNA, 627 bp, Homo sapiens
agttttgagtgagtttcttaatcctgagttctagtttgattgcactgtggtctgagagacagtttgttataatttctgttcttttacatttgctgaggaatgttttacttccaactatgtggtcaattttggaataagtgcgatgtggtgctgagaagaatgtatattctgttgatttgggtggagggttctgtagatgtctgttaggtctgcttggctcagagctgagttcaattcctggatatccttgttaactttctgtctcgttagtctcttaacactcataccatctcccttaccccccgtactccaagcatagatactattatccaacttttaagtatgaaaaaactgaaggctgcttagggcttaaaggtttaaattaaggctatgatttggatccagatctgcctgtctctaaagcatgagcttttcaacattacaataggctgtctcacttttcactgatatcagagtaaccttttttaaaccatgrtgctgaacatattccatttccctgcataagtggattgcaactagtgtaggtttaagttcaaacttcttaccaggacatcaaagtttttaattacctgactctcacctgcatttctggcctgttgtattttc

SEQ ID NO: 586764 - DNA, 597 bp, Homo sapiens
aaggggaaaaagcaccactcactaacaggagaacaagacatgggaaacctccccccaattcaattatctcccactgggttcctcccatgacatgtgtggattatgggaagtacaattcaacatgagatttgggtggggacacagccaactcataccatcatccaccacatcaaacccactaagtgagctacatttttgctgygtgggatgaaaatgtccacacagcacagagaagaatatgtgcttcatagagtaatgatagtcagcttaacaaaagatgcttccgtgagaggctgatggtcagccctgagatcagtaaccagaagccgtggcttccagaaggctgcctggatctggttagtgaggatttcagtagtgaagtgaccagcaataggagtacctccagtggcagaagcgaacttcagcacagcccactggccaggattcctggatgacctgacattgacatcagcagagttttcaagggcaacaatggcataagctgtcagcagaagcttctcccaggtcctcttcagatttaggatgtagatgtcatcagttttccttttatagatgtactgttccatttggaagggt

SEQ ID NO: 586765 - DNA, 597 bp, Homo sapiens
aaggggaaaaagcaccactcactaacaggagaacaagacatgggaaacctccccccaattcaattatctcccactgggttcctcccatgacatgtgtggattatgggaagtacaattcaacatgagatttgggtggggacacagccaactcataccatcatccaccacatcaaacccactaagtgagctacatttttgctgcgtgggatgaaaatgtccacacagcacagagaagaatatgtgcttcatagagtaatgatagtcagcttaacaaaagatgcttcygtgagaggctgatggtcagccctgagatcagtaaccagaagccgtggcttccagaaggctgcctggatctggttagtgaggatttcagtagtgaagtgaccagcaataggagtacctccagtggcagaagcgaacttcagcacagcccactggccaggattcctggatgacctgacattgacatcagcagagttttcaagggcaacaatggcataagctgtcagcagaagcttctcccaggtcctcttcagatttaggatgtagatgtcatcagttttccttttatagatgtactgttccatttggaagggt

SEQ ID NO: 586766 - DNA, 597 bp, Homo sapiens
aaggggaaaaagcaccactcactaacaggagaacaagacatgggaaacctccccccaattcaattatctcccactgggttcctcccatgacatgtgtggattatgggaagtacaattcaacatgagatttgggtggggacacagccaactcataccatcatccaccacatcaaacccactaagtgagctacatttttgctgcgtgggatgaaaatgtccacacagcacagagaagaatatgtgcttcatagagtaatgatagtcagcttaacaaaagatgcttccgtgagaggctgatggtcagccctgagatcagtaaccagaagccgtggcttccagaaggctgcctggatctggttartgaggatttcagtagtgaagtgaccagcaataggagtacctccagtggcagaagcgaacttcagcacagcccactggccaggattcctggatgacctgacattgacatcagcagagttttcaagggcaacaatggcataagctgtcagcagaagcttctcccaggtcctcttcagatttaggatgtagatgtcatcagttttccttttatagatgtactgttccatttggaagggt

SEQ ID NO: 586767 - DNA, 576 bp, Homo sapiens
agaaataaagtaccaatacgtacatgaaccttgatagcattatgccaactgaaagaagccaggcagaaaaggccacctattgtatgattctatttagatgaaaacagaatagkaaagtctatagagaaagaaaacagatttgtggttgcttaggattgagtaggggatgagtgtataggatgttaacagctagagaaggtggggtttctttttgaagtgatgaaaatgctctaaaattcattgtgatgatggctccacttatctgtgcatatactaaaagtcactgacttgtagacattaatgtgtgcactctacactatgtaaattttatctcaataaatcctttaaaaaatacacagaagagtaaggggttttggaaagttgcagctgggaggcagtttgaaatactgaataggcctcatcgagaatgtgaagtttcagtaaagacttgaggaagttgaatgagctgatcaatggatatatggagggctatctttccaagccaagaaattaactagagtcttggtcataaggcagcagcgtgttggcatgtccagaggacagtgaggtggccag

SEQ ID NO: 586768 - DNA, 576 bp, Homo sapiens
agaaataaagtaccaatacgtacatgaaccttgatagcattatgccaactgaaagaagccaggcagaaaaggccacctattgtatgattctatttagatgaaaacagaatagtaaagtytatagagaaagaaaacagatttgtggttgcttaggattgagtaggggatgagtgtataggatgttaacagctagagaaggtggggtttctttttgaagtgatgaaaatgctctaaaattcattgtgatgatggctccacttatctgtgcatatactaaaagtcactgacttgtagacattaatgtgtgcactctacactatgtaaattttatctcaataaatcctttaaaaaatacacagaagagtaaggggttttggaaagttgcagctgggaggcagtttgaaatactgaataggcctcatcgagaatgtgaagtttcagtaaagacttgaggaagttgaatgagctgatcaatggatatatggagggctatctttccaagccaagaaattaactagagtcttggtcataaggcagcagcgtgttggcatgtccagaggacagtgaggtggccag

SEQ ID NO: 586769 - DNA, 576 bp, Homo sapiens
agaaataaagtaccaatacgtacatgaaccttgatagcattatgccaactgaaagaagccaggcagaaaaggccacctattgtatgattctatttagatgaaaacagaatagtaaagtctatagagaaagaaaacagatttgtggttgcttaggattgagtargggatgagtgtataggatgttaacagctagagaaggtggggtttctttttgaagtgatgaaaatgctctaaaattcattgtgatgatggctccacttatctgtgcatatactaaaagtcactgacttgtagacattaatgtgtgcactctacactatgtaaattttatctcaataaatcctttaaaaaatacacagaagagtaaggggttttggaaagttgcagctgggaggcagtttgaaatactgaataggcctcatcgagaatgtgaagtttcagtaaagacttgaggaagttgaatgagctgatcaatggatatatggagggctatctttccaagccaagaaattaactagagtcttggtcataaggcagcagcgtgttggcatgtccagaggacagtgaggtggccag

SEQ ID NO: 586770 - DNA, 573 bp, Homo sapiens
acttttcagtcatcttttcttcccttagtatatagttctatarattccatgacatatatagattagtgtatcactacaatcaagatagagtactgttctatcaacataaagaaatttattttttaatagtcacaaccctccacttcctcataccataacccctaataaccactgatctgttctccatccctacatttcatcatatttaggcttttaaataaatagaatcacacagtaagtaaccttttgagataggcttttttcccacttagcctcaatatatattcaagttattgtgtctattaatagcttattctttttcatttctgagtagtattctgttgtaatgatgtaccacagtttgtttattcattcattcattgaacgacaattgagtttttccagattagggctattacaaataaagttcctatgcattttagtgttctggtttttcgtgaatgtaagtttccatttctctgagataaacactaaagattgtgatttatatgtcatgtgataaagatatggttaactttataaaagactgccaaactgtttttcagaataaat

SEQ ID NO: 586771 - DNA, 576 bp, Homo sapiens
agaaataaagtaccaatacgtacatgaaccttgatagcattatgccaactgaaagaagccaggcagaaaaggccacctattgtatgattctatttagatgaaaacagaatagtaaagtctatagagaaagaaaacagatttgtggttgcttaggattgagtaggggatgagtgtataggatgttaacagctagagaaggtggggtttctttttgaagtgatgaaaatgctctaaaattcattgtgatgatggctccacttatctgtgcatatactaaaagycactgacttgtagacattaatgtgtgcactctacactatgtaaattttatctcaataaatcctttaaaaaatacacagaagagtaaggggttttggaaagttgcagctgggaggcagtttgaaatactgaataggcctcatcgagaatgtgaagtttcagtaaagacttgaggaagttgaatgagctgatcaatggatatatggagggctatctttccaagccaagaaattaactagagtcttggtcataaggcagcagcgtgttggcatgtccagaggacagtgaggtggccag

SEQ ID NO: 586772 - DNA, 614 bp, Homo sapiens
caacaatgaggctgggcaccgtggctcactcctataatcccagcactttgggaggccaaggtaggcagatcacttgaggtcagcagttygagaccagcctgtccaatatgttgaaactgcatctccactaaaaatacaaaaattagccaggcgtggtggcagggccctgtagtcccagctactcgggaggctgaggcaggagaatcgcttgaacccaggaggcagaggttgcagtgagccgagatcacaccacacgccactacactccagcctgggtgacagagcgagactccatctccaaaaaaaaaaaaaaaaaaaaatcaactatgaagttcaacaattgcaaaatgtttaatcaaaagagtttatcaagagaatgaaaaagaatgtagctattagaatttataaagctataaactatatcagtatagaaaaagatatattggaagaaataaaacagtcggtacttttaatgtattcatttttttctcccaatgtatcaaatattgaataaaaacatatatgcacgaaatatggtgctataatcaaatggatactcaataaatactatcaatatattgcggcttgaggtgataaaaatatacagacaggtc

SEQ ID NO: 586773 - DNA, 458 bp, Homo sapiens
ttgacctccatctgcctagaacagacataattttcttttcattcatttttggtgaaaaatataggctggtgtgattatttctgtgatgtaattcaataactaaaatgtacactcttgtctcaaagtcctcaacatcaccttgwcctaaactcctggtccaagaccaatctaccctccatcctcttgttgcctggatcccttttctttgtgggtatgaccattggagcactgaaaagatgatataagtgtcaggtgagttccatgttatacatttgatttatgagggaatgcaggctgctttgggaatttcctctggcaccttagccctttttctcctttccttttctccatattccaggaccatctgtaaaaggcagggatgagagagagttcaatgcctttctcctcctcttgataagaaggggtaggattatggataactacaactttgagaattc

SEQ ID NO: 586774 - DNA, 458 bp, Homo sapiens
ttgacctccatctgcctagaacagacataattttcttttcattcatttttggtgaaaaatataggctggtgtgattatttctgtgatgtaattcaataactaaaatgtacactcttgtctcaaagtcctcaacatcaccttgtcctaaactcckggtccaagaccaatctaccctccatcctcttgttgcctggatcccttttctttgtgggtatgaccattggagcactgaaaagatgatataagtgtcaggtgagttccatgttatacatttgatttatgagggaatgcaggctgctttgggaatttcctctggcaccttagccctttttctcctttccttttctccatattccaggaccatctgtaaaaggcagggatgagagagagttcaatgcctttctcctcctcttgataagaaggggtaggattatggataactacaactttgagaattc

SEQ ID NO: 586775 - DNA, 458 bp, Homo sapiens
ttgacctccatctgcctagaacagacataattttcttttcattcatttttggtgaaaaatataggctggtgtgattatttctgtgatgtaattcaataactaaaatgtacactcttgtctcaaagtcctcaacatcaccttgtcctaaactcctggtccaagaccaatctaccctccatcctcttgttgcctggatcccttttctttgtgggtatgaccattggagcactgaaaagatgatataagtgtcaggtgagttccatgttatacatttgatttatgagggaatgcaggctgctttgggaatttcctctggcaccttagccmtttttctcctttccttttctccatattccaggaccatctgtaaaaggcagggatgagagagagttcaatgcctttctcctcctcttgataagaaggggtaggattatggataactacaactttgagaattc

SEQ ID NO: 586776 - DNA, 546 bp, Homo sapiens
tatgtggattgtaaaaatgccagttagcttgcatctacatcaaagaaaaatgccatttttattayattagatcattgttttatatgagttttggtatagcacaatgttgaaccaagggcaaagagagatgaattaatgatatcttgattaagatatcaagaatttgaaagaaaaggcaggtcatctttgaaggttagtgacatagcattcatcttctgttgtcaccttttccatcatgccctgtatgcctgatggacaggtttcactcaagttcagagaacagcatgcaaaattagctaccaattaatctttatgaagtgagctgcatttcctgccagactgagcttatgttttagcaggaagcatttttgggaaatgtttatgttagagtttgcccttcttgacaaggtgagacataaatgtctactttatacacatgaattaagatgggaagatatttgggggaatcatttactcaaacgctaaataataaaggtacacaaagggcaaattatactagatttctttcccacttgttttgtatgt

SEQ ID NO: 586777 - DNA, 546 bp, Homo sapiens
tatgtggattgtaaaaatgccagttagcttgcatctacatcaaagaaaaatgccatttttattatattagatcattgttttrtatgagttttggtatagcacaatgttgaaccaagggcaaagagagatgaattaatgatatcttgattaagatatcaagaatttgaaagaaaaggcaggtcatctttgaaggttagtgacatagcattcatcttctgttgtcaccttttccatcatgccctgtatgcctgatggacaggtttcactcaagttcagagaacagcatgcaaaattagctaccaattaatctttatgaagtgagctgcatttcctgccagactgagcttatgttttagcaggaagcatttttgggaaatgtttatgttagagtttgcccttcttgacaaggtgagacataaatgtctactttatacacatgaattaagatgggaagatatttgggggaatcatttactcaaacgctaaataataaaggtacacaaagggcaaattatactagatttctttcccacttgttttgtatgt

SEQ ID NO: 586778 - DNA, 546 bp, Homo sapiens
tatgtggattgtaaaaatgccagttagcttgcatctacatcaaagaaaaatgccatttttattatattagatcattgttttayatgagttttggtatagcacaatgttgaaccaagggcaaagagagatgaattaatgatatcttgattaagatatcaagaatttgaaagaaaaggcaggtcatctttgaaggttagtgacatagcattcatcttctgttgtcaccttttccatcatgccctgtatgcctgatggacaggtttcactcaagttcagagaacagcatgcaaaattagctaccaattaatctttatgaagtgagctgcatttcctgccagactgagcttatgttttagcaggaagcatttttgggaaatgtttatgttagagtttgcccttcttgacaaggtgagacataaatgtctactttatacacatgaattaagatgggaagatatttgggggaatcatttactcaaacgctaaataataaaggtacacaaagggcaaattatactagatttctttcccacttgttttgtatgt

SEQ ID NO: 586779 - DNA, 546 bp, Homo sapiens
tatgtggattgtaaaaatgccagttagcttgcatctacatcaaagaaaaatgccatttttattatattagatcattgttttatatgagttttggtatagcacaatgttgaaccaagggcaaagagagatgaattaatgatatcttgaytaagatatcaagaatttgaaagaaaaggcaggtcatctttgaaggttagtgacatagcattcatcttctgttgtcaccttttccatcatgccctgtatgcctgatggacaggtttcactcaagttcagagaacagcatgcaaaattagctaccaattaatctttatgaagtgagctgcatttcctgccagactgagcttatgttttagcaggaagcatttttgggaaatgtttatgttagagtttgcccttcttgacaaggtgagacataaatgtctactttatacacatgaattaagatgggaagatatttgggggaatcatttactcaaacgctaaataataaaggtacacaaagggcaaattatactagatttctttcccacttgttttgtatgt

SEQ ID NO: 586780 - DNA, 550 bp, Homo sapiens
aaggaaatatgtggattgtaaaaatgccagttagcttgcatctacatcaaagaaaaatgccatttttattatattagatcattgttttatatgagttttggtatagcacaatgttgaaccaagggcaaagagagatgaattaatgatatcttgattaagatatcaagaatttgaaagaaaaggcaggtcatctttgaaggttagtgacatagcattcatcttctgttgtcaccttttccatcatgccctgtatgcctgatggacaggtttcactcaagttcagagaacagcatgcaaaattagctaccaattaatctttatgaagtgagctgcatttcctgccagactgagcttaygttttagcaggaagcatttttgggaaatgtttatgttagagtttgcccttcttgacaaggtgagacataaatgtctactttatacacatgaattaagatgggaagatatttgggggaatcatttactcaaacgctaaataataaaggtacacaaagggcaaattatactagatttctttcccacttgttttgta

SEQ ID NO: 586781 - DNA, 550 bp, Homo sapiens
aaggaaatatgtggattgtaaaaatgccagttagcttgcatctacatcaaagaaaaatgccatttttattatattagatcattgttttatatgagttttggtatagcacaatgttgaaccaagggcaaagagagatgaattaatgatatcttgattaagatatcaagaatttgaaagaaaaggcaggtcatctttgaaggttagtgacatagcattcatcttctgttgtcaccttttccatcatgccctgtatgcctgatggacaggtttcactcaagttcagagaacagcatgcaaaattagctaccaattaatctttatgaagtgagctgcatttcctgccagactgagcttatgttttagcaggaagcatttttgggaaatgtttatgttagagtttgcccttcttgacaaggtgagacataaatgtctactttatasacatgaattaagatgggaagatatttgggggaatcatttactcaaacgctaaataataaaggtacacaaagggcaaattatactagatttctttcccacttgttttgta

SEQ ID NO: 586782 - DNA, 353 bp, Homo sapiens
gctaaataataaaggtacacaaagggcaaattatactagatttctttcccacttgttttstatgtctcatgcaattcaccttgattcccttcagtttctgtttaatgtagaaagtggcattttccttattttaagcttctagcacaatgaaagaatttctctttttcatgaacaggatcataaatgaaagggaggaagagtgtcctatatcatatttattgttcaacaaaacactgctccatggcttaaattcagtttaaaaaagagaatttattggacatctaacacatacataaaagatagtaaagacaaatgagaagagcgcaggatattgaagtatacagatttcaatg

SEQ ID NO: 586783 - DNA, 353 bp, Homo sapiens
gctaaataataaaggtacacaaagggcaaattatactagatttctttcccacttgttttgtatgtctcatgcaattcaccttgattcccttcagtttctgtttaatgtagaaagtggcattttcmttattttaagcttctagcacaatgaaagaatttctctttttcatgaacaggatcataaatgaaagggaggaagagtgtcctatatcatatttattgttcaacaaaacactgctccatggcttaaattcagtttaaaaaagagaatttattggacatctaacacatacataaaagatagtaaagacaaatgagaagagcgcaggatattgaagtatacagatttcaatg

SEQ ID NO: 586784 - DNA, 564 bp, Homo sapiens
ggtttcactcaagttcagagaacagcatgcaaaattagctaccaattaatctttatgaagtgagctgcatttcctgccagactgagcttatgttttagcaggaagcatttttgggaaatgtttatgttagagtttgcccttcttgacaaggtgagacataaatgtctactttatacacatgaattaagatgggaagatatttgggggaatcatttactcaaacgctaaataataaaggtacacaaagggcaaattatactagatttctttcccacttgttttgtatgtctcatgcaattcaccttgattcccttcagtttctgtttaatgtagaaagtggcattttccttattttaagcttcwagcacaatgaaagaatttctctttttcatgaacaggatcataaatgaaagggaggaagagtgtcctatatcatatttattgttcaacaaaacactgctccatggcttaaattcagtttaaaaaagagaatttattggacatctaacacatacataaaagatagtaaagacaaatgagaagagcgcaggatattgaagtata

SEQ ID NO: 586785 - DNA, 564 bp, Homo sapiens
ggtttcactcaagttcagagaacagcatgcaaaattagctaccaattaatctttatgaagtgagctgcatttcctgccagactgagcttatgttttagcaggaagcatttttgggaaatgtttatgttagagtttgcccttcttgacaaggtgagacataaatgtctactttatacacatgaattaagatgggaagatatttgggggaatcatttactcaaacgctaaataataaaggtacacaaagggcaaattatactagatttctttcccacttgttttgtatgtctcatgcaattcaccttgattcccttcagtttctgtttaatgtagaaagtggcattttccttattttaagcttctagcacaatgaaagaatttctctttttcatgaacaggatcataaatgaaagggaggaagagtgtcctatatcatatttattgttcaacaaaacactgytccatggcttaaattcagtttaaaaaagagaatttattggacatctaacacatacataaaagatagtaaagacaaatgagaagagcgcaggatattgaagtata

SEQ ID NO: 586786 - DNA, 353 bp, Homo sapiens
gctaaataataaaggtacacaaagggcaaattatactagatttctttcccacttgttttgtatgtctcatgcaattcaccttgattcccttcagtttctgtttaatgtagaaagtggcattttccttattttaagcttctagcacaatgaaagaatttctctttttcatgaacaggatcataaatgaaagggaggaagagtgtcctatatcatatttattgttcaacaaaacactgctccatggcttaaattcagtttaaaaaagagaatttattgracatctaacacatacataaaagatagtaaagacaaatgagaagagcgcaggatattgaagtatacagatttcaatg

SEQ ID NO: 586787 - DNA, 318 bp, Homo sapiens
tttaaaaaagagaatttattggacatctaacacatacataaaagrtagtaaagacaaatgagaagagcgcaggatattgaagtatacagatttcaatgctgagttttatatcttaggaagttactccaccttacagaggctcaatttcccctgatttaggaaggcgatgctaatgggtattgcataggtgtaagtataaaaatgttgtatttaagagaatcccacaagcttggtataaggcagaaaataaatagatgtgacatgaataagtagtttattacatttgtattctacctgcggactagaggaagcaagaaa

SEQ ID NO: 586788 - DNA, 318 bp, Homo sapiens
tttaaaaaagagaatttattggacatctaacacatacataaaagayagtaaagacaaatgagaagagcgcaggatattgaagtatacagatttcaatgctgagttttatatcttaggaagttactccaccttacagaggctcaatttcccctgatttaggaaggcgatgctaatgggtattgcataggtgtaagtataaaaatgttgtatttaagagaatcccacaagcttggtataaggcagaaaataaatagatgtgacatgaataagtagtttattacatttgtattctacctgcggactagaggaagcaagaaa

SEQ ID NO: 586789 - DNA, 546 bp, Homo sapiens
tgccctagtgacagtgctcatatagctccaaattacagatggctctagactaactccacaaagtttaaagagaagatttaaaacaacaacagacaaatactcatcctgaagttactgaactgcctgccacaacattgttcaaaggtagccaataaaatctagatagtcaatagcataacatcaaaaaacyccccccaaaaaaaactctgacatgcaaagaagccgtaagatatatatacttaagacatatattaacaagataaaaataagtcatttataaatgacagaaaagaaggaaatttcaaggtccttaaagtaaacatattttataaatacatataggtaaatacatatatatgtcaaggcacttaaatgaaaattgaacatagaaaaatagaagttataaaatgaaaaatgtgacatgtatagatgaaaaataaatattagaaataaaaattccatgagatagaataagtaatggattttacccaaacatcagaaaatttatagaaaaaaatagaagctttacaaactaaaggacaaagg

SEQ ID NO: 586790 - DNA, 546 bp, Homo sapiens
tgccctagtgacagtgctcatatagctccaaattacagatggctctagactaactccacaaagtttaaagagaagatttaaaacaacaacagacaaatactcatcctgaagttactgaactgcctgccacaacattgttcaaaggtagccaataaaatctagatagtcaatagcataacatcaaaaaaccccccccaaaaaaaactctgacatgcaaagaagccgtaagatatatatacttaagacatatattaacaagataaaaataagtcatttataaatgacagaaaagaaggaaatttcaaggtccttaaagtaaacatattttataaatacatataggtaaatacatatatatgtcaaggcacttaaatgaaaattgaayatagaaaaatagaagttataaaatgaaaaatgtgacatgtatagatgaaaaataaatattagaaataaaaattccatgagatagaataagtaatggattttacccaaacatcagaaaatttatagaaaaaaatagaagctttacaaactaaaggacaaagg

SEQ ID NO: 586791 - DNA, 407 bp, Homo sapiens
  misc_feature 382, 383, 384, 385, 386, 387, 388, 389, 390, 391, 392, 393,394, 395, 396, 397, 398, 399, 400, 401, 402, 403, 404, 405,406, 407: n = A,T,C or G
atgtaattaacatctcaaaaaggatgggtgggggaattataggtgaataaagaatgctacactcattcctgagggcaccgaggagggaggatatctttatgatttctgagagggagggtattatccaytcatgaaggtccaaccccatgaccaaacaccttccagtaagccccacctgcaacattggggatcaaattttaacatgagattggaaggggcaagcattcaaaccatagcaagagttaaatttcctttttaaaaaaatcactgatatgattccatttcgccatagataaaagctagtatttcagcctaccattgagtgtgcttatagctcaccaaaagggcactctgtctcgggaatacagatttgcctgagagnnnnnnnnnnnnnnnnnnnnnnnnnn

SEQ ID NO: 586792 - DNA, 407 bp, Homo sapiens
  misc_feature 382, 383, 384, 385, 386, 387, 388, 389, 390, 391, 392, 393,394, 395, 396, 397, 398, 399, 400, 401, 402, 403, 404, 405,406, 407: n = A,T,C or G
atgtaattaacatctcaaaaaggatgggtgggggaattataggtgaataaagaatgctacactcattcctgagggcaccgaggagggaggatatctttatgatttctgagagggagggtattatccattcatgaaggtccaaccccatgaccaaacacctyccagtaagccccacctgcaacattggggatcaaattttaacatgagattggaaggggcaagcattcaaaccatagcaagagttaaatttcctttttaaaaaaatcactgatatgattccatttcgccatagataaaagctagtatttcagcctaccattgagtgtgcttatagctcaccaaaagggcactctgtctcgggaatacagatttgcctgagagnnnnnnnnnnnnnnnnnnnnnnnnnn

SEQ ID NO: 586793 - DNA, 407 bp, Homo sapiens
  misc_feature 382, 383, 384, 385, 386, 387, 388, 389, 390, 391, 392, 393,394, 395, 396, 397, 398, 399, 400, 401, 402, 403, 404, 405,406, 407: n = A,T,C or G
atgtaattaacatctcaaaaaggatgggtgggggaattataggtgaataaagaatgctacactcattcctgagggcaccgaggagggaggatatctttatgatttctgagagggagggtattatccattcatgaaggtccaaccccatgaccaaacaccttccagtragccccacctgcaacattggggatcaaattttaacatgagattggaaggggcaagcattcaaaccatagcaagagttaaatttcctttttaaaaaaatcactgatatgattccatttcgccatagataaaagctagtatttcagcctaccattgagtgtgcttatagctcaccaaaagggcactctgtctcgggaatacagatttgcctgagagnnnnnnnnnnnnnnnnnnnnnnnnnn

SEQ ID NO: 586794 - DNA, 407 bp, Homo sapiens
  misc_feature 382, 383, 384, 385, 386, 387, 388, 389, 390, 391, 392, 393,394, 395, 396, 397, 398, 399, 400, 401, 402, 403, 404, 405,406, 407: n = A,T,C or G
atgtaattaacatctcaaaaaggatgggtgggggaattataggtgaataaagaatgctacactcattcctgagggcaccgaggagggaggatatctttatgatttctgagagggagggtattatccattcatgaaggtccaaccccatgaccaaacaccttccagtaagccccacctgcaacattggggatcaaattttaacatgagattggaaggggcaagcattcaaaccatagcaagagttaaatttcctttttaaaaaaatcactgatatgattccatttcgccatagataaaagctagtatttcagcctaccrttgagtgtgcttatagctcaccaaaagggcactctgtctcgggaatacagatttgcctgagagnnnnnnnnnnnnnnnnnnnnnnnnnn

SEQ ID NO: 586795 - DNA, 629 bp, Homo sapiens
tgtattaactttctgatgcttttaaggatgttttataacaaattgtttagttttttccactggaatgtttattctgaatgatctaattcatattgtaaatatagagggagtttaatataaaattattaaactaawatttatgaaagaacgtatttgtgcatttaacaaatatgttaatcctcagactgttattgggcagctgagcatacagcaataaaaataacaatttttatgtgtataatatttatggaatacgttactggaacaaataaataatttagttaataacatgacaaagaacagaaattgtatacactatagagcatagtaatggaatagtgaatgattaaagttattaatattaggtagaaaatgaagggtatctttgagagcagatctcaaggaagcaagcaatttgccttatgaggaaagagttacctgtggataaaggagaaactgaaaaatttagaagtcaagactttttgagcaaaaacaaaaatatgactattagtcaccaattcagtacagtgaaaaaagagttgaagagatatcttggaagtaaaccatgttgtggaagagcatgtagggttttgataatcatgggatgattctgaattaattttaaatgc

SEQ ID NO: 586796 - DNA, 629 bp, Homo sapiens
tgtattaactttctgatgcttttaaggatgttttataacaaattgtttagttttttccactggaatgtttattctgaatgatctaattcatattgtaaatatagagggagtttaatataaaattattaaactaaaatttatgaaagaacgtatttgtgcatttaacaaatatgttaatcctcagactgttattgggcagctgagcatacagcaataaaaataacaatttttatgtgtataatatttatggaatacgttactggaacaaataaataatttagttaataacatgacaaagaacagaaattgtatacactatagagcatagtaatggaatartgaatgattaaagttattaatattaggtagaaaatgaagggtatctttgagagcagatctcaaggaagcaagcaatttgccttatgaggaaagagttacctgtggataaaggagaaactgaaaaatttagaagtcaagactttttgagcaaaaacaaaaatatgactattagtcaccaattcagtacagtgaaaaaagagttgaagagatatcttggaagtaaaccatgttgtggaagagcatgtagggttttgataatcatgggatgattctgaattaattttaaatgc

SEQ ID NO: 586797 - DNA, 375 bp, Homo sapiens
acagaaattgtatacactatagagcatagtaatggaatagtgaatgattaaagttattaatattaggtagaaaatgaagggtatctttgagagcagatctcaaggaagcaagcaatttgccttatgaggaaagagttacctgtggataaaggagaaactgaaaaatttasaagtcaagactttttgagcaaaaacaaaaatatgactattagtcaccaattcagtacagtgaaaaaagagttgaagagatatcttggaagtaaaccatgttgtggaagagcatgtagggttttgataatcatgggatgattctgaattaattttaaatgcgataggaatatatgagatactttcaccagagaataacatgattgt

SEQ ID NO: 586798 - DNA, 338 bp, Homo sapiens
gttttcagaacgaatgactttgggatcagaaagccatcattctaaytgatggttccaagactacacgggctcacactcccaagaccaaaagtaaatcatcacaaaggtgcttcctgataattctagagaatggagaattactgtaacatctttctgattttaggagaggtagcagttccctgtttagcctaaacgctattttttttaaagctcagccaagagactccattataattttcaaatgtgtgtaacttcaattctcatatgaaataccactatgcttaaattagtcaaaacattttccccatctacaactctatcttgtcattgcaatcatt

SEQ ID NO: 586799 - DNA, 338 bp, Homo sapiens
gttttcagaacgaatgactttgggatcagaaagccatcattctaattgatggttccaagactacacgggctcacactcccaagaccaraagtaaatcatcacaaaggtgcttcctgataattctagagaatggagaattactgtaacatctttctgattttaggagaggtagcagttccctgtttagcctaaacgctattttttttaaagctcagccaagagactccattataattttcaaatgtgtgtaacttcaattctcatatgaaataccactatgcttaaattagtcaaaacattttccccatctacaactctatcttgtcattgcaatcatt

SEQ ID NO: 586800 - DNA, 338 bp, Homo sapiens
gttttcagaacgaatgactttgggatcagaaagccatcattctaattgatggttccaagactacacgggctcacactcccaagaccaaaagtaaatcatcacaaaggtgcttcctgataattctagagaatggagaattactgtracatctttctgattttaggagaggtagcagttccctgtttagcctaaacgctattttttttaaagctcagccaagagactccattataattttcaaatgtgtgtaacttcaattctcatatgaaataccactatgcttaaattagtcaaaacattttccccatctacaactctatcttgtcattgcaatcatt

SEQ ID NO: 586801 - DNA, 261 bp, Homo sapiens
ttactgtaacatctttctgattttaggagaggtagcagttccctgtttagcctaaacgctattttttttaaagctcagccaagagactccattataattttcaaatgtgtgtaacttmaattctcatatgaaataccactatgcttaaattagtcaaaacattttccccatctacaactctatcttgtcattgcaatcattttcacaaaagtgactgcagctcacagaccctaaaaggagaaaatccagggtaggttatct

SEQ ID NO: 586802 - DNA, 519 bp, Homo sapiens
tataattttcaaatgtgtgtaacttcaattctcatatgaaataccactatgcttaaattagtcaaaacattttccccatctacaactctatcttgtcattgcaatcattttcacaaaagtgactgcagctcacagaccctaaaaggagaaaatccagggtaggttatctgatctagttagtttggaagacaggatctagagattatttaatatgaaatagktcacctgaaatgaagtgtttactgaaaacagcttggatcagcccagttttctaccactgaaccatgcatttggtttaaaaaacacaacaactctggggaatatcagccgcttccaactgtgttgaaggtgttaaagaaaagagcataaaattaaaaatgatcatctgaggcctttatagtctctgctcaagagactagaatcttccattcttaacgaaacaccgcaaatatcttaataattgggcaaaatctaaatatcagagagataattttatcttgaagattgttaaattataat

SEQ ID NO: 586803 - DNA, 519 bp, Homo sapiens
tataattttcaaatgtgtgtaacttcaattctcatatgaaataccactatgcttaaattagtcaaaacattttccccatctacaactctatcttgtcattgcaatcattttcacaaaagtgactgcagctcacagaccctaaaaggagaaaatccagggtaggttatctgatctagttagtttggaagacaggatctagagattatttaatatgaaatagttcacctgaaatgaagtgtttactgaaaacagcttggatcagcccagttttctaccactgaaccatgcatttggtttaaaaaacacaacaactctggggaatatcagcygcttccaactgtgttgaaggtgttaaagaaaagagcataaaattaaaaatgatcatctgaggcctttatagtctctgctcaagagactagaatcttccattcttaacgaaacaccgcaaatatcttaataattgggcaaaatctaaatatcagagagataattttatcttgaagattgttaaattataat

SEQ ID NO: 586804 - DNA, 519 bp, Homo sapiens
tataattttcaaatgtgtgtaacttcaattctcatatgaaataccactatgcttaaattagtcaaaacattttccccatctacaactctatcttgtcattgcaatcattttcacaaaagtgactgcagctcacagaccctaaaaggagaaaatccagggtaggttatctgatctagttagtttggaagacaggatctagagattatttaatatgaaatagttcacctgaaatgaagtgtttactgaaaacagcttggatcagcccagttttctaccactgaaccatgcatttggtttaaaaaacacaacaactctggggaatatcagccgcttccaactgtgttgaaggtgttaaagaaaagagcataaaattaaaaatgatcatctgaggcctttatagtctctgctcaagagactagaatcttccattcttaacgaaacaccgcaaatatcttaataattgggcaaaatctaaatatcagasagataattttatcttgaagattgttaaattataat

SEQ ID NO: 586805 - DNA, 585 bp, Homo sapiens
aagtggtccatgagattataatacatatttttacatacttttctatgtttaagtatgtttagatacataacctcttaccattgtgttcttattgcctgcagtattcagtacagtaatgtagtacacaggtttgtagcctgggagagagaggctataccatataacctagacgtggtaggctgtacaatctaggtgtttgtaatattccctgtgatgtttgcaaaatgatgaaattgcctayggatgcatctgttagaacgtatccctatcattcagtgatgtgtggctgtactaaaatgctcaatgtaagtttcaatgtcctccataaaactgttgtactgtgaaatacaaatctctcacccatggcctgaatatgtttgcaaactaagcagatcatgggaaggagaatgtgctggcatcgctgggatgattttctcacactacatgaataatatctacagacttagtgcatatgagccacttgcatagagttaaagtaggcatctctttgctgggaaatttatcaaatgggagtatgaaatgtttttaaaagatacttgtttgtttgtagctggtaggcataca

SEQ ID NO: 586806 - DNA, 299 bp, Homo sapiens
gatcacttgtttctgttgagttacagactcagctggctgtttctcccaatkttaattatttggagaaaaaaaacgtgatggtaattttggagtaacaaatacaatatttgatgaaagcaaatttattgagggttagacaaactacaagatactttaagctgcaaagtcaacacgagacttctggcccaaattgtgcagagtttgcgtccagctgcaaagttcaaaggaagaggccatataagacgattctcacttctgacaccaactgccagttcagggtttcccctgaacaccctcag

SEQ ID NO: 586807 - DNA, 299 bp, Homo sapiens
gatcacttgtttctgttgagttacagactcagctggctgtttctcccaattttarttatttggagaaaaaaaacgtgatggtaattttggagtaacaaatacaatatttgatgaaagcaaatttattgagggttagacaaactacaagatactttaagctgcaaagtcaacacgagacttctggcccaaattgtgcagagtttgcgtccagctgcaaagttcaaaggaagaggccatataagacgattctcacttctgacaccaactgccagttcagggtttcccctgaacaccctcag

SEQ ID NO: 586808 - DNA, 299 bp, Homo sapiens
gatcacttgtttctgttgagttacagactcagctggctgtttctcccaattttaattatttggagaaaaaaaacgtgatggtaattttggrgtaacaaatacaatatttgatgaaagcaaatttattgagggttagacaaactacaagatactttaagctgcaaagtcaacacgagacttctggcccaaattgtgcagagtttgcgtccagctgcaaagttcaaaggaagaggccatataagacgattctcacttctgacaccaactgccagttcagggtttcccctgaacaccctcag

SEQ ID NO: 586809 - DNA, 572 bp, Homo sapiens
aaactactataagtataaaygcaaaattccttaaaaaatactaacaaatcagaactagcaacatataaaagaattatacactatgacaaagtgaaatttatacaagtattcccaggttggtttaacagcccaaaatccattaaggtaatacatcttatccatagaataagaaacgagaattgcatgatcatctcgatagattcggaaaacacatttaacaaaatccaaatgctttaatgattaaaaataaaaataaaaactcaatgaaccaggaatagagaactttctacaccagatacatggcacctgtgaaaagccaacagcaagcatgcaacttaatggtaaaggatgctttcccgctatggtcagagataagaataggatatataatttgaactcttctagtcaatactgtactaaagattttatgcagggcaaatcggcaactaaaaaaataagaatcacccatattgaacaggaagaaataaaactttatttgaaaataacattcttgtatatagaaaatgttaaggaatccactgaacgatagaagtagtaaattatttcagcaa

SEQ ID NO: 586810 - DNA, 416 bp, Homo sapiens
aatacatcttatccatagaataagaaacgagaattgcatgatcatctcgatagattcggaaaasacatttaacaaaatccaaatgctttaatgattaaaaataaaaataaaaactcaatgaaccaggaatagagaactttctacaccagatacatggcacctgtgaaaagccaacagcaagcatgcaacttaatggtaaaggatgctttcccgctatggtcagagataagaataggatatataatttgaactcttctagtcaatactgtactaaagattttatgcagggcaaatcggcaactaaaaaaataagaatcacccatattgaacaggaagaaataaaactttatttgaaaataacattcttgtatatagaaaatgttaaggaatccactgaacgatagaagtagtaaatt

SEQ ID NO: 586811 - DNA, 572 bp, Homo sapiens
aaactactataagtataaacgcaaaattccttaaaaaatactaacaaatcagaactagcaacatataaaagaattatacactatgacaaagtgaaatttatacaagtattcccaggttggtttaacagcccaaaatccattaaggtaatacatcttatccatagaataagaaacgagaattgcatgatcatctcgatagattcggaaaacacatttaacaaaatccaaatgctttaatgattaaaaataaaaataaaaactcaatgaaccaggaatagagaactttctacaccagatacatgrcacctgtgaaaagccaacagcaagcatgcaacttaatggtaaaggatgctttcccgctatggtcagagataagaataggatatataatttgaactcttctagtcaatactgtactaaagattttatgcagggcaaatcggcaactaaaaaaataagaatcacccatattgaacaggaagaaataaaactttatttgaaaataacattcttgtatatagaaaatgttaaggaatccactgaacgatagaagtagtaaattatttcagcaa

SEQ ID NO: 586812 - DNA, 572 bp, Homo sapiens
aaactactataagtataaacgcaaaattccttaaaaaatactaacaaatcagaactagcaacatataaaagaattatacactatgacaaagtgaaatttatacaagtattcccaggttggtttaacagcccaaaatccattaaggtaatacatcttatccatagaataagaaacgagaattgcatgatcatctcgatagattcggaaaacacatttaacaaaatccaaatgctttaatgattaaaaataaaaataaaaactcaatgaaccaggaatagagaactttctacaccagatacatggcacctgtgaaaagccaacagcaagcatgcaacttaatggtaaaggatgctttcccgctatggtcagagataagaataggatatataatttgamctcttctagtcaatactgtactaaagattttatgcagggcaaatcggcaactaaaaaaataagaatcacccatattgaacaggaagaaataaaactttatttgaaaataacattcttgtatatagaaaatgttaaggaatccactgaacgatagaagtagtaaattatttcagcaa

SEQ ID NO: 586813 - DNA, 416 bp, Homo sapiens
aatacatcttatccatagaataagaaacgagaattgcatgatcatctcgatagattcggaaaacacatttaacaaaatccaaatgctttaatgattaaaaataaaaataaaaactcaatgaaccaggaatagagaactttctacaccagatacatggcacctgtgaaaagccaacagcaagcatgcaacttaatggtaaaggatgctttcccgctatggtcagagataagaataggatatataatttgaactcttctagtcaatactgtactaaagattttatgcagggcaaatcggcaactaaaaaaataagartcacccatattgaacaggaagaaataaaactttatttgaaaataacattcttgtatatagaaaatgttaaggaatccactgaacgatagaagtagtaaatt

SEQ ID NO: 586814 - DNA, 416 bp, Homo sapiens
aatacatcttatccatagaataagaaacgagaattgcatgatcatctcgatagattcggaaaacacatttaacaaaatccaaatgctttaatgattaaaaataaaaataaaaactcaatgaaccaggaatagagaactttctacaccagatacatggcacctgtgaaaagccaacagcaagcatgcaacttaatggtaaaggatgctttcccgctatggtcagagataagaataggatatataatttgaactcttctagtcaatactgtactaaagattttatgcagggcaaatcggcaactaaaaaaataagaatcayccatattgaacaggaagaaataaaactttatttgaaaataacattcttgtatatagaaaatgttaaggaatccactgaacgatagaagtagtaaatt

SEQ ID NO: 586815 - DNA, 345 bp, Homo sapiens
aaaactatgtgtctatggtcaatggattcttacagtggtgccatgtgcaattcaatgaggaagagacagtctttgaacaaactggttcaacaacgtacacgtggatcaccacttgcaaaataataaattggaacccttaccccaaagcatacaaaaatattaactcaaatgaattaaagacacacatgcaagagctagaataaaacatatgggaaaatcttcacgattttggatctagcaaagaaatagctgtaacatcaaaaacatgagcaacaaaataaaaattagatatttaaaatttsttaaaaattaaagacattggtgtttcaaaggacaaccaagcaa

SEQ ID NO: 586816 - DNA, 551 bp, Homo sapiens
aaaaaaaagccacctgaatgttcctactcagagctcctaccccacccccaccaaggcccgggccattaaaaagactcaatgcagcctttctgtatctcatactgtattctgcaagrtactcctgtgaaagaaagttgtgctgcatcagccatctccctcctgaagatccctgcggatgaggatttgtgttttgaaggttctgagaattcctgcaacaacaattctcaaacttatttgtccaggggatcttttcttccactgaatgtagttggggagacatggccttaagccttgagcagagaaagagataactgttggctcacttacaaccaagtgttgtgtttatgttttaggtttttatgaaactgaggtgctgtttgaggttctaaatgaaattgggtggttgaagagaggctggtgtccctgtagacttagccagccatgagtagttgccttttgttgaaggaggtgttttacaaagggaaatagggtgtctcctgggcatcgcattagcacttaaatacatgtatcactgaaatgaaatgaaatga

SEQ ID NO: 586817 - DNA, 551 bp, Homo sapiens
aaaaaaaagccacctgaatgttcctactcagagctcctaccccacccccaccaaggcccgggccattaaaaagactcaatgcagcctttctgtatctcatactgtattctgcaaggtactcctgtgaaagaaagttgtgctgcatcagccatctccctcctgaagatccctgcggatgaggatttgtgttttgaaggttctgagaattcctgcaacaacaattctcaaacttatttgtccaggggatcttttcttccactgaatgtagttggggagacayggccttaagccttgagcagagaaagagataactgttggctcacttacaaccaagtgttgtgtttatgttttaggtttttatgaaactgaggtgctgtttgaggttctaaatgaaattgggtggttgaagagaggctggtgtccctgtagacttagccagccatgagtagttgccttttgttgaaggaggtgttttacaaagggaaatagggtgtctcctgggcatcgcattagcacttaaatacatgtatcactgaaatgaaatgaaatga

SEQ ID NO: 586818 - DNA, 551 bp, Homo sapiens
aaaaaaaagccacctgaatgttcctactcagagctcctaccccacccccaccaaggcccgggccattaaaaagactcaatgcagcctttctgtatctcatactgtattctgcaaggtactcctgtgaaagaaagttgtgctgcatcagccatctccctcctgaagatccctgcggatgaggatttgtgttttgaaggttctgagaattcctgcaacaacaattctcaaacttatttgtccaggggatcttttcttccactgaatgtagttggggagacatggccttaagccttgagcagagaaagagataactgttggctcacttacaaccaagtgttgtgtttatgttttaggtttttatgaaactgaggtgctgtttgaggttctaartgaaattgggtggttgaagagaggctggtgtccctgtagacttagccagccatgagtagttgccttttgttgaaggaggtgttttacaaagggaaatagggtgtctcctgggcatcgcattagcacttaaatacatgtatcactgaaatgaaatgaaatga

SEQ ID NO: 586819 - DNA, 551 bp, Homo sapiens
aaaaaaaagccacctgaatgttcctactcagagctcctaccccacccccaccaaggcccgggccattaaaaagactcaatgcagcctttctgtatctcatactgtattctgcaaggtactcctgtgaaagaaagttgtgctgcatcagccatctccctcctgaagatccctgcggatgaggatttgtgttttgaaggttctgagaattcctgcaacaacaattctcaaacttatttgtccaggggatcttttcttccactgaatgtagttggggagacatggccttaagccttgagcagagaaagagataactgttggctcacttacaaccaagtgttgtgtttatgttttaggtttttatgaaactgaggtgctgtttgaggttctaaatgaaattgggtggttgaagagaggctggtgtccctgtagacttagccagccatgagtagttgccttttgttgaaggaggtgttttacaaagggaaatagggtgtctcctgggcatygcattagcacttaaatacatgtatcactgaaatgaaatgaaatga

SEQ ID NO: 586820 - DNA, 581 bp, Homo sapiens
cacatgaaacatcaggaatcggcaaatcaattgggatataaatcagattagtggtcattagggctcagggaagcagaatagggtgtaacaacttaatgcataatgggcttttagaagggacatgatgaaattatcctggaacattgtgaatattctgaaagcaattgcattgtatgttttaaaatggttaagttattaatttyatattatgtgatttttgccttagaaaacaaaaaagagaaaatagccttactgtatatacaaaaaactcaagatgtgttacaaatttatatgtgaaatccaaaatactgtaatatttaagggatagctaagtagaataacactaaaatttaacataatgaaatatttccttagaaaagaaaaaagcacagtaattaaaaagggaaatatagttaatattttttccctccattaagcataccattaactgattaaaaaatcaagctgcaattatgtaaactacattttctgaaaccataaagaaaataagaagtgaaaagggatttgggaaaaaaatccaaaggtacagtcaactacacaaaaaaagcttagtctcatta

SEQ ID NO: 586821 - DNA, 581 bp, Homo sapiens
cacatgaaacatcaggaatcggcaaatcaattgggatataaatcagattagtggtcattagggctcagggaagcagaatagggtgtaacaacttaatgcataatgggcttttagaagggacatgatgaaattatcctggaacattgtgaatattctgaaagcaattgcattgtatgttttaaaatggttaagttattaattttatattatgtgatttttgccttagaaaacaaaaaagagaaaatagccttactgtatatacaaaaaactcaagatgtgttacaaatttatatgtgaaatccaaaatactgtaatatttaagggatagctaagtagaataacactaaaatttaacataatgaaatatttccttaraaaagaaaaaagcacagtaattaaaaagggaaatatagttaatattttttccctccattaagcataccattaactgattaaaaaatcaagctgcaattatgtaaactacattttctgaaaccataaagaaaataagaagtgaaaagggatttgggaaaaaaatccaaaggtacagtcaactacacaaaaaaagcttagtctcatta

SEQ ID NO: 586822 - DNA, 581 bp, Homo sapiens
cacatgaaacatcaggaatcggcaaatcaattgggatataaatcagattagtggtcattagggctcagggaagcagaatagggtgtaacaacttaatgcataatgggcttttagaagggacatgatgaaattatcctggaacattgtgaatattctgaaagcaattgcattgtatgttttaaaatggttaagttattaattttatattatgtgatttttgccttagaaaacaaaaaagagaaaatagccttactgtatatacaaaaaactcaagatgtgttacaaatttatatgtgaaatccaaaatactgtaatatttaagggatagctaagtagaataacactaaaatttaacataatgaaatatttccttagaaaagaaaaaagcacagtaattaaaaagggaratatagttaatattttttccctccattaagcataccattaactgattaaaaaatcaagctgcaattatgtaaactacattttctgaaaccataaagaaaataagaagtgaaaagggatttgggaaaaaaatccaaaggtacagtcaactacacaaaaaaagcttagtctcatta

SEQ ID NO: 586823 - DNA, 581 bp, Homo sapiens
cacatgaaacatcaggaatcggcaaatcaattgggatataaatcagattagtggtcattagggctcagggaagcagaatagggtgtaacaacttaatgcataatgggcttttagaagggacatgatgaaattatcctggaacattgtgaatattctgaaagcaattgcattgtatgttttaaaatggttaagttattaattttatattatgtgatttttgccttagaaaacaaaaaagagaaaatagccttactgtatatacaaaaaactcaagatgtgttacaaatttatatgtgaaatccaaaatactgtaatatttaagggatagctaagtagaataacactaaaatttaacataatgaaatatttccttagaaaagaaaaaagcacagtaattaaaaagggaaatatagttaatattttttccctccattaagcataccattaactgattaaaaaatcaagctgcaattatgtaaactacattttctgaaaccataaagaaaataagaartgaaaagggatttgggaaaaaaatccaaaggtacagtcaactacacaaaaaaagcttagtctcatta

SEQ ID NO: 586824 - DNA, 185 bp, Homo sapiens
tttaaaaaatcaactctaaattttatatcttgctccaaatatatagagatacaaataggttatcatcaagatatggagaaagccatatcatggaaacactaaaataaagctgtggaaggackacattgatattagacacaacagagttcagaacaagaaatagtatcagagatgagagataatag

SEQ ID NO: 586825 - DNA, 357 bp, Homo sapiens
gaaatctttaaattccctttgccaatctttcttagatttgattttagcagagattcattttctctaggtcacaaaatcacagaagccttccacaaatggctacacaacatagagtccacatagagcagagactcagaatctcccaggatttgacatccacacatcagacagtcctagagtctcaggttttttctaggtcgatcgcctcataaatctgccttgtgatatttttattctaccttaggggaagaccattgtgtggatgatgagrgttgtttgtggaataaataatacacccactaaagacatcattgtcctaatatctggaatctatgatcattacttatgaatatgtca

SEQ ID NO: 586826 - DNA, 434 bp, Homo sapiens
ttccaaaaatttaggaaatctttaaattccctttgccaatctttcttagatttgattttagcagagattcattttctctaggtcacaaaatcacagaagccttccacaaatggctacacaacatagagtccacatagagcagagactcagaatctcccaggatttgacatccacacatcagacagtcctagagtctcaggttttttctaggtcgatcgcctcataaatctgccttgtgatatttttattctaccttaggggaagaccattgtgtggatgatgagagttgtttgtggaatraataatacacccactaaagacatcattgtcctaatatctggaatctatgatcattacttatgaatatgtcaaaaataacttggcagacatggttgagaatttgggggtcaggagagtatcctgaattatctggg

SEQ ID NO: 586827 - DNA, 534 bp, Homo sapiens
tgcttctctgtacactgtaggtttcatgtgcacttcttcaatcacaaaatttttcaccaatctatttatgtctagtatcagaaarttaagcaaggagattgcaaaccaacacaacacctttagtctggattttcccggagccccatttgtgttagtgtccttgggctactgtaacaagttctcaaaaatgtggtagcttcaaacaacaggaatggaatctctcatagttcagaagtccagatcagtttcactgggctaagatcttggagtcatcagttctggctccttctgaagctctagggagcagtctgatttagctcttccagcttctggtggcttctctctcccggaatgtggacacatcactgcaatctctgtctctgtgttcacattgccttctccacttcagtctatgctaaatgtctctctacctcttggtttttttaggacacttgagtttgcatttaagtcccagttgattaatctaagaatatctccctgtttcaagctccttaatttacacctgcaaaagct

SEQ ID NO: 586828 - DNA, 534 bp, Homo sapiens
tgcttctctgtacactgtaggtttcatgtgcacttcttcaatcacaaaatttttcaccaatctatttatgtctagtatcagaaaattaagcaaggagattgcaaaccaacacaacacctttagtctggattttcccggagccccatttgtgttagtgtccttgggctactgtaacaagttctcaaaaatgtggtagcttcaaacaacaggaatggaatctctcatagttcagaagtccagatcagtttcactgggctaagatcttggagtcatcagttctggctccttctgaagctctagggagcagtctgatttagctcttccagcttctggtggcttctctctcccggratgtggacacatcactgcaatctctgtctctgtgttcacattgccttctccacttcagtctatgctaaatgtctctctacctcttggtttttttaggacacttgagtttgcatttaagtcccagttgattaatctaagaatatctccctgtttcaagctccttaatttacacctgcaaaagct

SEQ ID NO: 586829 - DNA, 408 bp, Homo sapiens
caaggctgggctttcagtctcagcgcacagagcaggttccccactactccgcaccctggtgtctcctcccagatgttccacctcattcttgccttaagggctccaagttgttaatgggacagtagccctcttcctttcccagggtttctaagaatttggctctcttttgtgtattgtggggtttgtttgccatctagaggcagstttttggcatagcaacttacaggctttttctacttgtgatagtgaaaataaatacataaataaattcatcataaataataaattgacttaatgcattgaacctgtaaaaaaaaaataaggtcagtttgagagcttaaaaggagcctgatgaggttgaaaagacaaattacctttagtaaagagcagttggagcaatagatgatt

SEQ ID NO: 586830 - DNA, 606 bp, Homo sapiens
aattatggcataagggagttttaagaaaatagacaaaagaagttataaaattttagacattataaaatatttgttactgatattatgctatgtttttcatgctatcttaaagactttttatagatattattctatgctcacaactagattttgcaattccagyatgcccatgaatggaggaaacctccagttagcttggtaattaattagcttcttttgtgaaatgtccaagctgctaatttctgtctttttattttaaaatagaacaccttttgtttatttctctgagacacagatttctcctacaactccaagtaggagaaataaaaggagaaaaactccagaaagaactgttcggagttggttagaagattgtccagatgatctttattttaatgttgggaaaatatagatgcctatcttggaatcagcaaataaattatagtcatattaaatttcattctaaatttctgactttacggtttattttatatatataatatattatatataaataaaattttatatatgtatatctgtaaacatatgaaaccatgcatagtacataaaaactaggttcaagtaggaacccagtttactttgttt

SEQ ID NO: 586831 - DNA, 606 bp, Homo sapiens
aattatggcataagggagttttaagaaaatagacaaaagaagttataaaattttagacattataaaatatttgttactgatattatgctatgtttttcatgctatcttaaagactttttatagatattattctatgctcacaactagattttgcaattccagtatgcccatgaatggaggaaacctccagttagcttggtaattaattagcttcttttgtgaaatgtccaagctgctaatttctgtcyttttattttaaaatagaacaccttttgtttatttctctgagacacagatttctcctacaactccaagtaggagaaataaaaggagaaaaactccagaaagaactgttcggagttggttagaagattgtccagatgatctttattttaatgttgggaaaatatagatgcctatcttggaatcagcaaataaattatagtcatattaaatttcattctaaatttctgactttacggtttattttatatatataatatattatatataaataaaattttatatatgtatatctgtaaacatatgaaaccatgcatagtacataaaaactaggttcaagtaggaacccagtttactttgttt

SEQ ID NO: 586832 - DNA, 606 bp, Homo sapiens
aattatggcataagggagttttaagaaaatagacaaaagaagttataaaattttagacattataaaatatttgttactgatattatgctatgtttttcatgctatcttaaagactttttatagatattattctatgctcacaactagattttgcaattccagtatgcccatgaatggaggaaacctccagttagcttggtaattaattagcttcttttgtgaaatgtccaagctgctaatttctgtctttttattttaaaatagaacaccttttgtttatttctctgagacacagatttctcctacaactccaagtaggagaaataaaaggagaaaaactccagaaagaactgttyggagttggttagaagattgtccagatgatctttattttaatgttgggaaaatatagatgcctatcttggaatcagcaaataaattatagtcatattaaatttcattctaaatttctgactttacggtttattttatatatataatatattatatataaataaaattttatatatgtatatctgtaaacatatgaaaccatgcatagtacataaaaactaggttcaagtaggaacccagtttactttgttt

SEQ ID NO: 586833 - DNA, 606 bp, Homo sapiens
aattatggcataagggagttttaagaaaatagacaaaagaagttataaaattttagacattataaaatatttgttactgatattatgctatgtttttcatgctatcttaaagactttttatagatattattctatgctcacaactagattttgcaattccagtatgcccatgaatggaggaaacctccagttagcttggtaattaattagcttcttttgtgaaatgtccaagctgctaatttctgtctttttattttaaaatagaacaccttttgtttatttctctgagacacagatttctcctacaactccaagtaggagaaataaaaggagaaaaactccagaaagaactgttcggagttggttagaagattgtccagatgatctttattttaatgttgggaaaatatagatgcctatcttggaatcagcaaataaattatastcatattaaatttcattctaaatttctgactttacggtttattttatatatataatatattatatataaataaaattttatatatgtatatctgtaaacatatgaaaccatgcatagtacataaaaactaggttcaagtaggaacccagtttactttgttt

SEQ ID NO: 586834 - DNA, 605 bp, Homo sapiens
cgttctccagaagggcccattccagcctcacaggcygagaagtctgttcggttcccaagtactagagatgctgctataagggactcccgaatttccttcctgaaccagaggctgcccagccttttcttcctgttttattttttcccaggaagatacttgcctgtacaattacaaggttctacggttctaaattccaatctagtcttccacatcattttgaaggtataatattatttgtcaaagtgggatgatagaacataagtgtggacataaaattaaattgttgacaaggaaaaaaactaaaataagaaaataagagagaaaaaatatatgtatgtacagtggttagctagaaatatgccctttaaatatttggcatgtggtatgtgggcctcaatgtgtactattgcactagcttcccaaatattaaaggatgtcttttaaaagaaaaacctcttgctaaaaggttaacagttaaaataaccagagtggcacaggtaccagtcattaagtgaaacctttcatcttcccagaatagtacctgttcccaagccagcttcgttgaaaatcacttttctctcctttactatttagtttacagattg

SEQ ID NO: 586835 - DNA, 605 bp, Homo sapiens
cgttctccagaagggcccattccagcctcacaggctgagaagtctgttcggttcccaagtactagagatgctgctataagggactcccgaatttccttcctgaaccagaggctgcccagccttttcttcctgttttattttttcccaggaagatacttgcctgtacaattacaaggttctacggttctaaattccaatctagtcttccacatcattttgaaggtataatattatttgtcaaagtgggatgatagaasataagtgtggacataaaattaaattgttgacaaggaaaaaaactaaaataagaaaataagagagaaaaaatatatgtatgtacagtggttagctagaaatatgccctttaaatatttggcatgtggtatgtgggcctcaatgtgtactattgcactagcttcccaaatattaaaggatgtcttttaaaagaaaaacctcttgctaaaaggttaacagttaaaataaccagagtggcacaggtaccagtcattaagtgaaacctttcatcttcccagaatagtacctgttcccaagccagcttcgttgaaaatcacttttctctcctttactatttagtttacagattg

SEQ ID NO: 586836 - DNA, 588 bp, Homo sapiens
gtgtgtgtgtgtgtgtgtatgtgtgtgtggtgaatatatttctttttgttcagagcaaacattttttcaatatgtatatttattttaggcagattatgctagtaattttctacaaatgtgctttttaaaaaataacctttaatttaaaaaawatattcttactcagtggcccacaattgttaaaaatgctactaatggagctgggtatggtgacatacacctgtcatcccagctacttgggagactgaggcaggggtattgcttaaacttgggaatgtgaaaccagcctgggcaacatagtgagatctcaatctcaaaaatcaatcaatcattaaaaaataaaataaaacactactaatagctttttaaaaaatagttcttaaccaattttcctaacaccttcctttcctcactgaagtatagaaatatgtggtcaggcactgtggctcacacttataatcccaataatttgggaagccaaggcatgagggtcagttgattccaggagttcaagactagccagggtgacataaggatacttggtctctaacaaaaatttttttgttctttaattaccagggcatgatg

SEQ ID NO: 586837 - DNA, 588 bp, Homo sapiens
gtgtgtgtgtgtgtgtgtatgtgtgtgtggtgaatatatttctttttgttcagagcaaacattttttcaatatgtatatttattttaggcagattatgctagtaattttctacaaatgtgctttttaaaaaataacctttaatttaaaaaatatattcttactcagtggcccacaattgttaaaaaygctactaatggagctgggtatggtgacatacacctgtcatcccagctacttgggagactgaggcaggggtattgcttaaacttgggaatgtgaaaccagcctgggcaacatagtgagatctcaatctcaaaaatcaatcaatcattaaaaaataaaataaaacactactaatagctttttaaaaaatagttcttaaccaattttcctaacaccttcctttcctcactgaagtatagaaatatgtggtcaggcactgtggctcacacttataatcccaataatttgggaagccaaggcatgagggtcagttgattccaggagttcaagactagccagggtgacataaggatacttggtctctaacaaaaatttttttgttctttaattaccagggcatgatg

SEQ ID NO: 586838 - DNA, 588 bp, Homo sapiens
gtgtgtgtgtgtgtgtgtatgtgtgtgtggtgaatatatttctttttgttcagagcaaacattttttcaatatgtatatttattttaggcagattatgctagtaattttctacaaatgtgctttttaaaaaataacctttaatttaaaaaatatattcttactcagtggcccacaattgttaaaaatgctactaatggagctgggtatggtgacatacacctgtcatcccagctacttgggagactgaggcaggggtattgcttaaacttgggaatgtgaaaccagcctgggcaacatagtgagatcycaatctcaaaaatcaatcaatcattaaaaaataaaataaaacactactaatagctttttaaaaaatagttcttaaccaattttcctaacaccttcctttcctcactgaagtatagaaatatgtggtcaggcactgtggctcacacttataatcccaataatttgggaagccaaggcatgagggtcagttgattccaggagttcaagactagccagggtgacataaggatacttggtctctaacaaaaatttttttgttctttaattaccagggcatgatg

SEQ ID NO: 586839 - DNA, 588 bp, Homo sapiens
gtgtgtgtgtgtgtgtgtatgtgtgtgtggtgaatatatttctttttgttcagagcaaacattttttcaatatgtatatttattttaggcagattatgctagtaattttctacaaatgtgctttttaaaaaataacctttaatttaaaaaatatattcttactcagtggcccacaattgttaaaaatgctactaatggagctgggtatggtgacatacacctgtcatcccagctacttgggagactgaggcaggggtattgcttaaacttgggaatgtgaaaccagcctgggcaacatagtgagatctcaatctcaaaaatcaatcaatcattaaaaaataaaataaaacactactaatagctttttaaaaaatagttcttaaccaattttcctaacaccttcctttcctcactgaagtatagaaatatgtggtcaggcactgtggctcacacytataatcccaataatttgggaagccaaggcatgagggtcagttgattccaggagttcaagactagccagggtgacataaggatacttggtctctaacaaaaatttttttgttctttaattaccagggcatgatg

SEQ ID NO: 586840 - DNA, 384 bp, Homo sapiens
atgcctgtattttgttgctggccctataggaccaattatttaattcattaaactttccctttctcattcccaactctgtttacactaacttttctgcagttgcagtcagctttaccttccaaatctcccattaagttatatatttctgcaataaatttcttaatttttaagaattctatttttttgaatatccattttatatcacaccttgttcttgttgtattatcttatcttccctctctgaggaaattaataattacttttttcccacactgyatagactctgtttactttcagttgttttgtttattttttgtttctgtgtttgttattggctgtacctagaatctcatgattgtttgttatctgtttgcgttcaagagc

SEQ ID NO: 586841 - DNA, 384 bp, Homo sapiens
atgcctgtattttgttgctggccctataggaccaattatttaattcattaaactttccctttctcattcccaactctgtttacactaacttttctgcagttgcagtcagctttaccttccaaatctcccattaagttatatatttctgcaataaatttcttaatttttaagaattctatttttttgaatatccattttatatcacaccttgttcttgttgtattatcttatcttccctctctgaggaaattaataattacttttttcccacactgcatagrctctgtttactttcagttgttttgtttattttttgtttctgtgtttgttattggctgtacctagaatctcatgattgtttgttatctgtttgcgttcaagagc

SEQ ID NO: 586842 - DNA, 552 bp, Homo sapiens
aacagaagattacctatctggataccctagcttctccattcctgagcaagttgggaggccatggggtccaactctctcaatatgtactaagsaaacagagatacttttgccaaaggatattcttcttgatggtaaaaatattagctaacatttgttagctgacaaaaatgaagtatattaaatatgctaagggaaactgtggttcaagtgatagagatttttaattctttttgagatcatgtaattatacccatgacaaggtaagtttgattcagaataatttctgccaaaataaaggatgctgttgatggcctgcttgtcccctgcctattgactattattctcaaactcaagcaaaattaatttttaaataacaggataagaaatattagtaagctctgccttttgtgggtcaggttgaaagtatggaagaaattcagaaaggacatagtcaggaatagatgagaaaagaaaaatatatattattttggccattgatatggtttggctctgtgtccccacccaaatctcatcttgaattgtaatccccac

SEQ ID NO: 586843 - DNA, 552 bp, Homo sapiens
aacagaagattacctatctggataccctagcttctccattcctgagcaagttgggaggccatggggtccaactctctcaatatgtactaagcaaacagagatacttttgycaaaggatattcttcttgatggtaaaaatattagctaacatttgttagctgacaaaaatgaagtatattaaatatgctaagggaaactgtggttcaagtgatagagatttttaattctttttgagatcatgtaattatacccatgacaaggtaagtttgattcagaataatttctgccaaaataaaggatgctgttgatggcctgcttgtcccctgcctattgactattattctcaaactcaagcaaaattaatttttaaataacaggataagaaatattagtaagctctgccttttgtgggtcaggttgaaagtatggaagaaattcagaaaggacatagtcaggaatagatgagaaaagaaaaatatatattattttggccattgatatggtttggctctgtgtccccacccaaatctcatcttgaattgtaatccccac

SEQ ID NO: 586844 - DNA, 606 bp, Homo sapiens
tgcctcagcctctctagtagcgggactacaggcacccgccaccacgccaggctattttttttttatttttattagagacggggtttcaccttgttagtcaggatggtctcaatcttctgacctcgtgatccgcctgcctccaccttccaaagtgctgggaatacaggcgcaagccaccgcrcagggccaagactattgttttaaagtgtgaaaattgatattgaattcttgtgtttatataataagatgtcctataatttctgtttggaatataaaatcagcaactaatatgtattttcaaagcattataaatacagagtgctaagttacttcactgtgaaatgtagtcatataaagaacataataattatactggattatttttaaatgggctgtctaacattatattaaaaggtttcatcagtaattcattatatcaaaatgctccaggccaggcgtggtggcttatgcctgtaatcccagcactttgggaggtcgaagtgggcggatcacttgaggtcaggagatggagactagcctggccaacatgatgaaaccccgtgtctaataataaaaaaaaaaaaattagctgggtgtggtggtggg

SEQ ID NO: 586845 - DNA, 606 bp, Homo sapiens
tgcctcagcctctctagtagcgggactacaggcacccgccaccacgccaggctattttttttttatttttattagagacggggtttcaccttgttagtcaggatggtctcaatcttctgacctcgtgatccgcctgcctccaccttccaaagtgctgggaatacaggcgcaagccaccgcgcagggccaagactattgttttaaagtgtgaaaattgatattgaattcttgtgtttatataataagatgtcctataatttctgtttggaatataaaatcagcaactaatatgtattttcaaagcattataaatacagagtgctaagttacttcactgtgaaatgtagtcatataaagaacataataattatactggattatttttaaatgggctgtctaacattatattaaaaggtttcatcagtaattcattatatcaaaatgctccaggccaggcgtrgtggcttatgcctgtaatcccagcactttgggaggtcgaagtgggcggatcacttgaggtcaggagatggagactagcctggccaacatgatgaaaccccgtgtctaataataaaaaaaaaaaaattagctgggtgtggtggtggg

SEQ ID NO: 586846 - DNA, 357 bp, Homo sapiens
aagtatgcttacatttctataaacaatatcctttgactcccaggcattacagatgagcagtcagtaaaatcattctgaggaatgctttctctttccttttcttccatttttcttagttgtatcatttctatattgccagagcacctacagttgcatttctttctgtcagctttatccagcatttgtttttgtcttttatttgaagttaaatatattccttgytcactacaacactgggggaaggaaggtttctgttgtcattgttgtgcttgtacagttgtttatttaaaaacattggcgaaaacaaaaactgtatgtagatggagtggagataagacagcaaatgagagagactga

SEQ ID NO: 586847 - DNA, 407 bp, Homo sapiens
gctaaattttatataaagtataaatttaggtcagtcttagtttttgtacctgtgaatgtccaattgctctagcaccatttgttgaaaaagatatccttcctttaaactgattttgcatccttgtwaaaaaaaatcagatgaatatagtgtggtctgtcaccttttaataagataaaaacattggcactcaccagatatcgaagtttagaaatttttttaaagctaaacttctgaagatagaataaaaacaccttcacatgtcaaattagtcaatttgtataggactaattcatttaaatatattaaaatacaaaataattcaaaccactaaagtgataatacaagactataaatttaaaggctaattattaagtcaaattgctgtattctacgtgttagagtgagtt

SEQ ID NO: 586848 - DNA, 407 bp, Homo sapiens
gctaaattttatataaagtataaatttaggtcagtcttagtttttgtacctgtgaatgtccaattgctctagcaccatttgttgaaaaagatatccttcctttaaactgattttgcatccttgtaaaaaaaaatcagwtgaatatagtgtggtctgtcaccttttaataagataaaaacattggcactcaccagatatcgaagtttagaaatttttttaaagctaaacttctgaagatagaataaaaacaccttcacatgtcaaattagtcaatttgtataggactaattcatttaaatatattaaaatacaaaataattcaaaccactaaagtgataatacaagactataaatttaaaggctaattattaagtcaaattgctgtattctacgtgttagagtgagtt

SEQ ID NO: 586849 - DNA, 533 bp, Homo sapiens
tatataaagtataaatttaggtcagtcttagtttttgtacctgtgaatgtccaattgctctagcaccatttgttgaaaaagatatccttcctttaaactgattttgcatccttgtaaaaaaaaatcagatgaatatagtgtggtctgtcaccttttaataagataaaaacattggcactcaccagatatcgaagtttagaaatttttttaaagctaaacttctgaagatagaataaaaacaccttcacatgtcaaattagtcaatttgtataggactaattcatttaaatatattaaaatacaaaataattcaaaccactaaagtgataatacaagactataaatttaaaggctaattattaagtcaaattgctgtattctacktgttagagtgagttcaaaagatccattgtattactgaataggcaaaagttttaatttcagagaatgaaactgatatattactgccaccttgtggatattctgttattacaggctattataaaaagcaataagggtatgtaatctgttct

SEQ ID NO: 586850 - DNA, 565 bp, Homo sapiens
accatttgttgaaaaagatatccttcctttaaactgattttgcatccttgtaaaaaaaaatcagatgaatatagtgtggtctgtcaccttttaataagataaaaacattggcactcaccagatatcgaagtttagaaatttttttaaagctaaacttctgaagatagaataaaaacaccttcacatgtcaaattagtcaatttgtataggactaattcatttaaatatattaaaatacaaaataattcaaaccactaaagtgataatacaagactataaatttaaaggctaattattaagtcaaattgctgtattctacgtgttagagtgagttcaaaagatccattgtattactgaataggcaaaagttttaatttcagagratgaaactgatatattactgccaccttgtggatattctgttattacaggctattataaaaagcaataagggtatgtaatctgttctaacaagaagcgtttcctttttttgtcgcttttattattgttattattacgttttaagttctgagatacatgtacataacgtggaggtttgttacgt

SEQ ID NO: 586851 - DNA, 565 bp, Homo sapiens
accatttgttgaaaaagatatccttcctttaaactgattttgcatccttgtaaaaaaaaatcagatgaatatagtgtggtctgtcaccttttaataagataaaaacattggcactcaccagatatcgaagtttagaaatttttttaaagctaaacttctgaagatagaataaaaacaccttcacatgtcaaattagtcaatttgtataggactaattcatttaaatatattaaaatacaaaataattcaaaccactaaagtgataatacaagactataaatttaaaggctaattattaagtcaaattgctgtattctacgtgttagagtgagttcaaaagatccattgtattactgaataggcaaaagttttaatttcagagaatgaaactgatatattactgccaccttgtggatattctgttattacaggctattataaaaagcaatragggtatgtaatctgttctaacaagaagcgtttcctttttttgtcgcttttattattgttattattacgttttaagttctgagatacatgtacataacgtggaggtttgttacgt

SEQ ID NO: 586852 - DNA, 565 bp, Homo sapiens
accatttgttgaaaaagatatccttcctttaaactgattttgcatccttgtaaaaaaaaatcagatgaatatagtgtggtctgtcaccttttaataagataaaaacattggcactcaccagatatcgaagtttagaaatttttttaaagctaaacttctgaagatagaataaaaacaccttcacatgtcaaattagtcaatttgtataggactaattcatttaaatatattaaaatacaaaataattcaaaccactaaagtgataatacaagactataaatttaaaggctaattattaagtcaaattgctgtattctacgtgttagagtgagttcaaaagatccattgtattactgaataggcaaaagttttaatttcagagaatgaaactgatatattactgccaccttgtggatattctgttattacaggctattataaaaagcaataagggtatgtaatctgttctaacaagaagcgtttcctttttttgtcgyttttattattgttattattacgttttaagttctgagatacatgtacataacgtggaggtttgttacgt

SEQ ID NO: 586853 - DNA, 400 bp, Homo sapiens
tcctaatttcttaaatacaatgcaactttatgtttaatttaactaacttaattttttgagacaaggtctagctctgttgcccaggctggagtggagtggcgtgaatatggttcagtgaaacctccacctccctggctcaagtgatcctccttcttmagcctctcgagtagctaggaccacaggcacgcaccaccatggccagctaatttcttttttattttttatagagatgaggtctcactttgttgtccacgctggtctcaaactcctgggctcaaaggatcctcttgccatggccttccacagcgctgggatttataggtgtgtgccatggcaccaggcctaagcaactgtagagaagcctttttttctttcataaaaacagttgtagatattttcc

SEQ ID NO: 586854 - DNA, 583 bp, Homo sapiens
tccacctccctggctcaagtgatcctccttcttaagcctctcgagtagctaggaccacaggcacgcaccaccatggccagctaatttcttttttattttttrtagagatgaggtctcactttgttgtccacgctggtctcaaactcctgggctcaaaggatcctcttgccatggccttccacagcgctgggatttataggtgtgtgccatggcaccaggcctaagcaactgtagagaagcctttttttctttcataaaaacagttgtagatattttccttatggaatttatttgtggtgaaatattttaatagacaatttaatttgttaaataatttgtctcagataataataattgattaatattaaaactacaaaacaagtagggtcttctttttctatgaaaaatgaaagttgattctgacatttatgtaaacattttaaatattcaaagtatataaatgtgaagtcctatcaagagtaattagacaagagaaagaaataaagggcattcagatcggaaaggaggacatcaaattgttcctatttgcagatgacatgatcttatatataggaaaacctga

SEQ ID NO: 586855 - DNA, 583 bp, Homo sapiens
tccacctccctggctcaagtgatcctccttcttaagcctctcgagtagctaggaccacaggcacgcaccaccatggccagctaatttcttttttattttttatagagatgaggtctcactttgttgtccacgctggtctcaaactcctgggctcaaaggatcctcttgccatggcctyccacagcgctgggatttataggtgtgtgccatggcaccaggcctaagcaactgtagagaagcctttttttctttcataaaaacagttgtagatattttccttatggaatttatttgtggtgaaatattttaatagacaatttaatttgttaaataatttgtctcagataataataattgattaatattaaaactacaaaacaagtagggtcttctttttctatgaaaaatgaaagttgattctgacatttatgtaaacattttaaatattcaaagtatataaatgtgaagtcctatcaagagtaattagacaagagaaagaaataaagggcattcagatcggaaaggaggacatcaaattgttcctatttgcagatgacatgatcttatatataggaaaacctga

SEQ ID NO: 586856 - DNA, 300 bp, Homo sapiens
ccatggccttccacagcgctgggatttataggtgtgtgccatggcaccmggcctaagcaactgtagagaagcctttttttctttcataaaaacagttgtagatattttccttatggaatttatttgtggtgaaatattttaatagacaatttaatttgttaaataatttgtctcagataataataattgattaatattaaaactacaaaacaagtagggtcttctttttctatgaaaaatgaaagttgattctgacatttatgtaaacattttaaatattcaaagtatataaatgtgaag

SEQ ID NO: 586857 - DNA, 300 bp, Homo sapiens
ccatggccttccacagcgctgggatttataggtgtgtgccatggcaccaggcctamgcaactgtagagaagcctttttttctttcataaaaacagttgtagatattttccttatggaatttatttgtggtgaaatattttaatagacaatttaatttgttaaataatttgtctcagataataataattgattaatattaaaactacaaaacaagtagggtcttctttttctatgaaaaatgaaagttgattctgacatttatgtaaacattttaaatattcaaagtatataaatgtgaag

SEQ ID NO: 586858 - DNA, 300 bp, Homo sapiens
ccatggccttccacagcgctgggatttataggtgtgtgccatggcaccaggcctaagcaactgtagagaagccttttwttctttcataaaaacagttgtagatattttccttatggaatttatttgtggtgaaatattttaatagacaatttaatttgttaaataatttgtctcagataataataattgattaatattaaaactacaaaacaagtagggtcttctttttctatgaaaaatgaaagttgattctgacatttatgtaaacattttaaatattcaaagtatataaatgtgaag

SEQ ID NO: 586859 - DNA, 575 bp, Homo sapiens
tgttgtccacgctggtctcaaactcctgggctcaaaggatcctcttgccatggccttccacagcgctgggatttataggtgtgtgccatggcaccaggcctaagcaactgtagagaagcctttttttctttcataaaaacagttgtagatattttccttatggaatttatttgtggtgaaatattttaatagacartttaatttgttaaataatttgtctcagataataataattgattaatattaaaactacaaaacaagtagggtcttctttttctatgaaaaatgaaagttgattctgacatttatgtaaacattttaaatattcaaagtatataaatgtgaagtcctatcaagagtaattagacaagagaaagaaataaagggcattcagatcggaaaggaggacatcaaattgttcctatttgcagatgacatgatcttatatataggaaaacctgaagactctaccagaaaacttttagaacaaacaaattcaatgaagttgcaagacacaaaactaatacacaaagattggttgcatttatatttatgaacaacaaactcgctgaaaa

SEQ ID NO: 586860 - DNA, 583 bp, Homo sapiens
tccacctccctggctcaagtgatcctccttcttaagcctctcgagtagctaggaccacaggcacgcaccaccatggccagctaatttcttttttattttttatagagatgaggtctcactttgttgtccacgctggtctcaaactcctgggctcaaaggatcctcttgccatggccttccacagcgctgggatttataggtgtgtgccatggcaccaggcctaagcaactgtagagaagcctttttttctttcataaaaacagttgtagatattttccttatggaatttatttgtggtgaaatattttaatagacaatttaatttgttaaataatttgtctcagataataataattgattaatattaaaactacaaaacaagtaggrtcttctttttctatgaaaaatgaaagttgattctgacatttatgtaaacattttaaatattcaaagtatataaatgtgaagtcctatcaagagtaattagacaagagaaagaaataaagggcattcagatcggaaaggaggacatcaaattgttcctatttgcagatgacatgatcttatatataggaaaacctga

SEQ ID NO: 586861 - DNA, 583 bp, Homo sapiens
tccacctccctggctcaagtgatcctccttcttaagcctctcgagtagctaggaccacaggcacgcaccaccatggccagctaatttcttttttattttttatagagatgaggtctcactttgttgtccacgctggtctcaaactcctgggctcaaaggatcctcttgccatggccttccacagcgctgggatttataggtgtgtgccatggcaccaggcctaagcaactgtagagaagcctttttttctttcataaaaacagttgtagatattttccttatggaatttatttgtggtgaaatattttaatagacaatttaatttgttaaataatttgtctcagataataataattgattaatattaaaactacaaaacaagtagggtcttctttttctatgaaaaatgaaagttgattctgacatttatgtaaacattttaaatattcaaagtatataaatgtgaagtcctatcaagagtaattagacaagagaaagaaataaagggcattcaratcggaaaggaggacatcaaattgttcctatttgcagatgacatgatcttatatataggaaaacctga

SEQ ID NO: 586862 - DNA, 542 bp, Homo sapiens
aataaagaacccagaaaatccacatatctcagccaacagattttttacaaagatgccaagaacactcattgggraaaggatagtctcttcaataaatggtgctggaaaaactggatatccatatgcagaagaatgaaactagacctctgcctctcaccctatacaaaaatcaactcaaagtacctcaaatacccaaatataagacccaaaatggtaaagctactagaagaaaacataggggagatccttcaggacattgctctgggaaaatattttatgaataaggcatcaaaagcacaggcaacaaaagaaaaaataaacaaatgggatcacatcaagctaaaaatcttctgcacagcaaaggaaataataaagtgagtgaaaagacaacctacagaatgggagaaaatataaactcatctggcaggaaattaatatcaagaatatacaaggaattcaaacatatcaacagcaaagaagcacaacaatctaattaaatataaacaaatgctctgaacagacatttctcaaaagaagacata

SEQ ID NO: 586863 - DNA, 542 bp, Homo sapiens
aataaagaacccagaaaatccacatatctcagccaacagattttttacaaagatgccaagaacactcattgggaaaaggatagtctcttcaataaatggtgctggaaaaactggatatccatatgcagaagaatgaaactagacctctgcctctcaccctatacaaaaatcaactcaaagtayctcaaatacccaaatataagacccaaaatggtaaagctactagaagaaaacataggggagatccttcaggacattgctctgggaaaatattttatgaataaggcatcaaaagcacaggcaacaaaagaaaaaataaacaaatgggatcacatcaagctaaaaatcttctgcacagcaaaggaaataataaagtgagtgaaaagacaacctacagaatgggagaaaatataaactcatctggcaggaaattaatatcaagaatatacaaggaattcaaacatatcaacagcaaagaagcacaacaatctaattaaatataaacaaatgctctgaacagacatttctcaaaagaagacata

SEQ ID NO: 586864 - DNA, 484 bp, Homo sapiens
cctctgcctctcaccctatacaaaaatcaactcaaagtacctcaaatacccaaatataagacccmaaatggtaaagctactagaagaaaacataggggagatccttcaggacattgctctgggaaaatattttatgaataaggcatcaaaagcacaggcaacaaaagaaaaaataaacaaatgggatcacatcaagctaaaaatcttctgcacagcaaaggaaataataaagtgagtgaaaagacaacctacagaatgggagaaaatataaactcatctggcaggaaattaatatcaagaatatacaaggaattcaaacatatcaacagcaaagaagcacaacaatctaattaaatataaacaaatgctctgaacagacatttctcaaaagaagacatacaaatgaccaacaaatatatgaaaaaatgttcaacaccactaatcagcaaggaaatgctaatcaaagccacagtgaggcatcatc

SEQ ID NO: 586865 - DNA, 542 bp, Homo sapiens
aataaagaacccagaaaatccacatatctcagccaacagattttttacaaagatgccaagaacactcattgggaaaaggatagtctcttcaataaatggtgctggaaaaactggatatccatatgcagaagaatgaaactagacctctgcctctcaccctatacaaaaatcaactcaaagtacctcaaatacccaaatataagacccaaaatggtaaagctactagaagaaaacataggggagatccttcaggacattgctctgggaaaatattttatgaataaggcatcaaaagcacaggcaacaaaagaaaaaataaacaaatrggatcacatcaagctaaaaatcttctgcacagcaaaggaaataataaagtgagtgaaaagacaacctacagaatgggagaaaatataaactcatctggcaggaaattaatatcaagaatatacaaggaattcaaacatatcaacagcaaagaagcacaacaatctaattaaatataaacaaatgctctgaacagacatttctcaaaagaagacata

SEQ ID NO: 586866 - DNA, 542 bp, Homo sapiens
aataaagaacccagaaaatccacatatctcagccaacagattttttacaaagatgccaagaacactcattgggaaaaggatagtctcttcaataaatggtgctggaaaaactggatatccatatgcagaagaatgaaactagacctctgcctctcaccctatacaaaaatcaactcaaagtacctcaaatacccaaatataagacccaaaatggtaaagctactagaagaaaacataggggagatccttcaggacattgctctgggaaaatattttatgaataaggcatcaaaagcacaggcaacaaaagaaaaaataaacaaatgggatcacatcaagctaaaaatcttctgcacagcaaaggaaataataaagtgagtgaaaagacaacctacagaatgggagaaartataaactcatctggcaggaaattaatatcaagaatatacaaggaattcaaacatatcaacagcaaagaagcacaacaatctaattaaatataaacaaatgctctgaacagacatttctcaaaagaagacata

SEQ ID NO: 586867 - DNA, 484 bp, Homo sapiens
cctctgcctctcaccctatacaaaaatcaactcaaagtacctcaaatacccaaatataagacccaaaatggtaaagctactagaagaaaacataggggagatccttcaggacattgctctgggaaaatattttatgaataaggcatcaaaagcacaggcaacaaaagaaaaaataaacaaatgggatcacatcaagctaaaaatcttctgcacagcaaaggaaataataaagtgagtgaaaagacaacctacagaatgggagaaaatataaactcatctggcaggaaattaatatcaagaatatacaaggaattcaaacatatcaacagcaaagaagcacaacaatctaattaaatataaacaaatgctctgaacagacatttctcaaaagaagacatacaaatgaccaacaaatawatgaaaaaatgttcaacaccactaatcagcaaggaaatgctaatcaaagccacagtgaggcatcatc

SEQ ID NO: 586868 - DNA, 484 bp, Homo sapiens
cctctgcctctcaccctatacaaaaatcaactcaaagtacctcaaatacccaaatataagacccaaaatggtaaagctactagaagaaaacataggggagatccttcaggacattgctctgggaaaatattttatgaataaggcatcaaaagcacaggcaacaaaagaaaaaataaacaaatgggatcacatcaagctaaaaatcttctgcacagcaaaggaaataataaagtgagtgaaaagacaacctacagaatgggagaaaatataaactcatctggcaggaaattaatatcaagaatatacaaggaattcaaacatatcaacagcaaagaagcacaacaatctaattaaatataaacaaatgctctgaacagacatttctcaaaagaagacatacaaatgaccaacaaatatatgaaaaaatgtkcaacaccactaatcagcaaggaaatgctaatcaaagccacagtgaggcatcatc

SEQ ID NO: 586869 - DNA, 484 bp, Homo sapiens
cctctgcctctcaccctatacaaaaatcaactcaaagtacctcaaatacccaaatataagacccaaaatggtaaagctactagaagaaaacataggggagatccttcaggacattgctctgggaaaatattttatgaataaggcatcaaaagcacaggcaacaaaagaaaaaataaacaaatgggatcacatcaagctaaaaatcttctgcacagcaaaggaaataataaagtgagtgaaaagacaacctacagaatgggagaaaatataaactcatctggcaggaaattaatatcaagaatatacaaggaattcaaacatatcaacagcaaagaagcacaacaatctaattaaatataaacaaatgctctgaacagacatttctcaaaagaagacatacaaatgaccaacaaatatatgaaaaaatgttcaacaycactaatcagcaaggaaatgctaatcaaagccacagtgaggcatcatc

SEQ ID NO: 586870 - DNA, 546 bp, Homo sapiens
aatcttctgcacagcaaaggaaataataaagtgagtgaaaagacaacctacagaatgggagaaaatataaactcatctggcaggaaattaatatcaagaatatacaaggaattcaaacatatcaacagcaaagaagcacaacaatctaattaaatataaacaaatgctctgaacagacatttctcaaaagaagacatacaaatgaccaacaaatatatgaaaaaatgttcaacaccactaatcagcaaggaaatgctaatcaaagccacagtgaggcatcatcttactycagttaggatggctattatagaagagacaaaaataacaaatgctgacaaagacgtgaagaaaagggacctttttttgacagaatctcactctctgtccaggctggagtgcagtggtggtgtaatctggctccctctgcttctagggttcaaatagttctcctccctcagcctcctgagtagctgaagaaaaaggaactcttatgcactgttggtaggaatgtaaattagtgcagccagtatggagaacagtattgaa

SEQ ID NO: 586871 - DNA, 546 bp, Homo sapiens
aatcttctgcacagcaaaggaaataataaagtgagtgaaaagacaacctacagaatgggagaaaatataaactcatctggcaggaaattaatatcaagaatatacaaggaattcaaacatatcaacagcaaagaagcacaacaatctaattaaatataaacaaatgctctgaacagacatttctcaaaagaagacatacaaatgaccaacaaatatatgaaaaaatgttcaacaccactaatcagcaaggaaatgctaatcaaagccacagtgaggcatcatcttactccagttaggatggctattatagaagagacaaaaataacaaatgctgacaaagacgtgaagaaaagggacctttttttgacagaatctcactctcygtccaggctggagtgcagtggtggtgtaatctggctccctctgcttctagggttcaaatagttctcctccctcagcctcctgagtagctgaagaaaaaggaactcttatgcactgttggtaggaatgtaaattagtgcagccagtatggagaacagtattgaa

SEQ ID NO: 586872 - DNA, 570 bp, Homo sapiens
ggaattcaaacatatcaacagcaaagaagcacaacaatctaattaaatataaacaaatgctctgaacagacatttctcaaaagaagacatacaaatgaccaacaaatatatgaaaaaatgttcaacaccactaatcagcaaggaaatgctaatcaaagccacagtgaggcatcatcttactccagttaggatggctattatagaagagacaaaaataacaaatgctgacaaagacgtgaagaaaagggacctttttttgacagaatctcactctctgtccaggctggagtgcagtggtggtgtaatctggctccctctgcttctagggttcaaatagttctcctccctcagcctcctgagtagctgragaaaaaggaactcttatgcactgttggtaggaatgtaaattagtgcagccagtatggagaacagtattgaaacacctcaagcaatcccactactgggaatttatccaaaggaaagaaaagcattatattgcagagacatctacatcccccatgtttattgcaacagtgttcacaatagccaagatatggaatcaacctaggt

SEQ ID NO: 586873 - DNA, 662 bp, Homo sapiens
tggcacggtgtctgactttgttccatcagccacttgggctttctctgggtcttctctgccctagggatagcactactattgaaaacatgtctttgtgacattgtctatgccaggaactcccaacatattttccttgaaactgatgaaatgaataaaaataaaccaagaggtgtgctgtttgtttctgtttcctcctttctgcagcccttcttgatcatctaatatttttaaatacattgtcgatcaccaaaaggagcataagggctttattggtttgtagcagatgtattaatagcccagcccctattccttacctgtagctgctgggaagaaaaccattcttaacactctacaaggtctcatctccagaatttgcacctgtttcyagctgaggactttctctagcagcacgggagcttgtgattgggcatgaagtgggaagaaaaggtgagggtaactaagaagaatctccctggattcagtgatgtaattctgaggcatgttccacgtagcttcccataaaattaagcccagatatctaacacaggaacttacctcttaacacgtgtggtattggcttgtctctctttcctgttttattttgttctcttttccttgtctcactttcactgtgtcctcactcctgctttaagaatacccaa

SEQ ID NO: 586874 - DNA, 550 bp, Homo sapiens
aatactgacaggaagatggtgaactcacaatgtctaattaagatamaatttaaaaaatatattgaatcatgtccaaagatttaaaaaacctaagtggcagtgtcacaatttcttctttttagtttacatggtttcttaaatgcctacaattattttaaaggaagccttgagtctaggaaaaattgagacatatggaataaattactaacccatttctccttgaaatccattagatgattgatgattttttcacatatatttctgaactgaaaagctagttgggaattatttttataaggatatccttatgtaatattttgtttctaacagagaattgaatgtttaaagattaaattattctatccagagaataaaaagcaattatttcacaaggaaaccatgtgtatgttgacacgacattttaaaatctagattttaaaataggtcccatataattttgagtcaattagaatatgtttgtatcagtctgtctacagttttacacctgtcaaaaggtacttgaactaaaagaagtaccttgaacaatttt

SEQ ID NO: 586875 - DNA, 550 bp, Homo sapiens
aatactgacaggaagatggtgaactcacaatgtctaattaagatacaatttaaaaaatatattgaatcatgtccaaagatttaaaaaacctaagtggcagtgtcacaatttcttctttttagtttacatggtttcttaaatgcctacaattattttaaaggaagccttgagtctaggaaaaattgagacatatggaataaattactaacccatttctccttgaaatccattagatgattgatgattttttcacatatatttctgaactgaaaagctagttgggaattatttttataagsatatccttatgtaatattttgtttctaacagagaattgaatgtttaaagattaaattattctatccagagaataaaaagcaattatttcacaaggaaaccatgtgtatgttgacacgacattttaaaatctagattttaaaataggtcccatataattttgagtcaattagaatatgtttgtatcagtctgtctacagttttacacctgtcaaaaggtacttgaactaaaagaagtaccttgaacaatttt

SEQ ID NO: 586876 - DNA, 444 bp, Homo sapiens
acattttgttactatcaaagcagttggcacaagagtgtacaaaattccctaattgtgtctatgtggagaagacatagacaaacagagaatagcaaaacagaaatagcaaaaaagcacaaataaattttacctgtatttttaagtaaaagccaattagagmaggaaaacatgaaatttgtgttttatcaaaatttttctctttctcataatatagttgaaaatattactgcaaaaaatttgaagcactggtatgttcacaaaaaaagtaaaatataaggtcaaaaccatgggaatgcagggagcagacaaaatacacctaaacacggaaactgattttgccctacagacatgtagcaaaatgaatgagtgcagattcctactgtcatacatcacataggatagtaaagaaatacatagtttttcccaagatagggcatcacacag

SEQ ID NO: 586877 - DNA, 525 bp, Homo sapiens
aattttcacaacatattaatattatagaaaatgttgaacttaacagttaagatacaagtagtgaaaaatgatagtatttaaggagatctagaaaatttaatctatatcagtaatgtgtgagaagtattagaataatgcttgtatttctggattggcatcgatttctattgagactggaaatgtaacagaagtgagcaaaaaagaatttaaattgtggatacttgagttttatacctaggagttcgagaaatacattttgttactatcaaagcagttggcacaagagtgtacaaaattccctaattgtgtctatgtggagaagacatagacaaacagagaatagcaaaacagaaatagcaaaaaagcacaaataaattttacctgtatttttaagtaaaagccaattagagaaggaaaacatgaaatttgtgttttatcaaaatttttctctttctcataatatagttgaawatattactgcaaaaaatttgaagcactggtatgttcacaaaaaaagtaaaatat

SEQ ID NO: 586878 - DNA, 525 bp, Homo sapiens
aattttcacaacatattaatattatagaaaatgttgaacttaacagttaagatacaagtagtgaaaaatgatagtatttaaggagatctagaaaatttaatctatatcagtaatgtgtgagaagtattagaataatgcttgtatttctggattggcatcgatttctattgagactggaaatgtaacagaagtgagcaaaaaagaatttaaattgtggatacttgagttttatacctaggagttcgagaaatacattttgttactatcaaagcagttggcacaagagtgtacaaaattccctaattgtgtctatgtggagaagacatagacaaacagagaatagcaaaacagaaatagcaaaaaagcacaaataaattttacctgtatttttaagtaaaagccaattagagaaggaaaacatgaaatttgtgttttatcaaaatttttctctttctcataatatagttgaaaatattactgsaaaaaatttgaagcactggtatgttcacaaaaaaagtaaaatat

SEQ ID NO: 586879 - DNA, 428 bp, Homo sapiens
ctatcaaagcagttggcacaagagtgtacaaaattccctaattgtgtctatgtggagaagacatagacaaacagagaatagcaaaacagaaatagcaaaaaagcacaaataaattttacctgtatttttaagtaaaagccaattagagaaggaaaacatgaaatttgtgttttatcaaaatttttctctttctcataatatagttgaaaatattactgcaaaaaatttgaagyactggtatgttcacaaaaaaagtaaaatataaggtcaaaaccatgggaatgcagggagcagacaaaatacacctaaacacggaaactgattttgccctacagacatgtagcaaaatgaatgagtgcagattcctactgtcatacatcacataggatagtaaagaaatacatagtttttcccaagatagggcatca

SEQ ID NO: 586880 - DNA, 444 bp, Homo sapiens
acattttgttactatcaaagcagttggcacaagagtgtacaaaattccctaattgtgtctatgtggagaagacatagacaaacagagaatagcaaaacagaaatagcaaaaaagcacaaataaattttacctgtatttttaagtaaaagccaattagagaaggaaaacatgaaatttgtgttttatcaaaatttttctctttctcataatatagttgaaaatattactgcaaaaaatttgaagcactggtatgttcacaaaaaaagtaaaatataaggtcaaaaccatgggaatgcagggagcagacaaaatacacctaaacackgaaactgattttgccctacagacatgtagcaaaatgaatgagtgcagattcctactgtcatacatcacataggatagtaaagaaatacatagtttttcccaagatagggcatcacacag

SEQ ID NO: 586881 - DNA, 444 bp, Homo sapiens
acattttgttactatcaaagcagttggcacaagagtgtacaaaattccctaattgtgtctatgtggagaagacatagacaaacagagaatagcaaaacagaaatagcaaaaaagcacaaataaattttacctgtatttttaagtaaaagccaattagagaaggaaaacatgaaatttgtgttttatcaaaatttttctctttctcataatatagttgaaaatattactgcaaaaaatttgaagcactggtatgttcacaaaaaaagtaaaatataaggtcaaaaccatgggaatgcagggagcagacaaaatacacctaaacacggaaactgattttgccctacagacatgtagcaaaatgaatgagtgcagattcctactgtcatacatcacataggayagtaaagaaatacatagtttttcccaagatagggcatcacacag

SEQ ID NO: 586882 - DNA, 591 bp, Homo sapiens
aattttaaaaaatgcacaatgtggacagaatcatgaagagacatggaagatacagtgagaaagtgtagcatgtgtttagtgagtgttctcttagaagaagggaactgggaagggacaatatgtgatggtattttggctgaaagttctctagactcttgtaagacactaatccacatattcaaaaattctatgcatgctaagcaagctacagtggagataaacctacctctacatatctcctagagaaatagtaaacaatcaggaagggaaaaatatttcaattagcactagaaaaatcaaattacctttaatcatattgaaatctgaaagcatgaaaggtaaaataaacaatattatttgttaagaataataatgccactctgaaattctcaaccaagaaaaatattcatcaacctatggctaaataacatatttagagacaaaaaacaaaacaccaccagcagaattccactaaagaaactaaaaagaaactctgaaaacatgcttcagaaagattgaagttctgaaatcaaagaatgaacacagagmaaaatatattgtaaacatacagatagatctaaataaaaaatt

SEQ ID NO: 586883 - DNA, 369 bp, Homo sapiens
gctacattctctttgtcagaacacaaaacattcatacactcttctcatcctcactttcaccttttaatcttagatctactattaaatgtattcaacattactatcaatcctttggtcaaaatttctttactcacattgtgcttgatgcacttggatagactgttcaagaacktgtgagtagtgaattcctcaaactcttgcatatttaaaatcacatttttgaaccttgatgcttgaagtgtagtttgggtaacagatgacctttaagccaattttggcatgcaaggggttgtttattaggcatcagcactgctgaaaatcgtggggatgcaggcttaatttcaacactattctaaatacttgaaagat

SEQ ID NO: 586884 - DNA, 369 bp, Homo sapiens
gctacattctctttgtcagaacacaaaacattcatacactcttctcatcctcactttcaccttttaatcttagatctactattaaatgtattcaacattactatcaatcctttggtcaaaatttctttactcacattgtgcttgatgcacttggatagactgttcaagaacttgtgagtagtgaattcctcaaactcttgcatatttaaaatcacatttttgaaccttgatgcttgaagtgtagyttgggtaacagatgacctttaagccaattttggcatgcaaggggttgtttattaggcatcagcactgctgaaaatcgtggggatgcaggcttaatttcaacactattctaaatacttgaaagat

SEQ ID NO: 586885 - DNA, 369 bp, Homo sapiens
gctacattctctttgtcagaacacaaaacattcatacactcttctcatcctcactttcaccttttaatcttagatctactattaaatgtattcaacattactatcaatcctttggtcaaaatttctttactcacattgtgcttgatgcacttggatagactgttcaagaacttgtgagtagtgaattcctcaaactcttgcatatttaaaatcacatttttgaaccttgatgcttgaagtgtagtttgggtaacagatgacctttaagccaattttggcatgcaaggggttgtttattaggcatcagcacygctgaaaatcgtggggatgcaggcttaatttcaacactattctaaatacttgaaagat

SEQ ID NO: 586886 - DNA, 415 bp, Homo sapiens
tttaaaatcacatttttgaaccttgatgcttgaagtgtagtttgggtaacagatgacctttaagccaattttggcatgcaaggggttgtttattaggcatcagcactgctgaaaatcgtggggatgcaggcttaatttcaacactattctaaatacttgaaagatattatataattctttaataaactcctgtgtataaaaatggttcacattaactcaatatccatgattaaacatttacaaaatcaagrcactgttatttagtggagacttgctggctattctatgagaggaggtattgttattgtaatctcatcctctcataaatatgtatcatattactcataaccagcccttcatattctattcctattttggtattttaaaataagatatctttgaaactcttgaattc

SEQ ID NO: 586887 - DNA, 415 bp, Homo sapiens
tttaaaatcacatttttgaaccttgatgcttgaagtgtagtttgggtaacagatgacctttaagccaattttggcatgcaaggggttgtttattaggcatcagcactgctgaaaatcgtggggatgcaggcttaatttcaacactattctaaatacttgaaagatattatataattctttaataaactcctgtgtataaaaatggttcacattaactcaatatccatgattaaacatttacaaaatcaagacactgttatttagtggagacttgctggctattctatgagasgaggtattgttattgtaatctcatcctctcataaatatgtatcatattactcataaccagcccttcatattctattcctattttggtattttaaaataagatatctttgaaactcttgaattc

SEQ ID NO: 586888 - DNA, 560 bp, Homo sapiens
tctctactaaaaacacaaaattagccaggcatggtggtgcatgcttgtagtcctaaccactcgagaggctgaggcaagagaatcacctgaacctgggaggmaaaagttgctaggttgctgtgaggcaaattcgcaccattacactccagcctgggtgaaaagagcaaaactctgtctcaaaaaaaaaaacccaccaaaaactgcttctgaatggaattgtacatacaattttgatgaaaaaaattatcaagtgcataagttcataatagaaaaaccaataatactccaggcacaagttagtactaaaaaaattatgttgaatattctctaatacaacatgctttttcccttcatgaacaatttgtgttttactgagaagagtcattgtttatggtagacattagaccacagatgaatatgtactttaaacactcttagttactttcttaattttatatctgctgcttcatgcttctgtttattttcattctttccaatgtccacattctagtaaatttgaatattttaatccaagtttatatactatttaatattgcttg

SEQ ID NO: 586889 - DNA, 560 bp, Homo sapiens
tctctactaaaaacacaaaattagccaggcatggtggtgcatgcttgtagtcctaaccactcgagaggctgaggcaagagaatcacctgaacctgggaggcaaaagttgctaggttgctgtgaggcaaattcgcaccattrcactccagcctgggtgaaaagagcaaaactctgtctcaaaaaaaaaaacccaccaaaaactgcttctgaatggaattgtacatacaattttgatgaaaaaaattatcaagtgcataagttcataatagaaaaaccaataatactccaggcacaagttagtactaaaaaaattatgttgaatattctctaatacaacatgctttttcccttcatgaacaatttgtgttttactgagaagagtcattgtttatggtagacattagaccacagatgaatatgtactttaaacactcttagttactttcttaattttatatctgctgcttcatgcttctgtttattttcattctttccaatgtccacattctagtaaatttgaatattttaatccaagtttatatactatttaatattgcttg

SEQ ID NO: 586890 - DNA, 560 bp, Homo sapiens
tctctactaaaaacacaaaattagccaggcatggtggtgcatgcttgtagtcctaaccactcgagaggctgaggcaagagaatcacctgaacctgggaggcaaaagttgctaggttgctgtgaggcaaattcgcaccattacactccagcctgggtgaaaagagcaaaactctgtctcaaaaaaaaaaacccaccaaaaactgcttctgaatggaattgtacatacaattttgatgaaaaaaattatcaagtgcataagttcataatagaaaaaccaataatactccaggcacaagttagtactaaaaaaawtatgttgaatattctctaatacaacatgctttttcccttcatgaacaatttgtgttttactgagaagagtcattgtttatggtagacattagaccacagatgaatatgtactttaaacactcttagttactttcttaattttatatctgctgcttcatgcttctgtttattttcattctttccaatgtccacattctagtaaatttgaatattttaatccaagtttatatactatttaatattgcttg

SEQ ID NO: 586891 - DNA, 536 bp, Homo sapiens
ttctctaatacaacatgctttttcccttcatgaacaatttgtgttttactgagaagagtcattgtttatggtagacattagaccacagatgaatatgtactttaaacactcttagttactttcttaattttatatctgctgcttcatgcttctgtttattttcattctttccaatgtccacattctagtaaatttgaatattttaatccaagtttatatactatttaatattgcttgtatagtttagtattgtgaagactcaaaaaggtttacagaaagaagaaaaagatcaacatgttattaatcatttaaagatcttttgaaatctttgacctttatattttaatgaataaaatattagtagttattagtataaaataatttatgtcttttggacttagcatccagtatttcttttttaataaagaaaataattattctcttgcaatatactatgtttatctgggttttgaaaagtgmtgtttcctaatatgagaaagccatttacatttttaattctacaaaggcaaatggaa

SEQ ID NO: 586892 - DNA, 580 bp, Homo sapiens
ctctttcgcctattctaaattaaaaaactagctaaagtaatagctaatgacatagaactgtaagggaattcccacctcttccaaagtaggaaagctcccaaaattcaaatgcttcttccctgtaactagcacagcaaaaatggttacaggtgcagatttttcttcttttcacctctcctcacttaccttgtgtggctcaattactaagctagtcacctcagtatcaataaactaaacatgctattgggctttgagaagaactcattcctcctataaaatataaaatagtggtttcaattatgtgtgagccctgtaacaaacacttctttggtcacatttttagcaagttaagaaagcaagtcaaattaattgtaataatatcaatataatttgcaaaatgaaaataatatttttcttctcatgattggtactatgcaatgacagctatgtggaatgatttgagrgataacagtaatgtcccaaaggttctattgcctccaaatacctcccactttagcctgggaattccatattaagattcatccctttgagtcaagccactaatctctactggctgctg

SEQ ID NO: 586893 - DNA, 603 bp, Homo sapiens
tataactatttgggaatgtcttttaaaatatggcttatttcatgtaccttgtgaaacagtcctttcatttattcacatattcaattatttccatactttattaaagtactttattcattttaacataaattaacaaagaaagtggtattaaaggttttaaattaaagttggttgttttggtgggggaggggagtaaactgttctttctagagtcaaattttcaatttctattgtaatttttctgtgtttttctcctcctgttttcttctactttctattcaattatttttgccacccttccaaacaacacatgcttttcatgccattacaaagaaactcaaaagttttcaccttttataaattacctcatattttaaaaacataaaaygtaacataaaaagctccaagtcttagaaagtgccccctctatgggactcctgacagattgttggatattcatttacaaattcgtattttcactttttaagctttttagaacttctgatctctagattaattttataaactttttgaaaccaaaaacacacagaagcagatatttgttctaaaaatatagatatatacatagtatatatacatata

SEQ ID NO: 586894 - DNA, 636 bp, Homo sapiens
tgacaaatagagctcctgtgaagaatgaagagcaatagaagcctgggttaaagaaaaaacaggtaaagcatggtttaccttagagatgagaaaaggaagcgattaagaagggtgttttaaaagaaaatgtgtgagaacaagaagcaattaaaatatactaagattgcgaaccccattctttctattcatttcccaactctaaatggaggaaatttcatttcctggtgttccgcctgtgtagccaccaaatgttaccatgctaatatccggtgmaattccccctagcttttctgaggcctcacaggatattgatgggggaaagactatctccatgacatgaataagtctttcaggtattttaatgagtagggatagtaaatgattgcataccaactattatttagttctgtttagattagtttatagggcgcaggaaatgaaatttttccccagaatattcagcttgcattatataaacatgactccgttcagcaaacagaatgcaccatgcttgctatttcacttaaactaaacaggggatgataaaaaagtcactgaggaaaaattcaataaaattcaacattataaaatgcaatttaaagaaaactatcaacttctgctttttaaattacatta

SEQ ID NO: 586895 - DNA, 618 bp, Homo sapiens
acctgctgactgctgcccctttcagcaacctgttgccagtcatttgttaggaaccactgtgatctcttgtagctgaatcagacacccacaagagaccacagatacgccttgctctgccacgtagtggaaagaatgtctctcttctattttgagttacacttagattttttgctcrtggactctttcccccctgtgacttagacatgaaaacttgtggagctggcatggggacaaagcagacatgacattggactcagagacaccactctcctctagtggccaaatctttgtgtctgacttcttgttctgataggatgagctattttcctttcttcttttcttttcttttttgtattttttgctttcagccaactcacagcaggatgaattcttttctaagggactcatggttgttcacacaaaatgacctgtggataaccaagctactagcttgccaggcatatctatatttgttggaacctcgggagtgggcacaatttaacacaaatggaaatttgaatacacaagttattaatgaaatgtcaaatctaccctttactgtccttgactctataagatgtaaataattagaattctaagatttgcctgtaatctggg

SEQ ID NO: 586896 - DNA, 544 bp, Homo sapiens
ctctactaaaaataaaaaaattagccgggtgtggtggcaggcacctttagttccagctacttgggaggctgaggctagaggatcacttgagcccaggagattgaggctacagtgagctatatgatcatgccactgcactctaggcttggcaacagagggcagagcaagaccctgtctaaagaaatccaccatcactaccaacgaaaaaagcccttaccttgcaggtacttggcttgtagacactggggagtttgggtcttaagcatgacctgacctgattctccttgctgggcaccctgcaataartgcctttctttctatcactgcaaacacctctgggtaggtatctggatttactgctctgggtgagtgaacctcagtttggttctagaacataactggcatcgcaagccattcagttggtcttcttgggaataatgcttaaaagttgaaggaaattgaacactcaaacaatggatttttaacaaagcaattttacttctgtgcagaggggtgcttctttggccagttgccacgagagcac

SEQ ID NO: 586897 - DNA, 574 bp, Homo sapiens
ttttttttaactttcatggaagtttccctctgactttttattttgaaaaatttaaagcctacatccatttcccatctgcagacagacactgcatggtatttaaagmtttacgggtagatctcttaggtaattgccttgaatgtttccctctgtggtttgctgggataaccagtgaagatgcaagcaaatcttataacaattctccatttcctactcagggcctttactatcagtagattttgagctcaatgctttaggctattaaaaacaaatacttctaacatgttctcggacctcttgctgtgaaaatcttctagtcaatgattaaatttcaagagcctgaaccatcactaaactagtaaccattgttggataaatttgggaagaggtttgttgatgctcatctaagcagccccatatgtggagtttgtttttctccttggttatcagagtttgtgggtagcagtcaaggcgatggggacatagaatgaggctgtaaccaaggaatacatgttggtgacttccatgactagtaagagtttggcagtgaggcaaggctaatggggggtttggc

SEQ ID NO: 586898 - DNA, 551 bp, Homo sapiens
ttctctttctccacagttacagaatgcatcccctaagcaaaggaagcagagtgtgtacacaccacccaccataaaaggtactgttcaggtactgtttcgggttgtcatgagtgstgaatcatggctggtcggccgtctgttctctaggaccacatatctgatgataagctagatctagtctcagctctacaacttaacagtgttatgttcagtaagatatcttatctacttaaaacttagtttcatcaagagtaaaatatggggttgaaaaagaaatagctagtgatctcagaatttcagtctagaaattcagtttccaaaataatgacaaagatttttttttaccgttattcgcatacttccttaaagagattttcccagaagccctaattactcttgccagtgttggcagatgattactgtttttctcttggctaaagcaaagcagaataacttgaatttcagggagactgaggatgaagtgttgcctcattgtattgtgtcaggagcagctctaagaaactcaatcaaaccagctattcactgtacat

SEQ ID NO: 586899 - DNA, 557 bp, Homo sapiens
tttaaaaaagtgtatcttcttttgagtagagaactgattgtaaacatacttttaacataacttttacagattagaaataattattagatgttttaggcaatgttggaaaactaatgatgtaattattcaatgtgcatttaatccttttccaataatatatttttatgtcattttgatctatagattcctttaaataggatttgaataatttaggtrttagtcattttaaaacactaatatttcatttttctacataagatatcacaaaagtattctcatcagagtctccaaataaagtcttatgaccaatttccttacaagtagaagtaggggaaataattgaggtgagcatgagaaaattattcaaacgttaacaatttgaatgatgatgacaggaaattttgagagcattcactttaaagatggttctgagaggcactggaattagaatagaattagctgcttaccactatttgaaatatttagttctctttttacttcacagaaacgttttctttttttttccacataggtcgctaacattgacagtgacttac

SEQ ID NO: 586900 - DNA, 533 bp, Homo sapiens
ggtcaagggcctcacttgcctcatcctcctcccagcagatccctgtgaataccttttgactttttttttttttttgtggaatgctcacagcctcttcagtgttttcgatcccaacaaccagcacataaacatctttcaatgtatgattaatgttaagcatatttccttaactgaaaaagaggctaaataatcacattggctaacattttagcaggtaataaccccatgcttgtaagcmctttacatgaattaactcacttaaatgcagagcaactctatgaagtaggtacttttttttatagtcatagagaggttaagtaacttgtccaaagtaatacagagtattacctgggaactagaatttgaattgagagagtgttattaatctgtgcaattaaccactacaccatacctcagcaaaaaatatctactgtattaagcctggaatagaagacacaatcaataaaatttagcatgagggaaggggcaagatggccgactagaggcagccagatagacagggatgactggca

SEQ ID NO: 586901 - DNA, 609 bp, Homo sapiens
tgaccctattttcatcactaataacctcccaaatagttaatctttcccttcacacaagactgaaagcctgatattaatagcacctgacattcaatctatggctcaataatcatcttggagtgaacaagtgaatgaataaacacataaatacataatcgtatgcattggggtttcctgttttggtttttgcttttctctgtaaattccctgagagccctgagaagtrgtcccgagcatgagtgcctaaaggaaaagcagcttacttcagcttcctggctttctcatcagccgcctggagcttcctcagccgcatcctttctcttggcgtcattttctgtacttctgacagtgccctcagagtctgcaggtggatccttttttgcctataaataacaaagattcccctcatatagcccatcccaaacatgttcagaaaaattaaacaaatattttataaaagtatcactacactactgagagcaaaagcatcttgagacaggccaggcaaaaactaataagctttgggtatgtaatgagccaaccaggactgtagttaataagcaacatttttcaaattagatttttgtttaaaggaaattatttactttc

SEQ ID NO: 586902 - DNA, 613 bp, Homo sapiens
catacatatgtatacactgaggcaggagaattgcttgcacccrggaggcagaggttgcagtgagctgagattgcgccacggcactcaagcctggcaacaaagtgagactctgtctcagaaaaaaaaaaaaaacaacaacactaatagccactctgttgtgtaatgttctaaatgacatttagaaacctttgtgcattattctgtattcttcaataactcttatgtctaactatccattgcttgcacaacttccttttgccatatttctttgctgtgttatatgtgaaagcagttgttctctagtattaaagtgcatgagcaacatggcagatacctttagaaagtgtacattctcagtgcttcctctaccagtattctgattccacagatattctaaggtaggggccagtcatcttaaaaaaaagaaagaaaagagaaagaatcccaatggactcacagagtgggtttgttgaaaatgaatattcccttaatgaatatgataaaaataaacctgcacataaacatatatacagatgtatataaatatataagtaaatagcaaggaacaattagttttgtttaattttgctctttcataggattaaatataatt

SEQ ID NO: 586903 - DNA, 613 bp, Homo sapiens
aatcagcactctgtgtctagctaaaggtttgtaaacgcaccaatcagcactctgtaaaaatgtaccactcagcactctacatctagctaaaggtttgtaaatgtaccaatctgcactctataaaaacagaccaatcagcactctgtaaaatggaccaatcagcgggatgtaggcggggccaaataaggaaataaaagcaggccacccaagccagcagcggcaacctgcttgggtttcttcccacrttatggaatctttgttcttttgctcttcacaataaatcttgctgctgctcactctctgggtctgtgccacctttaagagctgtaacactcactgcaaaggtctgcagtttcactcctgaaatcagccagaccacgaatccaccaggaggaacaaacaaccccagatgcaccacctttaagagctgtaatactcactgcgaatgtctgcagctttacttctgaagtcagtgagaccaagaacccaccagaaggaagaaatgccagacacgtctgaacacctgaaggaacaaactccggacacaccatctttaagagctgtaacactcactgcaagggtccatggattcattcttgaagtcagcgagacc

SEQ ID NO: 586904 - DNA, 596 bp, Homo sapiens
tttaaaaggcataaaacttgccacttcaggaggaaacaaatatctctagttcattccaattatcatttattaattactacatgagtggtttgtttagtttagtcttcagcgtctctggtaatttcctttagagagtcaagctaaaattttttaacaagcaaatagctgatttccaaataagygtgttcctatgaactttttctgtttcattagtgttcaaaagatgtatctaatgcagtttttaaaataaatgtaagtttctgatatctgatttgtgctgaatttttctctttcttttaaggataatcccctatcatatcccccacaatttaaacctaatcaacctaaggaaaaagaaaagagaaaaaaatagcattgcatttgccttatggatcttttcaggtacttactacaggggtcagaactctatgaggaagccatgttttctcagcattgtcaccagttagctttgtttgacaaatgaaattagaaacaatgtgaacacagttcttctaatagttcataaattcttaaaaaaacaatgacaatttcaaaggatttttatttgaatgttttaagtttggcatggtattgaa

SEQ ID NO: 586905 - DNA, 598 bp, Homo sapiens
tctgcctggcaaccaatgctggaccattcataaggagaaatggcatcagcatccactaaaccagacagtctttgaagtacttctgccaaacccagggtaactactgagccaggaggccttcyggtcttttcatttccctgccaaactggccacgtgctgactctcccttgccaggagttcatgcctgcacctccatgggtacctgataagatgccacagtccttgtcatgggcatatgcatgggggctggggggtcaggtgagaggaggcagcagtggccagggagctggcagcctggggtcagttgtaccagtgattctcagctaaacttggcttagtggagccacagaactttgtctgaatatgtacctatcagaaagccgatgacttttcttgttatactttttctttaaaaatgaaacaaaactgaattaacatagaaagatctaactgatatgataattgataaaggcacatggtatagctgtatgcacaatatgatctatttgggtttttttcctaagtgtatgtgaaggtgtgtgtgtgtgcgcctgtgcgtacgtagaacttatctgaaaggatacatacccagcactgg

SEQ ID NO: 586906 - DNA, 608 bp, Homo sapiens
gagccaccatgcttggcctggatatttttgatattcaacaatctttatgataaaaaaaaatgtttgcactctctgctctggaggatggacagaaattagaagtgaacagaggaagaagtaggactaggagaaaagtcacaagtgtgcccttttccaccatgtacagccacctgcttaatctactaggcataattggagaaataataagcaatatttggagaaagaaaaattaaaggcagatgggtgaacaaagcccatggcttcaccaaagctcagtagggtaatcttcaacaacattgcttaaacttgtccccaggcattccaagttttttgcctagccragcctcttaaccatgtttctctatgacttgtggtgcaagctacttaagcctcagtgatacagggatgtctgcatcacctgtccctcttctcaccatgctgtcactccatgtctgtacttgagctaaaatcttgacagagctcccttctcaaattccctctggaattctaaccctttttatctttctctgtatttttccccatctcatcaatgtcagctctcccagagttatggtctccttagtccactgagttttctttcctccctc

SEQ ID NO: 586907 - DNA, 428 bp, Homo sapiens
tatacaaaaagagtatttcaaaactggtccatcaaaagaaacgttcaactctgggagatgaatgcacgcatcacaaagcagtttctcagaatgcttctatctagtttttacgtgaagatatttccttttccaccataggcctcaaagcgctccaaatgtccacttgcagattctacaaaaagagagtttcaaaactgctccatcaaaagaaagattcaactctgtgagaagaacgtacatatcaaaaagaagtttctcagaattcttctgtctagtttttatgtgaagatatttccttttccacaataggcctcaaagccctccaartgtccactagcagattctacaaaaagggagtttcaaaactcctcaatcaaaagaaagttttaactctgtggtatgaatggacacatcacaaataagtttct

SEQ ID NO: 586908 - DNA, 428 bp, Homo sapiens
tatacaaaaagagtatttcaaaactggtccatcaaaagaaacgttcaactctgggagatgaatgcacgcatcacaaagcagtttctcagaatgcttctatctagtttttacgtgaagatatttccttttccaccataggcctcaaagcgctccaaatgtccacttgcagattctacaaaaagagagtttcaaaactgctccatcaaaagaaagattcaactctgtgagaagaacgtacatatcaaaaagaagtttctcagaattcttctgtctagtttttatgtgaagatatttccttttccacaataggcctcaaagccctccaaatgtccaytagcagattctacaaaaagggagtttcaaaactcctcaatcaaaagaaagttttaactctgtggtatgaatggacacatcacaaataagtttct

SEQ ID NO: 586909 - DNA, 428 bp, Homo sapiens
tatacaaaaagagtatttcaaaactggtccatcaaaagaaacgttcaactctgggagatgaatgcacgcatcacaaagcagtttctcagaatgcttctatctagtttttacgtgaagatatttccttttccaccataggcctcaaagcgctccaaatgtccacttgcagattctacaaaaagagagtttcaaaactgctccatcaaaagaaagattcaactctgtgagaagaacgtacatatcaaaaagaagtttctcagaattcttctgtctagtttttatgtgaagatatttccttttccacaataggcctcaaagccctccaaatgtccackagcagattctacaaaaagggagtttcaaaactcctcaatcaaaagaaagttttaactctgtggtatgaatggacacatcacaaataagtttct

SEQ ID NO: 586910 - DNA, 467 bp, Homo sapiens
agaattctgagaaacttctttgtgatgagtccattcatctcacagagttgaaacattctttgatggaccagtttgaaacagtctttttatagtatctgcagagggatatttttgagcggtttaaagactatggtgaaaaaggaaatatcttcacataataactagacagaagcattctgagaaacttctttgtgatgtgtgcattcatcttacaatgttgaacgtttcttttgattgagcagtttggaaacagaacttttgtagaatctgcaaagggatatttgtgagcccattgattcctatggtgaaataggaattatcttgarataaaaactaggcagaagatttctgagaaacttctttgtgatgtgtgctttcatctcacagagttgaaaatttcttttgattgggcagtttggaaacagtctttttgtataatctgcaaatggatatttggagcactttgt

SEQ ID NO: 586911 - DNA, 467 bp, Homo sapiens
agaattctgagaaacttctttgtgatgagtccattcatctcacagagttgaaacattctttgatggaccagtttgaaacagtctttttatagtatctgcagagggatatttttgagcggtttaaagactatggtgaaaaaggaaatatcttcacataataactagacagaagcattctgagaaacttctttgtgatgtgtgcattcatcttacaatgttgaacgtttcttttgattgagcagtttggaaacagaacttttgtagaatctgcaaagggatatttgtgagcccattgattcctatggtgaaataggaattatcttgagataaaaactaggcagaagatttctgagaaacttctttgtgatgtgtgctttcatctcacagagttgaaaatktcttttgattgggcagtttggaaacagtctttttgtataatctgcaaatggatatttggagcactttgt

SEQ ID NO: 586912 - DNA, 467 bp, Homo sapiens
agaattctgagaaacttctttgtgatgagtccattcatctcacagagttgaaacattctttgatggaccagtttgaaacagtctttttatagtatctgcagagggatatttttgagcggtttaaagactatggtgaaaaaggaaatatcttcacataataactagacagaagcattctgagaaacttctttgtgatgtgtgcattcatcttacaatgttgaacgtttcttttgattgagcagtttggaaacagaacttttgtagaatctgcaaagggatatttgtgagcccattgattcctatggtgaaataggaattatcttgagataaaaactaggcagaagatttctgagaaacttctttgtgatgtgtgctttcatctcacagagttgaaaatttcttttgattgrgcagtttggaaacagtctttttgtataatctgcaaatggatatttggagcactttgt

SEQ ID NO: 586913 - DNA, 500 bp, Homo sapiens
gagtggaatggagtggaattcaatggaatggaatggattggagtggaggcgagtgaaatagaatggaatggagtggattggagtggaatggaraagatggagtggagtgtattggaatggagtggagtggagttcagtggcgaggaatgcaatggaatggaatggaatggacttgaatggaatggaatcaaatggaatggaatagaatggcatcgattgaaatcgaaaggagtgtggtgagggggagggaagtggactcgaatggaatggactggaatggaaaggacacgattggaatgcaatggaatgcactgtcattgaatggaatgtaatcgaatggtatggaatcgagtggaatggaatcgagtggaatggaaataactcgaatggaaaagactggaatggaatgaactccaatggaatggaatccaatggaatggattcaaaaggtatggaatgaaatggaatgcaatggaatgcaatggaaagcaattgaatgg

SEQ ID NO: 586914 - DNA, 500 bp, Homo sapiens
gagtggaatggagtggaattcaatggaatggaatggattggagtggaggcgagtgaaatagaatggaatggagtggattggagtggaatggagaaratggagtggagtgtattggaatggagtggagtggagttcagtggcgaggaatgcaatggaatggaatggaatggacttgaatggaatggaatcaaatggaatggaatagaatggcatcgattgaaatcgaaaggagtgtggtgagggggagggaagtggactcgaatggaatggactggaatggaaaggacacgattggaatgcaatggaatgcactgtcattgaatggaatgtaatcgaatggtatggaatcgagtggaatggaatcgagtggaatggaaataactcgaatggaaaagactggaatggaatgaactccaatggaatggaatccaatggaatggattcaaaaggtatggaatgaaatggaatgcaatggaatgcaatggaaagcaattgaatgg

SEQ ID NO: 586915 - DNA, 587 bp, Homo sapiens
gtgccagagtctctagatgtgagggaaccagtgcataaattctggcaccatgaaaaatctgaatgtagtaacaccaccaagattttcacttcctgtccagcaatagccattagccaaaatggaaactcaggaatgacagataaagaattcagagcatgaattacaaggaagctcactgagatccaagacaatgttgaaaatcaacacaaagacacttctaaagcaatccaggaaatgaagaaagaggtaaatatattttttwaaaaaaaaatcagagcttttggaattgaataacttacttaaggattttcaaaatataattgaaagctttatcaatagactggacctagcagcagaaaaattttgagagcttgaagactagtcttttgaagtgacccagttagattaaaatgaagaaaaaaagaatttttttaaaaaagaacaaagtcttcaagaaatattggattatgtaaagtgaccaaacctacaaattattgccattcctgagagagaaagagaaaaagtgaacaacctggaaaatattttagatggaataattcaagaaaactttcttaattttgctagag

SEQ ID NO: 586916 - DNA, 503 bp, Homo sapiens
ctcctgaagcggccatttcagaggcctaccctcaaggacgcattctctttctcagggatgttccttgctgagaaaaagaattcagcaatatttctcccatttgcttttgaaagaagagaaatatggctctgttccgccaggctcaccggtggtcagggtttaaggttatctctctctcgttccctgaacattgctgttttcctgttcttttttcaaggtgcctagatttcatattgttcaaacacacatgctctacaaacaattrtgcagttaacgcaatcatcacagggtcctgaggcgacatatatcctcctcagtttacaaagatgacaggattaagagattaaagacaggcataggaaatcacaagggtattgaatggggaagtgataagtgtccatgaaatcttcacaaattatatttagagattgcagtaaagacaggcgtaagaaattataaaagtattaatttggggaactaataaatgtccatgaaatcttcac

SEQ ID NO: 586917 - DNA, 516 bp, Homo sapiens
gagccactacagaaagcccgtattggggtaaatccagggtagcagggacactgtgaactcttcactagggcaatgcccagcagagctatgggaggggccacctccacaaaccctcactagggcaatatttagtggagccatgggggcagggctatccccaaggtcccagacctgtagagccaccagcatacaatgccatccttggagagccacaggcacccaactccaacccaagacctgctgcataggctgtgcccagcaaagcccaacacttgtcccattgtgtccaaaaggcagggcatggagtcaaagattattctcaagcctcaatctttatttatttatttacttgccttgttgagttgtggagttacttgggaygtattagccttttttaaattttctatttctctcttttggaatagcagtgtctatcttatgcctatctcaaaattgcattttggaagtacatactttgtttgattttacaggttcacagctagagaacaattttca

SEQ ID NO: 586918 - DNA, 516 bp, Homo sapiens
gagccactacagaaagcccgtattggggtaaatccagggtagcagggacactgtgaactcttcactagggcaatgcccagcagagctatgggaggggccacctccacaaaccctcactagggcaatatttagtggagccatgggggcagggctatccccaaggtcccagacctgtagagccaccagcatacaatgccatccttggagagccacaggcacccaactccaacccaagacctgctgcataggctgtgcccagcaaagcccaacacttgtcccattgtgtccaaaaggcagggcatggagtcaaagattattctcaagcctcaatctttatttatttatttacttgccttgttgagttgtggagttacttgggacgtattasccttttttaaattttctatttctctcttttggaatagcagtgtctatcttatgcctatctcaaaattgcattttggaagtacatactttgtttgattttacaggttcacagctagagaacaattttca

SEQ ID NO: 586919 - DNA, 626 bp, Homo sapiens
ttattaaggagaattgactcacatgatcacaaggtaaagccccacaataggccatctgcaagctgaggagcagggaagccagtggtggatgagtccgagtcccaaaacttcaaaagtagggaagctgacagtgcagccttcagtctgtgccaaaggcctgagagcmcctggcaaactactggtgtaagtccaagagtccaaaagctgaagagcttggagtctgataatcaagggcaggaagcatccaacacaggagaaagatgaatgctggaaaactcagcaagtctgctcttccatcttctcctgtctggtttattctagctgtgctggcagctgattagatggtgcccatccaggttgaggtgggtctgcttctccaagtctaccgactcaagtgttaattttctttggtaacaccctcacagacacacccaggaacaatactttgcatctttcaacccagtcaagttgacactcaatattaatgatcaaggggggtcaggggtggaattaaatggtttgaatgtttgtcccctccaaatctcatgttgaaatgtgattttcaattttggaaatgaggccaggtgggaggtgtttggatcatgggggtgtatccctcatgaatg

SEQ ID NO: 586920 - DNA, 615 bp, Homo sapiens
tttatctttattttaatacttaaattatctcataattagccagcagaacacctttcaagctgaccctgtgcctgtttgacaaaccctcatcattttgtatktatgcttttccctttaacataataaaatattctacttttgttctgcactgtttatactgcatccctctaaatcagccatttttccatagaacattagtaaagaatgacacttagaagtcaagatttgggttcttgacatgctcattgctattgagatcccattgcttattgacattttcagcagacacactaagaaataaatatatttatacacatacacatacacaagcacacacatgcctatgtacatatacacacaagtatatgaatatttacatatggttatatcttgtatgtacacaccatacatatttagatatatctctataactattaatctatattttttattggaattagaagtattgaagcaatcctaagagtataaaaatatgtagatattatatatgtatattacatacatatacgtttaaatcatgagtatgtgtgtataatttatatagcatgagtttccaccaacacctccaattccaatccaaaaaaacacaagaat

SEQ ID NO: 586921 - DNA, 615 bp, Homo sapiens
tttatctttattttaatacttaaattatctcataattagccagcagaacacctttcaagctgaccctgtgcctgtttgacaaaccctcatcattttgtatttatgcttttccctttaacataataaaatattctacttttgttctgcactgtttatactgcatccctctaaatcagccatttttccatagaacattagtaaagaatgacacttagaagtcaagatttgggttcttgacatgctcattgctattgagatcccattgcttattgacattttcagcagacacactaagaaataaatatatttatacacatacacatacacaagcacacacatgcctatgtacatatacacacaagtatatgaatatttacatatggttatatcttgtatgtacacaccatacatatttagatatatctctataactattaatctatattttttattggaattagargtattgaagcaatcctaagagtataaaaatatgtagatattatatatgtatattacatacatatacgtttaaatcatgagtatgtgtgtataatttatatagcatgagtttccaccaacacctccaattccaatccaaaaaaacacaagaat

SEQ ID NO: 586922 - DNA, 593 bp, Homo sapiens
aaatgaacaaagctgcatgtgtaggcaggagtcaaagaaaaatkactttacaaacataatgaggaatgaaggaaatccatagaatctcatttactccccctggttatgaagaatacttctttgccaatcaattctcataattgattagctaataagaagctgcattcacagcagcaggcaacagcgagttcactctcactagggaacagctttctctagggaataaaagagccagctcggagactgggttgtgagagcatccttccatccagagagtcactgaagaagcaaacactccctgttgtgctatgaaaatacttttgacgtgttaagaacttatactggtctctttgcaactcattcatactaaggaaatgttcctagacgtgaaaaaacaacattacatataattatatgttcagaacagattggttagttttgtactcaaatttcaccctttcatttttcttttactggaaatgaaaaaaaactaagaaatatacatatacatatatatgtgtgtatatataattttatacacacatatatatatatacacacatatatgtgtataaaattaaaatctggtacct

SEQ ID NO: 586923 - DNA, 593 bp, Homo sapiens
aaatgaacaaagctgcatgtgtaggcaggagtcaaagaaaaatgactttacaaacataatgaggaatgaaggaaatccatagaatctcatttactccccctggttatgaagaatacttctttgccaatcaattctcataattgattagctaataagaagctgcattcacagcrgcaggcaacagcgagttcactctcactagggaacagctttctctagggaataaaagagccagctcggagactgggttgtgagagcatccttccatccagagagtcactgaagaagcaaacactccctgttgtgctatgaaaatacttttgacgtgttaagaacttatactggtctctttgcaactcattcatactaaggaaatgttcctagacgtgaaaaaacaacattacatataattatatgttcagaacagattggttagttttgtactcaaatttcaccctttcatttttcttttactggaaatgaaaaaaaactaagaaatatacatatacatatatatgtgtgtatatataattttatacacacatatatatatatacacacatatatgtgtataaaattaaaatctggtacct

SEQ ID NO: 586924 - DNA, 593 bp, Homo sapiens
aaatgaacaaagctgcatgtgtaggcaggagtcaaagaaaaatgactttacaaacataatgaggaatgaaggaaatccatagaatctcatttactccccctggttatgaagaatacttctttgccaatcaattctcataattgattagctaataagaagctgcattcacagcagcaggcaacagcgagttcactctcactagggaacagctttctctagggaataaaagagccagctcggagactgggttgtgagagcatccttccatccagagagtcactgaagaagcaaacactccctgttgtgctatgaaaatacttttgacgtgttaagaacttatactggtctctttgcaactcattcatactaaggaaatgttcctagacgtgaaaaaacaacattacatataattatatgttcagaacagattggttagttttgtactcaaatttcaccctttcatttttcttttactggaaatgaaaaaaaactaagaaatatacatatacatatatatgtgtgtatatataattttatacacacayatatatatatacacacatatatgtgtataaaattaaaatctggtacct

SEQ ID NO: 586925 - DNA, 496 bp, Homo sapiens
ataccatgctattaaaataatagagaatgtacatagattgtcctaataatatattcgctgactaattaatcaagaacaatgaaatgggcatacagwcatgttggtggaataggaagagggcaggatgagccggtgtaaaaagtccaaagcaccatgtattaaaggaagtaaatacacatgtctaaaattaactaaaaaacggcaatcttaacttgacagtgagaaacagagacactaagagagttggaagtggtggcctctaggaagtgagaataggggttgggaatgatggatcagggcatgatttttttcttttttaaaaaacattgttattattctcattttttttttttttaccagagatagcgtgttgctattacccaggctggagtgaagtggcatgatcatagtccactgtagcctcgaactcctgggttcaagtgatcctcttgcctcaacctccctagcagctgggactacaggcacctgctaccac

SEQ ID NO: 586926 - DNA, 624 bp, Homo sapiens
tggtcagagctaactgcattattatgctaggatcccatgcagttgaacacctgtcaaccaaactatcacatatataaaactcaaatgcacccatttgtatgtgtggggacacactcatatattttcacaaactctcatacattgctgatgaaagtataaactagtataatctctatagaaggcartttctaaaaattatttaaatgcccatcccctttgacacaacaattctacttcttacccatgtaaaaaattaacataaacagaaagatcattaactgcagtactgctcataaaagcaaaaatatggaagccatctatgtattagccaatcctaatttaaaaatcatggtcctctacatgtaaaattctgtactgctgattaaaaaaaaaatgaaacaactctatttcttttttttttttcttttttttgagacggggtcttgctctgtcatccaggctggagtgcagtggcacgatctcagctcactgcaacctccgccttccaggttcaagcgattctcctggctcagcctcctgagtagctgggactacaggcgcatgccaccatgcctggctaattttttctatttttagtagaaatggggtttcacagtgttggcc

SEQ ID NO: 586927 - DNA, 536 bp, Homo sapiens
ctcccattctgttcactgtccccaaactcccaacccgttgcaccacacaattaaacaacatagtctgccctcaattaaggaagagtgtatgttcttataatacattatgggaaacttcattaataaaggtgcaaatactggacatggaggctcacgcctgtaatcctagcactttgggagaccaaggcgggaggatagcttgagtccaggagttcaagaccagcctgggcaacatggcaaaaaccagtctctacaaaaatagaaaaattagccatgtgcaatggtgtatgcctgtactcctatactcaggaggctgaggtgggaggatcacctgagcctgagaaggtcgaggctgyagtgagctgtgactacaccactgcactgcagcctgagggacagagcaagaccttgtctcaaaaaaaatattttttttaattaaaaaaaagaaatgcaaaaaggctgggaatggtggctcacacctataatcctagcactttgggaggccaagacaggtggatcacctgaggtcaagagtt

SEQ ID NO: 586928 - DNA, 588 bp, Homo sapiens
acaaataacaacctatccaaaaaagagatcaagggaacaatcccatttacaatggcatcaaaaagaatagaatgcttaggaatagaatgcttaggaattttgccaggagggtgaaagctctgaacactgaaaactgtaaaactctaataataagaaattgaagaagacacaaataaatggaaagatatcccatgctaatggattgaaagaattaatattattaaaaagggtcatactacccaaggcaatatacagattcaacaccatccctagcataatggaatactacaygcccaggataaatgatcaaaccacagctacatgcaacacagttgaatctcataagcatgttaactaaaagatgccaggtacaaaagaatataaagtagctcccccttatccatgggggatatgttccaacaccccgaatggatgcttgaaaccacagatagtaccaaaccctatatatactatgtttctttcctatatacacataactatgataaagtttaatttataaattagacacagtaagaaattaacagtagttaataacaaaatagaacaattataacaatatgctgtgat

SEQ ID NO: 586929 - DNA, 561 bp, Homo sapiens
ctaagaatttatctgggccaggcacggtggctcatgcctgtaatcccaacactttgggaggccgaggtgggtggatcacttgaggtcaggagtttgagaccagcctggccaacatggtgaaacctagyctctacttaaaatacaaaatttagcaaggcgtgttggcgagcacctgtaatcccagctactcaggaggctgaggcaggtgaatcaattgaacccaggaggcggaggttgcagtgaggggagaccccaccattgcactccagcctgggcaacaagagcgaaactccatctcaaaaaaaaagaaaaagaaaagaaagaaagaatttatttgaagattaatgtccaacaataggaaaatatacatgtataaggttattatttgcaacattatttgtaatttcaagatattagaatcaatcaaaatattaaaatataggagatcggttaaacaaattctgttgcatccacacaatggaatgttatatggcaggaaaaatgaatgagggtgaactgatatgaagcaattttatgtatttttaaatgaacaaacaaaaa

SEQ ID NO: 586930 - DNA, 550 bp, Homo sapiens
  misc_feature 508, 509, 510, 511, 512, 513, 514, 515, 516, 517, 518, 519,520, 521, 522, 523, 524, 525, 526, 527, 528, 529, 530, 531,532, 533, 534, 535, 536, 537, 538, 539, 540, 541, 542, 543,544, 545, 546, 547, 548, 549, 550: n = A,T,C or G
tgggattaactctagccccctcatcctttccccttttatctcatctttggtggcctgtgcgtcttgttaccctccctcactcackaagtctgcttttcattaagaaatatgctgtcaaacaattatacctcaagatagagaaatatttgaaccaaagaatctaggagctaaaagaaaaagctggtagtaagatattcaatatattaaaaagaaatagaaactcagtgagatgtggttccattccctgagaatacccaacatgtcagcttaggacagaaatgtgattaaaaggcaaatttcctgagtcccagactagaactctgtattaaagctatgatttacaacaatgagaagtaggtttaatttagtccatacactaagcccaatataatttgcatgatgaaggaaaatatttttaaaaagtattcatgtgagaataaaatggagaaatgtattgggcctttaaacttgtttaaacatctttttgggctattgtagacagaattcnnnnnnnnnnnnnnnnnnnnnnnnnnnnnnnnnnnnnnnnnnn

SEQ ID NO: 586931 - DNA, 434 bp, Homo sapiens
gacacatagtagacacttaataaatatttattaaatgagtgcttgaatgaattaattgattaagctgaagagttaggcaagaacaagatcaaaacaaggtcttgtggcctaagacaaggattattttaaaagcaaatcattttttagcaggcagattggcatgaccagayagtttgttaagaagctcatttggactgaaaaaggaagtatgggattcagggcaacagataaaagacaattgtgatgatcccagtgagtgatgatacaggcttgaactatgattatggtaggggagataaagagatgtgaggtatttaagaggtgaaatcaattgtgaaatattgaatattgaaggatgaagaaaaagaagatgtcagatatgacaacagaacaaaatagagacagaacactggaatgatgagattttgcatgga

SEQ ID NO: 586932 - DNA, 434 bp, Homo sapiens
gacacatagtagacacttaataaatatttattaaatgagtgcttgaatgaattaattgattaagctgaagagttaggcaagaacaagatcaaaacaaggtcttgtggcctaagacaaggattattttaaaagcaaatcattttttagcaggcagattggcatgaccagacagtttgttaagaagctcatttggactgaaaaaggaagtatgggattcagggcaacagataaaagrcaattgtgatgatcccagtgagtgatgatacaggcttgaactatgattatggtaggggagataaagagatgtgaggtatttaagaggtgaaatcaattgtgaaatattgaatattgaaggatgaagaaaaagaagatgtcagatatgacaacagaacaaaatagagacagaacactggaatgatgagattttgcatgga

SEQ ID NO: 586933 - DNA, 366 bp, Homo sapiens
cttgatcctggtccaaatacttctctcctccctgaaatatttgctttcatattggcttcctagtaacagacagaatgtcattttataatatttcaaattatatcatctttctgctcaaatttctcctcctgattccttcagaaattctcaatttctttaagtctgtgctcacatgttttatataacgtagcatgatatccctctaatctgagctctttttaacctatttatcccacttcagtatatttcattctcatgacacttaatatatatttctttgttttrtttgtatattgtctatcttcctccatactgctgaaatactggaggccagaaatttgctctgttttgttcactgatatatcg

SEQ ID NO: 586934 - DNA, 355 bp, Homo sapiens
caactggacagtaatagtgacacaasctattaaaacctctggaatacagaaaaggtagtattaagaggaaagttcatagccttaaatgcctacctcaagaagtctgaaagagcacagaaaatctcaagtcacacctcaaagaactagagaaacaaaaatagaccaaaaccaaacccagcagaagaaaagaaataaccaagatcagagcagaactaaatgaaattgaaaaaaaaatacgaaagataaataaaacaaaaagctgagtctttgaaaagataaataaaattgatagaccattagcaagattaaccaagaaaagaagagaaaagatccaaaataagctcatttagaaaca

SEQ ID NO: 586935 - DNA, 350 bp, Homo sapiens
aatgcctacctcaagaagtctgaaagagcacagaaaatctcaagtcacacctcaaagaactagagaaacaaaaatagaccaaaaccaaacccagcagaagaaaagaaataaccaagatcagagcagaactaaatgaaattgaaaaaaaaatacgaaagrtaaataaaacaaaaagctgagtctttgaaaagataaataaaattgatagaccattagcaagattaaccaagaaaagaagagaaaagatccaaaataagctcatttagaaacaaaacaggagacattacaatcaacaccacagaaatacaaaagatcattcaaggctactgtgaacaactttacatgtgtaa

SEQ ID NO: 586936 - DNA, 558 bp, Homo sapiens
taaaacaaaaagctgagtctttgaaaagataaataaaattgatagaccattagcaagattaaccaagaaaagaagagaaaagatccaaaataagctcatttagaaacaaaacaggagacattacaatcaacaccacagaaatacaaaagatcattcaaggctactgtgaacaactttacatgtgtaaactagaaaatctagagaagatggataaattcctggaaatatataacccttctagcttaacccaggaagaattagaaaccctgaacagatcaataacaagcagcgagatagaaatgggaataaaaaaactgccaaccataaaaactccaggaccagacagattcacagctgaattctatcagacattcaaagaaaagttgataccaatcttactgacactattccacaaggtagagaaagagggaatcctccctaaatcattctatgaagccaatatccccctaataccaaaaccaggaaaggatgtagaaaaaaaacyttgatgaatatagatgcaaaaatccttaacaaaatattagctaaccaaatcaa

SEQ ID NO: 586937 - DNA, 558 bp, Homo sapiens
taaaacaaaaagctgagtctttgaaaagataaataaaattgatagaccattagcaagattaaccaagaaaagaagagaaaagatccaaaataagctcatttagaaacaaaacaggagacattacaatcaacaccacagaaatacaaaagatcattcaaggctactgtgaacaactttacatgtgtaaactagaaaatctagagaagatggataaattcctggaaatatataacccttctagcttaacccaggaagaattagaaaccctgaacagatcaataacaagcagcgagatagaaatgggaataaaaaaactgccaaccataaaaactccaggaccagacagattcacagctgaattctatcagacattcaaagaaaagttgataccaatcttactgacactattccacaaggtagagaaagagggaatcctccctaaatcattctatgaagccaatatccccctaataccaaaaccaggaaaggatgtagaaaaaaaactytgatgaatatagatgcaaaaatccttaacaaaatattagctaaccaaatcaa

SEQ ID NO: 586938 - DNA, 437 bp, Homo sapiens
ttgcaaactatgtatctgacacaggtctaatatccagcatctataaagaacttaaacaaatttacaagaaaaaaacaaacaaccccattaaamaatgggcaaagaatatgaacagagacttctcaaaagaagacatacatgcagccaacaatcatatgagaaaaaactaaacatcactgatcagtagagaaatgcaaatcaaaaccacaatgaggtaccatctcacaccaatcagaatggctattattactattatttagtttatatgatgactttctagtacacccatagtttttatttattctagtaaatgttatttttttccttgtgtatattagattttttattttttattatactttaaggtctggggtacatgtgcagaaagtgcagttttgttacataggtatacacgtgccacggtggtttgctgcacc

SEQ ID NO: 586939 - DNA, 605 bp, Homo sapiens
attttccttgtctaattgaaaggttaaaagatgctatatatctttaaacataccttgcattaattatraaagaggctgagttggtttccatgcatttaatgtcttttctgggaactgacatttcttatctgttgatttggaatgtcacctacatgttatgttgagccatatataattaccatttttataaggaagcagacatgaaaattagtaattttatatagtgtaactcagatagatatataggtagacagataagagtatatatagctgcatcaaaaatttaattaatatggcttaaaaatacataatgacatgccttattattcatctttttcagaaatatctcagccattcttgaatgttatttttctacctataaagatatcatctttttccaaacaaattaatatgccatttaaaaatttgtatttaatttcattgatagtctaatttaggaataatcaatatctttacatgattgcctttttttatccttatcttctggtatacaaaagtctacttttgtaaaaatgtcaaatccttgatatcttggtacacacttagtttttatttcatataggtcttgtgtatttttattaatt

SEQ ID NO: 586940 - DNA, 470 bp, Homo sapiens
aggcttgccatgttggacagcttgcctacctcttttttttttttgtttatctctttctcttcttcttccctatccttttstttctgggatccctgggctcttcatacccatccctttgctgagcagctctccatgctggagtactctaaataaagactttgctacaaggctcataatgttccttatctctcttctcatggaaatttgtcaggtgactctcttaggtccttgttctttgctgggtttaataccataaaccactgtgatttagggtgttaatggttatcagtcatcaaatgccttgtttcatcatcctttgcatttgaagaatacttttcaatgttttgctgcaaaggaaggtgtggtggatgtggcagtgcattgccctggttctctattccacatggaagaattcattctccagctgctcagtgttggctgctgatggctcacagctgcatccctctcca

SEQ ID NO: 586941 - DNA, 365 bp, Homo sapiens
taaagtcctatgcaattgaattacaacatagaaaatagattaattttgtattagcactctctacacttgctccaaaaacaacatccagggatcttaagttctctgaataaatttgattatatttatytgtcctggtcagagccctgtagcaactcagagtaggtggcttcacttcccacatcacaccaatctcacagtacaaacaggatcagagttctgtaaataaataatgtctacacaatagcataaaaatagttgaaaacaaaaagtttcaacagaaattttcataaaataatataaagttatggttttagatcattttctcccactgaattaattaaaataaactttggttttaaaaaaac

SEQ ID NO: 586942 - DNA, 590 bp, Homo sapiens
aaaaacaaacaaccccatcaaaaactggcaaaggacatgaacagacacttctcaaaagaagacatttatgcagttgagttataatattacaaaaataaatgataatagtatctggaaaagtgaggaaaaggtttaataaacacattcttaaacatgtatttaaataaagaatatrctaattctttatttaaatattcttaaatatgtgtttaaataaagaatataaaagagttaccttctttaaaaaaactagcctttggggtaaaataaaagaggcaaacagtaacttttagtagaagctttatattcttggacttttatatttctatattttctctattacaaagcttaaaacatgaaacattaacttacaaatagcaggaaacataaagatatatcaagtagttacaaaatgcaatggagcaagatgttgagataaaattggctggagattgaagtcggaaagatcaaaagcagaaagattcaggccttagaaagtgcaatcagaagactgtcaaatttcactgatatctcaatgcagtttgtagattgatggatgctgctaataatatatcaatgtaaatgtctat

SEQ ID NO: 586943 - DNA, 590 bp, Homo sapiens
aaaaacaaacaaccccatcaaaaactggcaaaggacatgaacagacacttctcaaaagaagacatttatgcagttgagttataatattacaaaaataaatgataatagtatctggaaaagtgaggaaaaggtttaataaacacattcttaaacatgtatttaaataaagaatatactaattctttatttaaatattcttaaatatgtgtttaaataaagaatataaaagagttaccttctttaaaaaaactagcctttggggtaaaataaaagaggcaaacagtaacttttagtagaagctttatattcttgkacttttatatttctatattttctctattacaaagcttaaaacatgaaacattaacttacaaatagcaggaaacataaagatatatcaagtagttacaaaatgcaatggagcaagatgttgagataaaattggctggagattgaagtcggaaagatcaaaagcagaaagattcaggccttagaaagtgcaatcagaagactgtcaaatttcactgatatctcaatgcagtttgtagattgatggatgctgctaataatatatcaatgtaaatgtctat

SEQ ID NO: 586944 - DNA, 590 bp, Homo sapiens
aaaaacaaacaaccccatcaaaaactggcaaaggacatgaacagacacttctcaaaagaagacatttatgcagttgagttataatattacaaaaataaatgataatagtatctggaaaagtgaggaaaaggtttaataaacacattcttaaacatgtatttaaataaagaatatactaattctttatttaaatattcttaaatatgtgtttaaataaagaatataaaagagttaccttctttaaaaaaactagcctttggggtaaaataaaagaggcaaacagtaacttttagtagaagctttatattcttggacttttatatttctatattttctctattacaaagcttaaaacatgaaacattaacttacaaatagcaggaaacataaagatatatcaagtagttacaaaatgcaatggagcaagatgttgagataaaattggctggagattgaagtcggaaagatcaaaagyagaaagattcaggccttagaaagtgcaatcagaagactgtcaaatttcactgatatctcaatgcagtttgtagattgatggatgctgctaataatatatcaatgtaaatgtctat

SEQ ID NO: 586945 - DNA, 610 bp, Homo sapiens
tttttgtttactttttttgttttaatttatttttgagggtccttagtaggtgtatatatttatgggggggtacataaaatgttttgatacaggcgtacaatgtgaaataagtacatcatggagaatagggtatccatcccctcaagcatttattgtttgtattataaacaattcaattgcactcttttaattattttaaaatgtaccattaaattattgactatagttaccctgttatgctatcaaatagcagatcttattcattctattttttttaatccattaaccatccccactccccacaacagccccccactaccttcccaacctctggtaaccattcctctaatctctatgtccatgagtttaaatattttgatttttagtgagaacatgtgatgtttgtctttctgtgcctggcttatttcacttaacatcatgatctcaagttccatattcttatgaatttttggattccagtgagggtgtgatgatagtaaagacttatttttattttcttttttactgccaactttcttatgcccttgttcttaaatgatcattattaatagttcatgatttttgttkaaagaatagagtggataacaac

SEQ ID NO: 586946 - DNA, 325 bp, Homo sapiens
cagtgttaatagtgacaaaggtggcttcatgtgcatactatctgtttagttgtgcaaaattccatgctcccaaagggccctgtttaatactctgcagttactctcttgaaattctcaataatttttgaataaaaaactatgcatttccctccctccctccctccttccttcccttccttccttccttccttccttccttccttccttccttccttccttcttcctccctttccttctttctttgacagtgtctcactctgttacccasgctggagtgcagtggtgcaatcatggctcactgcagcctcaatctcctggactcaat

SEQ ID NO: 586947 - DNA, 325 bp, Homo sapiens
cagtgttaatagtgacaaaggtggcttcatgtgcatactatctgtttagttgtgcaaaattccatgctcccaaagggccctgtttaatactctgcagttactctcttgaaattctcaataatttttgaataaaaaactatgcatttccctccctccctccctccttccttcccttccttccttccttccttccttccttccttccttccttccttccttcttcctccctttccttctttctttgacagtgtctcactctgttacccaggckggagtgcagtggtgcaatcatggctcactgcagcctcaatctcctggactcaat

SEQ ID NO: 586948 - DNA, 578 bp, Homo sapiens
aagcagaaccgagaaaaagttaagcatatcagtattgcataaagagaatggaggctagtatgtctagagtagaactgcacagagggagcagtaagacatgagattgaggaaggaggcagacaggtcatacaagatactttatggcatctggtttagatttcattataaacacgatacaaaacaaaytagcagcaatggtaatagaaaagaacaaaaccaatgtaagctctatgcaggcaggtaagtataactagctgtagagcctaaaatagagcttggcctataattttgttgaattaagacccagaaagtgatgattcttagctagaaaatataaatttaacagaaaacaaaaacaggaatatctaatttggcaatggtttctatttcatgaataattcatatacagtgttaacattttaaaaagtgatatagaaagtggttttagtgagagctcattcagaatatatttgtataatttataaatgactttagtcctgtatttataaaattactaaaggtctatagggcttgcttacatttttcagataggtttcactgtctttcattggtgaatt

SEQ ID NO: 586949 - DNA, 474 bp, Homo sapiens
gttttatctcttcttgcataagatcactaaataatgtataaccagcatttcttaagtctctctcaaccccttttcagccactacttttctttgagaataatttaatatcctgagttttaaatatacgtattgctatgcctaatttgaaattcayacaaaaggaacaacacaggacactgtgttttgtgtccaacatctttcacccaacattatggttatgagatttttaaaaatattattgaagttgtatttcatttataatcattactgtataatattccactgtgtaaacataccataattttctgttcggttggattttcccctattatttttagttgacatgtaataattatatctgtttatgggatacagggtaatatttcaataaatatacacaatgtgcaattaccatcagggcaattagcatatccatcacttcaaacatttgttattattttgtgttgtgaacat

SEQ ID NO: 586950 - DNA, 245 bp, Homo sapiens
tgtaatcttgaaacaaaaatataattaaatggtttaaaaaacttaaaatagaactaattaagggttggaaaataaaggagattttcttgaaggtatagccaaagagaaagcaatagaaattaagaaatcaaagacttaaaaataaacaacaacctaygtacaatctatttcaggaggttaaatcccagaaaatgaaaatactagaaagtcagagagaagatggaagaactaattcaaagctaatt

SEQ ID NO: 586951 - DNA, 564 bp, Homo sapiens
ctgtcttacttttatctcttaatcctgttatcttcgtaagctgaggatgtatgtcacctcaggaccactatgataattgtgttaactgtacaaattgattggaaaagatgtgtatttgaacaatatgaaatcagtgcaccttgaaaaagaacagaataacagcactttttagggaacgagggaagacaaccataaggtctgactgcctgcagggtcgggcagaaagagccatatttttcttcttgcagagagcccataaatggacgtgcaagtaggagagatatcactaagttattttcctagcaaggaatattaatattaagaccctgggaaaggaatgcattcctggggggaggtctataaacagccgctctgggaatgtctgtcctatgtggttgagataaggactgagatayaccctggtctcctgcagtacactcaggcttactaggatggaaactcctccctggtaaatttttggtcagaccagttctctgctctcaaaacctgttttctgttaagatgtttatcaagacaatatgtgcactgctgaacatagaccct

SEQ ID NO: 586952 - DNA, 539 bp, Homo sapiens
cttccaaaatgccttcaagactttttctcgttgtattgactattagcacttggcttccttttagtcatgcaaatctctctagcaagtggttatctgcaaaaattcctcttctgaaaatgctctgttcttctctacaacatgactaagttgcaaattttccaaactttgacacactgcttcctttttaaatatgtttcaaatttawgtcattactttgctcctatatctgattgtaggctgttagaagcagccaagccacatattgaatgctttgctgcttagaagtttcttcctccagataccctaagtcttcactcttaagttcaaccttccacaaatccctaagacatgaacacaatgcacccaagctctttgctaaggcataacatgagtgaggatttgttccagttgccaataaatttctcatgtccatctgagagcttgtcagcctggacttcactgtctatatttctatcagcattttggtcacaaccactcaactagtccctaagacattccaaaccttctttcttcttcct

SEQ ID NO: 586953 - DNA, 622 bp, Homo sapiens
atggacccagcatctgctcctgtgaggcctcacgaaacttccaatcacagcagaaggtgaaggggatgccagaaaatcctatggcaagagaggaagcaagagagaagggacaagaaaaagaggagagaggtgccaggctcttttaaatgactagcttttgtgtgaactaacagagtaagaactcacttattacaatgtagagtgcatcaagccatttataaatctatccccatgacccaaatacctcccatgaggccccacctccaacacaggggattatgtatcaacgtgagatttggaagggatgaacataataatctcaaataaactattttttyttattaatttatagaagtgtttatgtatgataaatatatatatacagttatgacatatatagtaagttaaataacttttgtctccataaatgcagtgcacattttatattacttgaaaaaaagaaatcatgtacatattagtcaacatttactgagttttgccaggttcctctatatgctcaaaggaataggaaacatcaaaacagccatgttctgtgtgacgaaaggggagaagagtctgtctgaagacacaattggaaatagtgaagaaaaaatgcaggttg

SEQ ID NO: 586954 - DNA, 639 bp, Homo sapiens
aaccctctgtttcatttctggaactccttgagcatttcttttagggcagatcttgttatgacaaattacctcagtctttgcttgtttgggaacgactttaattatcttctacttatgaacttttataatacaaaatttgggattgacacttattttcctgaagcacattgaaaatggaatcgcaatctcctctgacttgtaagatttctgctaagaagtccactattagtctgatggagttttccatataggttactagactctagtcgcttgctgattttaggatatttacctttgtgttaaacttagacaatctgagaattgtatgtcatgatgaggtctttcttgcaatgtatttctctrgagttctttgaacttcttttatcagaatgtcttgcccttttgctggacaaggaaagttttcctcaattattttctttttttctttttctgttttttttgtttttgtttgtttctgagaaagagtctcactcagttgcccaggctggagtgcaatggtgcgatctcagctcactgcaacctctgcctctcaggttcaagtgattctcctgcctcagcctcccgagtagctgggactacaggcatgcaccactgagcccagctaatttttgtattttt

SEQ ID NO: 586955 - DNA, 570 bp, Homo sapiens
aaggggaacatcacacacttggrcctgttgtggggtagggggaagggggagggatagcattaggagatgtacctaatgttaaatgacgagttaatgggtgcagcacaccgacatggcacatgtatatatatgtaacaaacctgcatgttgtgcacatgtaccctaaaacttaaagtataatttaaaaaaaacctgtgatctctatgtttagcaatttctgtctctgtcatagataataagagagagaggtccaccccagctttatcaaattttgtcactttacaaaatacatcatggttttatatatatgatttaattaagtgagcaattagaagttggtatgtgctcagcatggatagtaactagttagtgacttgttacattaagaagatttaactattacttaaaatagtagctgggcgtggtggcttgtgcctataatcccagctgttcaggaggctgaggtgggagaattgcttgagaccagtagttcaagaacagtgtgggcaacataatgagatcccatctctaaaaaatcaatcaatcaattaattaattaatttaaaattt

SEQ ID NO: 586956 - DNA, 570 bp, Homo sapiens
aaggggaacatcacacacttgggcctgttgtggggtagggggaagggggagggatagcattaggagatgtacctaatgttaaatgacragttaatgggtgcagcacaccgacatggcacatgtatatatatgtaacaaacctgcatgttgtgcacatgtaccctaaaacttaaagtataatttaaaaaaaacctgtgatctctatgtttagcaatttctgtctctgtcatagataataagagagagaggtccaccccagctttatcaaattttgtcactttacaaaatacatcatggttttatatatatgatttaattaagtgagcaattagaagttggtatgtgctcagcatggatagtaactagttagtgacttgttacattaagaagatttaactattacttaaaatagtagctgggcgtggtggcttgtgcctataatcccagctgttcaggaggctgaggtgggagaattgcttgagaccagtagttcaagaacagtgtgggcaacataatgagatcccatctctaaaaaatcaatcaatcaattaattaattaatttaaaattt

SEQ ID NO: 586957 - DNA, 570 bp, Homo sapiens
aaggggaacatcacacacttgggcctgttgtggggtagggggaagggggagggatagcattaggagatgtacctaatgttaaatgacgagttaatgggtgcagcacaccgacatggcacatgtatatatatgtaacaaacctgcatgttgtgcacatgtaccctaaaacttaaagtataatttaaaaaaaacctgtgatctctatktttagcaatttctgtctctgtcatagataataagagagagaggtccaccccagctttatcaaattttgtcactttacaaaatacatcatggttttatatatatgatttaattaagtgagcaattagaagttggtatgtgctcagcatggatagtaactagttagtgacttgttacattaagaagatttaactattacttaaaatagtagctgggcgtggtggcttgtgcctataatcccagctgttcaggaggctgaggtgggagaattgcttgagaccagtagttcaagaacagtgtgggcaacataatgagatcccatctctaaaaaatcaatcaatcaattaattaattaatttaaaattt

SEQ ID NO: 586958 - DNA, 563 bp, Homo sapiens
gctgctctgccaaagagaacaatctcaaggatttcacactgtagttatcagtgctcagcccacagattacacatgctgatgactcatgggctattaataattatatcccctttgccccacagtccccaaccataaggggactaagaagggcagcccccaccatgggctcagaaggccaaggaaactacccttttttggtggtaattttgcaaattaccataagcatggtcactcttaattttgtaggtttggctgaaattacaagtttcatgtttagtgcttttgaagtctttgaataccctggtttaagctaaataatttaaattttaactctaaaatagtataattagggataaaatggtttattctctaaacatgctgtattagtccattttcatgctgctaataaagacatactgagactgggcaatttacaaaagaaagagatttaattggacttaacagttccacgtggctggggcggcctcacaatcatggcggaaggcaaggaggagcaagtcacatcttacgtggatggcagcargcaaagagagagcaagctt

SEQ ID NO: 586959 - DNA, 352 bp, Homo sapiens
tgcatgcatgtattgatacaagcaagcttccatcaaaaaatgactttcttctaaaggttcatatggcataaacattaacacttttcctttactgcctcacagatcagcttttcctccaaagattctctttctggaaaagtaaagtccagaaagagaaatatttaattgttacagtcataaaaattatacttattcactaatgctgcagccagggtagaagagagagaagttccaactttagccataytttcatcaaccaacttttccttctacttttaaagacaagcatacaggaatgaaagtgagtgttgttattctggagaaattctcttaaatttgtgaaagaacaaat

SEQ ID NO: 586960 - DNA, 600 bp, Homo sapiens
gtgtctttctgaagcagtgccctgtgtaggaatggggataataagcggaagctactttgccatagtctccctatatctccattcatcctctgatctgtggttttattgtggtttaaatctgtctttgttattgttgttttattttctggtacctgaatattacatttcaagaaatatttttattttatcatagttttagttttatagaaagtagtaaagataatagagtttcrtatatcctacagcttcctgaaatgttagcaccttatatcaccgtagcatatttatgaaaactcagaaattgacagtggtacaaaactattaactggaaaagattttcttcatattttatgaggttttccactagtgtcatttttctgttctaggatctaatccaagataccacattacatttactgtcaggcatataactgaccgattgttgtctacatagtttagactttccaacccagccctacacagtacttacagtttctctaggtcagatgcctggcagagatttcaagggaaggctcatctggggaaggatccccttccaagctcctgggattcttgggaggattcaatttctgtccaggt

SEQ ID NO: 586961 - DNA, 600 bp, Homo sapiens
gtgtctttctgaagcagtgccctgtgtaggaatggggataataagcggaagctactttgccatagtctccctatatctccattcatcctctgatctgtggttttattgtggtttaaatctgtctttgttattgttgttttattttctggtacctgaatattacatttcaagaaatatttttattttatcatagttttagttttatagaaagtagtaaagataatagagtttcatatatcctacagcttcctgaaatgttarcaccttatatcaccgtagcatatttatgaaaactcagaaattgacagtggtacaaaactattaactggaaaagattttcttcatattttatgaggttttccactagtgtcatttttctgttctaggatctaatccaagataccacattacatttactgtcaggcatataactgaccgattgttgtctacatagtttagactttccaacccagccctacacagtacttacagtttctctaggtcagatgcctggcagagatttcaagggaaggctcatctggggaaggatccccttccaagctcctgggattcttgggaggattcaatttctgtccaggt

SEQ ID NO: 586962 - DNA, 600 bp, Homo sapiens
gtgtctttctgaagcagtgccctgtgtaggaatggggataataagcggaagctactttgccatagtctccctatatctccattcatcctctgatctgtggttttattgtggtttaaatctgtctttgttattgttgttttattttctggtacctgaatattacatttcaagaaatatttttattttatcatagttttagttttatagaaagtagtaaagataatagagtttcatatatcctacagcttcctgaaatgttagcaccttatatcaccrtagcatatttatgaaaactcagaaattgacagtggtacaaaactattaactggaaaagattttcttcatattttatgaggttttccactagtgtcatttttctgttctaggatctaatccaagataccacattacatttactgtcaggcatataactgaccgattgttgtctacatagtttagactttccaacccagccctacacagtacttacagtttctctaggtcagatgcctggcagagatttcaagggaaggctcatctggggaaggatccccttccaagctcctgggattcttgggaggattcaatttctgtccaggt

SEQ ID NO: 586963 - DNA, 491 bp, Homo sapiens
cacagctagacaaagacatttcaagaaaagaaaattacagaccaatgtgaaacaggcaaaaattatcaaggaaatactatcaaaattaactagtaacatataaaaaggagtatacactaggagcaaaactatttatccctgcaatgtaagtctggtkaaacatacaaaaacaactggtgttataaactatactaacagaattttttaaaaagactcatggtcacctctaaagacacagaataggcatttgacaaattccaaacccattcatgataaaagctctgggaaaattaggcatagaagaaaactttctaaatctacaaagagcatccatggaaaactcacataacatgaggaaagacatataagccaacagaatagagttgagcaccccaaaatcaatctttatatatagggcaaacttattttcaaagttgaaaaattaattcaacatgaaaaaatagtttttcaacaaatgttgctgggagaaa

SEQ ID NO: 586964 - DNA, 440 bp, Homo sapiens
tttgatattaattgatatagtaataagattggttagagaaatagcaaagagcaagctccccatcctatgaccatatcagcaccagaagagaaaaacatatctacacagtttttcccttggcataggccttggtattctgttagggaacaggttatraaggaaatacaaagtgtctttgtacttactttcagaatatattttctttaacatgaaaagaatccaaggcctttttgcttctaattgctttttgtgtatctactaccatcccttgctaaattattgatacgtttccttaaatctcggcatgatgtcctacattccaaattttcaatagctgaaaatttcaccttttcagtgccttcatgtttatctcagtaaaaagttgagaaagaatgtaatagagttatttaatcagatttttttcatctaccataattttt

SEQ ID NO: 586965 - DNA, 440 bp, Homo sapiens
tttgatattaattgatatagtaataagattggttagagaaatagcaaagagcaagctccccatcctatgaccatatcagcaccagaagagaaaaacatatctacacagtttttcccttggcataggccttggtattctgttagggaacaggttataaaggaaatacaaagtgtctttgtacttactttcagaatatattttctttaacatgaaaagaatccaaggcctttttgcttctaattgctttttgtgtatctactaccatcccttgctaaattattgatacgtttcctyaaatctcggcatgatgtcctacattccaaattttcaatagctgaaaatttcaccttttcagtgccttcatgtttatctcagtaaaaagttgagaaagaatgtaatagagttatttaatcagatttttttcatctaccataattttt

SEQ ID NO: 586966 - DNA, 283 bp, Homo sapiens
gggacagtaatgaagatacagcaaatgaattgttttaatatataatcaaggcaaagttatcatcagaattataggaaaaaatccactaaatttggtttatgagaaattcatgattcattgtataccttgatactgggcttaaagcagcaatcctaattccagatctaccttcaagtctgggtcagtgttctcaaatgctgccagtttcatgtcaggacyggcttaatattgaaggtaactgagcattgctaatgtctgactggagctgaaagaggccaaaagc

SEQ ID NO: 586967 - DNA, 579 bp, Homo sapiens
ctgttgggattacaggcttgagacactgtgcccagcctatctttccactttctgatgtaaaaagttcttaattttgtgagcgtcaatatgtctaatcttttttaatggttaaatggctttttgtgtcttattcacttacattttctactaaaagttttaaagttttgtttctgacatgtaagtctttggtcctttggaatttaatgtttgtatatagaatgaagtaagaatataatttcattttgtttcctatatcaataaccattatttttctattctatttattgaaaagtcctttctttccttgctgatctgccatgtcaactacatcacatatcaaagattaaatttgtggagatttgtttgggaactctctgttctgtttcatcagtcagtttatcagtgaagaccacactgtcttaattgctgtagctttataaaattctgatatttgccagcacaaatctttcctcttcttcaataaggtctttgatattcttggcmccttcccttttccatatacatatacatatatatgatatatttcatatatatgatatatattatacatcatatatt

SEQ ID NO: 586968 - DNA, 572 bp, Homo sapiens
tgtctgtggcctgtaactatagctacatggtcaaatattgttttttcatatctacctctcttggggtgtgtgggyaaatgccaaagaacaaaatagctggaatagttttgagaaatttctccacgtttttaaaacccattcattgtatgggagagatgacaaatctatgtagaaatcctgtttgggcctcacacaaaaataaccccacagttctctgtggtatttggccatctcctgtttttttgtttcagggtgacacaaggttagataaaccacaagcaccgttctactggagtcaaggttacagtaaagaaagaaagggttggtgaatgtcaaggtcagtggttgtggaaaacagaatgggtggtgagctataaaaatgggagcttggttttggcaaattgtgaagcaggtaaagattgcctgcaatattccctcccttttcctctccctacacacctccacttctcccctctaccaaaagcctattcttcacatggctatctgggtctctgtgcgctcaagtcacaatggaaactaaagttccattgctgaagtactggctgatgctt

SEQ ID NO: 586969 - DNA, 597 bp, Homo sapiens
ataatctagctcagattcattccaccaactcctagctgctgttcttgaagaaaggctaattaaagtaattaacatatttcagacaaaataacccacccaaatattaacaaaacctctttcataagaaaaacacaaaatgtggttctgtcgttttatttctgcttgagaaggcaatattatgaaggaatgtgaaatcctttaattagacacaatttaaaagccagacagaaaattgagatgctgaaatttctacctagagaagcaatattcatactcaagagcagcagacaatgtactgcacacagacagatgttttacagtgaattaagattatctcatcacacaggaatattactctgttataaccacattaagatacacttcgatcacaacaagttatagcttcataatgagattaaaattctaccctggtagatgcctcaagccagattttaaaaagaaattctgtttttttcggttataggtatttttcttgtatgcatrtaaatttcacagttaggaaaaagtgcaggtgctaagaagtggatgaagctgaaactggatattgagagagtcttgtgaacatggaatcgagaa

SEQ ID NO: 586970 - DNA, 534 bp, Homo sapiens
ggtgggagttgaacaatgagaacatatggacacagggaggggaacatcacacaccagggactgtcagggggtgggggtaggggagggatagcattaggagaaatacctaatgtagatgcaggttgatgrgtgcagcaaaccaccatggcacgtgtatacctatgtaacaaacctgcatgttctgcacgtgtatcccagaacttaaagtataatttaaaaaaaaaagaaaatatttccaacaagaacaaaaaagaaaatgtggtatgtgtacactatggagtactgtgcagccacaaaaaaaaagagcaaaatcatgtcacttgtagcaacatggatgaagctggaggccattatcctaagtaaactaactcaaacaaacaaacaaaaaaaaagagattatagagaacacacatcacacatgtcctcttggttctgtttctctggagaaccctaatatacctgccttgaaataaaagaaatataatcaatagcagacccacttgctttaagctgatgatgtcccaacttttgtct

SEQ ID NO: 586971 - DNA, 561 bp, Homo sapiens
ttacctttcatcacagactttataggcttaccagcaggttctaaccactacccctagagcatttggagtcacatggcagccactgccacagtggcccaatgcacagctgttatgtcttgaacaatagccctgtttggagtccattagaagatcttgggtggttatcagccacttccagtgatcttgctgtgccctgactttttccttcatacctcacaactatctgcttccaatattaatttggaaatggagttcagccttaacatctttctctaacatcttcctttgaaataaaaaataaaaaagctatggaacttttttcaagcagttttccttaaaactgggtttcattacaaatttgaaatgttttcaaatttttcaggtaataaaaagtcagaaaaagggagaaaaatctgtcttttctgaattcttttttatatggtgatcacttttcttatcaggaaaaaaagaataagtgaattcattggmtctacattatttcttttttatccacaatataacttttctgtatctacatagcttgtgatctgatatatttaa

SEQ ID NO: 586972 - DNA, 594 bp, Homo sapiens
gttagtatgtaacaaagctggaattcagaatcacgcctctctgatggcaaagctacttctytctttatgccatgagctttcatgaacttaccattctcacccaagtggccatgtctgaccatcttatctggttcatggaccactactccagtacagctaaggattcttagcatcttgcctgcaataccaacctgtgcaaaatgagacttgtctgggactaattatatgtaagtttctctccaattcttactatttggccttcttcttgggtcattaaaggtcctcccaaatgcattattattattatttttctttatttcaagagcttaatcccttttctaaagtcttatgtggttcctcaagtgagcactacttttccctgctttctaaacaaagctggctattgatttattacttttttagtgtggcagcaaattaatacaccagaaagcagtttgtcagatgatccaaagaatgcaaaacaattatttttttgggaaagtgaacaccagggcttcctatgtgagatttgatatgagtgataccatcttcccagaccttcttttgttctggaggagaaaaagctggtctggt

SEQ ID NO: 586973 - DNA, 457 bp, Homo sapiens
aaaaatgttccatgtggggaaaaacagtgccatgtattatgtttaaattaaatgttcaagaaactctaaaatatgggagataatgaaggtttttccatctagtcctaattgttttgtctctgaccttctctcctagcacctacttcaaacaatcacacccacgctgccccagaagatgcttctatccaggccttaactgttagcagatccctactctttcttcatgatccaattcacttgtcgtctcttctgtgaatcctttcatttcccagacactctgcttcatggcatcacagagctatattygcttctctattaaagcacatatcatgttaagctgcaattccttggagtaccggtctgcttcacaagttttttctatctttatgttccttggacttagcaaactgccccgcattaagtaggggttcacaaatgtttgttgaagagatgagtg

SEQ ID NO: 586974 - DNA, 457 bp, Homo sapiens
aaaaatgttccatgtggggaaaaacagtgccatgtattatgtttaaattaaatgttcaagaaactctaaaatatgggagataatgaaggtttttccatctagtcctaattgttttgtctctgaccttctctcctagcacctacttcaaacaatcacacccacgctgccccagaagatgcttctatccaggccttaactgttagcagatccctactctttcttcatgatccaattcacttgtcgtctcttctgtgaatcctttcatttcccagacactctgcttcatggcatcacagagctatatttgcttctctattaaagcacatatcatgttaagctgcaattccttggagtaccggtctgcttcacaagttttttctatytttatgttccttggacttagcaaactgccccgcattaagtaggggttcacaaatgtttgttgaagagatgagtg

SEQ ID NO: 586975 - DNA, 442 bp, Homo sapiens
tacatatgtctttacatatttaaagtggatttcttaaagacagcatatagttgggtattgtttttaattcaatctgacaatctctaccttccaataggggtatctagattatttatatttaacttaattattgatacggttggatttaagtttaccatctttcaaggtatttgtctcatttctttttccttttgtgtcttttaaaaatattttaatatgttaataattccattttatctccactttttaatttttytagtgattgctttagggtttaaaataagcacctttaagttacaacagtctacttccagacattattatacaacttctcctatagtgtaagaaccttgaaacattgtatatgcttttcccactctcatttatttcctcctcccatgttattgttgctacacgttttacttctgcatgtaaccccagc

SEQ ID NO: 586976 - DNA, 567 bp, Homo sapiens
aagttcaacatctccttaagttgttagctccagaataaacctgcttttcctcacaccatcccttgtttctggagttttggcttctgagtgaagagcagctgaacccgagtttggttatagtagtgcagtctacgacctcctattcctccatcctgctgacaccacttcacattatttcctgaaatttgtattcttaaaagtgatatagacaaggtttagtcagatgtgagaaggcccttatttyttttggaccatggatttttaggagacttagaaagtgtgcaaaaccatgaagtgcaaatgcatagcaaaaggcagcggaaatttgtactttggtcttcatctaagtatttccgtagacaagcatcataaaccatgggctattgtaaacatcctaaatcagcgacagtttactccatggcacttatgtgaaaaataaaatgattaaatagattgcttcctaatacttgaattaagtttcaggttttgattttttttttttttttttttttttcagacagagtcttactctgtcacccaggctggagtgcagtggcgctatttcgg

SEQ ID NO: 586977 - DNA, 525 bp, Homo sapiens
catgcccggctaatttttgtatttttagcagagacggggtttcaccatgttggccaggctagtcttgaactcctgacctcaagtgatctgcctgcctcggcctcccaaartattaggattacaggcatgagccactgcacccggcctattctcttaatttttaaactctaccttatctttctttttctcaaattcttaggtatggtgacaattagcattaatttgtgacttttagatatctgaagatattcttttcactgccatggcttttaatactataactatacttccactctggatttgaatttccagcttcatcccaactctgtcactaagctttaaacccacgtgtctactgaccactggacacctctactcaggtgtccccagactcctcaaatccaatcccactcacccccaaaatatcttcctttttatattttatgtccttaaactccttctcctttgaaataaatctctgaatcagtcaacacttaccttgtctaaagctagaaatcctaatac

SEQ ID NO: 586978 - DNA, 550 bp, Homo sapiens
ttttgaaatgtgaggacatgagatttgggatgagccggggcagaataacatggtgtggctctgtcaccacccaaagttttatcttggattgtagtttttctaattcccacgtgtcaaaagggagaccaggtggaggtaattgaatcacggtggtggtttccctcacactgttctcatgacagtgggtgagttcccttgagatctgatgcttttataagtgtttggtagttcctcctgcaattattctgcttcctgcctccttgtgaagaaggtgccttgctttcccttcaccttctgccatgattgtaagctttctgagggcttgccagccgtgcagaactgtgaatcaattaaacctctttcttttataaattacccagtcttgggaagttctttatagcagtgtgaaaacaggctaatacrctgggggacctgagcaccagttcattatgctctcattttttcctgtaagaaaaatcatgggccaaggggtctctcttggcactcagctgtgtagacttgcaggagtggcaaaatgggcaaagtaaag

SEQ ID NO: 586979 - DNA, 443 bp, Homo sapiens
ggcaatataataaacgtaaaaatgtttgtaaaatgtaaaaaatacaaataaaataaatttaaaataaaatgtgttgtagctattgtttagctacgtagtatagggtaaaagagaaggcaagccagcatttcatagcatttttcatttaaggttttccatgtgtttcacagtgctrcattcccatttctcagtataaacctggagtaggaaagttaagttggcaagttaactagtggtgaattacaaccagtgcatatcagtgcacaaaagctgatggtgtgcatctcttcctgatgccccttagtaacttcatgttgacatataaaaatcagccatgagtaggtacactcataccatagaaattgaaaaacaccacaaatctggcctgtcctcatcccaagagctggctattaaacattcaccagcacatcgcagaaaataac

SEQ ID NO: 586980 - DNA, 580 bp, Homo sapiens
attatgctataattattttatatgtagagagagataaataaaatatatagatgtaaaataattacagcatatatatgaatctccagagaatwataattctctatataattctgcaatcattttatttatatgtatatatatataaatgtatagatgtcatcatgttaggcttgatcacataatactatttgggcattccttcttttatgatcattgatatttgtggttgaaatttccttcagatttttgttatcctatttagattaacacttaggctgtacttagtacagttgacactaatttgactcaatttttactcgtcttccttgtctaggaagcacaaaacatcactatgtgcttgtacatttactggcttcaaatcaccaaaaaatacatgtgggaggcaagtgtgaaactgctgtttcatgtcctctccaggattagctaggatggggcagatctgcctaaggcagatggtgtgattcaaagtgttacccaggacaaagagagttgagataggctggaagaagagtcataataagaagggggagtaaatttgtctctgccaaagccagtctcc

SEQ ID NO: 586981 - DNA, 634 bp, Homo sapiens
gtgccgtttgctaagaccattggaaaagtgcagtattagggtgggagtgacccgatcttccaggtgccatctgtcaccccyttctttgactagcagagggaattccctgaccccttgtgcttcctgggtgagttgatgtctcacccttcttctgctcatgctcagtgcactgcacccactgtgctgcaccctcagtctgacactccccagtgagatgaacctggtacctcatttggaaatgcagaaatcacccatcttctgtgtcactcattctgggagctgtagacttgagctgttgctattcggccatcttggctccaatatctgttttgcttgtttctttgtttatgcaatcagtgttaaattgtccagtctaaaatcatgtattatattattttcaagcctcatggtaatttcaaatcaaaaagtgtaccacagatatacaaaaagtaaaaagcaagaaattagattataattcaagagaaatcaccttcactaaaaggaagacagaaagaaaggaaagaaggaagagaggaaaaaaatcaatcagaaaacaaaaaatagcagaagtaagtgcttatgactgataacattgaatttaaatgaactaaatactccagtcaaaagaaaaata

SEQ ID NO: 586982 - DNA, 634 bp, Homo sapiens
gtgccgtttgctaagaccattggaaaagtgcagtattagggtgggagtgacccgatcttccaggtgccatctgtcacccctttctttgactagcagagggaattccctgaccccttgtgcttcctgggtgagttgatgtctcacccttcttctgctcatgctcagtgcactgcacccactgtgctgcaccctcagtctgacactccccagtgagatgaacctggtacctcatttggaaatgcagaaatcacccatcttctgtgtcactcattctgggagctgtagacttgagctgttgctattcggccatcttggctccaatmtctgttttgcttgtttctttgtttatgcaatcagtgttaaattgtccagtctaaaatcatgtattatattattttcaagcctcatggtaatttcaaatcaaaaagtgtaccacagatatacaaaaagtaaaaagcaagaaattagattataattcaagagaaatcaccttcactaaaaggaagacagaaagaaaggaaagaaggaagagaggaaaaaaatcaatcagaaaacaaaaaatagcagaagtaagtgcttatgactgataacattgaatttaaatgaactaaatactccagtcaaaagaaaaata

SEQ ID NO: 586983 - DNA, 634 bp, Homo sapiens
gtgccgtttgctaagaccattggaaaagtgcagtattagggtgggagtgacccgatcttccaggtgccatctgtcacccctttctttgactagcagagggaattccctgaccccttgtgcttcctgggtgagttgatgtctcacccttcttctgctcatgctcagtgcactgcacccactgtgctgcaccctcagtctgacactccccagtgagatgaacctggtacctcatttggaaatgcagaaatcacccatcttctgtgtcactcattctgggagctgtagacttgagctgttgctattcggccatcttggctccaatayctgttttgcttgtttctttgtttatgcaatcagtgttaaattgtccagtctaaaatcatgtattatattattttcaagcctcatggtaatttcaaatcaaaaagtgtaccacagatatacaaaaagtaaaaagcaagaaattagattataattcaagagaaatcaccttcactaaaaggaagacagaaagaaaggaaagaaggaagagaggaaaaaaatcaatcagaaaacaaaaaatagcagaagtaagtgcttatgactgataacattgaatttaaatgaactaaatactccagtcaaaagaaaaata

SEQ ID NO: 586984 - DNA, 584 bp, Homo sapiens
aacatggagaaaccccgtctctactaaaaatacaaacaattagccaggaatcttggcacatacctgtaatcccagctacctgggaggctgaggcaggagaattgcttgaacccaggaggcagaggttgcgttgagccgagatcacacgattgcactccaactagggcaacaagagtgaaactttgtctccaaaaaaaaaaaaaaaaaaagagagagagaaagaaaaacaaaaaagaatagaaaaccaaacattgcatgttctcactcataagtgggagttgaacaatgaggacacatggacacagggaggggaacatatcacactggggcctgtcatgttgtgggaggctaggggaggaatagcgttaggagaaatacctatgtagatgacgggttgatgggtgcagcaaaccaccatggcacgtatataactatgtaacaaacctgcatgctctgcccatgtatcacagaacttaaagtacaacaaagaaaactttamgtaaatgcataaagtctagaacagctaatatattataatgaaaagtcaactataatcccagctcaaagagaacaccataaaatta

SEQ ID NO: 586985 - DNA, 568 bp, Homo sapiens
gacaaaattttatctagattgactaagaaaaaaggtaatattcaaattactaaactcaaaaataaaatgggtacattactaacaaatttttggagtaaaaaaggatgtaggagagtaccataaggaattatacactaaaaaattgaagagcctaaataaaatgaacaaattcctagaaacaaaaaacctactaagactgaatcagaaaagttgaataaacctattcagcaaggagattcaacaggaagattgcatcagtaatcgaaaacccagcaacaatgaaaagcctggaccagatggcttcactgttgaattctacccaatgtttaaagcagaattaacaccactttttctcaaactttttcaaaacattgaagacaaggtaattttttctaacttattctatgagtacagtattaccctgacaccaagccagacaaaggcaccataagaaaactacaaacaaacatcccttataaatgctgatgcaaaaatcctcaacaaaataccagcaactcmaacttagcagtacattaaaaggattatacactatgaatgagtataattg

SEQ ID NO: 586986 - DNA, 530 bp, Homo sapiens
gactttgaggcatttttctctcatacaaaattttaatttttatggagtcaaatacaaccttggcgccgatctggttcccgtactgcctggcctgcgtgagcackatttccctcatggctaaggtgggattacagaggcaggagaaacgcgagaaggagcagcagacacacagctacccagcccgccctccaccaacgctgaaatagcccggcgcccacctgcctcagcctcggattctgctcccagaataagcaacagctttacttccacacaggtgtacccacctgtgactcccttggcgctgaacgtctgttggggagctcaggtgtccttgctgtggtcctttccatgttggggaaagctggtcagctggagaacttcctcccacaactttagtaagactaaatccttagctgagctgaaactgaattttcctcccatgtgggaggagaagactcttgtttccatattcacagagtgcctttgcacctgtcctagattgatgacatattgttgtaattgatgagtct

SEQ ID NO: 586987 - DNA, 514 bp, Homo sapiens
tcttctttagagtgttctggcccagttctatgtatgctgaccagcacrcccataagcttcattggccctttcagtgcaggggccttggctgtggcatctacaaggacatttccttttatatggtcagtctctcttttgatgtcctctgcaattaattttagtcactttttggcagcaaagcagcattctaacaagctcaaaatctcaatgatgttgtatggaaaagtccttggggatcaggagtccctactcattccaaattgcagcataagcatgaagcactaaaaagtcatacttggaatcagtgtaaatgttaacttttaaatcctttgccaactggaggggctgagtaagttcaattaactcagcattttgagctgaggtcgaggccagcaagacttgtgccttgattctcttgtgctgactactaatagcatatctagccctcctgttttcctgatgcataaaacaacttacatctgttaaccactcttccttgggatggtcaagggtc

SEQ ID NO: 586988 - DNA, 514 bp, Homo sapiens
tcttctttagagtgttctggcccagttctatgtatgctgaccagcacgcccataagcttcattggccctttcagtgcaggggccttggctgtggcatctacaaggrcatttccttttatatggtcagtctctcttttgatgtcctctgcaattaattttagtcactttttggcagcaaagcagcattctaacaagctcaaaatctcaatgatgttgtatggaaaagtccttggggatcaggagtccctactcattccaaattgcagcataagcatgaagcactaaaaagtcatacttggaatcagtgtaaatgttaacttttaaatcctttgccaactggaggggctgagtaagttcaattaactcagcattttgagctgaggtcgaggccagcaagacttgtgccttgattctcttgtgctgactactaatagcatatctagccctcctgttttcctgatgcataaaacaacttacatctgttaaccactcttccttgggatggtcaagggtc

SEQ ID NO: 586989 - DNA, 514 bp, Homo sapiens
tcttctttagagtgttctggcccagttctatgtatgctgaccagcacgcccataagcttcattggccctttcagtgcaggggccttggctgtggcatctacaaggacatttccttttatatggtcagtctctcttttgatgtcctctgcaattaattttagtcactttttggcagcaaagcagcattctaacaagctcaaaatctcaatgatgttgtatggaaaagtccttggggatcaggagtccctacycattccaaattgcagcataagcatgaagcactaaaaagtcatacttggaatcagtgtaaatgttaacttttaaatcctttgccaactggaggggctgagtaagttcaattaactcagcattttgagctgaggtcgaggccagcaagacttgtgccttgattctcttgtgctgactactaatagcatatctagccctcctgttttcctgatgcataaaacaacttacatctgttaaccactcttccttgggatggtcaagggtc

SEQ ID NO: 586990 - DNA, 195 bp, Homo sapiens
acatccaaactgtccttaaatgtgctcccaacagcagtgtacragggttcccttcactccacatacccaccagcattttttttttcactgtcttctggataaaagccaccttaattggggtgaaatgatatctcattttgggtttgatttgcatttctatgatgatcagtaatgtggagcaccttttcatttgcc

SEQ ID NO: 586991 - DNA, 195 bp, Homo sapiens
acatccaaactgtccttaaatgtgctcccaacagcagtgtacaagggttcccttcactccacatacycaccagcattttttttttcactgtcttctggataaaagccaccttaattggggtgaaatgatatctcattttgggtttgatttgcatttctatgatgatcagtaatgtggagcaccttttcatttgcc

SEQ ID NO: 586992 - DNA, 195 bp, Homo sapiens
acatccaaactgtccttaaatgtgctcccaacagcagtgtacaagggttcccttcactccacatacccaccagcattttttttttcactgwcttctggataaaagccaccttaattggggtgaaatgatatctcattttgggtttgatttgcatttctatgatgatcagtaatgtggagcaccttttcatttgcc

SEQ ID NO: 586993 - DNA, 195 bp, Homo sapiens
acatccaaactgtccttaaatgtgctcccaacagcagtgtacaagggttcccttcactccacatacccaccagcattttttttttcactgtcttctggataaaagccaccttaaytggggtgaaatgatatctcattttgggtttgatttgcatttctatgatgatcagtaatgtggagcaccttttcatttgcc

SEQ ID NO: 586994 - DNA, 404 bp, Homo sapiens
gcttgccagttttcccagccctatttattacaaaaactgtctcatttttattgtgtgttcttggcacttttgttgaaaattaatttagctgtccctcycataggattccagaacgctgctgggttctaaatgtttgtcacataggattccagaacactgctacgagggtctgaatgtttgttcctcacaggggattccagaacactcctgctgtggtctgaatgtttgtccctcacataggattccagtacactgctgtgaggatctgaatgtttgtccctcatacagaatgccagttttcccagccctatttattacaaaaactgtcttattttttattgtatgttcttgacacttttgttgaaaattgatttagcagtatgagtttgtttctaaggtctcta

SEQ ID NO: 586995 - DNA, 404 bp, Homo sapiens
gcttgccagttttcccagccctatttattacaaaaactgtctcatttttattgtgtgttcttggcacttttgttgaaaattaatttagctgtccctcccataggattccagaaygctgctgggttctaaatgtttgtcacataggattccagaacactgctacgagggtctgaatgtttgttcctcacaggggattccagaacactcctgctgtggtctgaatgtttgtccctcacataggattccagtacactgctgtgaggatctgaatgtttgtccctcatacagaatgccagttttcccagccctatttattacaaaaactgtcttattttttattgtatgttcttgacacttttgttgaaaattgatttagcagtatgagtttgtttctaaggtctcta

SEQ ID NO: 586996 - DNA, 627 bp, Homo sapiens
agaaaataggtttaattggttcatggttctacacgctatacagaaagcatagcactggcttctgcttctggggaagcctctgacaactgacaaggcgaaaaataaatctggtgctcgcacatcacatggtaagtgcgagggcaggtgggaagtgtgacacacacttgtagataaccagctctgataaaaacttactattgtgggaatggcaccaaaggaaatgatgccaaactgttcatggaaatcttgccctcatgattcaatcacctcccctctaggcccacttccaacattgagaattatatttcaatataagattttggtgggaatacacatccaaactgtatcattttgctccyggccattccaaatttcatatccttctcatatttcaaaatgcaatcatgacttcccaataatccccaaagtcttaactgatttcagccttaactcaaaagtcaaaagtctcatctaagacaaggctaatttcttcctcctataagcctgtaaaataaaaaaaaaaaaaacaagtgaggttcttccaagatacaaatgaggcagaggcattgggtaaatactcctattctaaaatgaagaaatcagccaaaagaaaggggccacaggacc

SEQ ID NO: 586997 - DNA, 315 bp, Homo sapiens
ttcactttgctaggtgttttgcaaatttttgcaccaatattctcagatatgggcctgtagtttgctttttttaatatgtctttgtctggttttgatatcagggtaatactagcctcaaagaatgagtttggaaatgttctttccttctctagttttcagtctggtctaaacagacttttttattaaggctttaattttgttaatygttatttgtctgttcaggttttagatttattcctagttcaatcttggtaagttgtgtgtgtctaagaatttcgtctaggttttctaatttgttggcataaaattgcagat

SEQ ID NO: 586998 - DNA, 607 bp, Homo sapiens
ttatctatttatgtattgtttaattcactttgctaggtgttttgcaaatttttgcaccaatattctcagatatgggcctgtagtttgctttttttaatatgtctttgtctggttttgatatcagggtaatactagcctcaaagaatgagtttggaaatgttctttccttctctagttttcagtctggtctaaacagacttttttattaaggctttaattttgttaattgttattkgtctgttcaggttttagatttattcctagttcaatcttggtaagttgtgtgtgtctaagaatttcgtctaggttttctaatttgttggcataaaattgcagatagtattcactaatgatcctttgcttttctgaagcgttacttgtaatgtctcctttatcacctctgattttactaatttgtatcttttctgtttttcagttaccctgtttaaatatttgtcaatagttttacttttcaaaaaatcaactttgtctttcattaattctttacattattttcattattttaactttatctacttatgctctaatctttattatttattttcttctaattttgggttaggtttggtcttttcattctagttaa

SEQ ID NO: 586999 - DNA, 315 bp, Homo sapiens
ttcactttgctaggtgttttgcaaatttttgcaccaatattctcagatatgggcctgtagtttgctttttttaatatgtctttgtctggttttgatatcagggtaatactagcctcaaagaatgagtttggaaatgttctttccttctctagttttcagtctggtctaaacagacttttttattaaggctttaattttgttaattgttatttgtctgttcaggttttagatttwttcctagttcaatcttggtaagttgtgtgtgtctaagaatttcgtctaggttttctaatttgttggcataaaattgcagat

SEQ ID NO: 587000 - DNA, 607 bp, Homo sapiens
ttatctatttatgtattgtttaattcactttgctaggtgttttgcaaatttttgcaccaatattctcagatatgggcctgtagtttgctttttttaatatgtctttgtctggttttgatatcagggtaatactagcctcaaagaatgagtttggaaatgttctttccttctctagttttcagtctggtctaaacagacttttttattaaggctttaattttgttaattgttatttgtctgttcaggttttagatttattcctagttcaatcttggtaagttgtgtgtgtctaagaatttcgtctaggttttctaatttgttggcataaaattgcagatagtattcactaatgatcctttgcttttctgaagcgttacttgtaatgtctcctttwtcacctctgattttactaatttgtatcttttctgtttttcagttaccctgtttaaatatttgtcaatagttttacttttcaaaaaatcaactttgtctttcattaattctttacattattttcattattttaactttatctacttatgctctaatctttattatttattttcttctaattttgggttaggtttggtcttttcattctagttaa

SEQ ID NO: 587001 - DNA, 523 bp, Homo sapiens
gttttctaatttgttggcataaaattgcagatagtattcactaatgatcctttgcttttctgaagcgttacttgtaatgtctcctttatcacctctgattttactaatttgtatcttttctgtttttcagttaccctgtttaaatatttgtcaatagttttacttttcaaaaaatcaactttgtctttcattaattctttacattattttcattattttaactttatctacttatgctctaatctttattatttattttcttctaattttgggttargtttggtcttttcattctagttaattaagatgtattgttcaaagaaattcaggaagaggagccaagatggctgaataggaagagctccagtctacagctcccagcgtgagcgatgcagaagatgggtgatttctgcatttccatctgaggtaccgggttcatcgcactagggagtgccagacagtgggcacaggtcagtgggtgcacacaccatgtgcgggccaaagcagggtgaggcattgcctc

SEQ ID NO: 587002 - DNA, 609 bp, Homo sapiens
tgaaccttacttttcattgatcagttttcaaacactctttctgtagaatctgcaagtggatatttggagcgctttgrggcctatggtggaaaaggaagtatctttacataaaaactagacagatgcattctgacaaacttttttgtgatgtgtgcattcatctcagagagtagaaactttcttttcattgagcagctttgaaactctctttttgtagaatctgcaagtggacatttggagcacttttaggcctaaggtggaaaaggaaatatcttcaaacaaaaagtagacagaagcattctgacaaactttttcgtgatgtgtgctttcatctcacagagttgaaacttacttttcattgtgcacttttcattgtgcaggcctaaggtggaaaaggaaatatcttcacataaaaactaggtcgaagcattttgacaaacttctttgtgatgtgtgcattcatctcacagagttgaaacttactttgattgagtagttttgaaacactctttttgtagaatctgcaagtggatatttgtagcactttgagccctgttctggaaaatgaaataccttcacataaaatctgcacagaagcattctcagaaa

SEQ ID NO: 587003 - DNA, 609 bp, Homo sapiens
tgaaccttacttttcattgatcagttttcaaacactctttctgtagaatctgcaagtggatatttggagcgctttgaggcctrtggtggaaaaggaagtatctttacataaaaactagacagatgcattctgacaaacttttttgtgatgtgtgcattcatctcagagagtagaaactttcttttcattgagcagctttgaaactctctttttgtagaatctgcaagtggacatttggagcacttttaggcctaaggtggaaaaggaaatatcttcaaacaaaaagtagacagaagcattctgacaaactttttcgtgatgtgtgctttcatctcacagagttgaaacttacttttcattgtgcacttttcattgtgcaggcctaaggtggaaaaggaaatatcttcacataaaaactaggtcgaagcattttgacaaacttctttgtgatgtgtgcattcatctcacagagttgaaacttactttgattgagtagttttgaaacactctttttgtagaatctgcaagtggatatttgtagcactttgagccctgttctggaaaatgaaataccttcacataaaatctgcacagaagcattctcagaaa

SEQ ID NO: 587004 - DNA, 490 bp, Homo sapiens
aaagaattctaacaaactcctttgtgatgtgtacgttcatctcacagagttgaaaatttcttttgattgagcagtttggaaacactgtttttgtagaatctgcaattggacatttggggtgctgtgtggcctatgggagaatagtaaatatcttcacataaaatctagacagaagcaatatgagaaacttctttgtgatgtgtgcaatcatctcacccagttaaacctgtgttttgattgaacagttttgaaactctctttttgtagaatccacaagtggacaattggagcgctttgcggcctatgttagaaaaggaaatatcttcacataaaatctagatagaagcaatcagagaaacttctttgttaagtgtgcattcatctcacagaattaarcctttcttgtgattgaggagttttgaaactctctttttgtagaatctgcaagtggacattttgagtgctttgaggcctatagtggaaaaagaaa

SEQ ID NO: 587005 - DNA, 390 bp, Homo sapiens
tgaacgtatcttatgattgagcagttttgaagcactctttttatagaatctgcaagtggatatttggaacattttgagtactattgtgaaaaagaaatatcttcacgtaaatactacacagaagcattctgagaaacttctttgtgatgtgtgcattcaactcacagagttgaacctatcttttgattgagcagttttgaatctctctttttgaagaatctgcaastggatatttggagccctttgtggcctaaggtggaaaaggaaatatcttcaaacaaaaaatacacagaagcattctgagaaacttctttgtgatgtgttcattcatttcacagaattgatcctttcctttattgagcactttggaaacactgtttttgtagaatc

SEQ ID NO: 587006 - DNA, 610 bp, Homo sapiens
ctttgttctttgcactcctgccattgccatgagaagaaggcaccctggcaggccccgaccccaggaggatcagagacacttggagcagatgcagctcaaccaccacatttcgagctgaaacctcccaagcaacccatgctcatgagtgagaaatggtggcctatggtcgtaggcctctgaggtgtgggattacttgttacaaagctagagttaattaatagagatttctacctcacatccctacaaatcaaataacaaaggaaataaaatatgaaaagyagatttccaatttttagaagaaaacagaggacatattttatgacactaagcagagagaaaaattttatatgacacaaaacacagacaccgtaaaataaattactgataaattcattcagttgtattaaatgtagaagctttgatctgacaaaagaggcgatgaataaagttaaaagacaaagacagtgcatgatatgatttggctgtgtgtccccacctaaatctcatcttgaattgtcttcccataattctcctgtgtcctgggagggacctagtgggagataattggaatcatgggagccgttcccccatactgttctcctggtagtga

SEQ ID NO: 587007 - DNA, 300 bp, Homo sapiens
ttccagctttgctgtttcacagacttcactggtgatacctccaggtgcaggagagactgaggtgactagggtccagagtggacccccaaaatccacatgagccctagccctagggaagagtggtstgttaaaaacaaacagaaaacaacaacaacaacatcaacaaaaaaccccacaaaaactccattcaaaggtcagcaatgtcaaagatcaaaggtagataagcccacaaagatgagaaagcttcaacacaaaaacgctgaaaactcaaaaaggcagaatgcctcttctcctctaaat

SEQ ID NO: 587008 - DNA, 300 bp, Homo sapiens
ttccagctttgctgtttcacagacttcactggtgatacctccaggtgcaggagagactgaggtgactagggtccagagtggacccccaaaatccacatgagccctagccctagggaagagtggtctgttaaaaacaaacagaaaacaacaacaacaacatsaacaaaaaaccccacaaaaactccattcaaaggtcagcaatgtcaaagatcaaaggtagataagcccacaaagatgagaaagcttcaacacaaaaacgctgaaaactcaaaaaggcagaatgcctcttctcctctaaat

SEQ ID NO: 587009 - DNA, 300 bp, Homo sapiens
ttccagctttgctgtttcacagacttcactggtgatacctccaggtgcaggagagactgaggtgactagggtccagagtggacccccaaaatccacatgagccctagccctagggaagagtggtctgttaaaaacaaacagaaaacaacaacaacaacatcaacaaaaaamcccacaaaaactccattcaaaggtcagcaatgtcaaagatcaaaggtagataagcccacaaagatgagaaagcttcaacacaaaaacgctgaaaactcaaaaaggcagaatgcctcttctcctctaaat

SEQ ID NO: 587010 - DNA, 300 bp, Homo sapiens
ttccagctttgctgtttcacagacttcactggtgatacctccaggtgcaggagagactgaggtgactagggtccagagtggacccccaaaatccacatgagccctagccctagggaagagtggtctgttaaaaacaaacagaaaacaacaacaacaacatcaacaaaaaaccccacaaaaactmcattcaaaggtcagcaatgtcaaagatcaaaggtagataagcccacaaagatgagaaagcttcaacacaaaaacgctgaaaactcaaaaaggcagaatgcctcttctcctctaaat

SEQ ID NO: 587011 - DNA, 517 bp, Homo sapiens
tttgttctcttgtatgtttgtgtgttattttaggttcaaatattaagaccaataggctaggatttatacattgtgtaaaaagtaaattagatagctagtaggtaccctatatatattataattttsacctataagattaagtttagtgcaggcaaaaagggctcattaaaattttcatccactttttcaacttctttccaaactataatataatttatgccccaactgttattttatcaattactcttaaccatatttcataaaatttatatttttttctttatttagaaatgtaaggctattatttgcttttaaaggctgtgatacagctttttttattttgtgaaataatagcaccaacattataaatatttattgtgtaaatacttactcattaaaatcttcccattagagaattttattaattattgtagttcatttctgtaaaattgtactgccacacaccacagggcaatgattcaaaatgcctggtcttcacagatgcacagtcactgtt

SEQ ID NO: 587012 - DNA, 479 bp, Homo sapiens
gatttatacattgtgtaaaaagtaaattagatagctagtaggtaccctatatatattataattttgacctataagattaagtttagtgcaggcaaaaagggctcattaaaattttcatccactttttcaacttctwtccaaactataatataatttatgccccaactgttattttatcaattactcttaaccatatttcataaaatttatatttttttctttatttagaaatgtaaggctattatttgcttttaaaggctgtgatacagctttttttattttgtgaaataatagcaccaacattataaatatttattgtgtaaatacttactcattaaaatcttcccattagagaattttattaattattgtagttcatttctgtaaaattgtactgccacacaccacagggcaatgattcaaaatgcctggtcttcacagatgcacagtcactgttgaacattgtggttatttagaaa

SEQ ID NO: 587013 - DNA, 561 bp, Homo sapiens
ggccattcttatctgtgagccccagccaaggtgctgcagaaagcttggtctctggctagcattctggactgtgaggcagcgtggctacagctagcactggatggagagagtacagtgtggtgaagtggggacagtgggcattctgccacatggcctagagtttcttgtgactctggactgcccaggtgtggtgaccagaaggcaaaccatttctaggccacagctcaaggagggagaacccaggctgagcctggtgttggttctgagttgaggagatgaagctgggagtccagggagactaaagaagctcaggtaaactctgcagggcagagtatttcgggaatgaaaaggacaaagacacaaaacaaaaaacctccagagtcttcagctaaatactgatcagcacgtgtatgtgtgtaaactacaagtctgggggaaaaaatacctgaaggtaacagaaagaacaatgcttgaacctcccacagaaccagcatatttgttgttcccascagcaacagtggacaaatcttatacttcccggaccatttgatggaacactca

SEQ ID NO: 587014 - DNA, 517 bp, Homo sapiens
gactggggctgggcatgctggctcactcctgtaatcccagcactttgggaggctgaggcgcatggattacgagttcaggagwttgagaccaacctggccaacatggtgaaaccctgtgtctactaaaaatacacagaaaaataggtgggcttggtggcatatgcctgtagtcccagctgagctactcgggaggctgaggcagcagaatcacttgaaccagggaggcagacattgcagtgagctgagattgcaccacttcactgcagcctgggtgacagagcgagactacgtctcaaaaaataaatgtctgagactgggtaatttatgaagaaaagaggtttaattggctcacagttctgcaggctgtacaggaagcgtgattctgtcatctgctcggcttctggggaggcctcagggagcttacaatcatgacggaaggcaaaagggaagcaggcacttcttatgtgactggagcaggaggaagagagagggggaggtgccacacactattaaataa

SEQ ID NO: 587015 - DNA, 355 bp, Homo sapiens
agcccaggagtttgaggccagccttggaaacwtcacgagacctagtctacgggttgagggtggggaggagggggaaaggtggtggtaatgggaggtggtaatgcgattataaggtgtgggcaaccatattttgtgcctctaaatttgtggagttaccactaatctaaaattaaggatacagatcagctgaagaaagaaaaagatttatgtcgagatgaaacctcctcgtgagggtctgcagctgcaataccgccaggtggcagcatcccacctctttcgcctgctgcagccccaccaggtgaccgctccagccggggcactgcagcaggtagtagacctggaagcgcaggcgcgg

SEQ ID NO: 587016 - DNA, 535 bp, Homo sapiens
ccttcctctctttttctttccctccctccctccctgcatcccttccaaggtccgtcccttcatccgtcttttcctccctctgtccctctctctcactttgtctccgttcctttccccatctctgcctggcttccctcccacctagaaagggaagaaccacggtttgcgtgagatctcggggtctacatttagttcccgggcgcttcacgtgatgccgaggaggatggcggggcacgggtgggcgagggtgggtggagcggggaggtagtggagttgagctgcggaaaggagagcaggcctgccgctgcccgggtcggtatttcccggggtggaggtctccgcctacaccactgaagaacgcgggggtgggggtgtactgtctgggggggcgggggaagggatgagagccctgcctggctggccccaaaccctagccggctgcccgcggacccrcgcatgcgcagtagacggcccatctctgagtacctgggctggctctgaaatccttgggatgctcaggaaagaatgacagccc

SEQ ID NO: 587017 - DNA, 530 bp, Homo sapiens
gaattctacagaaactggaagtttctctctgggttcacacacgatttcagggagaaaccaccctggaagggtggagtgtggaactgaacctccatgatagtcttgattttccaggccctctccgtgaagccggcaatgcctgtgggtgtcgccgttgccgtgatagtcacacacgcaggtgtgtggatctcattcatttttttattttcattttttatttctacctcttaaagtcaatgataaagtcatgagtgtaaaatgaatgcatttaaaaacataaaagatacatttcaatgacaagaaatatgcaatgatcatgaaaatctactgtacactttgccaaggtcaaagaatgaaagamaatatggaaaagccaatcctcaaatatatccttaacaaaaactctctcctacatagtaaaagcatcatctaaacagcagctccaaccgagaaaaaaaatacaacaaaaaacaaaacaaaacaaaaaaacagcagggtagatgggacagataactttccccaggttttcc

SEQ ID NO: 587018 - DNA, 580 bp, Homo sapiens
tatacccaataatactgtaattcttccagactcagagaagtaccaccttgacagccttcaacaagatccaggagaattttctggattactagccagagactctttttccctacccttattttctcttaaagatacagagtctttctctctgttctaagccacctaaagctgggagaagaaagacacaagcacccctggccaccatcactatgactgccctggatcagacctgaagctagcacagcacgggtcttgctcaagtcytgctgcacgcactttcggacgactgcctatgttcattcaaggcctttggtctctacaattagcaggtggcaaagccagacagtcctatgttctttcctttagggcagtgagatccctcagtcactggctgggtccagaagtgccattcagaagtcagggctttggccactttttaatagggttttttgtttttctcttgtaaatttaagtcccttatattgaatattagatctttgtcagatacatagtttgtaaatatttttttctcattctgtaggttgtctgttcaccctattgataatttcttttgctgagc

SEQ ID NO: 587019 - DNA, 580 bp, Homo sapiens
tatacccaataatactgtaattcttccagactcagagaagtaccaccttgacagccttcaacaagatccaggagaattttctggattactagccagagactctttttccctacccttattttctcttaaagatacagagtctttctctctgttctaagccacctaaagctgggagaagaaagacacaagcacccctggccaccatcactatgactgccctggatcagacctgaagctagcacagcacgggtcttgctcaagtcttgctgcacgcactttcggacgactgcctatgttcattcaaggcctttggtctctacaattagcaggtggcaaagccagacagtcctrtgttctttcctttagggcagtgagatccctcagtcactggctgggtccagaagtgccattcagaagtcagggctttggccactttttaatagggttttttgtttttctcttgtaaatttaagtcccttatattgaatattagatctttgtcagatacatagtttgtaaatatttttttctcattctgtaggttgtctgttcaccctattgataatttcttttgctgagc

SEQ ID NO: 587020 - DNA, 668 bp, Homo sapiens
tttttcacatatttgaaaagagttgggtgttgtgatctaagccatatctgctttatggggcaccttatacccaataatactgtaattcttccagactcagagaagtaccaccttgacagccttcaacaagatccaggagaattttctggattactagccagagactctttttccctacccttattttctcttaaagatacagagtctttctctctgttctaagccacctaaagctgggagaagaaagacacaagcacccctggccaccatcactatgactgccctggatcagacctgaagctagcacagcacgggtcttgctcaagtcttgctgcacgcactttcggacgactgcctatgttcattcaaggcctttggtctctacaattagcaggtggcaaagccagacagtcctatgttctttcctttagggcagtgagatccytcagtcactggctgggtccagaagtgccattcagaagtcagggctttggccactttttaatagggttttttgtttttctcttgtaaatttaagtcccttatattgaatattagatctttgtcagatacatagtttgtaaatatttttttctcattctgtaggttgtctgttcaccctattgataatttcttttgctgagcagaagcttttaagtttaattaga

SEQ ID NO: 587021 - DNA, 584 bp, Homo sapiens
tttctttttttgttgtgtcactgccagtatttggtatcaggatgattctggcctcatagaacaagttgaggaagagtccctcctcctctatttcttgaaatagtttcagtaggactggtactggctcttctttgtacatctgttaaaatttgttaatgtatcaggtcctgggattttggggggttggtaggctattatggattcaatttttggagctcataattggtctgctcagagactaaatttcttcctggttcagtcttgagagagtatatgtgtccaggaatttattaatctcttctagggtttctagtttgtgtgtatagaggtgctcatagtagttgctgattgttatttttatttatctggagtcagtggtaacattcccttcmtcatttctaattttgtttatttgaatcttctctcttttcttctttattaatctagctagtgcactatctatcttattaattttttcaaaaaaccttgattaagtgattgtttgaacagtttttcatgtctcaatttctttcaattcagctctgattttagttatttcttgtcttctataagctttgtggttg

SEQ ID NO: 587022 - DNA, 565 bp, Homo sapiens
ctcatagtagttgctgattgttatttttatttatctggagtcagtggtaacattcccttcatcatttctaattttgtttatttgaatcttctctcttttcttctttattaatctagctagtgcmctatctatcttattaattttttcaaaaaaccttgattaagtgattgtttgaacagtttttcatgtctcaatttctttcaattcagctctgattttagttatttcttgtcttctataagctttgtggttgagttcttcttgcttctctaattctttcagttatgatgttaggttgttaatttgagatatttctaattttttgatatgagcattacttcttatgccctactctaacttttgtccctctagaaaactcagaactatgctttctaaaccaattcaaactttttcagtgaatcaacctggtctccctgagacaaagttagcaattttccattacacatggttctctttctctgtaagaatatctaatgcaacaatgcaagtgtttctttccctcctggtaatgcaggaaactccttttggctgagaccaagactta

SEQ ID NO: 587023 - DNA, 253 bp, Homo sapiens
ttctaattttttgatatgagcattacttcttatgccctactctaacttttgtccctctagaaaactcagaactatgctttctaaaccaattcaaactttytcagtgaatcaacctggtctccctgagacaaagttagcaattttccattacacatggttctctttctctgtaagaatatctaatgcaacaatgcaagtgtttctttccctcctggtaatgcaggaaactccttttggctgagaccaagactta

SEQ ID NO: 587024 - DNA, 253 bp, Homo sapiens
ttctaattttttgatatgagcattacttcttatgccctactctaacttttgtccctctagaaaactcagaactatgctttctaaaccaattcaaactttttcagtgaatcaacctggtctccctgagrcaaagttagcaattttccattacacatggttctctttctctgtaagaatatctaatgcaacaatgcaagtgtttctttccctcctggtaatgcaggaaactccttttggctgagaccaagactta

SEQ ID NO: 587025 - DNA, 556 bp, Homo sapiens
ttctttccctcctggtaatgcaggaaactccttttggctgagaccaagacttaaaaccttgttctctcaacattaatgatcgatttagagagcctccatttttacagaaaagatatacaaacaccaatgaaaataaatatgaaattatatgacatacaattatattgttgaaagactgaataaataaatgaactaagctgtaagaaaaaaagatgatgatattaaatgatatagaagtaaaaacctgggctggtatagcataattaatgtatcagtaaagtatgtaccttttagaagtggcaggaagacagcatagagagtgagacctgaccaaaagctttaaggaaaattctatacccttaaatgagattaaagtggactcaggaaaacatgcgccacaagaatggagggacaartgttccagacgggccaaatctcagagcatctctaccttctccaggaggaaaggggaggcaaagcagcaggcagaagacagcacggccaggtcagcacagggcacgccaggccaagccaggtggtctccatcgtacaggta

SEQ ID NO: 587026 - DNA, 465 bp, Homo sapiens
ccctaccttgttttaacctgagtgactctctcctagtggagggagagccggacagaccccattttagtttcttcacatgcagccccctttatctcccttccttaagggcataactagtgtaaactgactcaaagcacatccaggaatgtggttactattaagatattgaggcaagctgcaccagcagctcctggggacgcactcggtgaatggcacccaaaacccctgtatttctctctttgtgatagtttaagcccctgcacctggaatgtttttttttttgtaactgcttytgtaaccgattaatttttttaactttttgccagctctgcttctgtaaaaattgcttcagctaaactcccccctcccctatttagaccacggtataaaaacaaaaccagccccttcctcggggcccagagaattttgagcgttagctgcctctcggtcgctggctaataaagg

SEQ ID NO: 587027 - DNA, 260 bp, Homo sapiens
gagtttgcttccaccaaccccaacagcaagaattccagtcctgctgctgcaaagtaagtgtcactctgattttattactgctgtgtaacgcagttttagactcttgggttttcacttaatgttctaaaaaagtattaaagagaaaatattwttatggtgatgagcccatccactgcagccatctcaacatcataccaattataagccctatcatttaaaaagaaaactgttagtttaacttatttatccaaatatcagta

SEQ ID NO: 587028 - DNA, 260 bp, Homo sapiens
gagtttgcttccaccaaccccaacagcaagaattccagtcctgctgctgcaaagtaagtgtcactctgattttattactgctgtgtaacgcagttttagactcttgggttttcacttaatgttctaaaaaagtattaaagagaaaatatttttatggtgatgagcccatccactgcagccatctcaacatcataccaattataagccctatcatttaaaaagaaaactgttagtttaayttatttatccaaatatcagta

SEQ ID NO: 587029 - DNA, 484 bp, Homo sapiens
ttcacaatagggaaggcatggaattaacttatgtgtgaatcaataaattggatacaaatatgtgccacatatacaccataaaatactaygcacacattaaaaagaatacaatcatgtcctgtgcagcaacatgcatacttctggaggccattatcctagggcaattaatacaggaacagaaaacaaaataccacatgttcttgcctataagtaggatctaaacatggggtactcatgaatataaagatgacagcaatagacactgagaactactagatgaaggagggcaggaggaggggagggggtgagaaactatgagttctatgcttactgcctagctgatgggatcaattatatcccacaatatatgctcactaccttggtgatgggatcaataatatcccacattgcttagcatcacacaatatatccaggtaataaacctgcaaatatactccctgaatctaaaaattttaaggcagag

SEQ ID NO: 587030 - DNA, 436 bp, Homo sapiens
actatgcacacattaaaaagaatacaatcatgtcctgtgcagcaacatgcatacttctggaggccattatcctagggmaattaatacaggaacagaaaacaaaataccacatgttcttgcctataagtaggatctaaacatggggtactcatgaatataaagatgacagcaatagacactgagaactactagatgaaggagggcaggaggaggggagggggtgagaaactatgagttctatgcttactgcctagctgatgggatcaattatatcccacaatatatgctcactaccttggtgatgggatcaataatatcccacattgcttagcatcacacaatatatccaggtaataaacctgcaaatatactccctgaatctaaaaattttaaggcagagacagaataagagggcagaagagaagcctacattctc

SEQ ID NO: 587031 - DNA, 436 bp, Homo sapiens
actatgcacacattaaaaagaatacaatcatgtcctgtgcagcaacatgcatacttctggaggccattatcctagggcaattaatacaggaacagaaaacmaaataccacatgttcttgcctataagtaggatctaaacatggggtactcatgaatataaagatgacagcaatagacactgagaactactagatgaaggagggcaggaggaggggagggggtgagaaactatgagttctatgcttactgcctagctgatgggatcaattatatcccacaatatatgctcactaccttggtgatgggatcaataatatcccacattgcttagcatcacacaatatatccaggtaataaacctgcaaatatactccctgaatctaaaaattttaaggcagagacagaataagagggcagaagagaagcctacattctc

SEQ ID NO: 587032 - DNA, 436 bp, Homo sapiens
actatgcacacattaaaaagaatacaatcatgtcctgtgcagcaacatgcatacttctggaggccattatcctagggcaattaatacaggaacagaaaacaaaataccacatgttcttgcctataagtaggatctaaacatggggtactcatgaatataaagatgacarcaatagacactgagaactactagatgaaggagggcaggaggaggggagggggtgagaaactatgagttctatgcttactgcctagctgatgggatcaattatatcccacaatatatgctcactaccttggtgatgggatcaataatatcccacattgcttagcatcacacaatatatccaggtaataaacctgcaaatatactccctgaatctaaaaattttaaggcagagacagaataagagggcagaagagaagcctacattctc

SEQ ID NO: 587033 - DNA, 423 bp, Homo sapiens
tagagtccctgagtccaggcctagggtcttcttggtcagcatttctgcacttgccctgggccaaaggtcgagtcccaggcattgcagaatttatctcaagataattaaagagtccttgggctttaagtgagaaagtgatgatgatttggtggaaaccccccatgggccagtagtgttggcagtcatagaagaggctcttctgcytgaagacaggggaaggaagagtagaaaatactttgtcttattccctaagtgcaaggttagctacaataaaatagaagagcaggtaaattttgaagatcctatgctttaatctgtggctcccaggtagcatctgtggacccactcatggctaggggaacttgccaccctataggcagagacacaatcctggctgactttgctatctattaatcacagagt

SEQ ID NO: 587034 - DNA, 594 bp, Homo sapiens
tgaaccagcacagtctcagtggtggtggccacaggagtgcttatgttacccaaaccccagctccacatgtctcagcacagaaagagagactgctgatttgagataaagtaaggraagagaacatgagtctctacttgataaatcaagagaatttttcttgatattaatccaaggccaccaaggcagtacctctacgtgtttgcataaactacagtgctattgggtttgggacccaagtttctttgaatacctggaaagtgttcccaaaattaatgagcactaacaagcccagactgtgaagactacaataaagactgaactcttcaatgcccagatacagatgaacatctacatgtatcaaggccatccaggaaaacatgacctcaccaaacaagctaaataaactgccagggaaaaatcctggaaaaacagagatatgtgacttttcatacaggaaatccaaaatagcaggttgaggtaattcaaagaaatgtacaatataacacagagaaggaattcaaaattatatcagataaattttaacaatgagattgaaataaaaagaataaagcagaaattctgaagttaaaatgc

SEQ ID NO: 587035 - DNA, 594 bp, Homo sapiens
tgaaccagcacagtctcagtggtggtggccacaggagtgcttatgttacccaaaccccagctccacatgtctcagcacagaaagagagactgctgatttgagataaagtaaggaaagagaacatgagtctctacttgataaatcaagagaatttttcttgatattaatccaaggccaccaaggcagtacctctacgtgtttgcataaactacagtgctattgggtttgggacccaagtttctttgaatacctggaaagtgttcccaaaattaatgagcactaacaagcccagactgtgaagactacaataaagactgaactcttcaatgcccagatacagatgaacatctacatgtatcaaggccatccaggaaaacatgacctcaccaaacaagctaaataaactgccagggaaaaatcctggaaaaacagagatatgtgacttttcatacaggaaatccaaaatagcaggttgaggtaattcaaagaaatgtacaatataacacagagaaggaattcaaaattmtatcagataaattttaacaatgagattgaaataaaaagaataaagcagaaattctgaagttaaaatgc

SEQ ID NO: 587036 - DNA, 553 bp, Homo sapiens
attttattttcagaacaagcaagattcttattgtaattgtgcatgtttaggctttacttttattttgctactcaactcaatatgcctgtatgttttggtcaatctggaaattccctcacaccttttcatactgtattgccctctacttgtaatacactcctgctgaagtacaccctcctctcctactatatatcgctcatttataactctcctactttatgtcacagaatatttcacttttctaggcttccttcacaacataatcttatggttattataggatttatcaaattgaattgaatttgtgtttctttttatgtgtccactgtaatgtggtgaatggaagaaattgaatgaatattcayatttttacttttgttcattcctgtgtttctgctcctaggacaagtcaattagattaaatttaccatttacctactaatgtacttaagcattaacatagattttgactttgccttacaattcacttttttttaaaattgttccacactcaaatgaatttcataattctctcaacaattctcacatttaa

SEQ ID NO: 587037 - DNA, 608 bp, Homo sapiens
aatgtacatttacaagggattattccagaacaattgagagaaatttgctacctataccatttcttaaatggtaggaattatctgaaatgtgtattgcttaaaagtcagctattggtataaacatgtgacctaattgttatagggagacacaagaaatttgacaaacagttcagagaatatagtttgggaatgaagttatcactttgaatgtagaggtggcaaaaaaaaaaaaaaaaaaagagagagagagaaagggtaaaagacactggattactagcatggtctgagatagccaataagaatcaagctgcttggaggttgttcatatcattgaacaatttgacacagtcaaccctggaggatatttctgcgcacttacaaacatggtatggtggaatattaagttacgtggaataytaagttatacaatgagaaaataaattgacttcttcataacattcttaaagagtaagctataagtcctgggtaatgaaaaactgtctacatgtaaatgggagaatgataaaaggtgttgggggacagtgaaatgaagatatgccttccaccataaacaacggcaataatgacaataacagaacaataaataa

SEQ ID NO: 587038 - DNA, 655 bp, Homo sapiens
agaaaaacatttacacaggctatcttcaggtgcagcagtataaatgtttataatgtctgaccctattcctcccagaaacagtctttttttgttccttcgtgactgtcttcctgtgtcattttgtcataaaaagggataccatagaccctaatatgaaagctagatgagattcctctctagtcttgtttatgtcctggagagcttgacttgtgacaaagtaagaacactcttggactcactatctgggggatataatttttggtcacttctggtgactagtctgaaaagattggaaactctgaaacacctaagatcttaagcatctcactctgtttcaaatgtgcaaagccctcaggggtatttgtcttaataatttctctccataaagggcttttgttgtcttaagtcttgttgcctggttaatcttaggataactatatcccaggaggacctattcagtgttctggattcatgggtctgtgattgggagccagcattcctttgtggaatgcagractctttctatgtgcaaacaccactcttagctatttgtgtctacaagagtattttgctatcttaatctacttgtggaagtgaattttttggtggtatgggaggctgcattttttgtgcccatttaaaaaatgttcctttt

SEQ ID NO: 587039 - DNA, 655 bp, Homo sapiens
agaaaaacatttacacaggctatcttcaggtgcagcagtataaatgtttataatgtctgaccctattcctcccagaaacagtctttttttgttccttcgtgactgtcttcctgtgtcattttgtcataaaaagggataccatagaccctaatatgaaagctagatgagattcctctctagtcttgtttatgtcctggagagcttgacttgtgacaaagtaagaacactcttggactcactatctgggggatataatttttggtcacttctggtgactagtctgaaaagattggaaactctgaaacacctaagatcttaagcatctcactctgtttcaaatgtgcaaagccctcaggggtatttgtcttaataatttctctccataaagggcttttgttgtcttaagtcttgttgcctggttaatcttaggataactatatcccaggaggacctattcagtgttctggattcatgggtctgtgattgggagccagcattcctttgtggaatgcagaactctttctatgtgcaaacaccactcttarctatttgtgtctacaagagtattttgctatcttaatctacttgtggaagtgaattttttggtggtatgggaggctgcattttttgtgcccatttaaaaaatgttcctttt

SEQ ID NO: 587040 - DNA, 655 bp, Homo sapiens
agaaaaacatttacacaggctatcttcaggtgcagcagtataaatgtttataatgtctgaccctattcctcccagaaacagtctttttttgttccttcgtgactgtcttcctgtgtcattttgtcataaaaagggataccatagaccctaatatgaaagctagatgagattcctctctagtcttgtttatgtcctggagagcttgacttgtgacaaagtaagaacactcttggactcactatctgggggatataatttttggtcacttctggtgactagtctgaaaagattggaaactctgaaacacctaagatcttaagcatctcactctgtttcaaatgtgcaaagccctcaggggtatttgtcttaataatttctctccataaagggcttttgttgtcttaagtcttgttgcctggttaatcttaggataactatatcccaggaggacctattcagtgttctggattcatgggtctgtgattgggagccagcattcctttgtggaatgcagaactctttctatgtgcaaacaccactcttagctatttgtgkctacaagagtattttgctatcttaatctacttgtggaagtgaattttttggtggtatgggaggctgcattttttgtgcccatttaaaaaatgttcctttt

SEQ ID NO: 587041 - DNA, 468 bp, Homo sapiens
tgggggtgtgtttgacagtatagcttcatttctaacttttgtttagatagttgattaagtctatactttaagtctatacatccatatgatctccttatcaaacaatttcttagcttcacacttagtgctctcctgcaaaaatgttttcttatgttttgcaatatggttaagatgataattttccaatcttaaattttgtgtcattttttgcataacaattacatctttaagtcacttctcacttcttgaatttagtataagcagtcaggaggaaccaaaccatacctccaamattttgtttgcaaatgtcttcaggtaaacatgcaatttcatgacttacaagttctacctttcacaaaaccctgtgaacataagcatttcaaccaagttatttgtccctgtattactcagggttccctagagggacagaactaatcatatatctatatctatatattatattatatt

SEQ ID NO: 587042 - DNA, 468 bp, Homo sapiens
tgggggtgtgtttgacagtatagcttcatttctaacttttgtttagatagttgattaagtctatactttaagtctatacatccatatgatctccttatcaaacaatttcttagcttcacacttagtgctctcctgcaaaaatgttttcttatgttttgcaatatggttaagatgataattttccaatcttaaattttgtgtcattttttgcataacaattacatctttaagtcacttctcacttcttgaatttagtataagcagtcaggaggaaccaaaccatacctccaaaattttgtttgcaaatgtcttcaggtaaacatgcaatttcatgacttacaagttctacctttcacaaaaccctgtgaacataagcatttcaaccaagttatttgtccctgtattactcagggttccctagagggacagaactaatcrtatatctatatctatatattatattatatt

SEQ ID NO: 587043 - DNA, 653 bp, Homo sapiens
actactatttggtattagtttgctaaagaaaattggctaagtagatcactcagcataaatatctttgggcaatgaaaattttgattttgttcaacttaagtgagcaccgtggtaataataaaatcaacctccagaaggaatctaaaaaaaaccccatcaaactcggccttgtgtcattatctagtaaagattggtattaaaataaaagttgccagacacagatttcctatttrtcaaaatgagcgaatcactctatgcagcatttatcaaatactattttcaaaatttaagagcattaccctcatacaaataaataataaatatatgtcaaagatatttgttcaaaaaattctttaattgaggaaccaataagaccctacagctagctcaaaaaataatttgagaaatgtaaatatatataattactcagtaaaaggaattctaagttaaatatgttaataaaacaagttaatttcttacagagtattaaaaccataatattgaaattatgttttctactagacagaaatccacaagttagcatgtgactccatagtgtctgagtgctaatcgcatagtacatagaaaagatgaacacaagtatgttttcttacataattaataatagtgagtctgttaaacagtgtcgtttt

SEQ ID NO: 587044 - DNA, 653 bp, Homo sapiens
actactatttggtattagtttgctaaagaaaattggctaagtagatcactcagcataaatatctttgggcaatgaaaattttgattttgttcaacttaagtgagcaccgtggtaataataaaatcaacctccagaaggaatctaaaaaaaaccccatcaaactcggccttgtgtcattatctagtaaagattggtattaaaataaaagttgccagacacagatttcctatttgtcaaaatgagcgaatcactctatgcagcatttatcaaatactattttcaaaatttaagagcattaccctcatacaaataaataataaatatatgtcaaagatatttgttcaaaaaattctttaattgaggaaccaataagaccctacagctagctcaaaaaataatttgagaaatgtaaatatatataattactcagtaaaaggaattctaagttaaatatgttaataaaacaagttaatttcttacagagtattaaaaccataayattgaaattatgttttctactagacagaaatccacaagttagcatgtgactccatagtgtctgagtgctaatcgcatagtacatagaaaagatgaacacaagtatgttttcttacataattaataatagtgagtctgttaaacagtgtcgtttt

SEQ ID NO: 587045 - DNA, 317 bp, Homo sapiens
aattcaaggtaattccaacacaaattataagagagtttcaggtcaaaatttttaagcatattttaaaatttagagtaaaatgcaaagcagaaagaaaagctaagtaacccttaaaaaatgaactccagaagatttttgctaactatattaacacttaatttaaaggtacaattatttaactatargaaaatatagaattgaaaacaatgtccagaaatagtccaacaggtagagtaatttgatttgtgacaagggtgacaatcagtgcattaaaaaattaatagttttttaaataaatgattctgggaaagtggata

SEQ ID NO: 587046 - DNA, 507 bp, Homo sapiens
tatcctgcacatatcaagtataaattataaaacattctgtttaaatgtttttattaaaaatgcatactaatatttttgaaatgctgtttgcatgtatcatatgtatataattcttctgtgtctttatccatcaatgtatgaaaaacagaggaaaatgggaagtaaggtaataaataccaggataaacagataaggatgtaaaaatcactgtacaaattctgaagccacgaactaataagacagcttttagctttcttaacaaaacaaaacattgaaatctatctctatycctctctccccatcactgtctctttctttcacatgcatggctctgaatataaatctttccataataatttaaatcaatatagactttaatgaaatgtaggtgtgatttgtggctgctagttttatgtgtgctcatgacttctaagcggctgctgtgagacataaaagacagatcgaatagcatgagaaagacagatttttgagaacatcaggataggg

SEQ ID NO: 587047 - DNA, 600 bp, Homo sapiens
tggtgaggttgtggagaaataggaacactttcacactgttggtgggaatataaattagttcagccattatggaagacaraagtggcaattcctcaaatatttagaaccagaaataccatttgacccagcaagtccattactggtgtagctgctatcaaggattcatttgttcaatgaacaatttatattccaaaggaatataaattattctattataaagatacatgcatgtatatgttcattgcagcattattcacaatagcaaagacatggaatcaacccaaatgcccatcagtgaaagactggataaagaaaatatggtatatatacatcatggaatgctatgcagccataaaaagaaactagatcatgacctttgcagggacatagatgaagctggaagtcattatccttagcaaactgatgcaggaacagaaaaccaaacaccacatgttctcacttataagtgggggctgaaaaaagaacacatggacacagggaagggaacaacatacactggggcctgtgggggaaggtcaatggggtagggagagcattaggaaaaagagttaatacatgcttggcttaacacctaggtga

SEQ ID NO: 587048 - DNA, 600 bp, Homo sapiens
tggtgaggttgtggagaaataggaacactttcacactgttggtgggaatataaattagttcagccattatggaagacaaaagtggcaattcctcaaatatttagaaccagaaataccatttgacccagcaagtccattactggtgtagctgctatcaaggattcatttgttcaatgaacaatttatattccaaaggaatataaattattctattataaagatacatgcatgtatatgttcattgcagcattattcacaatagcaaagacatggaatcaacccaaatgcccatcagtgaaagactggataaagaaaatatggtatatatacatcatggaatgctatgcagccatraaaagaaactagatcatgacctttgcagggacatagatgaagctggaagtcattatccttagcaaactgatgcaggaacagaaaaccaaacaccacatgttctcacttataagtgggggctgaaaaaagaacacatggacacagggaagggaacaacatacactggggcctgtgggggaaggtcaatggggtagggagagcattaggaaaaagagttaatacatgcttggcttaacacctaggtga

SEQ ID NO: 587049 - DNA, 466 bp, Homo sapiens
tcacaaatatatttcacaaggcacttgtcaaaggtatatctcctagatcctcccagctgggatgagtaggtctaaagtgactaatccactccaccatcccaatctccctaagcctttggattccttcctctacataaaaccaaggaagatcaggcatttccagctcactcacagtgggccatcttttaatccatatttctgctaacsaagcaaataaactattagaatcctttttaactccctgagctgcaacattaaatgcagagtcattacttagtgggtccaaatcaataaattcaacctaatccaactctatgtttctttcaccattatctcatacccttaatatccattcccatgcctgttctcgagatgtctgcttatataaataagaaaactcaaccagttattttcaagtgtagtgcacctcctcatgggtcactgtcaacctcacctctagggaccc

SEQ ID NO: 587050 - DNA, 573 bp, Homo sapiens
cagcaaaaatattaaaatggcagatgtaaatctaactgtataaaaaaataaatgtaaatgggtcaaacaatacaatcaaaagacagagattattagactgaatttaaaaatatgacccaactctatgctgttgacaagacacatacttttctatttatataaaagatacaaatagattgaaagtaaagtagatcaggccattgctaaatcattccttagggctacctttagaatcaaagctcattcattactatgcttctgtgtgtgcaggtatattctcagtgttgtagaaaatataaggataaatagtcaatatttatatctaaaaaagcttatggtatatagataactgaaaaattaacctaatagttctactgaaaatagaatcagattagtaccctaaatttaaaagagatggattcagaagagggagaattagaaagattaggaaaggatgctgaaggaggtggcacttaagagggggatagaattatgatgtgtacatatgaagagcactcaaaggataagmaaggacacaaacatgtagaatttatagttgttgagcccaccaaa

SEQ ID NO: 587051 - DNA, 583 bp, Homo sapiens
aggctgaaagcaacaacttctaaccactttacatgttgaagctgacaaaaaagtagattttctcttaaatttcaatcaaaacttcagcaagttgttttccacatattgacaaactgatgctaaattttctatgctgaggcaaaagattcagaatagccaacacaaacttaaaggagaagaacaaagtcaaaagtctgacactacccaatttcaagacttattataaagctatagtaattcaggcagtgtagtattacagaaggaataaacaaatagttcaatggaagggaatagaaagtctagaaatagacagacataaatagtawcaattgatctttgacaaaagatcatgggcaatacaatggagaaaatataatctcttcaataagtggtgctggaacaactgaagtttcacatgcaaatatatttttctagacacagacctcacatcttttacaaaaattagctcgaattagatcattgactcaaatgtaaactgcaaatctacaaaactcttagaagataatataggagaaaatctggataatcttgggtatggtgatgtctttctatacacatcacc

SEQ ID NO: 587052 - DNA, 418 bp, Homo sapiens
gaattcaagatgagatttgggtggggacacagccaaaccatatcagtgtgtgtgtgtatgtatagatagatagatagatagatagatagatagatagatagatgatagatagatagatagatagatagacacattatatatagataratatatttttcccaagtgtcctgaacactttgaaagttgatgtattttgtatttacagccaacttatcttcaacaaaggatacaaaaacattaagtgcagaaaggacactctatccaataaatggagctgggataattggcaagccacatgtagaaaatgaaactgaatcatcatctctcacattatatagaaatcaactcaagatggatcaaagtcttaaatctaaaatctgaaacataaaaattctagaagataggatcagaaaaactc

SEQ ID NO: 587053 - DNA, 603 bp, Homo sapiens
acatttaaatctgtaatccattttgagttaatttttgtatgtgatgaaaggtagggggtccaactccaatcttctgcatatggctcgccagttattccagcatcatttaccgaataggaaatcctttccccattacttgctttcatcagccttgttgaatataagatggttgttttcaatttaaatgtgacatgtctatgtttttttatgtcatagatattgggtttggttttgtttttgctattaattctgcttgataktctctaggattcctggatctgtgcctaggtgcctgttaataaaatgttttcagccattattacttcaactgtttcttctgcattgttctttctttcttattcttctggtatcctgtttaagttgtctcataattcttggatgttatgtctggctttttaattttttttctctgcacatttcagtttggggattttctattaaccagttgtcaagctcattgattatttgcttgggtgtgttgagtctaatgtaaagcctttcttcatttctgttataatgtttttgatttcttatattttcttttgattctttcttagttttttaatctctctgcttacatta

SEQ ID NO: 587054 - DNA, 636 bp, Homo sapiens
tttgtactttttttatttcttgttaaactgcaattttagaaatactgcatgttcactatattcctctgtagatgaatattatcttgattacaatacttttttctctaccttctattctgaacgcactaaataaactgtcaaatggaacctgtttcctatttctgttctgaattccttcctcccaggacatcagatttcatcatagtgctatttttgtagaccattgattatcaaacttaggtggggagccctttcttcaacaaaggatggtgcagatgcttaataaatacaactgcccagttgggaggggaggaacagaaagagtacaagggttcttgcccccyaaactgccaagtatcgcaactccaggtgactcttgaaatacttggtttggagtacctagggctacagagagctcaacctgaaaattagctctgagctatatttcaactttcttctaaactcaaattttgaaaaagtcagaaatatgtaaaatctcacattttaaaaatttttcaataagtttaatatatccacaccaaactgcttgtatatctatcatatatactgaatattcatcaacctatttataagtgtccaacaatatgcagtgtttgtatataaatacaaaatcaa

SEQ ID NO: 587055 - DNA, 599 bp, Homo sapiens
cattccgtccttctcaggcttcagatctctctgacttttcttgtctcccgacagagaaaattcagcttttaaagggcttctgtaatgagattgggcccatctgataatcctttgcatgcactcatgctcagttggcccatcagacttcacttacaaaatataagttctaagacgaagtattaagagtttaaagaasgtgaaagcggagcattaaaccaagtgcaaactctgtcttgagtatgaggcccgtgcagctgcgcagctgcctgcccttgaagctcggatttcaccaggtaaagcgcgatcactttctccaatcttatgtaagcatgttgaataatttaggggacaaccaaaattatagaacctccagctgtaattccaaacctccaagaaaaaatgggggaagagaaaactttcaaaatcacgtgatgcggtgtggactgaaatgatttactctacattcatgttaatggttgtcgttagaaagatttcaggatataatcaaggactcagtcagggaaaagatgaattgactaatttgtaaatttttattttttaattaaaaatctgacaaaatacaatataaaaatatttgt

SEQ ID NO: 587056 - DNA, 572 bp, Homo sapiens
aacaccaaggggccccattgctgggttatatggtaagagtaagcactgctgtaattgcatttcataaatgttgatgaattgtgtttttattttcatttagtttaaaatatatttttaaaattgtttttaagagttctttgactcatattttttaaaaacgtgtttgatatctccaattatgtttaatattttccagatattctgttattaatttctaatataactctattgctgtctgagagcagatattgtatgatttctattctttgaagtttgttaaggtacgtatgttttattgcccataatgtagtctatcttgtgaatgttccgtgcgagcttgaaaagaatgtgtattctgcytttgttggatgaagtagtttatatactttgttggatggagtagtttatatacatccattatatccagttattgatgtgttgttgagttcgattttgtccttaccaattttctgtctactagatttgttcatttctgacagagggataatgaagtctctaactgtaatagtggctttatcactttcttcttgcaattcttccagtttttgcct

SEQ ID NO: 587057 - DNA, 572 bp, Homo sapiens
aacaccaaggggccccattgctgggttatatggtaagagtaagcactgctgtaattgcatttcataaatgttgatgaattgtgtttttattttcatttagtttaaaatatatttttaaaattgtttttaagagttctttgactcatattttttaaaaacgtgtttgatatctccaattatgtttaatattttccagatattctgttattaatttctaatataactctattgctgtctgagagcagatattgtatgatttctattctttgaagtttgttaaggtacgtatgttttattgcccataatgtagtctatcttgtgaatgttccgtgcgagcttgaaaagaatgtgtattctgcttttgttggatgaagtagtttatatactttgttggrtggagtagtttatatacatccattatatccagttattgatgtgttgttgagttcgattttgtccttaccaattttctgtctactagatttgttcatttctgacagagggataatgaagtctctaactgtaatagtggctttatcactttcttcttgcaattcttccagtttttgcct

SEQ ID NO: 587058 - DNA, 552 bp, Homo sapiens
tgtatatttcattgtgtaattctgaaaaccggatgagatgaaaatgtgtctttaaaactttcagtaaataataactcattttattgtaactgaaatatttaataccccatgttcaaagttagtatctttctcatacttcagttttttcctaggttgacatcaaaataaaaatgtggctttgattattcaaccacctacattcaattgattgtacttcccaccctgccacaatctgccagatgaataactttgtaaaacccaagcayataatttctacaatatccctattagtgccatctagggcttctagatatccttaaacttccctagtttccccctgttggggaagacataagccaaatgagaattagcatttcacccttcaacatcaacctgtgtattatttaaaattataataaaacgttcaaaattcatttttgtgtcatcgattgctgttttatttttttataaaattttcatatatatttaaacaaatccacttctttaaaacataactataatagctttattaagattcttgtttaaaactct

SEQ ID NO: 587059 - DNA, 552 bp, Homo sapiens
tgtatatttcattgtgtaattctgaaaaccggatgagatgaaaatgtgtctttaaaactttcagtaaataataactcattttattgtaactgaaatatttaataccccatgttcaaagttagtatctttctcatacttcagttttttcctaggttgacatcaaaataaaaatgtggctttgattattcaaccacctacattcaattgattgtacttcccaccctgccacaatctgccagatgaataactttgtaaaacccaagcatataatttctacaatatccctattagtgccatctagggcttctagatatccttaaacttccctagtttccccytgttggggaagacataagccaaatgagaattagcatttcacccttcaacatcaacctgtgtattatttaaaattataataaaacgttcaaaattcatttttgtgtcatcgattgctgttttatttttttataaaattttcatatatatttaaacaaatccacttctttaaaacataactataatagctttattaagattcttgtttaaaactct

SEQ ID NO: 587060 - DNA, 526 bp, Homo sapiens
acgtgtgagccttgtctggttttaggacaggtgaaatggggaaattgtaaggggagtttacaggctttaaaaggccatgctgtagtaggtgagtgataacaggctttaatctttttaaagcatgatgtgggatgggatattggtattgagggggggtaagggtgattaggttttaatgagattgtaaggggtgcatgatcagttgccgaggagggagtagaggtaccttatacttgtgggttaaggtggggggatactagaggaggatgcgaaggaggttttgacctggggaaaagggcagcaatgaggtgtggctgtagctaataasggaactgggcaggtggggataattaaaaaagagtgcataaaagaatgttttctaagttggcaacagagttggggagttttaagaggtttagaagcctggccgtcaatacccatgacagttatggtggcaagggaaacaggcccttgaaaagaaggtaatgtggagtgggtagcctctgtattgactaagaaggggatg

SEQ ID NO: 587061 - DNA, 555 bp, Homo sapiens
gagtgagaacatgcagtgtttggttttttgtccttgtgatagtttgctgagaatgatggtttccagcttcatccatgtccctacagaggacaaagattgaatgaaaaaattttaaaagtacttcagaactttcttctcctttctctctctttcatacatccacayagacatatacacatagaagtagattaaatatcatattattcctactggaattaatagaagccaatggacaatttcttatcttgagtatcaaatatatccaaccatatttgccaaaattcgatttaaaaaatataattgtgtgtctatgaataaatgaagaagacaaagaagaaatgtttcattgccgcttctctttgtgttattaataaaatctcttataatccttggaataatctttggaagttacacaataattgtttccaaaacacttaaagtaggattcatcagatgataaattctttatttttgatgcctatgtgtcttattgtttctatacctcattcattaaaagcataataattaatgctaatgttttgtgtttgtcaaaca

SEQ ID NO: 587062 - DNA, 587 bp, Homo sapiens
caacatagtattgaaaatcttagagcaattaggcaagagaaataaataaaaagagatccaaattggaaagaaagaagtcaaattatcttgcttgcagatgacatcatgctatatttagaaaaccctatagagtccatcaaaaaactcttagaactcaagaagaaattcagtaagtttgaaatatacaaaatcgacatgcaagaatgttgtatattgtgtatagcatttctatacacccacagcaatctgaaaaagaaattaagaaagcaatcccatttacaatagctacaaaaatgatacatacaagcaaatrtaactgaagtgaaagatctataaagaaaactataaaacactgaggaaataaatggaagagaacacaaagaaacagaaatatattgcatgcttataaattggaagaattaatattcttaaaatgtcaataccactcattgtacagattcaattaaatccctattaaaatgccaatgaaattcttcccagatatagaaaacacaatcttaaaattcactggaaccacaaaaacccctactatccacagaaactttgagcaaaaaggtcagagctac

SEQ ID NO: 587063 - DNA, 257 bp, Homo sapiens
ataaaggggaggtagtggaatggaattatataaaagttggcatttgtcttyagtagattattaaaatcgctgtggtaagaaatctgctcataaagacagaacaagttcataggggctggatatcatttgtccaaaatagagtcttttctctacactcattaactatctcgcccagtaatgtggttgtaatcctattaaacctgatacatcaaaaattaaaaaaaagtttagttgctgtctcaaactacactacaact

SEQ ID NO: 587064 - DNA, 257 bp, Homo sapiens
ataaaggggaggtagtggaatggaattatataaaagttggcatttgtcttcagtagattattaaaatcgctgtggtaagaaatctgctcataaagacagaacaagttcataggggctggatatcatttgtccaaaatagagtcttttctctacactcattaactatctcgcccagtaatgtggttgtaatcctattaaacctgatacatcaaaaattaaaaaaaartttagttgctgtctcaaactacactacaact

SEQ ID NO: 587065 - DNA, 570 bp, Homo sapiens
cacctgtctgaagctaaattcactattctccactccccaaccacatactacttcttcccctctcattcagtctatgtaagtcaatcagcagtaccacaggttttcaaatgtcctttgttcctaggaaatcagtttttagactgttttctctaaaagctattactctcttattcaaatttaataaaatgaactaataaagatgctagtataatagttctagttgaaacaatgatcgaaggctccttttctactgacatttttccttccttccttcctttgttccacatccctggaattggagaaaagtttggagccaactgccttaaaattcataattggctgctgttttccttcaccttctttttctactttgtcaccaagtttcattttttttccctgtagcctctggagggattttgtttgttttcttttattttaatcacattctccatccttaccctgttarttctccttggtaacactattttccagattcctatagcactttgttattttatacagattgccacttcattgttgtcaaattagattttgaatggattaattttg

SEQ ID NO: 587066 - DNA, 534 bp, Homo sapiens
gggctgggcatggtgtatatggacrgtgtgtttattttctctgctaagcgtttatgcttagattctgccatcatgctttaggtgacttattccctcattctctggtctctttttctggccacacttcagcttatcaacatttaaaaagccatctggctgccatctcttctccctaattcatttctagggtggatttgaccaatctggctggcccagctgtggtctctcctagagcattgtttcctgcaatatcttcccaaatagaggaggaccatttttggatctgcagtctgctaataaaccttccaaattattaacgggtctcttaaaatctggagcccaagctaagcactgtctttcagaagtactctcaatggttcggaggctagcaggactaataatacatcccttgatcctgttaatgcggcttaaaggttgtgttagctttttccctgtgtttgtaaagccgaagctgtagtgtaccccctgctgcggatggtgagggcaggagagccagatgcagtgggggcaaga

SEQ ID NO: 587067 - DNA, 317 bp, Homo sapiens
caccaccacacccaactaacttttgtattttttgtagagatggggtttcaccatgttgcccaggctggtcttgaactcctgggatcaagtgatccacccaccttggcttccccaagtgctggaattacaggcgtgcaccaccacacctggtgcatttgctcactataagtctaatgtgacatgggatactccaaaatgaaatgaagatcccaaagaaaaaatggttaaacctsactatttttatactaggtttgatgaagagtacaaagttatgaaaaaatatggtaggattaggaggtatgagataagactggtaa

SEQ ID NO: 587068 - DNA, 390 bp, Homo sapiens
ttgctggctatcccttttaacctaagtctcagcctttctgagtgccttttgcaattcrtaacttttgttctaagtctgagctctacctcctaatctttttaagggagttttttggtgttttcatgtgtttttctcagaccagttaagaaattgtttctttttcatttttcctttctttcaatttgatatttctatagacacttaagggacatttgtttagaatgggagccctcaagaaagaaaaatcctttggatgtacaagtccaaatcttcaaagtatacctattccaattgtgaatcaaattcaagcccaattaaccctttaaagaatgtttaccttttgccaactttgttaaagtttccagatttcttttcttttcttttcttttt

SEQ ID NO: 587069 - DNA, 505 bp, Homo sapiens
ccaggtgggaggattgcttgaggtcaagtattcgagtccaggattgatattttttccttaaatgtttgatgaaatttatccagacctgaaattttctttgtggaaacaatatatatatttataattttatttatcttattttaaacagttttgttgagatctrtttcacttatcataagcccattcatttaaacagtacaatttaataatttttactaatgttaccaagttgtgaaaccatcaccatagttagttttagaacattttcatttccctcataagatctctcatgcccatttacagttaattctaattcctgccaccagccccaggcaacagtgggaaaaggtttgtctctttaatgtactttatgattacaaacagtgggtttgtaattaagagacataaacattttcagatctgggttttttttggtggtggttttagtaaattgtgccttttaataaatttgttcatttcatttagttatccattttttggacat

SEQ ID NO: 587070 - DNA, 551 bp, Homo sapiens
gtcaagttaatttcctgtattcagactgcttttgtattatcttacaatttacttctcaatcatatatatcaaggctactggtagggaaaatgatctctcaggtcagcttactgaatgatcataagacacaaggcagggagtgagaactgtggaatttacagtggcagcaagctatagctttcgtatctccatgtagtattcccattcatcttgcaaaaatatcagacttttctctcccaaaactgagaaatgatgacatcctgcctatcttcctggccccagggatgaggtacgtggccaggtcaaatgaagcaggtgattggttcctttgtaatcrtttgacctcatccaggccaattagaatcttccccaagatgtttctctcagagataaatgggaacactatctcctctctctggaatttttaagctagggagatgtgattctggggctcccagtggccatccaacacaaggagagactttctgtagcatatagtcaagtagatgtgagtagggctgagtggtgggagagaggggagccctgctgat

SEQ ID NO: 587071 - DNA, 569 bp, Homo sapiens
agaattaatctcttatttggcaaccaaaggactctagcctaactataaaatggccctctgcaatggcacatgcagggatgtgtggaaacccaggttgactgtcaatctaaagcagagctaggaaaagtgaggctatcatcacaacatactgatgagggccctgtgtcacaggctccgtaagaaactagcaagcttccaaattgaatgctgacagcatggcctaatgcaaatgacacttattagagatggtgcttcttattttggcgataataaaaacaagagaagctgccacagtatttttgcttagagtgctgatgaggaaatatttgattgattggaaacaaaatcactttgttaaggctccattaccaatagaacagtgaatattaaaatacaaaaagccatgttgtctacgttattaaaatactattctatcttttatcacctcatttgagatataatgagtttccatttcattcagctgggcaaagcttaccttatttcataataactgaaatatactaaaatacaaaggttgtcaygatttacaagacattgtatttaaacac

SEQ ID NO: 587072 - DNA, 525 bp, Homo sapiens
ctcttgttaaacatcaggttcagaaaccaactccatcaaagtggctttgtgtgttttatttcttctcccaagtcttcaagtaggaaagattcaattaatcgtaaccagaatttcttctgaagaaaaacctttcctaatctcaccaatagtaagaagccatgtctagggtaaacaaattctccttgaagttgattggaaatctttctttgatgatttcttccattactgaagtccacaagggaaatagactatctcatgaattcatatacaattttatcttgaagattttcttgtgaccttgtgtgctaggttttaggcgtaacgtgaaagtgttttttkttttttttttttcaatgaaaaagacagtggactggaacttttagtagtttttgagcagactatactcataatgcaactcatcacagcatggtgagtacagatagaatagcatagtgggggtggcttttaaacacgctgggcatcaaaatgaattatgaacatttcataaagtatatcgttgccctc

SEQ ID NO: 587073 - DNA, 569 bp, Homo sapiens
agcatgagaattcctatttccaataagttccccagtgataatgacgctactagttcagaggccacactttgtggatcactgccttagattattattttgtacacctaaatgcacatagaaatgcatctcaagtgactgcaacaattgcagtttctcaaacctgtcactcctcctcaccgtatttcttcctttagkaacctagtagattttattttaataaattgcctcacctggggtggttcttatatcagtggcccaggactgcattttaggaaacactgtcttgggggaaacatttcagaatttttttttttttttttttttttgagacacagtctcactctgtcgcccaggctggagtgcagtggcacgatctcggctcactgcaaactctgcctcctgggttcatgccattctcctgcctcagcctcccgagtggctgggactacagacacccaccaccacgcccggctaattttttgtatttttagtagagacagcgtttcaccatgttagccaggatggtctcgatcttctgacctcgtgatctgcccgcctcggcctcccaa

SEQ ID NO: 587074 - DNA, 525 bp, Homo sapiens
gctgcccaagaccagcactccygggtcctacaggctctcagcaccgaatggccctgagaggctcactgcctgagactggtggtgcctggggcagcccctgagctagctctgtacttgctcatttgtagggaggaagagtttagtgctgtcaagatagaagctggtggactggctgtcagggtctcttgaggactggtcatcccctacctgtgttgtccctcccacatgcttggcggggatcaacccctcagagaaggacaagtttgtattcactaaaggggcagtgctatcaggtctgccactattccatgacctcagggagcattagtccagggagcctgttggcactggccgatggcaaccccggccccagaagtcttttctctctccaatgagactgggcctggagggtcccagggcactgggagcaggggctcttcaaagcagcccggggctaggaagagatcaaggtcctcccagaggaatggaggggaaatcgaaggcaagcagagtagctgcctccac

SEQ ID NO: 587075 - DNA, 599 bp, Homo sapiens
tatacaaccaccccgtctttcaagatcagctaatcttgaaaagccattttatttaaatagatgagccattagctctcaaattagtttcttcagcagaagctaaataaatgtccagaatataatttagccagccattatggtctctaacatctcaaatgaagtccctgaatatttaaatgtttctaaaccactactttgttacaaaaggtataccatggagtcactcagagggactgaaacatgttcgcaaagtgttctgatggcccaaaaccaggtgaacatgttggcaaagtattctgatggctcaaaaccaggtgaacacccaagataaagcaccraaggcagttaattttagatgggtctgaaacgggggtagggatgcacaaccaaaaaaaagaaatttgcagaatcttgaggacctacaattcacaagatccctatttaggaccaaggaggaaaacacagggaccaaaaatcaattgcatatcaagaagcttcaggaagttgtaaccatgatttaaacaaatccttgcaaatgctaagtggttcatgcagtatttccctgagctcattttctcttgcaaggttcagaatgttac

SEQ ID NO: 587076 - DNA, 517 bp, Homo sapiens
aagccagaatagctattgctaaaaatgcatttcattgactattccctctgcaaatgtgccatgatgacaatcaatcaggataaatcacacagctattcaactaattcatccataaagaaaactgatagagtgttgaagtcagtgaggccaaaatcagatgcccatagcatctgcatttgtaggatatgaagctttaatggyggtctctcagaaattttaaaaacagccttatcggcattatccactgctatctacatggacagccttccccatgattttcaaggtcatataagtggttaagtattcacttccttatgcatttataaattgtaggggctttccagagaaagttctttatgacttacttattgctgcttgcaattctgaaaactctaaattagaaatgtcaactcctttgttggacaatagtttcatattggtgctggtcagtgggatttcccaacttgaatctcttacttaattactttttattaatctgtttttttaactacttttt

SEQ ID NO: 587077 - DNA, 517 bp, Homo sapiens
aagccagaatagctattgctaaaaatgcatttcattgactattccctctgcaaatgtgccatgatgacaatcaatcaggataaatcacacagctattcaactaattcatccataaagaaaactgatagagtgttgaagtcagtgaggccaaaatcagatgcccatagcatctgcatttgtaggatatgaagctttaatggcggtctctcagaaattttaaaaacagccttatyggcattatccactgctatctacatggacagccttccccatgattttcaaggtcatataagtggttaagtattcacttccttatgcatttataaattgtaggggctttccagagaaagttctttatgacttacttattgctgcttgcaattctgaaaactctaaattagaaatgtcaactcctttgttggacaatagtttcatattggtgctggtcagtgggatttcccaacttgaatctcttacttaattactttttattaatctgtttttttaactacttttt

SEQ ID NO: 587078 - DNA, 517 bp, Homo sapiens
aagccagaatagctattgctaaaaatgcatttcattgactattccctctgcaaatgtgccatgatgacaatcaatcaggataaatcacacagctattcaactaattcatccataaagaaaactgatagagtgttgaagtcagtgaggccaaaatcagatgcccatagcatctgcatttgtaggatatgaagctttaatggcggtctctcagaaattttaaaaacagccttatcggcattatccactgctatctacatggacagccttccccatgattttcaaggtcatataagtggttaagtattcacttccttatgcatttataaattgtaggggctttccagagaaagttctttatgacttayttattgctgcttgcaattctgaaaactctaaattagaaatgtcaactcctttgttggacaatagtttcatattggtgctggtcagtgggatttcccaacttgaatctcttacttaattactttttattaatctgtttttttaactacttttt

SEQ ID NO: 587079 - DNA, 494 bp, Homo sapiens
acgagagatgagacaaatattttcctctccatgcacagtgaagtttagcttaaggggctgctgagaaaaaggatgcagttcaattcttattcaaacatcataaaaatggaaagcaattaagtgacaagtgtttgggttacacaagtgatcatgatacgcttttatttttgggaaagggtctcactctgtcacccatgctggagtgcagtggcatgaacatggcccactgcagcttcaatcctgggcccaagtgatcgtcccacctcagcctcccgagtaactgrgagcacaggcaggcaccaccatgcctggctaatttttaaatttttcatagagatggggtttccctgtgttgtccctgacaatagggactcttctcctagccaggaaggtggcagtaaaggacaaggacagaaagaagggggagtagagagagaaaagcaggtctcaggctggaccagaatgtggtggctaacgctctttgagccactgat

SEQ ID NO: 587080 - DNA, 488 bp, Homo sapiens
ccaggatggtctcgatctcctgaccwcgtgatctgccctcctcggcctcccaaagtgctgggattacaggcatgagccactgcacccggccccaagctgagtaagctcttactcagctgagggtaggtaagctaagattccacactgatccctggcaacctggcaccttgctcacccactgttgagtgaccatctgctctcagtttgaacactcaagcgtagggaacttatgatctcctacagctgagcaagaggaaaagttctgaagaggctattagaaaaataataagaataagaggcccatggctgatagaagttatatacccatcttctggtgccttctgagagcttagaacctatcagtccaaatgcctctagtatggttgtcacggactttcataatttggcacttacttgtcccttcagcctcattgcttccaggcctttatgtgccgccaccctccaccctccttttagtagttttccaa

SEQ ID NO: 587081 - DNA, 632 bp, Homo sapiens
tagatacagcttctgtttagagtcataccgaacagaaaaggtaacatgatcattccccattgctttctccttcaattgcaattgatttttattagtaactatgagtatcagaaaaagagtttctgtctctgttaatgaactgaagtgtgcaggtgtgtatggatatgttcgtaaaaaccagggctgtaaagtgcccaaattctccccaattttctacaatattttctgtttcttatcattatgaccaaataatgatggaaaaactaatgatgccattaccctgtaattgggaattgaggccgtttagtaatgataaagcatgccctgagcagagttaatgggccaacmaggcagcgccactgggtagctggtccgcagagcaagaagactgaacagttacaaggtagagtgttgttcataacaggcaccagcttcaggaaacagcttttaccgattattgtctactgctctatcagcttagggaaagttaacagaacttgaataaaaatgtgaagtaattcttgatgtaaaaaaagtcatttttctccacaatttgatcttttagaggcatcttattgaacttattttgaaaagaaaccattattttaatgctaccctattctgcatatgct

SEQ ID NO: 587082 - DNA, 602 bp, Homo sapiens
actttgtagaaataaatttttagaaatttataaaatcatagaaaaagttgacaattttcttattactattaccaagaactgatgatgctttacatcgtaagatacttgctttaatattccattgtaagaagtggggaagttccttcatttttgtttccataccttttatgtatttcttgcctctctaagagataaaaatattaatactatcatacttttcctcatcttcccttactctaactccatttttttattagtgttaaaattatgatgttgatttcacattatacatgtttatagcctttatattgcgttctataaaaatccttctcagagtcatttgttgttatttctatatttaaataaatccaaatgctaattgcaagcgagtttatcatggtgtctttattgttgagcttttgtcttgatttaccacctaactgattggatttgttgtccagcaggttgactctttccaaaaaagactgttacaacgtttcctgaatattttgtattggrgaatttctgcctactgtctggttttttttttttttttttttaagacggagtctcactctgtcatccaggctggagtgcaaagg

SEQ ID NO: 587083 - DNA, 575 bp, Homo sapiens
ttcaaagtgtggaggaattattgtgtatgaagtcaaagcatgtgctcttgggtcagtaggcaagaaaacagcaatcaaaataagatgacagaaagggctaaaggaagccaagataaagctaagatcgaagcccacatgattccagaaaaaaaaaaatgatgycatttatgataagagagttctggctctagcaattacattggggaaagtcaccttacctctctgatttccttacctgcaaaatgaagagtttcacaggaataaaaccagatgatctcccagtttgaggagacccttgagagcactcatcctaacctccagctaatatggaaggcccagtgtgaatggccaccgtgactcaagtgaaagagaatctcttacttggcgagaaaccttgttccattaagataaagttctaataggtgataatttcacatttgagcagcacattacggtttagaaaagggtctcactgacattacctttgatagtcatgtgatcgtatagtagaaggaaaagattgtttttaataatcctcattttatgcatcaggaaattaagatttaaagagggta

SEQ ID NO: 587084 - DNA, 658 bp, Homo sapiens
ttagatgaagatgctatgaaattcacataagaaaaaatcatcagaaatatttttatattatcaaatgtactgcaataatgaaagcaaatccyacttctagctaatgaaacatgattctttaggtgatattatattgtggcagaaaagggatttatgtcatctattgtttctatcctaaaaatgctagaatgggagcaaataagccaaattaattgtaatatatacattgtaattgtaatatatacatacatctctataggtgtatatatatacatatgtgtgtatatatgtatatacaaatatatacacatatatattgcatacacacatgtgcacacatataagtaaaatttcaacttgcatcctcagagcaggttttgtggggaagataggatgtaaactgggtaggcttccagcagctttactcgattctgactttaggataaaatcaagcatttcaactggtcagtcagtctgaccttgatggaaaagcattcatctggatggaacactataattaaacatgcagttgtagagatgccctggctgtattattccagtgcctggaaggtattgaaacatctattttctctaggagatggaaaggtatctcaagtgaagtctaagtgtaataaacagaggccagtgctctttgttg

SEQ ID NO: 587085 - DNA, 608 bp, Homo sapiens
tgtttctagcaactttgggaaatgctgtcctactttcagctgtgccattgaaatcttagcagttggagggaggcccaccaacaagctcatccaatttccaatatagaaatcttcactatatccrtgctatcctctcatttggctgtggatgaatattttgataacagaatgttcgatgccatacagatcagctgattctatggttggaatgcttttctgttaggaagctttaacttcaatgtcttttttacagttagaaaattttaacttttaagagttcacttattggacatagatctgatctctggatttaaaaaatcccacttaagaaatttttattaatcatagacaaattctacctagaaaaaatgctaaaataagttataaatagtgatcaaagattgatttaaaataattttttagaataaattgtgatttgaaatttatgtcaaaataggttgttattaagtgaataaaaccacattttctgttgtgtttcataaattcaagctaaatagcacttatgcacaattgtaataatttaaaaaacaattacatgttgttttgagtgattattccaacaaaattggattatagcattattccct

SEQ ID NO: 587086 - DNA, 522 bp, Homo sapiens
gggcaccttctatgtgtcctcacatggtggaaggggggaacaagctgcctcagtcctcttataaggacactaatcccattcatgagaactctgccctgattatctaattacctcctaaagaccctacctattggactggtgattcgatttcgacatataaatcttggggagacacaagcattcagatcatagcagaggtaaaactttattaattcatttttttttcattcagaacctactatgtgtctatactattctcaatcctgatatgtaagaagaaaaaaatgtttytaagaaactgaaatggtggctgggtgggggcagaaaatgttgcaggttgagatggattcaaaacaatcactgttaagtaacccttaggagttttcaaaattcagatatagatgtttcctttttattgggaggaggaggtgcagatactgcctagcgattctattcagaagaatcccagccatgccagtcactagttgtgtgacctcaggcaagttacttaaagtctttgta

SEQ ID NO: 587087 - DNA, 514 bp, Homo sapiens
atgcataaactctcacaagaaaaaaatgtccttttatttctaaaatgtctgtaacattggattaacatagcaaatgaaatcttttgaggattgttcaaagggtcaccaatttagaattcatctcctctgttggtttttattttttgttttaacttttactatatctatgatagggtttttttccccctgcactgggactgacagatggaatggttaaagaaacacatcaacacttattttagatactttgttatcagacccattctgtgaactttgctctatccatgaattatttatttcatttgatgtgtttttccctggattcataaaatttcrttttgtcatgatgtttcttcccgtttatgggactataaatgcagctgactaaacctctttaatggctgaacacatatcatgtctttgagtgaaggatgtgatttctctttctgttcacagacatgttcacattttcatttatttgcttttcttctgttcactcatgacaatagtgtca

SEQ ID NO: 587088 - DNA, 499 bp, Homo sapiens
ggttttctcctgcccaaaatcacagagtataatgttgctaactgaaactggaaattggaatagaaacataatggcaaaaagtccrctaatgtaaacccaaaccacagccacctgctctaaggctctttaattccttgctgatgtgatttaaataacaaagggaaagcaaggctttaatctagcaaggaaaaacagataagtttcatgcttcaacaagaacaacaacaacaaaaaaaacacactaagaaaaagaaaaatcccaacacaactcaaaaaacaaaaagcagttaggttttctcatttaaatcaataccatgacctatgaagattacttgggtttttaatcttcacactatttgcataattgtcaaaacagccacatttgtttggaaggacccttcaatttttctaagtcttttcttagtacaagaccaaatgctcttgtattgtatgggacagtgctagctcctaaactgaaataaaactagatgcaagaaag

SEQ ID NO: 587089 - DNA, 499 bp, Homo sapiens
ggttttctcctgcccaaaatcacagagtataatgttgctaactgaaactggaaattggaatagaaacataatggcaaaaagtccactaatgtaaacccaaaccacagycacctgctctaaggctctttaattccttgctgatgtgatttaaataacaaagggaaagcaaggctttaatctagcaaggaaaaacagataagtttcatgcttcaacaagaacaacaacaacaaaaaaaacacactaagaaaaagaaaaatcccaacacaactcaaaaaacaaaaagcagttaggttttctcatttaaatcaataccatgacctatgaagattacttgggtttttaatcttcacactatttgcataattgtcaaaacagccacatttgtttggaaggacccttcaatttttctaagtcttttcttagtacaagaccaaatgctcttgtattgtatgggacagtgctagctcctaaactgaaataaaactagatgcaagaaag

SEQ ID NO: 587090 - DNA, 635 bp, Homo sapiens
cactttctcagcaaggtctttgactttctaaaatagttccaccctctcagccagccaaaacttacccaatttccctattttgatagcgcttatcactatctacaattatcttgtttatttatgtttccatttattgtctgttttttccaccttcccaagaatgaaagctccacgaagaccaggaaaagactgatgggccactgtgtgtccagctcttagaaaaaggtctggcacatagtacatgcttagtaagtacacattgaatgggaggaaatagctgttctgaataatgactcaaaataacagagggaaagcatctaacaggggacccaggtcttgagagcagcaccagcaactcaaatacgaacacacgctgctcttcctactgttaccatgtctgaaatgctttctttgtgctggacactgctaagcctaatatgtctgttatctcatttgtttctcatatcaacctcmaagttctaggttctagatttattatcctccttctaccaacaagaaaactgagtcttagaaaagttaaacaactcagataaaatacccatgatttaaattcatgaagtttaactctaagttccattttaaaataatataatgatactctgatttcttttcag

SEQ ID NO: 587091 - DNA, 620 bp, Homo sapiens
ttaggctagtaccactgttatgaataaagatgaatacrcattaccagttcacattgtgttgtagcatttttctttgagacttatcggaagaaatgttaattgcttaagtccttacataagatccggtgttctttaaagttttcttgaagagagattaagggaaaggtgacaactaagtttgcatttatttttagcttcatcctattctattgctgtattcccaaagtagtcatcctgactttatagcattccttaagagttaactttccaaaacccagatactataatgttgctcagtaccccacccctacttcatactcagattcctacagtagcccttgttgcttataagagtattcccaaactggtgaattctgctcctgcccaatgttttgttattgttgttgttttcatagagatagagtcttgctctgtcacccaggctagagggcaggggcatgatcaaagctcactgcagcctacaactcctgggctgaagtgatcctcctgcctcagcctcctgagtagctagaattataggtgtgcaccaccatgcccaactaattttttaattttttgtcaagctggggtctcactatgttgtccaggctggtcttgaa

SEQ ID NO: 587092 - DNA, 620 bp, Homo sapiens
ttaggctagtaccactgttatgaataaagatgaatacacattaccagttcacattgtgttgtagcatttttctttgagacttatcggaagaaatgttaattgcttaagtccttacataagatccggtgttctttaaagttttcttgaagagagattaagggaaaggtgacaactaagtttgcatttatttttagcttcatcctattctaytgctgtattcccaaagtagtcatcctgactttatagcattccttaagagttaactttccaaaacccagatactataatgttgctcagtaccccacccctacttcatactcagattcctacagtagcccttgttgcttataagagtattcccaaactggtgaattctgctcctgcccaatgttttgttattgttgttgttttcatagagatagagtcttgctctgtcacccaggctagagggcaggggcatgatcaaagctcactgcagcctacaactcctgggctgaagtgatcctcctgcctcagcctcctgagtagctagaattataggtgtgcaccaccatgcccaactaattttttaattttttgtcaagctggggtctcactatgttgtccaggctggtcttgaa

SEQ ID NO: 587093 - DNA, 620 bp, Homo sapiens
ttaggctagtaccactgttatgaataaagatgaatacacattaccagttcacattgtgttgtagcatttttctttgagacttatcggaagaaatgttaattgcttaagtccttacataagatccggtgttctttaaagttttcttgaagagagattaagggaaaggtgacaactaagtttgcatttatttttagcttcatcctattctattgctgtattcccaaagtagtcatcctgactttatagcattccttaagagttaactttccaaaacccagatactataatgttgctcagtaccccacccctacttcatactcagattcctacagtagcccttgttgcttataagagtattcccaaactggtgaattctgctcctgcccaatgttttgttattgttgttgttttcatagagatagagtcttgctctgtcacccaggctagagggcaggggcatgatcaaagctcactgcagcctacaactcctgggctgaagtgatcctcctgcctcagcctcctgagtagctagaattataggtgtgcaccaccatgcccaactaattttttaattttttgtcaagytggggtctcactatgttgtccaggctggtcttgaa

SEQ ID NO: 587094 - DNA, 644 bp, Homo sapiens
aaaagcatgtgtttccatgcatatagtttctgttattaaaatcaacaaatacttatacaatgctggttacataaagagcttttatttatttattttattttattttattttatatatttatatttttgrgaccgagttttgctcttgttgcccaggctggagtgtaatggtgtgatctcagctcaccacaacctccgcctcccaggttcaagcgattctcctgcctcagcctcccgagtagctggaattacaggcatgcaccaccacgcccggctaattttgcatttttagtaaagacagggtttctctgtgttggtcaggctggtcttgaactcccaacctcaggtgatccacctgcttcagcctcccaaagtgctgggattacaggcgtgagccaccacacccggaccaagagcttttatttatttatttatttatttatttatttatttatttagagacggagtctcgctctgtcaggagtgcagtgtgcgaccactgctcactgcaacctctgcctcccaggttcaagtgattctcctgcctcagcctcctgagtagctaggattacagatgtgtgccaccatgcccagctaatctttgtatttttagcagagacaggatttcatcatgttgaccaggct

SEQ ID NO: 587095 - DNA, 574 bp, Homo sapiens
acttcaaggacaggcatttgttatcaagcatctcttcacttcttctaagaaggaaggtcaataatgccttatgtatacataaataggaaacagcattttttactttgcaaagtgcttttatcaacttttaaaacatcccatcctctagattaagctgaaaagatattttacccatttttttcagctaaaggaaccaggtcgcatagaagtggatttgatgaagctcatatacctaattattttcaaaagcattaggtttcttactcacagcacaatcttcattctgttgaatcacgttaagtgtcaaggcaacttacytaaacagaccccacactactgctttcttcttcattgaaaggtagaatagtgcagcatctaaggcatcattgttcctttgaaaagaagctttggcaacctaaatgataaataaaatattaaattcacaatttgacataagaattacaatcaattaatcaacaataatgttcccctgctacttccatggctgatagaaactgtggagacagaaaaagttggttctgtttcacaatctccagtaggttataatattaat

SEQ ID NO: 587096 - DNA, 574 bp, Homo sapiens
acttcaaggacaggcatttgttatcaagcatctcttcacttcttctaagaaggaaggtcaataatgccttatgtatacataaataggaaacagcattttttactttgcaaagtgcttttatcaacttttaaaacatcccatcctctagattaagctgaaaagatattttacccatttttttcagctaaaggaaccaggtcgcatagaagtggatttgatgaagctcatatacctaattattttcaaaagcattaggtttcttactcacagcacaatcttcattctgttgaatcacgttaagtgtcaaggcaacttacctaaacagaccccacactactgctttcttcttcattgaaaggtagaatagtgcagcatctaaggcatcattgttcctttgaaaagaagctttggcaacytaaatgataaataaaatattaaattcacaatttgacataagaattacaatcaattaatcaacaataatgttcccctgctacttccatggctgatagaaactgtggagacagaaaaagttggttctgtttcacaatctccagtaggttataatattaat

SEQ ID NO: 587097 - DNA, 574 bp, Homo sapiens
acttcaaggacaggcatttgttatcaagcatctcttcacttcttctaagaaggaaggtcaataatgccttatgtatacataaataggaaacagcattttttactttgcaaagtgcttttatcaacttttaaaacatcccatcctctagattaagctgaaaagatattttacccatttttttcagctaaaggaaccaggtcgcatagaagtggatttgatgaagctcatatacctaattattttcaaaagcattaggtttcttactcacagcacaatcttcattctgttgaatcacgttaagtgtcaaggcaacttacctaaacagaccccacactactgctttcttcttcattgaaaggtagaatagtgcagcatctaaggcatcattgttcctttgaaaagaagctttggcaacctaaatgataaataaaatattaaattcacaatttgacataagaattacaatcaattaatcaacaataatgttcccctgctacttccatggctgatagaaactgtggagacagaaaaagttggttytgtttcacaatctccagtaggttataatattaat

SEQ ID NO: 587098 - DNA, 572 bp, Homo sapiens
aggaatagctatacttatatcagacagatatactgatatcagtatcattattttctgatactatgtatcagacaaaatagttttcaagacaaaaactgtaagaagagacaaagaaggtcactatataatgctgaaggggtcaattcagcamgagaatataacaattttaaatgtatatgcacccaacactggggcacccagatatatcaagcaaatattagagttacagaaagagatagaccccaataaaatcatagcttgagacttcgacatcactcagaattggacatatcttctagacagaaaatcaacaaagaaacatcagacttaatctgtactatcaaaaacaatagatatttacagaacatttcatccaacagctacagaatatacattcttttcctcagcacatggatcattctcgaggacagaccatacgttaggtcacaaaacaagtcttaaaacattttaagaaatgaaataatatcaagcatcttctctgaccacattggaataaaactagaaatcaataacaaggaattttggaaactatacgaacatatggaaattaa

SEQ ID NO: 587099 - DNA, 420 bp, Homo sapiens
gaggacgttttggctatgatcatctgatggcaagtgaaggagaaatgagtgatagggctttgcgttttcatccagatgctgtggccctgtgtttcacagcattaagagccataatttccaacctgcacagatcctgaacaacaaatgaataacgatgaatgtctttttggttgtaatttaacaagtcaaataaaataatcattgctgagcacaatcacatgttgaaacaagtgtgttgttatttttacctcttgttaatgtataygtaacatttaaaagaaaaaatccaaaacaatattgtggtagaattatattagttgctcctctgtggaaactcaatttgctagctccttctgaatacagtactgaaaaattgttgatatggactgtctcttctctataagaaaacatgagcgatgg

SEQ ID NO: 587100 - DNA, 516 bp, Homo sapiens
ttttcaagttcatgagtactgagagtgagcatggtgctttgtccatagtagacatcgaggaacgtttgttgaactgagtactttttaatttgttctgaaaatgaaacattcctattgttgcgctttgcacacagtaggttcttaataactattttccaaatgaatatactataatccagaaaaaacagatggctcaccctctatttgttttctgtattcttctgaacttttataatggggggtaggggagtgatgggattcatctttagatagtatttgtattcctttttatctgttgactttgaccattctgaatctttttcttgtatttattattttctttccaatccagtcttgatcaacaatcataaccagagtaatgttgcattactcggcaccataktctgtggaagtagagccatattacagatactatttaatttatcctctaattctttagtaagaagagtaggggatattattttttccttttagtagacagggttaattggagac

SEQ ID NO: 587101 - DNA, 582 bp, Homo sapiens
tattttgtgcctgtgtgatcctgactactctgcctgtcactttaaatttaagtttgtaagcctactcggaagtaggtattaaatgtatctccatttttaaatatggggcttaaaaatkttaagaaacctgccccaaatctacagctagaaagtagcagtaccaggtattaaaaatggctgtggtttcaaaggaaattctactgttgctatttttaatttaactcacacaaactgatatggtttgggtgtgtccccacccaaatctcaccttgaattgtagctcccataatttccatgtgtcatgggagggacccagtgggagataattgaatcatgggagcaggtctttgctatgctgttcctatgataaagactaagtctcacaacatctgatggttttataaaggtgagtttccctgtacacactctcttgcctgctgccatataagacgtgactttgctctccaccatgattgtgaggtctctgcagccatgtggaactatgagtcaattaaacctctttctttgataaattacccaggctcgggtatgtctttattagcaacgtgagaacagactaat

SEQ ID NO: 587102 - DNA, 582 bp, Homo sapiens
tattttgtgcctgtgtgatcctgactactctgcctgtcactttaaatttaagtttgtaagcctactcggaagtaggtattaaatgtatctccatttttaaatatggggcttaaaaatgttaagaaacctgccccaaatctacagctagaaagtagcagtaccaggtattaaaaatggctgtggtttcaaaggaaattctactgttgctatttttaatttaactcacacaaactgatatggtttgggtgtgtccccacccaaatctcaccttgaattgtagctcccataatttccatgtgtcatgggagggacccagtgggagataattgaatcatgggagcaggtctttgctatgctgttcytatgataaagactaagtctcacaacatctgatggttttataaaggtgagtttccctgtacacactctcttgcctgctgccatataagacgtgactttgctctccaccatgattgtgaggtctctgcagccatgtggaactatgagtcaattaaacctctttctttgataaattacccaggctcgggtatgtctttattagcaacgtgagaacagactaat

SEQ ID NO: 587103 - DNA, 582 bp, Homo sapiens
tattttgtgcctgtgtgatcctgactactctgcctgtcactttaaatttaagtttgtaagcctactcggaagtaggtattaaatgtatctccatttttaaatatggggcttaaaaatgttaagaaacctgccccaaatctacagctagaaagtagcagtaccaggtattaaaaatggctgtggtttcaaaggaaattctactgttgctatttttaatttaactcacacaaactgatatggtttgggtgtgtccccacccaaatctcaccttgaattgtagctcccataatttccatgtgtcatgggagggacccagtgggagataattgaatcatgggagcaggtctttgctatgctgttcctatgataaagactaagtctcacaasatctgatggttttataaaggtgagtttccctgtacacactctcttgcctgctgccatataagacgtgactttgctctccaccatgattgtgaggtctctgcagccatgtggaactatgagtcaattaaacctctttctttgataaattacccaggctcgggtatgtctttattagcaacgtgagaacagactaat

SEQ ID NO: 587104 - DNA, 481 bp, Homo sapiens
aaacaccagccttttcctgctctgaaggtggctgtgggcactttgagaggggatscacattgttgctgagctgctggcttgcctgtgagggtgaggcagcaccatctcccatcagatcctcttcatcttcctgggccaggtgtaagtgcagtcccatggcagaaggtgtcagcttttgcaggtctcctgcatcatcatgctaagagtaattgagagacagtcatagattccaatctgctatggtctctctaacttcaagtttggttttcttttccaacagtttacacatctgatgtagagtggcttcagcccaacatcaggttcaacagccttgcaggcacttcttcaccatatcccacaattgtgaaaagtctgttcctattaatgatcctttattctataccactgataatgattctgcttctctgattaaatgctccctaatacactatgatttcattttttatttaaaatcatattc

SEQ ID NO: 587105 - DNA, 590 bp, Homo sapiens
gggtgctttttggcagcccagaaagtaattgtaaagaagtgtaaatcttgtgctttgacagtactttattttgacaggaaaatacacacacaaccccctatttgtttttaggtactgcaagaatcacatttgctctggtccaacagaaatagccgcagtgaaagatctagatatgaacagggattggtgaggattaatgagggagtgatttagaagatataaaaaggcaaatgataaagatttttctcctgctgagtgaaggctttcagtttggaaatacacctcacttttgatcacaatggcaagtcacaatgagtatctggatgcataaatggcwgttcagaatcataaagtctagagcaggagctaacctattatccagtgttttcctctagatgaataaggttatgatctcagtttttcagcacctaagatcctgagacatttatacaccctgtccaaggcctacctaccaggaatacacaattgactggagctctgcattgctgtctattgatacagggctttaccttcatataaggctatgtcctcattacagggttctcctgtaataccgacctccaacccct

SEQ ID NO: 587106 - DNA, 375 bp, Homo sapiens
tgattggtgatgttgaacattttttgatacattcactggccatttttatgtcttttttctttttttcttgaggcagagtcttactctgtcacccaggctggagtggagtgggtgtgatatcggctcactgcagcctctgcctcccaggttcaagcaattctccagcctcagtctcccaagtagctgggattacaggcrtgcaccattactcctggctaatttttatatttttagtagagatggggttttgccatgtttgccaggctggtctcgaactcctgacctcaagtgacccgcccctcttggcctcccaaagtgctgggattacaggcatgagccaccgtgcccagccatttttatgtcttcttttgagaa

SEQ ID NO: 587107 - DNA, 582 bp, Homo sapiens
ggccaaatctctggctcaccacaacacccgcctcccagcgttcaagatattctcctgcctcaaactcccaagctagctagcgattacaggcatgcaccaccatgccckgctaattttgtatttttagtagagatggggtttctccatgttggttaggttggtcaagaactcccaacctcaggtgatccacccgcctcggcctcccaaactgctgggattacagacatgagccactgcacccagcctgattcctttctcttttttccttcatatattgcctctactaggtagttttatagtttcacaagtttttattatgtcatttatcatctttttacttccaaatgtaagacttccttgaacatttcttgtaaggccagtctggtaatgatgaatttccttggtttttgcttttatgtgaaagattttatttctccatcatttctaaaggatggcttttctgggtataatatttgtggttgggaggtttttttttttcttttggtactttaaatatattattccattccctcctgtcctataggggttctgtgagaatttcactattaatctaatgagggt

SEQ ID NO: 587108 - DNA, 582 bp, Homo sapiens
ggccaaatctctggctcaccacaacacccgcctcccagcgttcaagatattctcctgcctcaaactcccaagctagctagcgattacaggcatgcaccaccatgccctgctaattttgtatttttagtagagatggggtttctccatgttggttaggttggtcaagaactcccaacctcaggtgatccacccgcctcggcctcccaaactgctgggattacagacatgagccactgcacccagcctgattcctttctcttttttccttcatatattgcctctactaggkagttttatagtttcacaagtttttattatgtcatttatcatctttttacttccaaatgtaagacttccttgaacatttcttgtaaggccagtctggtaatgatgaatttccttggtttttgcttttatgtgaaagattttatttctccatcatttctaaaggatggcttttctgggtataatatttgtggttgggaggtttttttttttcttttggtactttaaatatattattccattccctcctgtcctataggggttctgtgagaatttcactattaatctaatgagggt

SEQ ID NO: 587109 - DNA, 582 bp, Homo sapiens
ggccaaatctctggctcaccacaacacccgcctcccagcgttcaagatattctcctgcctcaaactcccaagctagctagcgattacaggcatgcaccaccatgccctgctaattttgtatttttagtagagatggggtttctccatgttggttaggttggtcaagaactcccaacctcaggtgatccacccgcctcggcctcccaaactgctgggattacagacatgagccactgcacccagcctgattcctttctcttttttccttcatatattgcctctactaggtagttttatagtttcacaagtttttattatgtcatttatcatctttttacttccaaatgtaagacttccttgaacayttcttgtaaggccagtctggtaatgatgaatttccttggtttttgcttttatgtgaaagattttatttctccatcatttctaaaggatggcttttctgggtataatatttgtggttgggaggtttttttttttcttttggtactttaaatatattattccattccctcctgtcctataggggttctgtgagaatttcactattaatctaatgagggt

SEQ ID NO: 587110 - DNA, 582 bp, Homo sapiens
ggccaaatctctggctcaccacaacacccgcctcccagcgttcaagatattctcctgcctcaaactcccaagctagctagcgattacaggcatgcaccaccatgccctgctaattttgtatttttagtagagatggggtttctccatgttggttaggttggtcaagaactcccaacctcaggtgatccacccgcctcggcctcccaaactgctgggattacagacatgagccactgcacccagcctgattcctttctcttttttccttcatatattgcctctactaggtagttttatagtttcacaagtttttattatgtcatttatcatctttttacttccaaatgtaagacttccttgaacatttcttgtaaggccagtctggtaatgatgaatttccttggtttttgcttttatgtgaaagattttatttctccatcatttctaaaggatggctttkctgggtataatatttgtggttgggaggtttttttttttcttttggtactttaaatatattattccattccctcctgtcctataggggttctgtgagaatttcactattaatctaatgagggt

SEQ ID NO: 587111 - DNA, 527 bp, Homo sapiens
gcatggacaggatctatgaaggccaagtggagatgactggagattaatgtgatgtggaaagcattgatggtcagcctggtgccttcacctgctatttggatgtaggccttgccagaaccatcactggcaataaagtttttggggccttgaagggagctgttgataaaggctgttckgtccctcacagtaccagatgattccctgcttgtgattctgaaagcaaggaatttaatgcagaagtgcatgggaaacacatcatgggtcagaatgatgcagattacatgcattacctaatggaagcagatgaagatgcttacaagaaacggttctttccgttcataaagaacagcgaaacttcagacctgatggaggagatatacaataaagctcatattggctgggcacggtggctcacagtcccagcactttgggaggctgaggtgggtggattgcttgagcccaggagttcgagaccagcctggacaacatggcaaaaccctgtttctgcaaaaacaatttataaaaat

SEQ ID NO: 587112 - DNA, 615 bp, Homo sapiens
ggtctgttatccttctgtattaactcatagtctgaggagaattgtaacacgtggcagactcagtaaagagttgaattccaaattcttagcagagttctgaaagatggcaataacgttttgacaaggaaaaataatacacaggtcttggcggcagtttctcaggctcaaactggttcctccctctttcttcacccacgtttccaactttttttttcaaattrgtgttttggttttgagaaaagtgcacaaacaaaaagcttcttattggtctatacatccttgagagtctaccccactctatctgtatcactctaatgggtgatttttgttccatttaaaatagcgtattcttaccagccctttaccttctctttcctgctttatttttcttctcaccagttacgaccctttgatatactatctattttacctatttaatgttactgtctttataaatggagatgtcaggtccacacagggcttccaggtccatgcagactgtttggaaatatttgcctctgtttccttgaaaggcaaaagcagataagaaatttgagcaaagttaaggaaaacaagaagagacgctaagcctttggtggtttggagttgtttggg

SEQ ID NO: 587113 - DNA, 615 bp, Homo sapiens
ggtctgttatccttctgtattaactcatagtctgaggagaattgtaacacgtggcagactcagtaaagagttgaattccaaattcttagcagagttctgaaagatggcaataacgttttgacaaggaaaaataatacacaggtcttggcggcagtttctcaggctcaaactggttcctccctctttcttcacccacgtttccaactttttttttcaaattggtgttttggttttgagaaaagtgcacaaacaaaaagcttcttattggtctatacatccttgagagtctaccccactctatctgtatcactctaatgggtgatttttgttccatttraaatagcgtattcttaccagccctttaccttctctttcctgctttatttttcttctcaccagttacgaccctttgatatactatctattttacctatttaatgttactgtctttataaatggagatgtcaggtccacacagggcttccaggtccatgcagactgtttggaaatatttgcctctgtttccttgaaaggcaaaagcagataagaaatttgagcaaagttaaggaaaacaagaagagacgctaagcctttggtggtttggagttgtttggg

SEQ ID NO: 587114 - DNA, 615 bp, Homo sapiens
ggtctgttatccttctgtattaactcatagtctgaggagaattgtaacacgtggcagactcagtaaagagttgaattccaaattcttagcagagttctgaaagatggcaataacgttttgacaaggaaaaataatacacaggtcttggcggcagtttctcaggctcaaactggttcctccctctttcttcacccacgtttccaactttttttttcaaattggtgttttggttttgagaaaagtgcacaaacaaaaagcttcttattggtctatacatccttgagagtctaccccactctatctgtatcactctaatgggtgatttttgttccatttaaaatagcgtattcttaccagccctttaccttctctttcctgctttatttttcttctcaccagttacgaccctttgatatactatctattttacctatttaatgttactgtctttataaatggagatgtcaggtccacacagggcttccaggtccatgcagactgtttggaaatatttgcctctgtttccttgaaaggcaaaagcagataagaaatttgagcaargttaaggaaaacaagaagagacgctaagcctttggtggtttggagttgtttggg

SEQ ID NO: 587115 - DNA, 448 bp, Homo sapiens
ggattaaaagaatggattccagaaccagacttcctggattagcatcttggctctgkcatttaccaagtgtgtaatcttagacaaatcagtttactcatttaaaaaaaacatatgaaagtagtacacattcataagaatgtgatgagggtactttctgtgtgtgtatgtgagtgtgtttgtgtgtgagtgtatagtacctagtatgcacgagccctattctaagtttatatatgtgtacatgtgtgtgtatagctatgattattcagaaatgctttattgttttaattataaaaaaactacaattattttttcataacaacttttttatactaagaaaatcaacatatgtagcccatttcataattcaccattagatacacatttgctgagcaactaacatgccaggaactgcatcagacattagatatttaatatttctcagatttta

SEQ ID NO: 587116 - DNA, 448 bp, Homo sapiens
ggattaaaagaatggattccagaaccagacttcctggattagcatcttggctctggcatttaccaagtgtgtaatcttagacaaatcagtttactcatttaaaaaaaacatatgaaagtagtacacattcataagaatgtgatgagggtactttctgtgtgtgtatgtgagtgtgtttgtgtgtgagtgtatagtacctagtatgcacgagccctattctaagtttatatatgtgtrcatgtgtgtgtatagctatgattattcagaaatgctttattgttttaattataaaaaaactacaattattttttcataacaacttttttatactaagaaaatcaacatatgtagcccatttcataattcaccattagatacacatttgctgagcaactaacatgccaggaactgcatcagacattagatatttaatatttctcagatttta

SEQ ID NO: 587117 - DNA, 564 bp, Homo sapiens
actgtgctcggctaattttttgtrtttttagtagagacagggtttcaccgcccaatagatattttaaaaagaaaatttaaaaagttaaagatagagttcatgatatggaatataggttagaagaaattatctaaattacagcatataataatcaaaagatgaaaaaatgctatttatgactaaaagagagtaaattgtgaaaaggtttaacatatgtataagtgcaagagagaacgagacaaaaggaaaacaaagacatagtgattctgaattttccagaactgacaaaagatactgcattactcagaaacttgcatcaataatactacataacaaacaaccctcatatttcagtagcttacaataaaatcaaggctgtgctcccatggctttctctgattccctgagttgatatctcctctatacacttccctgaaactgaaatatcaggtcgagtatagggagagagaaactcacttccagtatttttgtgctcacaattcatcagactggttgaggatcaagttcagtcactattctaaatgactctcattttgggactag

SEQ ID NO: 587118 - DNA, 564 bp, Homo sapiens
actgtgctcggctaattttttgtgtttttagtagagacrgggtttcaccgcccaatagatattttaaaaagaaaatttaaaaagttaaagatagagttcatgatatggaatataggttagaagaaattatctaaattacagcatataataatcaaaagatgaaaaaatgctatttatgactaaaagagagtaaattgtgaaaaggtttaacatatgtataagtgcaagagagaacgagacaaaaggaaaacaaagacatagtgattctgaattttccagaactgacaaaagatactgcattactcagaaacttgcatcaataatactacataacaaacaaccctcatatttcagtagcttacaataaaatcaaggctgtgctcccatggctttctctgattccctgagttgatatctcctctatacacttccctgaaactgaaatatcaggtcgagtatagggagagagaaactcacttccagtatttttgtgctcacaattcatcagactggttgaggatcaagttcagtcactattctaaatgactctcattttgggactag

SEQ ID NO: 587119 - DNA, 564 bp, Homo sapiens
actgtgctcggctaattttttgtgtttttagtagagacagggtttcaccgcccaatagatattttaaaaagaaaayttaaaaagttaaagatagagttcatgatatggaatataggttagaagaaattatctaaattacagcatataataatcaaaagatgaaaaaatgctatttatgactaaaagagagtaaattgtgaaaaggtttaacatatgtataagtgcaagagagaacgagacaaaaggaaaacaaagacatagtgattctgaattttccagaactgacaaaagatactgcattactcagaaacttgcatcaataatactacataacaaacaaccctcatatttcagtagcttacaataaaatcaaggctgtgctcccatggctttctctgattccctgagttgatatctcctctatacacttccctgaaactgaaatatcaggtcgagtatagggagagagaaactcacttccagtatttttgtgctcacaattcatcagactggttgaggatcaagttcagtcactattctaaatgactctcattttgggactag

SEQ ID NO: 587120 - DNA, 545 bp, Homo sapiens
agtgattctgaattttccagaactgacaaaagatactgcattactcagaaacttgcatcaataatacwacataacaaacaaccctcatatttcagtagcttacaataaaatcaaggctgtgctcccatggctttctctgattccctgagttgatatctcctctatacacttccctgaaactgaaatatcaggtcgagtatagggagagagaaactcacttccagtatttttgtgctcacaattcatcagactggttgaggatcaagttcagtcactattctaaatgactctcattttgggactagcagctgatttaaacatgctcttcccgtggtctttggtattagcacaagagggaaaaataaaaacatcaggtattccatagggtcttggctaggtactgacatattctcacttctacattccactgaccaaagcacattatgtagctcattatcagtgaggtggagacatatactctgtccattgtcagctaagctatggtgaagtagggaaggaagaatataataaaacatgactcagat

SEQ ID NO: 587121 - DNA, 545 bp, Homo sapiens
agtgattctgaattttccagaactgacaaaagatactgcattactcagaaacttgcatcaataatactacataacaaacaaccctcatatttcagtagcttacaataaaatcaaggctgtgctcccatggctttctctgattccctgagttgatatctcctctatacacttccctgaaactgaaatatcaggwcgagtatagggagagagaaactcacttccagtatttttgtgctcacaattcatcagactggttgaggatcaagttcagtcactattctaaatgactctcattttgggactagcagctgatttaaacatgctcttcccgtggtctttggtattagcacaagagggaaaaataaaaacatcaggtattccatagggtcttggctaggtactgacatattctcacttctacattccactgaccaaagcacattatgtagctcattatcagtgaggtggagacatatactctgtccattgtcagctaagctatggtgaagtagggaaggaagaatataataaaacatgactcagat

SEQ ID NO: 587122 - DNA, 545 bp, Homo sapiens
agtgattctgaattttccagaactgacaaaagatactgcattactcagaaacttgcatcaataatactacataacaaacaaccctcatatttcagtagcttacaataaaatcaaggctgtgctcccatggctttctctgattccctgagttgatatctcctctatacacttccctgaaactgaaatatcaggtcgagtatagggagagagaaactcacttccagtatttttgtgctcacaattcatcagactggttgakgatcaagttcagtcactattctaaatgactctcattttgggactagcagctgatttaaacatgctcttcccgtggtctttggtattagcacaagagggaaaaataaaaacatcaggtattccatagggtcttggctaggtactgacatattctcacttctacattccactgaccaaagcacattatgtagctcattatcagtgaggtggagacatatactctgtccattgtcagctaagctatggtgaagtagggaaggaagaatataataaaacatgactcagat

SEQ ID NO: 587123 - DNA, 490 bp, Homo sapiens
taagtgattctcctgttctcctgcctcagcctcccaagtagctgggactacaggcatgcaccaccatgcccagctaatttttgcatttgtagtagagacagggttttttcatgttggccaggctggtctcaaactgctgacctcaagttatctgcctgcctggacctcccaaactgctgggattacaggtgtgagccaccacgcctggccaaatttaagtatattctatgttttgaagtttctccccatttgaatctcctgtgcttcaactggatgttcttatctcaatgttccacctatatccactattccatgcatcagatctcccttcttctacctctgacaaaactttcctatacactgtgccttccaaatttgatattgaactaaaccaaataccaaataattaayatatgctaaattgctgatagctactaattgcatctcgcttgctaagagttcttccacaaaagtcatcagttacaagaga

SEQ ID NO: 587124 - DNA, 562 bp, Homo sapiens
ggaatggcgtttttgagattagggtcgctgccatgctctcattcccttgctctctccttgcttattctgatgaaactcggctgtcacattgtgagcctttggagaggcccaagtggcaaggagctgagggagacctctggccatggcccacaaggaaactgaggctttcatccaagaacccacgaggaactgaatgctgccaactaccacttgagtgagcaaggaagtagatactcctgcagtcaagccttgagataacagcagctctggacgacaccttgattgtaaacttgtgagagagttacagccagagaacccaattaagccctgcccagagtcatgacccacaaaatctgtgacataataagtgtttattgttttaagccattaagttttggggtcatttggtatgcagacataaataactaatacacgtacttactacagaagtatactagcttgtctacctacatttattctggcctccatcaaatcacttcttcatawggcagtcagagtgatcttttcataacacaaatcagtctattttccacctaaactc

SEQ ID NO: 587125 - DNA, 572 bp, Homo sapiens
agacatttaaatgtaacaaataaattttaggaatgaattgcagtcattactaaagatgattagggtgttagatagctttaaaaatttatgaagggtctgtttatatgaaaagctttagtagtccattttgattatttcagacaactagattcattgaaatatcatttgttaacagtgcctaagatcgtgttcaaaatcagtcatgtcttatagawgtgttctgaggaagtttttaaatcaatgtatttggcacaatataagagacctgagcaaaaaaggggagcaaggaaagaaaatgcagtttctgatagtttctgatgattcaactggaactagttaaatccttagagattaccaataaaaagtcctttagtcttgcttaagatggttgctttttaaatttgtcagacatatgtgaattaaattaaaacaatgatgaaatcaggtaatactgccagtaaatttgccccctgcctcccctacctctaactccactaagaaaaaatgagataatgttttacagaataaagaattatgaactaaaaaattagaaatacatataaatacgattt

SEQ ID NO: 587126 - DNA, 572 bp, Homo sapiens
agacatttaaatgtaacaaataaattttaggaatgaattgcagtcattactaaagatgattagggtgttagatagctttaaaaatttatgaagggtctgtttatatgaaaagctttagtagtccattttgattatttcagacaactagattcattgaaatatcatttgttaacagtgcctaagatcgtgttcaaaatcagtcatgtcttatagaagtgttctgaggaagtttttaaatcartgtatttggcacaatataagagacctgagcaaaaaaggggagcaaggaaagaaaatgcagtttctgatagtttctgatgattcaactggaactagttaaatccttagagattaccaataaaaagtcctttagtcttgcttaagatggttgctttttaaatttgtcagacatatgtgaattaaattaaaacaatgatgaaatcaggtaatactgccagtaaatttgccccctgcctcccctacctctaactccactaagaaaaaatgagataatgttttacagaataaagaattatgaactaaaaaattagaaatacatataaatacgattt

SEQ ID NO: 587127 - DNA, 583 bp, Homo sapiens
gctgtctctccttactcctcagcttgcagatagtctattgtgagaccctgtgattgcgtaagttaatacttaataaactccctattagttctgtctctctagaggaccctgactaatacagatttatatatatatctgtattcatatatatatagtgtcaagccactgaaaatttgaagctgcttattatagaatttagcctagtccaattaatttatacttgcgcagaaaaaaagagctcatggtttccatcttagtttttcaagacaaatcaagaatctgaaaggtgatgtgaaatttcccagatattaaatattaacaaagatttcaaatattttaaaacactactcagtcttarcaaacatattgtaaattagaactgatctttaagttgtacataaacctgctttagtcataaaggatcactcaccatttcctggacatttcctacattttcctgcctcatattttgttcacattgttccctaaacctgaaatgtccttctccttctgtttcttcaggaaaaacatattgatccttcagttagtaagaatagttaaggctttacttggtgtacaaatt

SEQ ID NO: 587128 - DNA, 563 bp, Homo sapiens
tttgcagtcaagatttatcatcttttcacagaagtgatagacctggtttgcactgaaagaaggcartgtcttctagatttattgtatttaatggtcttgtgtgggagatgttaggcagagaaatattagagcaataaattgtaagtgtttgaactgtggttagaaagaaaatatattttgtgtattaaagcctaagttttgagcaattttgcctatggagatagttaatatgttagccttaatctaaggatttcataagtagctgtccgaaccaacatgaactgcagaagtagagcagaaggtaacacataatatatgactaaaaaagaaagacttagaacaatacaatcaagtctttattgttcttgattgagggtttcatcaatggtgtagagaaagatgattggtagttcaagatagaaccatacttttatttgtctaacctaaatataaattcacacaagtgattgtctacaaattagtcaccaacaattattcccacacctaaatgtatattgcccatcttccttcaaaatgtaaagtctgtatgccatcttcaaatc

SEQ ID NO: 587129 - DNA, 422 bp, Homo sapiens
tgatagacctggtttgcactgaaagaaggcagtgtcttctagatttattgtatttaatggtcttgtgtgggagatgttaggcagagaaatattagagcaataaattgtaagtgtttgaactgtggttagaaagaaaatatattttgtgtattaaagcctaagttttgagcaattttgcctatggagatagttaatatgttagccttaatmtaaggatttcataagtagctgtccgaaccaacatgaactgcagaagtagagcagaaggtaacacataatatatgactaaaaaagaaagacttagaacaatacaatcaagtctttattgttcttgattgagggtttcatcaatggtgtagagaaagatgattggtagttcaagatagaaccatacttttatttgtctaacctaaatataaatt

SEQ ID NO: 587130 - DNA, 533 bp, Homo sapiens
ctcactttagaatagagaaggttaaaatgagaaataaaaatactactggagaacaagttccagatgtccactaagagcattcctcaggtacatagtaactttttgctaccagtggagctgcagaaagcattcaattagcagttacctgacagccaaaacactcagcacagcaccaactcatgaaaaatgtgaagggtcaggmcattgtttttcctttttttttcccccaaatcttgggtaccagatgacttaattatttacataattaaaagcaatatcttttaatgctaggatttcagaactgtagtatactaatgagaaagactgtttatggcagatagaatttgtgtgcgtttgtgtacatacctgcacctctcaagtcaacctaggcatccagagactagtcacacttttgcaatgaaccagctgtgtgggcaagtcaatgaacccttggaacatttccctcttttgtaaatgagaggtttgggctagaagatttctgatgtctgtgcttcaacattcttacagcctat

SEQ ID NO: 587131 - DNA, 586 bp, Homo sapiens
aaaggacatttctaaggagattgaaaaagcatatatctataaaatatgaaacaagaaaatatctacaaatgataatttatcaactttttttcctggaggtagcaagaataaataaaatcttattttctatgcaaaacagtgcttttaaattaaaattattcacctagaatgtctacagatactttcttcagagtcctttttgttaagtaatctaacatattttaagatactctgataaatacataagcagcagaaaaaatattttattaaaatttatgttttccaaacartatcatttaaaaggcaaaccaaacattatttcaattggaaactatatgaatgccaaatacccacatgtacaaaatattcagctttctaaagtaatgaaaataattatgataatttatatatcatatctgtgattcttagattttcagattatacaacatcttttcccagataaggatttagtaagaagagaaaaggaaaaaacattcacttttcattcaagccaaattaattaatttaattaggtgctttagggaataatattattgctccaaaaatagtattaagacaaacataa

SEQ ID NO: 587132 - DNA, 431 bp, Homo sapiens
cactgctgggggacccagcacaccctccacagctgctgaccctgggtgctaagcccctcactgcccgaggctggcgggccagccggccactccgagtgcggggcatgctgagcccacacccacctggaactggtactggcctgtggtgccaacgccggttcccacccacgcctctccctccacacgcacccccccacacctctctgcaagccgagggagccagctccagccttgascagcccagagaggggctcccacagtgcagcggcgggctgaagggctcctcaagtgtgtccagagcggacaccgaggctgaggtggcactgggagcaagcgagggctgctaacacgttgtcacctctcattactattctccttttgtagatgagaaaacaaggggctcaggtaaactaactgctttatctaacatc

SEQ ID NO: 587133 - DNA, 323 bp, Homo sapiens
gttatgttttccaggcaagaaaatgtactataaagtaggagctatrataacgaggaaaggtgcatggatgttaagttttattgtgttatggaagtctagaaggccaccaagggggaaaaaaaaaaaactagagacaatacccaaatattgaaaagtcactgttgggtaatattactttgtaattatggcgtaactaatattttagttctttatttttttttaatttcactttcagttctgagatacaagtgcagaacgtgaaggtttgttacataggtacacatgtgccatggtggtttgctgcacccatcaacctgtcatct

SEQ ID NO: 587134 - DNA, 444 bp, Homo sapiens
aaacattaaaaatatatttaattcccaaaggaaacttctgagaaaaacataagcaaakgaagaagtgtgtttagaagagaaactgtgtttcaatctagtgctctagtttctctgtgaatgctgtaacatgcattttcaaaaggataacagctataaaacaagagcaggtacaagggccaggggtggccacatggattggctgactttattcacacagagacaacattgtgaaagatgcatctaaagtgctgagcccaggtggatgccatcgggagctggacttagagatccctaggaaaatattcattagtcccagccctgaaacacgggaataagaactctgaaataataaaatagtacagcctttttcgaaacatgccatcatagaggaacaaaaagctgggtcatttcctaagtgatttaattgtttagcaaaatgtagtg

SEQ ID NO: 587135 - DNA, 556 bp, Homo sapiens
atcacacatactattagaagctgagagttctgtttaaaatcgactcttctttgttctggagagaaatagaatgttctaaaatatatccttctaatcaactattaatagctaattcaatagccacctgcatcgaattctgctgttctcagaatagaacaccttgatattttgagagaatgtgtttgctctcccacttctgtgtaagtgagctacaaggagaatttcatgtgaattagtgggtaaagtgttatcttcatgtaacccataaattgagcattttgtctcctattggctacatatcacaatctgagttcatcttgcagatatcccattatgtgccagagaatcacatgtgggtgggagcatataaagaaatgctgaaagatgttaaataaaaactgtatgaacagtgtgtcttattttattaaagatttgttttctgtgggcctttttgtaaaaaatatgtgggggatatggacattctatagawaaatttcattggaaattcatagagtcagtgaatatttgcaaagtatgaaaaagaaattttaaaaat

SEQ ID NO: 587136 - DNA, 526 bp, Homo sapiens
gcctcagcctcctgatacctaagactacaggtgtgcaccaccacgccaggctaatttttgtatctttagtagagacaaagttttgccatgttggccaggctggtctcgaactcttggcctgaagtgatgtcccctcctcagcctcccaaagtgctgggattacacgcatgagccaccgcactaggcctagtctgtgttttaaaggagacaagctacttaacagctataatccctatcgcaatctgagttgtcagtttctgtcactacaccaagagctcttggagagcagggatggctccttatatatctctgagtcctggtggcaaaactgcacttggtggcacactaggcactgtaagtgtttgtggaattgattggttgctcttttagcaggatctctccctacctgttttgtctctcacactacaacctctcaataaataactgctgawtgttgtctaaactagtgctgctgattgttgtctaaactagtatgatctttgaactgctaacatcggcttgatct

SEQ ID NO: 587137 - DNA, 326 bp, Homo sapiens
tccaggggctctgggagtggctgccaggtgagttggacagtccratttccagtggggtcccgcacagatgggacgtggcttaggaggaatcctgggctgcaggcattccttggcctggtggccagatttctggcacttgtagcaagctcctgggggaggaggttctggaggaatgcctggccgctgaggttcaggcgtttggaagttcttgtgtgctggagacgtggctgaggtttgtctcacagtgaaggcaaggaattgcaacttttttctattattgtacaccttgaaggtgaggttaattaaattctgttgtggggtttgag

SEQ ID NO: 587138 - DNA, 326 bp, Homo sapiens
tccaggggctctgggagtggctgccaggtgagttggacagtccaatttccagtggggtcccgcacagatgggacgtggcttaggaggaatcctgggctgcaggcattccttggcctggtggccagatttctggcacttgtagcaagctcctgggggaggaggttctggaggaatgcctggccgctgaggttcaggcgtttggaagttcttgtgtgctggagacgtggctgrggtttgtctcacagtgaaggcaaggaattgcaacttttttctattattgtacaccttgaaggtgaggttaattaaattctgttgtggggtttgag

SEQ ID NO: 587139 - DNA, 531 bp, Homo sapiens
tatctctccatttcaagattcttaatcagcatctgtgaagttcctttcccatgtaaggtagcatatccacaggtaaaggggattaggacatgtacatctttggagggccattattatgctgctatatctaggttctacctcactacaacatgccctagaaactttcttaagtcaataagctggtctattggagagtttatctcctgtgtttctcatctcttgmaattctgggtctttcactgatttctatttagtgtcttgaacactgtgatttcgtatattttgtcttctttttttaaaagttgtttcacgggaaagagtaaatccaatatttgttactccaacctagctagaagcacttctgtccttggtactctactgttttaaaataaattttcttgattcttcataggattgggcatcttttagtttctttttccttgtttacttttgctattcaggtttactatttaagtttctttttgggaagtttgtatttttttcctcttgttttatagaaataatttatat

SEQ ID NO: 587140 - DNA, 507 bp, Homo sapiens
ctcacttatttgtgagagctaaaaattaaaccaatggaactcatggaaatacagagtaaaatgatggttaccagaggtggaaaggatagtggagatgggaaggaaaatgggatggttaatgggtacaaaaatgtagttggaatgaatgagatccagtatttgttagcataacaggttaactacagtcagcaataatttaytgtacaattgaagtatctaagagagtatatttgaattgtttgtaccataatgaaagaataaatgcttgaggtgatggatactccattgaccctaatgtgattgttacacattttatgcctgtatcaaactatcccatgtaccccattaatatatacatctactatgtacctataaaaataaaaatatcacaagtgctggcagggatgcagagaaattttaagtcttatgcactattggtaccaatgtaaaatggtacagccgctgtgaaaaatagtatagtatggttcctcaaaaaattaaaagaaa

SEQ ID NO: 587141 - DNA, 555 bp, Homo sapiens
ggttagcaaaatgtggtatacatatatatatatgwaccacattttactgtatatatttatatagtgaaatatataccacattttactgtgtgtgtatacatatatatatatatatatacagtgaactattattcagctttagaaagaaaattctgacatatgctgtagcatggatggatcttgaggacattatgctaattgaaatgagtcggtcagcaaaagacaaatactgcatgattccacttatatgtggtatctagagcactcaaattcatggaagcaaacctccaatacttaaaatgtgtgatcttggttggaactagggccactgtaggtatagttgagatgaggtactagtgaagttaaggtgggccccatataaaaggagaagagacacagagatacagacacagggaatctgccatgtgacaatggaaaagaggtcaaagtgcttcagctgcaagccaaggaatgcccatgactgtgggtaagccaccagaagctagaaaggggaaaagcagattcctcccctacaggtttcagggaaataataac

SEQ ID NO: 587142 - DNA, 589 bp, Homo sapiens
ctgttgaatatggatgcaaaaatcctcaacaaaatactagcaaaccaaattcaacaatacattagaaagttcatttatcatgaccaaacagaatttatctatgtgatgcaaggattgttcaacatacacaaatcaatcaacatgatacttatatcaacagaattaaggattaaaatcatatgattatttcaataaatgctgaaaaagcatttgagaaaattaacatctctctmtgataaaaatcctcaaaaaccaggggatggaagaaacatacctcaatataacaaaagctttataggacagatcaacagctagtattatactgaatggggaaaaactgaaagcttttcctctaagatctggaacatgactaggatgcccaccgttaccactgtcacttaacatagtactggaagtcctagctagagcaatcagacaaaagaaatgtataaagggcatccaaattagaaaggaagaagtcaaattatccatgtttgctaatgatttaatcatatatttagaaaaacctaaagactccacaagaaaactattagaactgataaattcagcaaaggtggaggatagaaaa

SEQ ID NO: 587143 - DNA, 563 bp, Homo sapiens
cattttaaacactctaatggaaaccgattctaggtgggcagcaacttggtgcacagtcccgagaggtacagtggccatgagagcaaagtaacataggagcccagcagcaggggaggtgggggcctgtgcccacgccattggcagccagcctcagtcacacactggaggtgggcagcccagggttctccctgctgggacccccagggataggaaggggacgcaggtgacggaaggaacagctaatctatagcttaggtggccacaggcaccagaaggttgacacggcagttctcagacagagtctggattttttgtttttgtttttgaggcagartcttgctctgtgacccaggctagagtgcactggtgcaaccatagctcactgcagcctctacctcccaagttcaagcaatcctcccacctcagcctcccaagtagctgagaccacaggagcacgccaccacgccaggctaattttgtttttgtttttgtttttgttttttttttggtagagacagggttttgccatattgcgcaagctgatctcaaactcctgggctcaa

SEQ ID NO: 587144 - DNA, 585 bp, Homo sapiens
gaccatggcattttatcaaaacaaatacttacattggtcaacctacaattagggcttatatcttttttctataattataaatatttataatatattcatacatttatcatgtgattaagtataataatatattttgcatattacaaataatattcaaatatattgaatattactaattaaatataaactcataattaaaggttttatattatatatataacaggacttatttcttagagcagtttctagtgtacagagaaatgaaatgtttcaacagaaagtacaaagagttcccatgtactttctttcccatcccctcctacagtttctctattattagagaactgctttggtgtggtacatatgttacaattgatgaattatattgatgaattgatattaacacattttacattattaactaaagtccayctttttttttttcttgagatggagtctcaccctgttgcccaggctggagtgcagtggcacgatctcagctccctgctacatctgcctcctgggctcaagctattcttctgccttggcctcccgagtagctgggattacaggtgcacgccacca

SEQ ID NO: 587145 - DNA, 512 bp, Homo sapiens
acatttaaataatattacacatgtgtaacagagcatgtgtatgtatgtgtatgtatgtaggtgttaaggttcccagttctgtattaatgcttttggtgggaaagggaggaataataaaaatgtctaaagaaagtgatgtactatgagtaaaaggccatcattttttttctacccaattcaaggttttaaaaaatcttgagtacatttggtaaaatttccaattggtaagctttacacatttattttatattccaaataatgctacataaatgtcagcaatctctgttctcccaaagccatttacccaatttcaytggtgtcaacaaaagttatacatgcttgtagagaggaaatcagacccttcactattcaaagaaataatggtagaatcctaaagccatgttaaagaaagcaacacaacccttgcctttgccacctgatagatgtttctgtaaacagagatccacctcagtgtctcaaagcgttgaggtaagactgctgaactgagggct

SEQ ID NO: 587146 - DNA, 549 bp, Homo sapiens
ggccaaccacctcttttgctccagtcgccttccgtggagaataatcaacagaaggaaatctaaaaatcaacatagagaggctgcggtgagctgcttcatgggtcctgggatagggggcatctgaactatttcccagcgtctgggggaaaaggagtgaacattttcaagtgcctcatatgtgctggtgctttacttgggctgtttatttcattttttcatgttctttcaaggtgttcttaattctgccttacagaccagtggaggctccagtatgttagataaattccccaggggcaccagttaaggatcactaggaatgcggaattcccctccagctcagctctgccctgaacatcttgatgccaggagtaaatycagggctctgagaagggtcccaaatgttacaaactttaaaattgaactaagggatgaaagtttaaaattgtcttcaaaggaattcctcaagtaacataaccctgcacatataaaagtgtcagcaggctcagattaaagggctcatgaaagagggttatttccagagataagaat

SEQ ID NO: 587147 - DNA, 527 bp, Homo sapiens
atttgacagaacatataaatgttaggggaccaatggaacaatctattctttataaggccaagatagggcaactcttaagaaggagttgtttggcggagttctttataacatgaggccgttaatgaaactcgtattctgagacactccttacggtttcacatttccaggagagagttttattagtctagcctaagtcatttttctctcttggatcaatcagtgtgtccagagaatagtgacacagaaatggtcaccggagaaatcactgatatccactctgctatcccagtgtatgttggtttaggcattagagtttgtccttggaatatctgttgcattcagtgwattcaaatctgtaagatctttttatttttacctttgtgtttctttgctggttcttaattcttatacctaattagaatttttttcaatgataaattgaatgaattcagattcacaaacaccaagcttatgttttatgctaacattttaaactcacattaagggttttgatctgtgatataggg

SEQ ID NO: 587148 - DNA, 402 bp, Homo sapiens
caacatgatgaaatcccatctctactaaaaatataaatattagcctggcatggtggtgcatgcctgtagttccagctactctggaggctgagacaagagaatcgcttgaasccaggaagcggaggttgccgtgagctgagatcgtaccactgcactccagcctgggtaacagagcaagagtctgtcaaaaaaaaaaaaaaaaaaaaaaaaaaaagaatagcatgttctcaaagtatcaagtaaatcttttattggttaataatgtctgaggcagatgcgttttcttatctcttccttgtttgtcactctttataaccagaacaacaatacttcatcattgtgtttcttaaatgtaacatatcccataaccagtggtagtaggcttggtacaaagtgccctcc

SEQ ID NO: 587149 - DNA, 402 bp, Homo sapiens
caacatgatgaaatcccatctctactaaaaatataaatattagcctggcatggtggtgcatgcctgtagttccagctactctggaggctgagacaagagaatcgcttgaagccaggaagcggaggttgccgtgagctgagatcgtaccactgcactccagcctgggtaacagagcaagagtctgtcaaaaaaaaaaaaaaaaaaaaaaaaaaaagaatagcatgttctcaaagtatcaagtaaatcttttattggttaataatgtctgaggcaratgcgttttcttatctcttccttgtttgtcactctttataaccagaacaacaatacttcatcattgtgtttcttaaatgtaacatatcccataaccagtggtagtaggcttggtacaaagtgccctcc

SEQ ID NO: 587150 - DNA, 408 bp, Homo sapiens
ttgttgattttctgtctgcacgatctgtccaatgctgaaagtggggtgttgaagtctccagctattattgtattgaggtctctctctttccctgtaatgtttaatttatatatctgggtgcaccagcactgggtacatatttatttatagttgttatagcctcttgaagaattgacccttttattattatataatgaccttttttgtctcttcttacagtttttgtcttgaaatctattttgtctgatattagtatarctacttttgtccttgtttggttttcattggcgtggaatatctttgtccatccctttattatttttggtctatgtgtctctttataggtgaagtgtgtttcttgtaggaaacagattcactgggtcttgctttttaatccattcagccagt

SEQ ID NO: 587151 - DNA, 458 bp, Homo sapiens
gggaatttaaaatttttggggktttttttgcctcccagtagctgggattaaggcacctgccgccacgcccggctaatttttgtattttttagtagagacagggtttcaccacgttggccaggctggtcttgaactcctgacctcagatgatccacccgccgcggcctcccaaactgctgggattacaggcgtgagccaccgtgcccagtcaatttaaatgtttttaatttcacaacttacattctagcttcaaaaatatattttacattattacgaaccactcaccaagattttatggccagatacccaaattcatctcagtctccaagtgcaaattttaaaactaatttcttccatcattcaattcaagcagaatggtagagtagtattttagaacagatagaactagtaaatcccagctctgtgaacatactttctctgttaccttgggccagtta

SEQ ID NO: 587152 - DNA, 614 bp, Homo sapiens
ttcaccatgttggtgaggctggtctagaactcctgacctcaggtgatccacctgccttggcctctcaaagtgctgggattacaggagtgagccaccgcgcccggccccaagaagttattttagatgaatatttactgggtgactactatgtgctaggctgccttctaggtgctgaggacaaagagtggataaatgttcctgtccttatggggcatayatttagtcagggaaacaggtacattctttctgacagagtgaataaatatgtctcagttccagggaaattttgtttccaaatcatcttgatctttttggagggagggccctatagaccgaaaactaaatgatcattaaaaagcttttcattgatcagaaaaatataattcgagcatttttagtaataaagattcgggatttgaagtcattataaaagtttcatttcttgtcctaaattgacatctattttaaaataagtgttgctatatatacacatatgtatgcattttggtactttaaaactgaactgattgaagcaaggggaaatcgttttctgctctgctgctgttttgcttcaattagttggaccaggtattgactggcaaactctgccagcc

SEQ ID NO: 587153 - DNA, 614 bp, Homo sapiens
ttcaccatgttggtgaggctggtctagaactcctgacctcaggtgatccacctgccttggcctctcaaagtgctgggattacaggagtgagccaccgcgcccggccccaagaagttattttagatgaatatttactgggtgactactatgtgctaggctgccttctaggtgctgaggacaaagagtggataaatgttcctgtccttatggggcatatatttagtcagggaaacaggtacattctttctgacagagtgaataaatatgtctcagttccagggaaattttgtttccaaatcatcttgatctttttggagggagggccctatagaccgaaaactaaatgatcattaaaaagcttttcattgatcagaaaaatataattcgagcatttttagtaataaagattcgggatttgaagtcattataaaagtttcatttcttgycctaaattgacatctattttaaaataagtgttgctatatatacacatatgtatgcattttggtactttaaaactgaactgattgaagcaaggggaaatcgttttctgctctgctgctgttttgcttcaattagttggaccaggtattgactggcaaactctgccagcc

SEQ ID NO: 587154 - DNA, 280 bp, Homo sapiens
caaatgtattttgagtttccatctatgaatttcatcctacattcatcttattctgaaacaagtagttgtcactgaggaaagcaagcacagtcttgaggattagaataggtttaaatccaggtcaagtgcttgcaattcgacctcaagaaaatcattcaactctgaatggakttttcatccaaaaaaataagagggagaaaactgtaggtgaagggaaacttatgaacagagacctccagttgaaggtgacagatgactctgggcttgattagggcagaga

SEQ ID NO: 587155 - DNA, 517 bp, Homo sapiens
tttattattggtagagtagctgtaccaaaatgcgtttgagcaggaagtgtggatagccttatcacttcgtagtatgtgccagatagaggataattcagaaataactcttctcattcgtttttccattcagattggaacactaaaaagggatatctgagtctagatatgacttacctrgataattattttctttcttgataaataaaatggtaataatcatgaaatgtataatgttattataaaatattttagatggatctcaacactttgaggaaaaataagttgttttatttcttctagtagttgtcccaacaccatgtcaactgtggtttttcccattggttaagggctcccttaacaatgtcgaagtctaatttcatgcctttccagtcacttttgtttcttagaaccatcttactctgttaattgttaggtactttttattttaaaaccttaatctcaaacttcatttaagacttttcccttgcactcccttcagctggagctattgcccagc

SEQ ID NO: 587156 - DNA, 596 bp, Homo sapiens
gataggcatggtttggattagagaagggacagtggttaaatttatagccacttaaatttgtgttaagggggtgagaggtacccttttctagatgtatttatgcaraggcaagctcctgctatttgacctccttcgtcttctacccattgtctagctcttcttgcattcattttcttttattgtataaatttgtagatttttaaattaattagcttacttaattaactaaaaatgcctgtagctgaaatgatacaaccttgagagataaactaaggtaatatttccattttattctgaaagcttattactatagaatgaggtaaacccactgggaaaaataatatgcagtaatcacctgttttccttgggtccttgattttgttgcactatttcactgattttcatcattttctctgattgagaagtcagcttatcaataataaaagcagtgagaatattgtgtatttctagactttgcatgttaggtatcaaatgtacatcctgtcacagaaataatcctataatggtgataatactgactatttatttatttgagatggaatctcactctgtggcccaggctggagtgcagtggt

SEQ ID NO: 587157 - DNA, 476 bp, Homo sapiens
ttgtttttgtttctaattattcaagaaatacatgattctgattrtgaaaaaaaatcctcaaataataagtatagagagcaaaaaaggaaatcttatttctctggcaaagcatttccttcagaatatccactacttacagtttagtttgtgttcattcagaaattgctatggatttacacatctttatctatatttccacattatatgcttttaaaaatatataaatgggaacatcttgtgtttttttttctgtgactttctttctcttaacaataatcattagcatataattctttgcaaacttatgtagataacctcattgtttaaccaatttgttttggtgaatagtatggatgcagtataatttaactatatccatactgatagatgtttgtttctagtgttggtattacaaacagtatagtggcacacacatccttgtacatgaaattttgttggcatataaaagtatttct

SEQ ID NO: 587158 - DNA, 400 bp, Homo sapiens
  misc_feature 1, 2, 3, 4, 5, 6: n = A,T,C or G
nnnnnnaccatatttgtgaattattttaaattcgacaaattataattgtattacatttatagaatacagtgtgatgtttttgatatatgaacatagtggwgtgattagatcaagggaatcacacttacttgacgttgttttgtggcgatacatttgaaatttattctcttattttgaaagatataacacactacacccttacctgttctgttttacttattttgcttaatcattctgcttatatacaggggtaaaatgttgtcagcccaggctttctggaggaactgacctctgagtgtaatttttagaaagatgagtggacataaaaatattaccattttttaaaagatgttgtgaatagtatcaggacttctaaaagagccagacctcaccacacagt

SEQ ID NO: 587159 - DNA, 232 bp, Homo sapiens
ggtgaaacgtcgtctctactaaaaatatgaaaattagctgcatgtgctgakgcacacctgtagtcccagctacctaggaagctgaggcaggagaatcaattgaaccagaaaagcagttgttgcagtgagccaagatcgtgccactgcactccaacctggtgacagagcgagactccatctcaaaaaaagaaaaaaaagaaatccctcaatattatcttaggctgggcacagt

SEQ ID NO: 587160 - DNA, 232 bp, Homo sapiens
ggtgaaacgtcgtctctactaaaaatatgaaaattagctgcatgtgctgaggcacacctgtagtcccagctaccyaggaagctgaggcaggagaatcaattgaaccagaaaagcagttgttgcagtgagccaagatcgtgccactgcactccaacctggtgacagagcgagactccatctcaaaaaaagaaaaaaaagaaatccctcaatattatcttaggctgggcacagt

SEQ ID NO: 587161 - DNA, 621 bp, Homo sapiens
agaatacattctatatctatataaacayagactggtatacacatacatctttgcttcatctcactagggaaaaataccatgggtagttattgtacaaaataagagatgtcaataaaatgttggaagaaaaacaagcagatgagcaagtgatagcaggacatttccctagatggccttgggatgacctagttctcctctctttcttgcttatagatctcaagaataactgtagaacatgctggaaatgcaatattttgaattaggaaggacagcctgggctttgttctctctcccctagaagcaggatgtccttcaaagttttgccccataagtcacatagtctctgaattatataacctctgaaaggggtgaactgcctttcagagtccctcaactgtcgtgcaaaatggggcacacacagtcaagactttttcttctctgtactgtttcttaagccttggggaatctgctcataattgatccagtcttctgtgcctttcagcttatcagtcagtattaaacctgattcacataacttgtatgtgagtgaattctgtcacactggactcagataaataggtaactagtgcatgatggacataagcagtagcccaggatgca

SEQ ID NO: 587162 - DNA, 583 bp, Homo sapiens
gatttacaggcatgtgtcaccacacccgkctaatttttgtatttttggtagggacgaggtttcaccatgttggccaggctggtctcgaactcctgacctcaggtgatccgcccacctcggtctcccaaagtgttgggattacaggcgtgagccactgcgcccaaccacaaatgtacccttttaaagtgtaattcagtggtctttagtatattcacaaaattgtgcaaccatcaccactacctaattccagaacattttcatcacctccaaaacaaaccccacacccattagcaattatttcctgttattcctctccctggcccctgcaaccacaactctacttactatctccgtgtatttgcctactcaggatatttcatataaatggaatcatgaaatatgtgaccttttgtgattggcttatttcacttagcataatgtcttcaaggctcatctatgttataacatgtgtcagaatttccttccttcttaaagctaaataatattccattgtatggacataccacactgtgtttatccattcctctgttggtggacacttgagttgtttctcccttttgac

SEQ ID NO: 587163 - DNA, 599 bp, Homo sapiens
ttttttccccaaagtatgatgttactttttttctggctgctttcaagattgttttctttttctttgtctttagttgtaagaagtgcgattaagatgattttggcatagatgtctttgtgtttaacrtttttgaagttctttcattttcctcaagctgtaagtttatgtctcaacagattttttggagttctcagccattatatcttcaagtaatttttcagcttccatttctttcttctttacttttgaaattctgataacatgaatattagatcttttgtgataaacaggtctgtaatgctctgcttatttttttcagtctaacttttatttataatgtgtatttttaattgtcctctttcaattcattaattctttcctttttccatacatcttagcaatattgtgccccttcactgagattttattttagatattgtatactattgcagttataaattttccattttattctccttttttgttgttgttgttgttgagaaattctatttctttgttaagcctttatcttttttcattttgtttcaagtatgttcaaaattgttcattgaagcatttttaccatcactgatttaaaa

SEQ ID NO: 587164 - DNA, 550 bp, Homo sapiens
acatctaactgccgttagaataagagtaagaagaggtatgaggactgatcttaactgcttcctgatggcaagsgatgctgtttagggaaaatagcagtccgatgtccctcagaggcctatttaaacatccctggcaaaaagggccatcatctgaggctccagttgaatgaccatttagagtttgatggcctgaaggtgagaagaggcaaaccaggttattagaaaacatatatcaaaacaaaacaagtgggggaaaggagagttcaaaaagttgaggccttttaccagttttcacagtgagaaggaggttaaaagcccaactggtaagaaaaaaaaaaaagaaaagaaacacacacacacacacacacacacacacacacacaaaagtctacccttttgccagcatgtcaggcttctgggtttctttgccttgagcccaatcctaaaccaaccagtttaaggtttggggaattaacttttcccaatttggaggatgcatctgaggggagtgtcccatagtatgagacacaattacctatcagtgaagaga

SEQ ID NO: 587165 - DNA, 550 bp, Homo sapiens
acatctaactgccgttagaataagagtaagaagaggtatgaggactgatcttaactgcttcctgatggcaagcgatgctgtttagggaaaatagcagtcygatgtccctcagaggcctatttaaacatccctggcaaaaagggccatcatctgaggctccagttgaatgaccatttagagtttgatggcctgaaggtgagaagaggcaaaccaggttattagaaaacatatatcaaaacaaaacaagtgggggaaaggagagttcaaaaagttgaggccttttaccagttttcacagtgagaaggaggttaaaagcccaactggtaagaaaaaaaaaaaagaaaagaaacacacacacacacacacacacacacacacacacaaaagtctacccttttgccagcatgtcaggcttctgggtttctttgccttgagcccaatcctaaaccaaccagtttaaggtttggggaattaacttttcccaatttggaggatgcatctgaggggagtgtcccatagtatgagacacaattacctatcagtgaagaga

SEQ ID NO: 587166 - DNA, 390 bp, Homo sapiens
aaggcttagaagcaaaagggtaaaagatcttttggtccgcawatcactcaccttttctcatgccccatgtttgggcaccaaaatgatgcagaactttgctccttcattcagctaaaatcaggttcttatcacatgaccaggaaagataaggcacacggacacactgaagggtgactagagtggaatatattgggtgaaaaggaaaaaagttaaaaaaaaaaaaaaaaaaaaaaaaaaaccctcagcaaagtgagaggggatgctgacagcaggcttccatctcatagaatgatttacaggccaccacacaggagctgatgaggccaggcttctcactccctgtacaaggcacgaacttcccatggcttcaccccattcttccagtgcaca

SEQ ID NO: 587167 - DNA, 532 bp, Homo sapiens
acaaaaagagatactgaattctttttgtcattcaaactttgtaattataggtgtgttttcagttaaaaaaataaagaaaagtttcagttctggtagttttttgattcctttaaatacactttcagatggtggtttttagaatgatgtgcatgaatcttaacatagtctactgattatctgccaaataaattgcggctagcctatgattattgtttaggacaaagaatcatctcttttacctataatgtagttgcttaagtcccatttgttgtcccactattgctgagctattgtcacattaaccattttaactgtacctgaaaaatctgtcatgatgccattctctcttactccagcttctctatttctttcttcttcttgttaacctctcaaaagttgattgggtaaggaaaaccattcttggtcattgctggaggagggcagccaagatggctgaataggaacagctccagtctacagctcccagcrtgagcgatgcagaagacgggtgatttctgcatttccatttgag

SEQ ID NO: 587168 - DNA, 524 bp, Homo sapiens
tgggtgcggtggctcatgcctgtaatcccagcactttgggaggccaaggcaggatgatcacctgaggtcaggagttygagaccaccctagccaacatggtgaaaccccgtctacactaaaaatacaaaaattagccaggtgtggtggtgcactcctgtagtcccagctactcaggaggctgaggcagaagaattgcttgaatctgggaggtggaggttgcagggagccaagatcacgccacagcactccatcctgggcaacagagtaaaactccatcttaaaaccaaaccaaacaaacaaacaaacaaactgtaaatacttattcctcacctcagactcaagagtaggccccaggaatctgtgttttaaaagctctccagatgattctgaggcgtgctaaagtgtgataatcactgaactagtctgttctaattatggcctatcatgccttgttccaggcggaaaatttcagaaacatgaactttcatgtaaagcacaggtggcatagtaattagcagaataat

SEQ ID NO: 587169 - DNA, 646 bp, Homo sapiens
atggtggcacatacctgtaatcctggctactcaggaagctgaggtaggagaatcacttgaacccggaagaggaggttgcagtgagttgagatcatgctacctcactccagcctaggtaacaggtgagactctgtttcaataataataataataaataaaacaaatggacctaacagatatgtatagaacattctacccagaaagtgcagaatatacattcttctcataagtacatgggatgatgggatattctccaaaagagaccatatgataggtcagaaaacaagtctcaataaaacttaaatactgaaatcatatcaagtatcttctcagactacagtgaaataaarctagaagtcaactacaaaaggaaccttcaaaactatacaaatatatgaaaattaaacaacctgcttttgaatcattttggggttaacaatgtaatcaggttggaaatttaaaaatccttgaaatgaataataatagagacacaaattgtcaaaacctctgggttatagcaaaagcagtgctaaaaggaaagtttatagcactaaatgtttacatcaaaaagtctgaaatatcccaaattgacctcttaatgtcacaaatcaaggaactagagaaacaaggtcaaactaaacacaaa

SEQ ID NO: 587170 - DNA, 316 bp, Homo sapiens
agtggaatcgaatggaattatgatcaaatggaatcgaatgtaatcatcatcaaatggaatcaaaaataaccatcatcaattggtattgaatggaattgtcatcaaatggaattcaaaggaaacatcatmaaatggaaccgaatggaatcctcattgaatggaaatgaaaggggtcatcatctaatggaatcgcatggaatcatcatcaaatggaatcgaatggaatcatcatcaaatggaatctgatggaatcattgaacggaattgaatggaatggtcatcgaatgaattgaatgcaatcatcgaatggtctcga

SEQ ID NO: 587171 - DNA, 445 bp, Homo sapiens
gattccattcgattccattcgatgataattccattcgattctatgcgatgattccattcctttccattagaagatgattccattcgagaccattcgatgattgcattcaattcattcgatgacgattccattcaattctkttcaatgattccattagattccatttgatgatgattccattcgattccatttgatgatgattccatgcgattccattagatgatgacccctttcatttccattcaatgaggattccattcggttccatttgatgatgattcctttgaattccatttgatgacaattccattcaataccaattgatgatggttatttttgattccatttgatgatgattactttcgattccatttgatcataattccattcgattccactcgatgattccattcgattccattcaatgatgattccattcgagttc

SEQ ID NO: 587172 - DNA, 445 bp, Homo sapiens
gattccattcgattccattcgatgataattccattcgattctatgcgatgattccattcctttccattagaagatgattccattcgagaccattcgatgattgcattcaattcattcgatgacgattccattcaattcttttcaatgattccattagattccatttgatgatgaytccattcgattccatttgatgatgattccatgcgattccattagatgatgacccctttcatttccattcaatgaggattccattcggttccatttgatgatgattcctttgaattccatttgatgacaattccattcaataccaattgatgatggttatttttgattccatttgatgatgattactttcgattccatttgatcataattccattcgattccactcgatgattccattcgattccattcaatgatgattccattcgagttc

SEQ ID NO: 587173 - DNA, 457 bp, Homo sapiens
ttttgattccatttgatgatgattacattcgattccatttgatcataattccattcgattccactcgatgattccattcgattccattcaatgatgattccattcgagttcattgactgttccattccattccattcgatgattccattsgagtccattcgatgattctattcgattgcattcgataattccattcgattgcattcgataattccattcgattccatttgaggataattccatttgagtccattcgatgattgttccattcgattctattcggtgattccattcgattccatttgataatgattccaatcgagaccattcgatgattccattcaattccattcaataatgatccctttcgagtccattcaatgattccattccagtccattcgatgattccatctgattccattcaatgaatccattcgattccattctatgacgat

SEQ ID NO: 587174 - DNA, 539 bp, Homo sapiens
tttcatgcttataattatctatttccccattaaaaaattggctcttatatgtcattactggctggatattaagtgtcttcttgaggcgattttgagactttctttttctgcatgctcatgcacgcatacacacacacatgcacaaacacacagttagatgcatggttgcatgcataataaaacttgaaaacttaactgcagcacactgcataaattaaataaggcaaacatatccttggcaagacttgaagtaaatgctagagttttcccagcaataagtagttccataataacagaagtgaaaagaaaataaactaaaayttctaagtccatcttagttacatggaaagtccactaaagttttcttaagaagctgataccaaactcctaaaaatcaactctggattccaaaggtcgactttccatcccaagtcattacttactggtgcaggatttctattatccatgttgagccatggcttatagataaataaggaatttagaatacagcatttgaattcattaagctgcttccagta

SEQ ID NO: 587175 - DNA, 539 bp, Homo sapiens
tttcatgcttataattatctatttccccattaaaaaattggctcttatatgtcattactggctggatattaagtgtcttcttgaggcgattttgagactttctttttctgcatgctcatgcacgcatacacacacacatgcacaaacacacagttagatgcatggttgcatgcataataaaacttgaaaacttaactgcagcacactgcataaattaaataaggcaaacatatccttggcaagacttgaagtaaatgctagagttttcccagcaataagtagttccataataacagaagtgaaaagaaaataaactaaaacttctaagtccatcttagttacatggaaagtccactaaagttttcttaagaagctgatrccaaactcctaaaaatcaactctggattccaaaggtcgactttccatcccaagtcattacttactggtgcaggatttctattatccatgttgagccatggcttatagataaataaggaatttagaatacagcatttgaattcattaagctgcttccagta

SEQ ID NO: 587176 - DNA, 612 bp, Homo sapiens
gagaactctggtaaaggttttctcctcccaatatgaagagatgcacyatgcatacttaagaatggttaaaattaaaaggactgacaatactaaacattggagaggatggggagcaaccagacgttttccacattgctgatcacagtgtaaaaagatccaaacactttggaaaacagtttgctagttttatacaaagttgagtacatactatttgatccagcaacttcactcctaggtatttagtcaagagaaattaaaacacatgactatgaaatgttgcacatgaatactcaaagcagagcatattcataatagccccacactggaaacccaaatgcacaccaacagtgaatggataaacaaattgcagttttctcataaaagagaatacgaagcatgaataaagaagaatgaaagactgatacatgcaataccatggatgaatctcataaacttgctgaatgaaagaaggtagacacaaaagtatagtaaatgtcacatttccataaaattataaaaaaggcaaatctacagtgacagaaagtcaataggtggttgcctaatagctggaggtaggagggagtattggcagtaagagtgggcacagggaac

SEQ ID NO: 587177 - DNA, 612 bp, Homo sapiens
gagaactctggtaaaggttttctcctcccaatatgaagagatgcactatgcatacttaagaatggttaaaawtaaaaggactgacaatactaaacattggagaggatggggagcaaccagacgttttccacattgctgatcacagtgtaaaaagatccaaacactttggaaaacagtttgctagttttatacaaagttgagtacatactatttgatccagcaacttcactcctaggtatttagtcaagagaaattaaaacacatgactatgaaatgttgcacatgaatactcaaagcagagcatattcataatagccccacactggaaacccaaatgcacaccaacagtgaatggataaacaaattgcagttttctcataaaagagaatacgaagcatgaataaagaagaatgaaagactgatacatgcaataccatggatgaatctcataaacttgctgaatgaaagaaggtagacacaaaagtatagtaaatgtcacatttccataaaattataaaaaaggcaaatctacagtgacagaaagtcaataggtggttgcctaatagctggaggtaggagggagtattggcagtaagagtgggcacagggaac

SEQ ID NO: 587178 - DNA, 612 bp, Homo sapiens
gagaactctggtaaaggttttctcctcccaatatgaagagatgcactatgcatacttaagaatggttaaaattaaaaggactgacaatactaaacattggagaggatggggagcaaccagacgttttccacattgctgatcacagtgtaaaaagatccaaacactttggaaaacagtttgctagttttatacaaagttgagtacatactatttgatccagcaacttcrctcctaggtatttagtcaagagaaattaaaacacatgactatgaaatgttgcacatgaatactcaaagcagagcatattcataatagccccacactggaaacccaaatgcacaccaacagtgaatggataaacaaattgcagttttctcataaaagagaatacgaagcatgaataaagaagaatgaaagactgatacatgcaataccatggatgaatctcataaacttgctgaatgaaagaaggtagacacaaaagtatagtaaatgtcacatttccataaaattataaaaaaggcaaatctacagtgacagaaagtcaataggtggttgcctaatagctggaggtaggagggagtattggcagtaagagtgggcacagggaac

SEQ ID NO: 587179 - DNA, 595 bp, Homo sapiens
aattacatgtttaatagggttcccaatattctcccagaagttcctgatgctctgttaattttgcttcagtctttttattttagactctgttgggtgggtctagaataggtcgttctctaaaagtgtggcgctttcttttaaagtaagtactttctgatgtcttaactagatgctggagtgttaatgagctctttccactttaactggactggaccaccaatgcccctcagcactgatttgtgtctataaactcttttgcattctcaatactattaacagccactttctcctaagcttttccatgtaatctgcaaagcgtaaccctcaactagtaatatcaaggaactctcatacaccccatgttcagctttctgcctctgatgcmttaccatatagaatccggctcttttagctgccctgaattctgacctctgcctcttttgcttggtgggacacctgcactctgcctggactccagctcactaggttgacgtcaaaaaaattgtacccaggaagaaagctgggtgatcttggggctctccttgtgagtttccttgatcttagctattgtggtcttccctgcctgttattcaat

SEQ ID NO: 587180 - DNA, 442 bp, Homo sapiens
cacatgaatactcaaagcagagcatattcataatagccccacactggaaacccaaatgcacaccaacagtgaatggataaacaaattgcagttttctcataaaagagaatacgaagcatgaataaagaagaatgaaagactgatacatgcaataycatggatgaatctcataaacttgctgaatgaaagaaggtagacacaaaagtatagtaaatgtcacatttccataaaattataaaaaaggcaaatctacagtgacagaaagtcaataggtggttgcctaatagctggaggtaggagggagtattggcagtaagagtgggcacagggaacttttggggttgatagcaatgttttatatcttgattatcttattacatggatgtacacattattgaactagacacttattataggtacatttattgtctataaattttat

SEQ ID NO: 587181 - DNA, 560 bp, Homo sapiens
agaatacgaagcatgaataaagaagaatgaaagactgatacatgcaataccatggatgaatctcataaacttgctgaatgaaagaaggtagacacaaaagtatagtaaatgtcacatttccataaaattataaaaaaggcaaatctacagtgacagaaagtcaataggtggttgcctaatagctggaggtaggagggagtattggcagtaagagtgggcacagggaacttttggggttgatagcaatgttttrtatcttgattatcttattacatggatgtacacattattgaactagacacttattataggtacatttattgtctataaattttatcttaataacattgattttttaaaaaagagagataaataaacaaataagaccaccaaagcctcagaactgtgaaactgggtttcagaggtggtttgaaatattgttgaattttgcattgaagtatatttaatggttcaatttcagaataacatattatcaataagacccattatttctgagatttcttttaattttttttatgcttgagctcttattatatgct

SEQ ID NO: 587182 - DNA, 560 bp, Homo sapiens
agaatacgaagcatgaataaagaagaatgaaagactgatacatgcaataccatggatgaatctcataaacttgctgaatgaaagaaggtagacacaaaagtatagtaaatgtcacatttccataaaattataaaaaaggcaaatctacagtgacagaaagtcaataggtggttgcctaatagctggaggtaggagggagtattggcagtaagagtgggcacagggaacttttggggttgatagcaatgttttatatcttgattatcttattacatggatgtacacattattgaactakacacttattataggtacatttattgtctataaattttatcttaataacattgattttttaaaaaagagagataaataaacaaataagaccaccaaagcctcagaactgtgaaactgggtttcagaggtggtttgaaatattgttgaattttgcattgaagtatatttaatggttcaatttcagaataacatattatcaataagacccattatttctgagatttcttttaattttttttatgcttgagctcttattatatgct

SEQ ID NO: 587183 - DNA, 595 bp, Homo sapiens
ggttcaatttcagaataacatattatcaataagacccattatttctgagatttcttttaattttttttatgcttgagctcttattatatgctgaactctctctctctcctttaatccttactgtctgaggtaaggattacttcaatgatgattatatcagctaaaaaacaggaattgctttagaacttttgagcatgaagaatttkattcaggaagttggttatagctcagtgagggagctgagaaggcaaaaagggtcagtgagacaacccagagattagcagtagcaggaagctgctactccctctggggctggaggcagaattcagaagcaagacatgctgagagaggggccaccctgcataagttggaactctggaagagatactgctattgtcagaggcacaacaggaagtggagagagtgggagaaaaaccttgacatgtctctgactcccacccttccacctttcaccagtgtgtcccatgggttagaccagcccaggagccagaaagcaagggagcctggaaaatgtggttctcttcgacacagagcaaagcagaaggacggagaatgaatccattgagggcaaata

SEQ ID NO: 587184 - DNA, 595 bp, Homo sapiens
ggttcaatttcagaataacatattatcaataagacccattatttctgagatttcttttaattttttttatgcttgagctcttattatatgctgaactctctctctctcctttaatccttactgtctgaggtaaggattacttcaatgatgattatatcagctaaaaaacaggaattgctttagaacttttgagcatgaagaatttgattcaggaarttggttatagctcagtgagggagctgagaaggcaaaaagggtcagtgagacaacccagagattagcagtagcaggaagctgctactccctctggggctggaggcagaattcagaagcaagacatgctgagagaggggccaccctgcataagttggaactctggaagagatactgctattgtcagaggcacaacaggaagtggagagagtgggagaaaaaccttgacatgtctctgactcccacccttccacctttcaccagtgtgtcccatgggttagaccagcccaggagccagaaagcaagggagcctggaaaatgtggttctcttcgacacagagcaaagcagaaggacggagaatgaatccattgagggcaaata

SEQ ID NO: 587185 - DNA, 595 bp, Homo sapiens
ggttcaatttcagaataacatattatcaataagacccattatttctgagatttcttttaattttttttatgcttgagctcttattatatgctgaactctctctctctcctttaatccttactgtctgaggtaaggattacttcaatgatgattatatcagctaaaaaacaggaattgctttagaacttttgagcatgaagaatttgattcaggaagttggttatagctcagtgagggagctgagaaggcaaaaagggtcagtgagacaacccagagattagcagtagcaggaagctgctactccctctggggctggaggcagaattcagaagcaagacatgctgagagaggggccaccctgcataagttggaactctggaagagatactgctattgtcagaggcacaacaggaagtggagagagtgggagaaaaaccttgacatgtctctgactcccacccttccrcctttcaccagtgtgtcccatgggttagaccagcccaggagccagaaagcaagggagcctggaaaatgtggttctcttcgacacagagcaaagcagaaggacggagaatgaatccattgagggcaaata

SEQ ID NO: 587186 - DNA, 555 bp, Homo sapiens
cttatctctcagtggctttactgcggtggaatataccagccaattcacccaggaatccaccagatgacacattgcaaagtaagacatgcattaggcatcaggtttaggtattttcccaaaggcaatgttcaagcattatgagagtgatgagggcacaaatagaggcatgttacagactgagttgtgtcctccctcaaattcatatgttaaagtcaagagaggcactttaaggagataattaaggttaaatgaggacaagggtgggyccttaatgcaacagggcagatgaagaggaagagacatgacattaaggacacatgtgcacagagaaaaggccgtgtaagaacacagggagaaggaggtcatcttcgagccaaggagagaggcctcaagagaaaccaaacctgccaacaccttgggcttgcactaaagtccccagactttaaatttcttctgtttaagccacctgatatgtggcatgttgttatggcagacctagcagattaatacaaggtactgagcacaatacatctaacaagagtcaatgcttattgc

SEQ ID NO: 587187 - DNA, 555 bp, Homo sapiens
cttatctctcagtggctttactgcggtggaatataccagccaattcacccaggaatccaccagatgacacattgcaaagtaagacatgcattaggcatcaggtttaggtattttcccaaaggcaatgttcaagcattatgagagtgatgagggcacaaatagaggcatgttacagactgagttgtgtcctccctcaaattcatatgttaaagtcaagagaggcactttaaggagataattaaggttaaatgaggacaagggtgggtccttaatgcaayagggcagatgaagaggaagagacatgacattaaggacacatgtgcacagagaaaaggccgtgtaagaacacagggagaaggaggtcatcttcgagccaaggagagaggcctcaagagaaaccaaacctgccaacaccttgggcttgcactaaagtccccagactttaaatttcttctgtttaagccacctgatatgtggcatgttgttatggcagacctagcagattaatacaaggtactgagcacaatacatctaacaagagtcaatgcttattgc

SEQ ID NO: 587188 - DNA, 589 bp, Homo sapiens
aactgggtattcaaaacagaagcggtttcaaagaggtgtgtggggaggtgggggagggaattgaggacaytgaaaataaaattttccaagtttacaaatttaccatgttggcctggctgaagtcatggttaagaatttttttttcctctttatagctgtgatttttgttcaataccatatatggcagcagatcagcaagctattttttgacatgtttctttctccagaccattttacatagaaagttactaaaatagtccaatttggatgtttttttcttaatcttacaattcttgatcaaacaggacacaacagttctgtgtcaatataattatgagaatattattttaatgaagaagcttaaaatgatgtccaaatagaccaacaatgctcagataggctatgacggtttggggattttaagagcttctgtgtgattgcttttgaggaaagcagttttaagaagcaaattaatattctgcaatcagcattgctctccggtcctcccagggtctgagcagcaattcaggatctgcttcggatgaacagtttcacatttttccctggagaccaacccaagtcctgtaag

SEQ ID NO: 587189 - DNA, 558 bp, Homo sapiens
tatgcccatggaattttgagatgcaattctctaaagtattgttcagccagatggatgtgaaaggcattgaatcattctgccagggcttgattgtacaygcaaggctttcattcccatcatgaagaataaagctgaggggaaaagacacagagaacagaaacaggattgaggttgtctcacacccaacaactctcaccctccacctgtgccaggccatctttcagaagcagcagtgaacagaacctactgaagttgcagtggcatgcctagactatggggcaagggctccctcgctgccactgaagctgttgtcagaaaatgcaccactctcagaaactggtgcagggttcacagagttctttcttctccctttccaatcctgtttctctggtctcccctgtgcctgcaagaggtgagtaccaattagttgctgtttccaccccatatttaaaacccaacaccaaacaggttgccactgctgttggcgaggtcactctcagtgctaggaaacttgaagtaatgagctaaaactgtcaagtaaattaatagattccagac

SEQ ID NO: 587190 - DNA, 452 bp, Homo sapiens
tacagatgagtggagcagagtgaggcagaagatagtggaaagaaatgaagctttagaactaggcaggagctagatcacattaggcttataggtcacagtaggaagttcaggttttatcctatgtgccaagagaggatattaaagggtctgaaatcatatcagagttataaaaaactggttaamctcactcactaaattacaagtgtgtaattgtggattacacaaataattacaggtataataatgtaatatgacagtcatgacaagaatgctcctgttccataagtttggttttaattaaccaagaagagccgtcaaaggtttgatgcaagttcaggataacttgcatcagtaattttacttcatcactttaaagtttagcatccacttcagcttgactttcagggtaaatgacaaaataaatctgtggctcaaattaccccaacctaccc

SEQ ID NO: 587191 - DNA, 452 bp, Homo sapiens
tacagatgagtggagcagagtgaggcagaagatagtggaaagaaatgaagctttagaactaggcaggagctagatcacattaggcttataggtcacagtaggaagttcaggttttatcctatgtgccaagagaggatattaaagggtctgaaatcatatcagagttataaaaaactggttaaactcactcactaaattacragtgtgtaattgtggattacacaaataattacaggtataataatgtaatatgacagtcatgacaagaatgctcctgttccataagtttggttttaattaaccaagaagagccgtcaaaggtttgatgcaagttcaggataacttgcatcagtaattttacttcatcactttaaagtttagcatccacttcagcttgactttcagggtaaatgacaaaataaatctgtggctcaaattaccccaacctaccc

SEQ ID NO: 587192 - DNA, 452 bp, Homo sapiens
tacagatgagtggagcagagtgaggcagaagatagtggaaagaaatgaagctttagaactaggcaggagctagatcacattaggcttataggtcacagtaggaagttcaggttttatcctatgtgccaagagaggatattaaagggtctgaaatcatatcagagttataaaaaactggttaaactcactcactaaattacaagtgtgtaattgtggattacacaaataattacaggtataataatgtaatatgacagtcatgacaagaatgctcctgttccataagtttggttttaattaaccargaagagccgtcaaaggtttgatgcaagttcaggataacttgcatcagtaattttacttcatcactttaaagtttagcatccacttcagcttgactttcagggtaaatgacaaaataaatctgtggctcaaattaccccaacctaccc

SEQ ID NO: 587193 - DNA, 452 bp, Homo sapiens
tacagatgagtggagcagagtgaggcagaagatagtggaaagaaatgaagctttagaactaggcaggagctagatcacattaggcttataggtcacagtaggaagttcaggttttatcctatgtgccaagagaggatattaaagggtctgaaatcatatcagagttataaaaaactggttaaactcactcactaaattacaagtgtgtaattgtggattacacaaataattacaggtataataatgtaatatgacagtcatgacaagaatgctcctgttccataagtttggttttaattaaccaagaagagccgtcaaaggtttgatgcaagttcaggataacttgcatcagtaattttacttcatcactttaaagtttagcatccacttcagcttgactttcagggtaaatgacaaaataaatctgtggckcaaattaccccaacctaccc

SEQ ID NO: 587194 - DNA, 571 bp, Homo sapiens
ttttcctcttttcaggcttccagtttattgagtcagagatttcaagctctacccaaaaccaagagactccaagwgtcaaatcgtcaaatgaaagaattttcttgaagtttcagccaattcttcccccagaatgtaggaggactgaatatttctgagtttggaatctggctagaatcttacctgggcacctcagttgcaggctatctccctgccacaacagcttcctcagtggaattctgggttgaagagagaataaggaaattaataccaaactattaatttcatgtgccctgttgaaatgcggaagctgattgtccatactgatgccatcgtcactgactacattaaagtttctgtacaaattcagtaagcattttgatgccagctaggcagtgagagacatgtactggggataccaagctgaatgagcagatgcccctgcctgcaaagagcccacgtggaagtcagtggtccaaaccgtaagagtctgaaactgtttttaaataggtccttttcactctacaggaaataggaatctctggacaggaaaaatctctgctagaccacacta

SEQ ID NO: 587195 - DNA, 564 bp, Homo sapiens
ttctgggcccttccaaggtgggcaattaggtcttaaatgagaaatctatgctaacattccaatctctctaagcctttgaatctcttcctctacattaaaccaaggcaggttgatcatttctaactcactaactgtaaaccacctattggtstatatttcagccaagcaatcaaacaaactcttttaacaatctccctttctaactccctgagctgcaacattaagcattagaatctctgcttagtaagtccatataaataaatttggcctggtctaactttatgttccttccattactatccaacacccttaacgtccattttcacacaagtcccctggatttctgcctgtataaattagaaaactcagacagctattttgaagtatagaatacctcttcctggttcacaccttgtacctcacctttagggacctgctgtgacttgagtcagtcatagatctagagtaaagataagtggtggagtgtgttccaaggagactcaacattgtcttgtgtggcagctgcctgagcagagccattacagtaatgcgtcacattactgc

SEQ ID NO: 587196 - DNA, 528 bp, Homo sapiens
gaattcctaagcatttgggagaatgaagaaactgartgcagctgcctcattccttctgcctgggtttgctgactgttcaaggcctgccgggactggggctaaggactaagccccactctggctacaaagactcctattagggtgggctgggaagactgattggtttgggagacaggattccaatgacagagcctgccaggctgggcatttctgagtaatctgtagacaataggaagtttgaggaaatttggactggatagaaaatgattaaatatatgctgaatagtctagtacattctggaaacatagaggtctgaggtggaagacaagattggaggaaatctcaaaagctgggcttagtaggtgagttctacattaagacaagcatgattttgagaagggtgaacctgcatcactaattgcattcagagggtgaataagaccagtaatgcacagatgtgtagctacaattgccaagatttgagaaagaccaatgcatttataacatacacaagaatctgtgtattt

SEQ ID NO: 587197 - DNA, 528 bp, Homo sapiens
gaattcctaagcatttgggagaatgaagaaactgagtgcagctgcctcattccttctgcctgggyttgctgactgttcaaggcctgccgggactggggctaaggactaagccccactctggctacaaagactcctattagggtgggctgggaagactgattggtttgggagacaggattccaatgacagagcctgccaggctgggcatttctgagtaatctgtagacaataggaagtttgaggaaatttggactggatagaaaatgattaaatatatgctgaatagtctagtacattctggaaacatagaggtctgaggtggaagacaagattggaggaaatctcaaaagctgggcttagtaggtgagttctacattaagacaagcatgattttgagaagggtgaacctgcatcactaattgcattcagagggtgaataagaccagtaatgcacagatgtgtagctacaattgccaagatttgagaaagaccaatgcatttataacatacacaagaatctgtgtattt

SEQ ID NO: 587198 - DNA, 503 bp, Homo sapiens
ctgggtttgctgactgttcaaggcctgccgggactggggctaaggactaagccccactctggctacaaagactcctrttagggtgggctgggaagactgattggtttgggagacaggattccaatgacagagcctgccaggctgggcatttctgagtaatctgtagacaataggaagtttgaggaaatttggactggatagaaaatgattaaatatatgctgaatagtctagtacattctggaaacatagaggtctgaggtggaagacaagattggaggaaatctcaaaagctgggcttagtaggtgagttctacattaagacaagcatgattttgagaagggtgaacctgcatcactaattgcattcagagggtgaataagaccagtaatgcacagatgtgtagctacaattgccaagatttgagaaagaccaatgcatttataacatacacaagaatctgtgtatttctgtgatttacaatttgcaaccaacagaattcca

SEQ ID NO: 587199 - DNA, 503 bp, Homo sapiens
ctgggtttgctgactgttcaaggcctgccgggactggggctaaggactaagccccactctggctacaaagactcctattagggtgggctgggaagactgaytggtttgggagacaggattccaatgacagagcctgccaggctgggcatttctgagtaatctgtagacaataggaagtttgaggaaatttggactggatagaaaatgattaaatatatgctgaatagtctagtacattctggaaacatagaggtctgaggtggaagacaagattggaggaaatctcaaaagctgggcttagtaggtgagttctacattaagacaagcatgattttgagaagggtgaacctgcatcactaattgcattcagagggtgaataagaccagtaatgcacagatgtgtagctacaattgccaagatttgagaaagaccaatgcatttataacatacacaagaatctgtgtatttctgtgatttacaatttgcaaccaacagaattcca

SEQ ID NO: 587200 - DNA, 586 bp, Homo sapiens
tcacagaatttaaacatctaagattttttaaaaagtttagttttggcaaaatattgtctgaaaatgcagagatttctgcctgtgttagatgacttaatggtttgggatggcaataaaatatttcctttaaaaaatgtttcctttaaaatgtatttcttagaagacggatacaagagagtcaaacttaaaagtctgaaaaggctctatcttttttataacatcayttttcaacatgttccttgaagaactatgacagaaacaattgctttagagaatagtgaaattatacttaatatggcaaagagagtaaatctctcctctgcagcatttcacttctaatcagtcttaagtaatagtgaagagatgttcattgggagcgtaatttactctttatacaaaagaaaaaaattctagaataatttactacatttacatctccaacccaaacataaaacaggagggaaaccaattttcttatcacatgacatgatgatttacaggagaaaagagaattaatttatcttcttgtaggacatgaaaatatccaagaacaaaccattgtggttttttttaagcacagaaagag

SEQ ID NO: 587201 - DNA, 586 bp, Homo sapiens
tcacagaatttaaacatctaagattttttaaaaagtttagttttggcaaaatattgtctgaaaatgcagagatttctgcctgtgttagatgacttaatggtttgggatggcaataaaatatttcctttaaaaaatgtttcctttaaaatgtatttcttagaagacggatacaagagagtcaaacttaaaagtctgaaaaggctctatcttttttataacatcacttttcaacatgttccttgaagaactatgacagaaacaattgctttagagaatagtgaaattatacttaatatggcaaagagagtaaatctctcctctgcagcatttcacttctaatcagtcttaagtaatagtgaagagwtgttcattgggagcgtaatttactctttatacaaaagaaaaaaattctagaataatttactacatttacatctccaacccaaacataaaacaggagggaaaccaattttcttatcacatgacatgatgatttacaggagaaaagagaattaatttatcttcttgtaggacatgaaaatatccaagaacaaaccattgtggttttttttaagcacagaaagag

SEQ ID NO: 587202 - DNA, 573 bp, Homo sapiens
acatcacttttcaacatgttccttgaagaactatgacagaaacaattgctttagagaatagtgaaattatacttaatatggcaaagagagtaaatctctcctctgcagcatttcacttctaatcagtcttaagtaatagtgaagagatgttcattgggagcgtaatttactctttatacaaaagaaaaaaattctagaataatttactacatttacatctccaacccaaacataaaacaggagggaaaccaattttcttatcacatgacatgatgatttacaggagaaaagagaattaatttatcttcttgtaggacatgaaaatatccaagaacaaaccattgtggttttttttaagcacagaaagagaaacaagtacaatgcaaatacctttsatctcaaaaacttccccctttttgtgtcttaaaaaaagacttgtgtcttgtctcccagtcaagcataataagcatagattcttgaaatggttgtagcctcaatttgatctatcatgttccctcctcctgtaaatgttctgtatcagacactctttccaatgcacacttttaaaattta

SEQ ID NO: 587203 - DNA, 562 bp, Homo sapiens
tctgtctgcctttgaaggacatgctcttaaaatatcaccactttatactgcttctttaaaatccctgagtaacattaattgcccctgtttgactgtcaatttaatttacattaaatgttagaattaataagtaaatttagcaaaatcctgggtacaaaataattttaatttctaaattctagcaacaaacaataaaataaaatattatttatatatagtaccagcaaaataaataggaatatatttaatgaaatatgtaaaagtttcctayattgaaacctttttaaaaatactgagttacagaagacctaactaaatggaaagactataccatgttcatggattagatctaccatttaaatatgtttccctcaaacttatttatatattcaatacaatccaaaccaaacaccagattgttgttatagtttatttacataaaaactgacaaattgattctagaatttgtggagagatgatagggtcaagcaaatcacaaggaacaataaagttggctgggcatagtagctcatgcctgtaatctcagtactttgggaggctg

SEQ ID NO: 587204 - DNA, 638 bp, Homo sapiens
tatacacacatctatatgcttttaattaggggagggagtgagggtggcagaggtagctgggaggtctgctcatcatttagagattctgggaaacttataataaatgctattcactatgacagtttattacaataaacgcagaagctttccccagtgatgtgaagcccttaagaagtgcagattataccaaattcatttgcaaattggaaagtgtctattaattagaccacaggagaaaaaagtacactgagggtgtgttttcctgactcrttattactgaaagcaaggacagcaagtggggatattaggatgatttacagtcccagggcaacctcaagaagatcagtaccctgtacttttttacaaggccatggttttgcacgtaaaaggacagctgaaaaagaggaactgcccaaatgcagtgatgtcagttactttgctgtcatttggatggtgatagggtgagggaggaggatggagtcactcagagtagaaatggggagaccaagaagagcatccaggggctgttgctgcactaggggttgagggggcctgtgtggattgggtttaagagtcaggggtcatggcttgaggtgaagggagaggagatcctgtaggattctaagcaggttgaggaa

SEQ ID NO: 587205 - DNA, 638 bp, Homo sapiens
tatacacacatctatatgcttttaattaggggagggagtgagggtggcagaggtagctgggaggtctgctcatcatttagagattctgggaaacttataataaatgctattcactatgacagtttattacaataaacgcagaagctttccccagtgatgtgaagcccttaagaagtgcagattataccaaattcatttgcaaattggaaagtgtctattaattagaccacaggagaaaaaagtacactgagggtgtgttttcctgactcattattactgaaagcaaggacagcaagtggggatattaggatgatttasagtcccagggcaacctcaagaagatcagtaccctgtacttttttacaaggccatggttttgcacgtaaaaggacagctgaaaaagaggaactgcccaaatgcagtgatgtcagttactttgctgtcatttggatggtgatagggtgagggaggaggatggagtcactcagagtagaaatggggagaccaagaagagcatccaggggctgttgctgcactaggggttgagggggcctgtgtggattgggtttaagagtcaggggtcatggcttgaggtgaagggagaggagatcctgtaggattctaagcaggttgaggaa

SEQ ID NO: 587206 - DNA, 456 bp, Homo sapiens
aatttacatcactaaggagctgaaatttttagctctttattaaacaaataaaagaagaggccctcatatcttcacaaaatttaatgtgagtcagaccygagttaatgatctacacattagccaaggtttggacatgagatgcaacatctgctatgcctaaaagtaattgtatactcagaaatgtgcctaattagctaacggatgggtctctggcattgacatttccaaggataaatcctaaaagggaaataagaagtccactgggaaggaggaatgtacaattacataatgtaaaaaaaaaatacttagatcaaactcctttaagcatgagccataatcctatgtgcttgaattttggtttgttttcattttttagttatatttattatttttaaggatataattaatttgtacattcttatacaaattcaaacaaatcatcctacaagaaagatc

SEQ ID NO: 587207 - DNA, 645 bp, Homo sapiens
gtttgcttgttttacacaaatgggattatatcgaatattgttttgcaaatcgcttttttttttacaaatgaaatatatcttagagatctttctattttaatgaatacagattatctcattctttttcattgttgcataatatttcatagtatagatgtggtatatttcatttaactgtaccttactaacagacattttgttgtgttcagtttgtcactataacatgcaacattgcaatgattattctttctgtacacatggaaatactttttaggaaaaatgcttatattaagaattgctaagtaagaggctatgcataccacattttgataaacattgaaattttttgccagaagagcctgttatcaatatcagcaccaacagtaaatagaacctttcatcatcatcatctttcattttccttcttcttcttccccatcttccrtatttatgggggaaaaactgatttttcactgtttattttatatttctctgattattagtgaagttttgcatctttttatatgttattggccatttgcatttcttattctgtaaatagcctgctcatattcctttctctatctttttccttattgataacggaaactaaatatttcaatctactagagtgaaagaaaatag

SEQ ID NO: 587208 - DNA, 634 bp, Homo sapiens
agttaaaattgatatgcccattctatatttaaacagaaattcaggtaagagattggaaattttacttgtgaattttggaagaaatctgggctagagacctacatttgtgagttaactatggataggtggtatttaaagtcatgggcctggatgagatgagctcagcagagaggccagagagaaaagggaaggcctaggatgaagccctcaggcaggccactatgtaagggtgagtcatggtaagaaagggcagaaaaggactacaaagggagctacctttgaggtgggaggaaatataggagagaatggatctcagaaatcaagagaagagagggtttcaagaakcagcagcatgacttgtcaaatgatggctgagagatgaagtaaagcaagaaaatagacatgcccattggctgtgttaatgcagaaatggcagagttttccttatggggtgtgggagcaggaaacccagccaagggagaagagcagatgagggagtggagctctgctaggaattacactgtgtggggcattttacaagcaaacaactaaagtatatctttaacaagtccatggcatagaaacaaagtatgttctaggttaaaagaggtttaagagatgcgatgaaatgcaa

SEQ ID NO: 587209 - DNA, 634 bp, Homo sapiens
agttaaaattgatatgcccattctatatttaaacagaaattcaggtaagagattggaaattttacttgtgaattttggaagaaatctgggctagagacctacatttgtgagttaactatggataggtggtatttaaagtcatgggcctggatgagatgagctcagcagagaggccagagagaaaagggaaggcctaggatgaagccctcaggcaggccactatgtaagggtgagtcatggtaagaaagggcagaaaaggactacaaagggagctacctttgaggtgggaggaaatataggagagaatggatctcagaaatcaagagaagagagggtttcaagaagyagcagcatgacttgtcaaatgatggctgagagatgaagtaaagcaagaaaatagacatgcccattggctgtgttaatgcagaaatggcagagttttccttatggggtgtgggagcaggaaacccagccaagggagaagagcagatgagggagtggagctctgctaggaattacactgtgtggggcattttacaagcaaacaactaaagtatatctttaacaagtccatggcatagaaacaaagtatgttctaggttaaaagaggtttaagagatgcgatgaaatgcaa

SEQ ID NO: 587210 - DNA, 558 bp, Homo sapiens
atctgtgatcagatcttttaacctagcattctattgaaatcatttaaaattttgtaacaacaacaaaaaagtgtttgtgcacatgagcattttcctgtcataataataacagctccttcttattaagcacttactactcagtaggcatttaggcactgtgcttagcttgttctctctccccatctcttcccttccattttctccccaaaaaatatatttaaatcctcacaataatcaatgaagcacttgagtctttttcttgtttatcgttcagtgacttgcccaaaatgcatggttagtaagtggcagaatgagaattctcaccactctctaatcctcaggatcacggcccactttctccctgctgttgtctcacttccctaggtcaggcacacatagytaaagatcccaagtgtgtattacctactcctatatgtctcacttccctaggtcaggcacacatagctaaagatcccaagtgtgtattacctactcctataggagaggcctcagggcaacgctggaggaccatttcccagaggaaaaaagtttgggagt

SEQ ID NO: 587211 - DNA, 547 bp, Homo sapiens
ggggttcttagttccttgtcatctggtatatctaagcaaattgagccaccagagcccatgctgggattgctgctgattgttcggccaccatctggagagcctctctgccatgtcttggctgccctttgaaagccaagcttttctgttgcttattccaaatgaagccaatgtctaaagagcaactgtaaggccaagatgccccatctgtgaagctcccaagatattctgaggctaagagtgcttttctgacccatcctctgagcttccagtgggcaagaatcctctgagccaacacacagccctcgtgatagcctggtcagtgaatggcacctaccatgagatgccagggacacaattcccctggaaaaagaaaggatttgctggcctctctctgcaagggcaatgggggctttggagttcatcgatgctgcatctcagaatggattactctactgggcataggcagcaagtaagccagggttattsctctttactggcaggagccatagcaacagaaaaccttggcagctccatttgacctggatca

SEQ ID NO: 587212 - DNA, 569 bp, Homo sapiens
atctgtgtgccaaagtagcatattttggggtggcagattctgcacccttcaagttaatgtatgaaatccctggctggaagacttttgcgtgggtttctaaaggtgcttccctatgtgtcatggcatttactcttcacattgcagctatggggtgggggtcaagggagtcagcagtatgttctccatttttgtaagagcaaacagaagccctgagagccagaaggctgacaccacatcccccagctactcagtagctgaaatgggaaaggaagcagagattctagctcctgctgtccttactcaccttcccacccttccctgccacccccctcttccctactcagctgacattctgcagtccgcccttgtcaaygcacatttatggaccaccagagggatcttcagcatcttgtcctcctacccaccttctctgacaaagtttctaatttgctacctaggctgtagcttcccaggaagaagccagccctgtgcacagttgttatttcacaaaacaccatttgtgtcctcgctggagggagtggtgtctctcatcttgtggagccacctta

SEQ ID NO: 587213 - DNA, 464 bp, Homo sapiens
gatttagctgcccctttgccaattctgggcatgagccagaggctgaaaatttgggcttggcccaggcagagcaatgatgctagggcaagagctaagaaagtgatacaataaggcttggagcagatgcacagggatgcagtgacttaaacgggaaatggaatggcttcaaactgagaacattttctcttaggacrtttgctaaatgttgaagctggttgaagcagaaggagaaaggactatgacctgtatactaaaaataaaactctaagcccctaaactgactgaatggaccccctcttggccaagaggatctgaaagaaactggaaaaactagttcaggccatgatgggaaagggggtcagacatgcctcattataccctcctccctttggagttaagaggtaactgacaagcattaacattaaaacagagctcttaagcctggcaaaatagactctatgtag

SEQ ID NO: 587214 - DNA, 464 bp, Homo sapiens
gatttagctgcccctttgccaattctgggcatgagccagaggctgaaaatttgggcttggcccaggcagagcaatgatgctagggcaagagctaagaaagtgatacaataaggcttggagcagatgcacagggatgcagtgacttaaacgggaaatggaatggcttcaaactgagaacattttctcttaggacatttgctaaatgttgaagctgsttgaagcagaaggagaaaggactatgacctgtatactaaaaataaaactctaagcccctaaactgactgaatggaccccctcttggccaagaggatctgaaagaaactggaaaaactagttcaggccatgatgggaaagggggtcagacatgcctcattataccctcctccctttggagttaagaggtaactgacaagcattaacattaaaacagagctcttaagcctggcaaaatagactctatgtag

SEQ ID NO: 587215 - DNA, 613 bp, Homo sapiens
cacatgacagagagcaagcacagaaggaaatcaaagtattttaccccaaaatgtttttccttgatatattttgaatggtcgtgcaaagtgtctctggtgggggaaatttgcattctatagagaatctcgtcattactaggtcttttctgaagagtctgacatcttttaaggcttggaaagcaatctctttctctaaagcttgctacctgaaggcttcatttacatgacaagaaccttggcttccccctgtctctgccccaccttaccttaactcaagcatctctttatgctgacttcaactcttcaggcagagtttaactctttcaactagctgccaatcaggaaatctttgaatccacctatgacctgggagcccctgctcagagacgtccctttttctgggccaaaccagtgtatacttttcatttattgatttatgtctttacctataacttccatttccctaaaatgtataaaaccaagctgtaactaaaccaccttggacacatgttctcaggacctcctgaggttgtgtcataggacrtggttctcaaccttggcaaaataaacctctaaattgattgggacctgtctcaaattctttttggttaac

SEQ ID NO: 587216 - DNA, 395 bp, Homo sapiens
tgtgtcataggacgtggttctcaaccttggcaaaataaacctctaaattgattgggacctgtctcaaattctttttggttaacaatccaaactctgaaaagaacagtagaatttcccacagtcttgcagtgcctaggagacaaggaaccactatgagaatgggctctgagaaattatagaccrggagtattatggacttcttacaggtagttaggctttgattggggctcttccccacccactaggaatgtcaggtgatggtttggcaatcattacattgcatctctagaagtgataaattggcagccagcaccagggagaggccatttcctgatggtccatatctgtggcattaaagtgttcattgaatacagttgccagggagaagcagctgc

SEQ ID NO: 587217 - DNA, 486 bp, Homo sapiens
gtttgacaacttcttgtaagatgarccagtgttatcagctttgacgacctgctcttccacataaatcttcctgtataatactacttagcaggtatttaaaaaatttttccatggcctcatgatcttcagagcctcctttgcctacatttaacatttctcatgctatatcactttttcaaatgtgtgagccaccatcattaactgggaagtctgtaacattttcctgaccctgagtgatgtaacagtaagtttatttgacattcaccatcatggtagtgctgtacattatgcttttgagaaatcaatcatcatcttaatagtccacaattttagacactttataatcttttccatggcttcattatgcactatacatgttactttagcactttccagagtggctttacttacagactggcaaattttctctttctttttctgcatgtatcacattattgactcattaacattggactcatgacaaag

SEQ ID NO: 587218 - DNA, 486 bp, Homo sapiens
gtttgacaacttcttgtaagatgagccagtgttatcagctttgacgacctgctcttccacataaatcttcctgtataatactacttagcaggtatttaaaaaatttttccatggcctcatgatcttcagagcctcctttgcctacatttaacatttctcatgctatatcactttttcaaatgtgtgagccaccatcattaactgggaagtctgtaacattttcctgaccctragtgatgtaacagtaagtttatttgacattcaccatcatggtagtgctgtacattatgcttttgagaaatcaatcatcatcttaatagtccacaattttagacactttataatcttttccatggcttcattatgcactatacatgttactttagcactttccagagtggctttacttacagactggcaaattttctctttctttttctgcatgtatcacattattgactcattaacattggactcatgacaaag

SEQ ID NO: 587219 - DNA, 569 bp, Homo sapiens
cactttttaaaatctttaacatttatatctacaacccatttggaaataatttttacatttggtacgagataaggcttaagatttatttttttccatgtgcatatttatttagcccagcactgttagttggaatgtacacttattactgtttcttctataataaattaaccatatggatatgattctgctttctcaattttctattctattccaacgagatggttttgttttcatatgccaataacacgctgtctaaatcactgtagcctaatgtcttgatatcytatggtgtaaattctccataatttttgttctttttcaagatcacctcagatatttgtagactttttgtatttctatacaaattttagaattactttgtcaatatccacaaaaaacaaaaactttctaaaattctaatttggattgcatttaatatatattaatggttgacaattaacatttttacattattgaatctttcatatatgaatatataccatttatttatgtattctttaatttctctcaagaaagtttttagatttgtgtttataagttttgttaga

SEQ ID NO: 587220 - DNA, 616 bp, Homo sapiens
ttttattagcatcctccaaaattttatatcgtattttcattttcattagtttgaaatatttcataatattacttgtgattctaccttcaatccctggattgtttcaaaatatgttgcttaatttccaagtaattggggatgttttagcattcttttgtgcttgattccagcacagcctgaatgaaattgttcatttaaaatatattgagcaccttttcatgacacctcagaggtgatcaactgcttcaagatgaaactgaatatgtccttcccagccactggcttccagaaactcattgaaawggatgatgaatgcaaatttcatactttttatgagaagtgtgtggtaacagaagttgctgctaacactctgagtgaagaatagagtggttatgtggtctgagtcagtggtgggaaggacaaacaagttttccccatgcagtagtgtgtcttgacccatggctgtgtctgcctgctactgagaaaggggcattcctgttatagaccaaggagaactggagaaaaaaagcacaaatctgttcgaggttgcattgtggatgtcagtctgaatgttctcaacttggttattgtaaaattttaaaaaggagagaataat

SEQ ID NO: 587221 - DNA, 549 bp, Homo sapiens
attccagcacagcctgaatgaaattgttcatttaaaatatattgagcaccttttcatgacacctcagaggtgatcaactgcttcaagatgaaactgaatatgtccttcccagccactggcttccagaaactcattgaaatggatgatgaatgcaaatttcatactttttatgagaagtgtgtggtaacagaagttgctgctaacactctgagtgaagaatagagtggttatgtggtctgagtcagtggtgggaaggacaaacaagktttccccatgcagtagtgtgtcttgacccatggctgtgtctgcctgctactgagaaaggggcattcctgttatagaccaaggagaactggagaaaaaaagcacaaatctgttcgaggttgcattgtggatgtcagtctgaatgttctcaacttggttattgtaaaattttaaaaaggagagaataatgttcctgtactgactgatactatggtacctcattacctgggggcccaaaggagctagcagaatccagagtctttttaatctgcctaaacaagatga

SEQ ID NO: 587222 - DNA, 623 bp, Homo sapiens
tgaaacaatattgatttgttatcattacctaaagttcaaagttcgtattaagatgcactctttgtgttatatagttctctatgttccctcaaatgcacaatgtcatgaatatacattatacaataataccctaaaaattccctatgctccacctatccatccctctcctccttctaaaccctggcagtcactgatcgttttactatctctatagttttgctttttccagaatgtcatatagttagaatcatatagtgtgtattcctttcaaacggacttcttttgcctagaaatatgcatttaaggttcttccacctatttttgtggcttaatagctcatttctttttactgtcaaataatayactattgtatggatgaaccacatgttgttgatctatttacctactaaaagacatcttggttgcttccagttttgggccattataaataaagctactattcacattcagatttttgtgtagacataattttcaactcttttgggtaaatacccagtagcacaattattggattatatagtaagactatatttcggtttttaaggaaatggcaaactatcttccaaaatgattgtatcatttttgaataggagcaatgaatg

SEQ ID NO: 587223 - DNA, 619 bp, Homo sapiens
ataagcctgtgctcagggcagaaatgcaatcaaatggcctgtagaaggaaacttaataagccctgcctctccttctgttaccttgcagtaagtttcccgagattcaggtcttgtggggacactgagagagggtagttccaggcattccagtagctctcacagcaactgtactggcacctggcagcattctaacacctcagaaagggttgaacagtttgcatctgtgtctctatcaaaaggcattaaatatgcatctgatcaagatagtagtcaggactatgaagtgcctatggggggaatttgcttgaaattatgactatatgtacatgctttctttctgaaatggctttggggctgaaattctcacaagagaattggttaaagaacgggagatggttcaacaaagattgactgttaacagtttgggtggaaagtaaggggggcagcaagaccaaaattcagggctcattactaaagatgggrcccagccctgcccatggaatttttaccacttgttggtggccatagaatcatggtagtcaagtaatcataagtcttggtttgctcagaatagtcccattttatttgtactgctccagtgtaattgttattagcacct

SEQ ID NO: 587224 - DNA, 591 bp, Homo sapiens
tttttaccacttgttggtggccatagaatcatggtagtcaagtaatcataagtcttggtttgctcagaatagtcccattttatttgtactgctccagtgtaattgttattagcacctccttttgttcttaagagtgtcctcgttaggatgataaattatagggccaccctacaaagtaaggatttccaaaattatttactttttgaataagtcaaacactcaagactattatttcacagtccagtaggcctcacaactcatagcccagatctacatccattaatgagagtagtaagtttcctctccctataactattcaggtaaagactagaaaaggakatgaggtcaaggaaatttggacaaaaaacaagggcctatgtcaatggttttgtgagattccttctttccctgaggttcagcaaatctgagaaaaaaactcataggggaaatagtttctcaagtttgtacaagaagatggtagctgatgaagaggctgagcccaagttttctcactttctttactagagactgattatgattaggagaaaataagccagacagggaaacacttagagtggttctaggtactgc

SEQ ID NO: 587225 - DNA, 548 bp, Homo sapiens
caacttatctacacagaaaaaacacgatcataagaaccaaaaatcaggcaagccctcatagtatctggttttaacattgtatcactgtaagagacactgaagagatagaaaacaacaatcttcaattgctgacgccaccccttccccacctctggccgcagcaatgtggtgcagagtgtccctgggcgctggaggagggtgaacacagaaattatgaagcaataaactccgtgctgttctgctacagcagaaagaaacaccagaccaaactcagctgatgccagcccatggcaggagcatttaaaccagccctacccagaggggaatcaccaatcccagtggtcagaacttgacttcccacagaccttaccactgaggkacaaagtactctgtgtctctaaataaacttgaaaggcagtctaggccgtaaggactacaactcttaggtgagctctagtgctcaacttggcccagagactaactggatggtggggcatccaaatactgagatatcagctggggcagccaaaggagtgttggcaacacac

SEQ ID NO: 587226 - DNA, 449 bp, Homo sapiens
tggtcagaacttgacttcccacagaccttaccactgagggacaaagtactctgtgtctctaaataaacttgaaaggcagtctaggccgtaaggactacaactcttaggtgagctctagtgctcaacttggcccagagactaactggatggtggggcatccaaatactgagrtatcagctggggcagccaaaggagtgttggcaacacacctcccctaccccaggctgcacagttcatgactccaaaagagactacttcctcttgcttgaggagaggaaagggaagactggggaggactttgtcttgcatcttggataccagctcagccatagcaggatatggccctggtcaaagttatgaggacccattcaaggccctagctcctggacaacatttctaaacataccctaggccaaaagggaacccactgccttgagggagggactcag

SEQ ID NO: 587227 - DNA, 449 bp, Homo sapiens
tggtcagaacttgacttcccacagaccttaccactgagggacaaagtactctgtgtctctaaataaacttgaaaggcagtctaggccgtaaggactacaactcttaggtgagctctagtgctcaacttggcccagagactaactggatggtggggcatccaaatactgagatatcagctggggcagccaaaggagtgttggcaacacacctcccctaccccaggctgcacagttcatgactccaaaagagactacttcctcttgcttgaggagaggaaagggaagactggggaggactttgtcttgcatcttggataccagctcagccatagcaggatatggccctggtcaaagttrtgaggacccattcaaggccctagctcctggacaacatttctaaacataccctaggccaaaagggaacccactgccttgagggagggactcag

SEQ ID NO: 587228 - DNA, 558 bp, Homo sapiens
gccttgagtgagcctgagacttgctggctacaggtgagactcggcatattccaagctgtagtggttatggggcaaaactctttctgcttgagaaatgcagaggagaaagtcttgagccttaggtaccagcacagcacaggagttaaagcatcaagtgggatcatggggtctctgattccaagacttgactcttgaacagcatttctggacctgccctgcaacagaggtgatcctactgctctgaagggtgagtcccaggccaggcaacattcaccacaactgacttaagagcccttgggccttaagggaacatcagcaatagtctggcagtactcctcgtggcctgagrtctcggtggctgtgggttgaggcttttctggctttagaaagggaagggaggagaaggaaggactacatattgtggtttgagggccagctcagctgcagtacagtagaacaccaggtagacttctaaggtttttgactcccagatggcacccctggactcacatggggcctgggggaccttgccaccctgaaaggaaggacctacaccca

SEQ ID NO: 587229 - DNA, 379 bp, Homo sapiens
caactgacttaagagcccttgggccttaagggaacatcagcaatagtctggcagtactcctcgtggcctgagatctcggtggctgtgggttgaggcttttctggctttagaaagggaagggaggagaaggaaggactacatattgtggtttgagkgccagctcagctgcagtacagtagaacaccaggtagacttctaaggtttttgactcccagatggcacccctggactcacatggggcctgggggaccttgccaccctgaaaggaaggacctacacccagctggctttgccaccagctgattgtagagccccagggccttgagcaaacataggcagtagccaggaagtggttacagcaagcattagccaacactca

SEQ ID NO: 587230 - DNA, 492 bp, Homo sapiens
aatatccaagtacaagaaggttatagaacaccgagcagagttagcccaaagaacactattttaaggcatttaataataaaactyccaaaggtcaagggtaaagaactgatcctcaaagcgtcaagaggaaagaaaaacaaataacatgcaatggaactttgatacatctggcaacagacttttcagtggaaaccttacaaaccaggagagagtgtaatgacatatttacagtgctaaaggaaaaaaaaaaaaaactttagaatagtatatctggttaaaatatccttcgaacatcaaggagaaataaagactttcctaaacaaaagctgagggatttcatcaacaccagacctgtcctacaagaaatgctaaagagagtatttcaatcagaaagaaaaggacattaatgagcaataagtactcaccattaggaacaaaactcactggtaatagtaagtacacagaaaaacacagtattataacactttaact

SEQ ID NO: 587231 - DNA, 425 bp, Homo sapiens
ttattggccttcaagttattgaaagtttattcacagggttaataacagagaacttcccaaatctatagaaagatatcaatatccaagtacaagaaggttatagaacaccgagcagagttagcccaaagaacactattttaaggcatttaataataaaactcccaaaggtcaagggtaaagaactgatcctcaaagcgtcaagaggaaagaaaaacaaataacatgcaatggaactttgatacatctggcaacagrcttttcagtggaaaccttacaaaccaggagagagtgtaatgacatatttacagtgctaaaggaaaaaaaaaaaaaactttagaatagtatatctggttaaaatatccttcgaacatcaaggagaaataaagactttcctaaacaaaagctgagggatttcatcaacacca

SEQ ID NO: 587232 - DNA, 234 bp, Homo sapiens
aaactattagaactgctaaacaaacttagtaaagttgcaacatacaaaaatcagtagcatttctatctgtgagtgagaactcactcactgtcatgagaacagcatgcrggaaaccactcccatgatccaatcaccttccacaaggtcccttccttgacacatggggattacaatttgtcttacaattcaagatgagatttgggtggggacacagccaaaccatattattctgcc

SEQ ID NO: 587233 - DNA, 590 bp, Homo sapiens
ttttaaaataacttacttaaagagtataattgaattatttgtaactctaaggatcagtgcttggggggaatggataccccattcttcatgatgtgctcatttcacattgcatgcctgtatcaaaacatctcatgtaccccataaatatatacacctactatgcacccacaaaaattaaaaattttgaaaaaattaattaaaacraaaaaaaatttgggtgtgtatctgcacctagggttttgtgtcagacagaatagagtaggttttgatgtagtagtaaacaaaatttcagtggcttaaaacaacatagttttgccaggaggagtggctcatacctgtaatcccagcactttgggaggtcaggagttcaagaccagcctggccaacatagtgaaaccctgcctctactaaaaatacaaaaactagccaggtgtggtggcaggcacctgtaatcccagctacttgggaggctgaggcaagagaattgcttgaacccaggaggcagaggttgcagtgagccaagatcgcaccattgcactccagcctgggtgacgagtgaaactccatctcaaaaaacaaaacaaacaaca

SEQ ID NO: 587234 - DNA, 590 bp, Homo sapiens
ttttaaaataacttacttaaagagtataattgaattatttgtaactctaaggatcagtgcttggggggaatggataccccattcttcatgatgtgctcatttcacattgcatgcctgtatcaaaacatctcatgtaccccataaatatatacacctactatgcacccacaaaaattaaaaattttgaaaaaattaattaaaacgaaaaaaaatttgggtgtrtatctgcacctagggttttgtgtcagacagaatagagtaggttttgatgtagtagtaaacaaaatttcagtggcttaaaacaacatagttttgccaggaggagtggctcatacctgtaatcccagcactttgggaggtcaggagttcaagaccagcctggccaacatagtgaaaccctgcctctactaaaaatacaaaaactagccaggtgtggtggcaggcacctgtaatcccagctacttgggaggctgaggcaagagaattgcttgaacccaggaggcagaggttgcagtgagccaagatcgcaccattgcactccagcctgggtgacgagtgaaactccatctcaaaaaacaaaacaaacaaca

SEQ ID NO: 587235 - DNA, 590 bp, Homo sapiens
ttttaaaataacttacttaaagagtataattgaattatttgtaactctaaggatcagtgcttggggggaatggataccccattcttcatgatgtgctcatttcacattgcatgcctgtatcaaaacatctcatgtaccccataaatatatacacctactatgcacccacaaaaattaaaaattttgaaaaaattaattaaaacgaaaaaaaatttgggtgtgtatctgcacctagggttttgtgtcagacagaatagrgtaggttttgatgtagtagtaaacaaaatttcagtggcttaaaacaacatagttttgccaggaggagtggctcatacctgtaatcccagcactttgggaggtcaggagttcaagaccagcctggccaacatagtgaaaccctgcctctactaaaaatacaaaaactagccaggtgtggtggcaggcacctgtaatcccagctacttgggaggctgaggcaagagaattgcttgaacccaggaggcagaggttgcagtgagccaagatcgcaccattgcactccagcctgggtgacgagtgaaactccatctcaaaaaacaaaacaaacaaca

SEQ ID NO: 587236 - DNA, 544 bp, Homo sapiens
tttatatggcacaagcggtgtgccaagcacttgctgagtttcactattctgtgagactcaccatgtatttaatcctgacaacaactatatagatagttactgttagtacactctctttacagatgagaaaatggaggcaaaaatggtaaagtaacttttcccaggtcaatggttagtaattatcagagctgggattcaaacccatgcagtttgctccagtatccaagttccattacttctacgctagacaaattggggaataaagacatgcccatcttatccaatagcatctgatggcatagtacatactacaatayggtttctcaggaaatggagcccctggggtcttatgaaataattttcttggcactcaaagaacattaaatagcatcgcctcatatgatggcaagtgcattttctttttattgcttttctccctttgtttcccaatccttctgattatgtcaaaaaaaaaatgtcaaagacatgctagcactaaccattattgttaatctcaatttggaagaagagaaaggcccccagc

SEQ ID NO: 587237 - DNA, 544 bp, Homo sapiens
tttatatggcacaagcggtgtgccaagcacttgctgagtttcactattctgtgagactcaccatgtatttaatcctgacaacaactatatagatagttactgttagtacactctctttacagatgagaaaatggaggcaaaaatggtaaagtaacttttcccaggtcaatggttagtaattatcagagctgggattcaaacccatgcagtttgctccagtatccaagttccattacttctacgctagacaaattggggaataaagacatgcccatcttatccaatagcatctgatggcatagtacatactacaatacggtttctcaggaaatggagcccctggggtcttatgaaataattttcttggcactcaaagaacattaaatagcatcgcctcatatgatggcaagtgcattttctttttattgcttttctccctttgtttcccaatccttctgattatgtmaaaaaaaaaatgtcaaagacatgctagcactaaccattattgttaatctcaatttggaagaagagaaaggcccccagc

SEQ ID NO: 587238 - DNA, 568 bp, Homo sapiens
aacctaccgtgtactagacagtcaaaggacaacctcagcttttgccctgtgaagctcagtcaagtaggaaatttcactaagagcagcaagagaaacaaaaccacgcaactgccrcttactgaggatttgccagtggccaggtattgaaccaagtgtcctatttgtataagcccctttcatcctaacaatagttctgcaaagaaatttacatatgtatcaccacccccattttacagatgagaatcctgagacttagagggataaagaacttacataaagttattcaactggcgaatggcagagccaggagctcaaacacatctgttttctttttaaaacagagatcattaggccaggcatgctggctcacacttgtaattccagcacattgggagaccaagatgggaagactgcttgaagctaggagtcgagaccagcctgagcaacatagcaagaccctgtatctacaaaactaaaaataagaatatccaggcacagtggtgcatgcctgtagccccaactactcaggagcctgaggtgagaggatcacataagcccagttctagtc

SEQ ID NO: 587239 - DNA, 568 bp, Homo sapiens
aacctaccgtgtactagacagtcaaaggacaacctcagcttttgccctgtgaagctcagtcaagtaggaaatttcactaagagcagcaagagaaacaaaaccacgcaactgccacttactgaggatttgccagtggccaggtattgaaccaagtgtcctatttgtataagcccctttcatcctaacaatagttctgcaaagaaatttacatatgtatcaccacccccattttacagatgagaatcctgagacttagagggataaagaacttacataaagttattcaactggcgaatggcagagccaggagctcaaacacatctgttttctttttaaaacagagatcattaggccaggcatgctggctcacacttgtaattccagcacattgggagaccaagatgggaagactgcttgaagctaggagtcgmgaccagcctgagcaacatagcaagaccctgtatctacaaaactaaaaataagaatatccaggcacagtggtgcatgcctgtagccccaactactcaggagcctgaggtgagaggatcacataagcccagttctagtc

SEQ ID NO: 587240 - DNA, 568 bp, Homo sapiens
aacctaccgtgtactagacagtcaaaggacaacctcagcttttgccctgtgaagctcagtcaagtaggaaatttcactaagagcagcaagagaaacaaaaccacgcaactgccacttactgaggatttgccagtggccaggtattgaaccaagtgtcctatttgtataagcccctttcatcctaacaatagttctgcaaagaaatttacatatgtatcaccacccccattttacagatgagaatcctgagacttagagggataaagaacttacataaagttattcaactggcgaatggcagagccaggagctcaaacacatctgttttctttttaaaacagagatcattaggccaggcatgctggctcacacttgtaattccagcacattgggagaccaagatgggaagactgcttgaagctaggagtcgagaccagcctgagcaacatagcaagaccctgtatctacaaaamtaaaaataagaatatccaggcacagtggtgcatgcctgtagccccaactactcaggagcctgaggtgagaggatcacataagcccagttctagtc

SEQ ID NO: 587241 - DNA, 518 bp, Homo sapiens
tgtgcttttgtcaggagtaggccgaggtggccttccaggggcagcatgactcagcgggtttggagcacaggcccacaaccccacacattatgtaaccacaccacatgaggtacattaaccactcacgtaagctcgtgcttggctcagagccactattgtctgtaaaaggcataactaccctgctcatgctgtacatacagcttgctaccagagagagaataaagtcatgtcaaaactgcctcaagtgtttttccagctatccaccacttgcctacccactcccctcaaacctcaacttgggctggaamctgatatttggcatgacagacttccaaggagttgattttgtctcattgccacatagagaagcttagggtaaagacagcttcttcaatctatatttcaaagggaataatgtggcttcatgattaaacataagctttgaggctatattttcattatttcagtcgctaaaaatgctggggcactgaaatctcaactggcttggttgcagcgtt

SEQ ID NO: 587242 - DNA, 574 bp, Homo sapiens
tggtcaggcgctaggactagaagggagcagtcctgatgcaggacagacctagtgtgtaagtcaccragggtgactgggaaggtggatgaccacgaggctccctccctgggtttctacagcccactgaaaagcccagcaagggccagagctcagtcctgctcagccctcagtcagcacaagacacaaagtgcacagctgggcccagcggtccagctttggaaggatagggctggacaatgttctgttgcccttcctatgtttgcaaatggtcttttccctgcctaaggctctactggtccttgacccacagctgaatccttggagtcagcacactctgctctgttcctagaacgctttccttcttttgctttaacaaagtgctgtcctcacgtggaccactggtggaacagacaggcacttctcttgggtcagccatgctttgctctcagggagttctcactccagtcctgctggccatactgcattttccacaggcaaaacccaaagaacagagtagtcttgattcaaggtgctgtgctttgctccctagctggccagctgacacctggctctg

SEQ ID NO: 587243 - DNA, 531 bp, Homo sapiens
atgggtattctggtttaaaccacttattaatgtaaattttaagaaytggaaaagaggaaaataacataagcttgcattagcaggagaaaacaataataatttcatctgcatgtgggagttgtgtctcagattcaatgaactctggaatgagatggaaaatattataaatatgactctgaaaattgaataatcagctttacacatggttccaactgtaatggatggatagacataaatagaataaaaggaatatttgctcttaaacttttctgagactgccaccctaagagtgagcttatctctccaaacaactgctaattgaactgtgaaataagggacacaacttataaatttgaagtttcaaattttaagtcaaattaaacaaaatccagacacttttaaatttataggattaatctcctgtctttcctgcaataacaagtaaattgaatctgcacaatcatgttcagtgtacgattttcaactgtgtaattattgtttaaagatacatgtcttcaatttcttctgttc

SEQ ID NO: 587244 - DNA, 531 bp, Homo sapiens
atgggtattctggtttaaaccacttattaatgtaaattttaagaactggaaaagaggaaaataacataagcttgcattagcaggagaaaacaataataatttcatctgcatgtgggagttgtgtctcagattcaatgaactctggaatgagatggaaaatattataaatatgactctgaaaattgaataatcagctttacacatggttccaactgtaatggatggawagacataaatagaataaaaggaatatttgctcttaaacttttctgagactgccaccctaagagtgagcttatctctccaaacaactgctaattgaactgtgaaataagggacacaacttataaatttgaagtttcaaattttaagtcaaattaaacaaaatccagacacttttaaatttataggattaatctcctgtctttcctgcaataacaagtaaattgaatctgcacaatcatgttcagtgtacgattttcaactgtgtaattattgtttaaagatacatgtcttcaatttcttctgttc

SEQ ID NO: 587245 - DNA, 531 bp, Homo sapiens
atgggtattctggtttaaaccacttattaatgtaaattttaagaactggaaaagaggaaaataacataagcttgcattagcaggagaaaacaataataatttcatctgcatgtgggagttgtgtctcagattcaatgaactctggaatgagatggaaaatattataaatatgactctgaaaattgaataatcagctttacacatggttccaactgtaatggatggatagacataaatagaataaaaggaatatttgctcttaaacttttctgagactgccaccctaagagtgagcttatctctccaaacaactgctaattgaactgtgaaataagggacacaacttataaatttgaagtttcaaattttaagtcaaattaaacaaaatccagacacttttaaatttataggattaatctcctgtctttcctgcaataacaagtaaattgaatctgcacaatcatgttcagtgtacrattttcaactgtgtaattattgtttaaagatacatgtcttcaatttcttctgttc

SEQ ID NO: 587246 - DNA, 611 bp, Homo sapiens
gtgcaaacacatgaccctgcagtgtcacagtttcttctagtgacaccacaaaaacttcctgagctattttacaaagaactgaaaagaaagtctgattcctctgaatgatctgtcccttttagatgtgacagttgaggtaatattaagcaactcaatagcaattgtgaaagtcaatatrcagtattacaagtttattacttgatattttgcattagatcttgacagtacgacatgcattttcttcttaggcagcaaatacctgcagggcaagggtgctttctgcacatttgatatagttatagatgtagcagtttactaaagtagaaaatgaatattagctaattagccatcaaacatggagggggcaccttctgaccatgtgacaggtactctgtcaagaactgcagaaaatgcaaatctgaatgagatcaggcccattctcattagtgttcagcctggtcagagaaataagagaataaagattctgataagcaaagagagggcaggggaattccagtgatgggcagtagggtggcaggggcagagatgggggcaggacataggcttggggggaggaaatgcaaagcatgtttaggaaaaaggaagaatat

SEQ ID NO: 587247 - DNA, 611 bp, Homo sapiens
gtgcaaacacatgaccctgcagtgtcacagtttcttctagtgacaccacaaaaacttcctgagctattttacaaagaactgaaaagaaagtctgattcctctgaatgatctgtcccttttagatgtgacagttgaggtaatattaagcaactcaatagcaattgtgaaagtcaatatacagtattacaagtttattacttgatattttgcattagatcttgacagtacgacatgcattttcttcttaggcagcaaatacctgcaggrcaagggtgctttctgcacatttgatatagttatagatgtagcagtttactaaagtagaaaatgaatattagctaattagccatcaaacatggagggggcaccttctgaccatgtgacaggtactctgtcaagaactgcagaaaatgcaaatctgaatgagatcaggcccattctcattagtgttcagcctggtcagagaaataagagaataaagattctgataagcaaagagagggcaggggaattccagtgatgggcagtagggtggcaggggcagagatgggggcaggacataggcttggggggaggaaatgcaaagcatgtttaggaaaaaggaagaatat

SEQ ID NO: 587248 - DNA, 596 bp, Homo sapiens
agagacgggagcagaagcagagcaaatcactgttgaatggcacgatttagactgtgtttgtgtgtgcgcatcttttgtcatcttaccaatttcctgtttgtctgcttattttcttttaccactttttattttgagctgttatgtggtttatttagtggtggggagaataaggatccaaacagcctatctgttaagaggtatgccatttgaggtcaccataattccatagtctagtgcaagatggccaagtgaagtctcttgagagtgaaggtggtaattttcatcaagtacatttccctgtctgattcaaggggacacataatgcagaaacccgaagcagtgagtctttgtgctgagarcattaatttaattccaatctataatgctcctgccgagtcacaaggcccatatattcccaatctcctgcttgtttgaaattgaaatcattccctttgcaaaaacaaaccatccttctccatgagtcccattacatggccagaactcctttctgggagattatttgatgacaaattatatcaagaaattaaacagaaaccccattagtaatggtgacaatattccacacacacatgaaa

SEQ ID NO: 587249 - DNA, 541 bp, Homo sapiens
tggccagaactcctttctgggagattatttgatgacaaattatatcaagaaattaaacagaaaccccattagtaatggtgacaatattccacacacacatgaaatatttaatgaaaatctagagctagggtgttgaatttgcacacaaagaacctatgtaagatgcattttctctgaatgcaaatgcaaattttcttttctaaagacctttgcaagtacgcaagagctgtctgcttttagtcacagggaaacatccatttagtaatctcctacctccattgattccacccataatgagatatccagaggtatagtagaagtccagaaacattcaaaatatggaagcagaaagatgaaaccagctcaaatggctagtaccatctgctaaggagtcagacatatgaatggccgaaagaacccttagtctttaaaggatgagtggagctggtcaaattaaaaatgggtttctgctagatcctagtataagcagctgaaagaattagtaaaaatagkaacagttcatgcttctgcttggggcaca

SEQ ID NO: 587250 - DNA, 465 bp, Homo sapiens
aattaaaatcaactgctgctactgggaccaaagattgaagaaccactgctaaggtgacagtaaaaacaaagaaagcaaacagaatgagaaaaatcccttctccctactccatcctttcagtctcttctagcacccgctaatggcagagctggtaaagaagaaatgctgttggcagaatcccagcccgggcattacagagcagaacataggaggtaggtctaaagtaagaaacaagcatttaataacgagcattagtcccccaggtgattatgttgtgtaggcagggttgagaaccactgcctgtggaaagctacaattcaggactcttctcaggtatttctggttgtttatgctttgtccaagtyccccagacttggttcagttttcccattattggcctgctctttcaagctctctatttgcttttggtctcttgacttttgggttcccacagttatggcttac

SEQ ID NO: 587251 - DNA, 465 bp, Homo sapiens
tcaagctggtttatagtattattcaaatttatttttatacctttatcaacatttttttaccctactagttatatcaagtatggcaacactcctaagagaagtaatgttaaaatctccaactataatgatgcattggtttatgtttctattgatttccagctttgtgaattttgctgctttgttattaattgtatatatattttaaaattatgtcaggctgagcatggtggttcacacctgtaatcccagcactttgggaggccgaggcggatcacgaggtcaggagttcgagaccatcctggctaacacagtgaaaccccgtctctactaaatatscaaaaaaaaaaaaaagaaaaaaaattagctgagtgtggtggcgggtggcgggtgcctgtggtcctagctacttgggaggctgaggcaggagaatggccagaacctgggaggcagagcttgcagtgagcc

SEQ ID NO: 587252 - DNA, 607 bp, Homo sapiens
tcagctgccctacatggtaataagtgctatggaggaaacaaaacagggtgaagagatagggagggcagaggtttggggtgactattgctcttgatacagatggtcacagaggacttcactcaggcacaaaacagaggcctgaagaaagtgagggagtagcttcaaggctttccttttaaaggattccacctaggggttagcttttgtgggaaatcatccctcagctccactaagaacccatcactcatcagcctcactaagaacccctactatgctctcccagagcatctacacttactctctgaaagctgtcatcacactgccacatcttctttcttccttygacgttagagggtgagttcttcagtgtcatggaaaatgtttgattcatctttgtatcctcagtaaaaggtcagtaattttagatgagtgaatgaaataattaacttaccttctctgcagtcttttttaggaacttagaacaaattactgtttaacaatttgttaaattaagtattagttttgtctaaagcaaaaactgtagatatagatttatatggccactttaaacacataaatctactcttgtgccctgtcagtggcattg

SEQ ID NO: 587253 - DNA, 607 bp, Homo sapiens
tcagctgccctacatggtaataagtgctatggaggaaacaaaacagggtgaagagatagggagggcagaggtttggggtgactattgctcttgatacagatggtcacagaggacttcactcaggcacaaaacagaggcctgaagaaagtgagggagtagcttcaaggctttccttttaaaggattccacctaggggttagcttttgtgggaaatcatccctcagctccactaagaacccatcactcatcagcctcactaagaacccctactatgctctcccagagcatctacacttactctctgaaagctgtcatcacactgccacatcttctttcttccttcgacgttagagggtgagttcttcagtgtcatggaaaatgtttgattcayctttgtatcctcagtaaaaggtcagtaattttagatgagtgaatgaaataattaacttaccttctctgcagtcttttttaggaacttagaacaaattactgtttaacaatttgttaaattaagtattagttttgtctaaagcaaaaactgtagatatagatttatatggccactttaaacacataaatctactcttgtgccctgtcagtggcattg

SEQ ID NO: 587254 - DNA, 594 bp, Homo sapiens
tccaaaccctcctgtgggcaggcacagggcctgccacatttctccaaggcctttgctcgatatcggctggttcctttggcttaaatcatgggagcatttcacggtaaaaggctatgcaatgtccaaaagaatgagaagagcgaagggcctaccagttaaaagcacaggattcaaagacacctatgtctgagtttgctgttgactgtgaatgaccctgggcattttgtataagctctccataccccagtctcttcttttccaagagagggataagcagtctrtctcatatttcttaatgcttatcaagtgacaatttatttattattattctctcccctgtaaatataagttccagaaagatggggacctgggggtattttatgcactgcttcattgtcagggcccaggacaactgaatgctgaatatagttattttgaatgaataactgaatgtatcaatagatttgctctatgaattcaatgagcccacttttgatacagtgtctagtaaattgtctggcacatcctaatttgataagtgatggcctaaccttttccctctacttatctctctccatttctagaaaggggcac

SEQ ID NO: 587255 - DNA, 560 bp, Homo sapiens
acagtgtctagtaaattgtctggcacatcctaatttgataagtgatggcctaaccttttccctctacttatctctctccatttctagaaaggggcacagatccctggttaaatactagaggagaagatctctgtttgcactgtttaatgatgactgtgatttctctgatgcaaagtaagggcagggacccagcattttctggcaccatccaggaagatgtattatcccatttctcttgaatctcattcactcccagcctggaaatctttttcttagccacacaccctgctcaatcctgyctctcacttttcttactctgggctctgccaacagtggcttgtcttctctctccccttctgagtcctaacctttggcagggtccatctcaagcacctgctcctctgtgggttcctcccttccccctcctccctcagtcagcttctcctgagtattagttcttttggacacaagttcacatagaatatgcactgtatgggcctttcagagcagaatgacacaggccatgagtacagaggcttgatctacttcaaatagagact

SEQ ID NO: 587256 - DNA, 588 bp, Homo sapiens
acagtgtctagtaaattgtctggcacatcctaatttgataagtgatggcctaaccttttccctctacttatctctctccatttctagaaaggggcacagatccctggttaaatactagaggagaagatctctgtttgcactgtttaatgatgactgtgatttctctgatgcaaagtaagggcagggacccagcattttctggcaccatccaggaagatgtattatcccatttctcttgaatctcattcactcccagcctggaaatctttttcttagccacacaccctgctcaatcctgcctctcacttttcttactctgggctctgccaacagtggcttgtcttctctctccccytctgagtcctaacctttggcagggtccatctcaagcacctgctcctctgtgggttcctcccttccccctcctccctcagtcagcttctcctgagtattagttcttttggacacaagttcacatagaatatgcactgtatgggcctttcagagcagaatgacacaggccatgagtacagaggcttgatctacttcaaatagagactcctccattggccaacacttgttgaattc

SEQ ID NO: 587257 - DNA, 536 bp, Homo sapiens
taatgatgactgtgatttctctgatgcaaagtaagggcagggacccagcattttctggcaccatccaggaagatgtattatcccatttctcttgaatctcattcactcccagcctggaaatctttttcttagccacacaccctgctcaatcctgcctctcacttttcttactctgggctctgccaacagtggcttgtcttctctctccccttctgagtcctaacctttggcagggtccatctcaagcacctgctcctctgtgggttcctcccttccccctcctccctcagtcagcttctcctgagtattagttcttttggacacaagttcacatagaatatgcactstatgggcctttcagagcagaatgacacaggccatgagtacagaggcttgatctacttcaaatagagactcctccattggccaacacttgttgaattcctatctaacactcagctcagtgtgagatgctggaatggagagtaacaaggtgttagggacaactttaagaagaccaagatcaggtggagatc

SEQ ID NO: 587258 - DNA, 626 bp, Homo sapiens
aagcaggggcacaaaggtaaggaggttatagtctctacctcaatttacacagtagaggaaggatgaggccaactctccacctgatctggaagtatggtcctgcaaaaccaagtcacttgtctctttagtcaagtgcaatgtgcaaccagagaaacactaatacgtaggatagtagcatcagtaataatcatcatagctagcatttaatggacaagtattaagtgctaagtatgggctaaatacttcaatggcatttttttttttaaccaccaaaaccaccctatgagttgggtattgctattatctccatttccccacgttgtaggttaacgaaacttatagggttgtcatgttaattaaggaggtgcatactgtagtgggcaccaatggggttggctrccagtgccactctccccaaaccgagagttgccaccctctccattcatgttgcattcagtggtattccctggagttgtgaaagcacagctttcaaaaatttaaaaccatgactcatacaaaatagaatgaatacaaataaaaatattcaactattaattaatgaaggaagcagaagggtggtaaagctgcttccaggaaaaattagaggaagaaaatgtatatagttg

SEQ ID NO: 587259 - DNA, 546 bp, Homo sapiens
caccactcactgtgtctctgcacctctatttcattatctatactgtgaagataataatrtacctacttcatggggctgttacatagtttaaatgtggtactgcactgtgtgtaaagcacctggcttggagcaaagtacgtgcactgtaaatattacttctcttgtctttaggattcctccctggttctcatctccggtgacttcaatgctaagtggctttagcattgacacaggaattatgctgatagcacagctctgccttccctttgcttgggttcaatgccctttctcctccatgctgctgttttatttcattgttgatgtctaacctttgactttcattcacattacctctaataactttgtgctttatgggggagtaaatgtgctatctgctctatttgcttttgtgagcgagaaagagtaggtgagttttaaggacaaacactgattgagcagtcttgtggctgggggctttacacaggccgtctttaatccgaacaaccatccatttttagggacaccattatccctgttttatagatg

SEQ ID NO: 587260 - DNA, 527 bp, Homo sapiens
gaagaccggctgttccccttgcggagcttgatggaagtaacacaatttattctttgtatttctttagctaatgtttatttagcatttactatgcaacatgcactatgcttaaacagcaggaaaaaatcccattcaactttcacaactactccatgaaaatactgttatccccattttccttccaagaagctaaggtacagaaaagttacataatgtatacatatacaatgagctaatgagtccaagtccatctgattccaaaatcaagggcacacttttaagaactttgctataatgtcagtttatagaggcacaaaatcagaacatgaactaggttctatatctggcaaatagtgatagttatatttttagaatgtgaaaaattacaatccttataagatgcgtgtgtgtstgtgtgtgtgtgtgtgtgtgtgtacttcctgaaggattagtgtaaactcttggagagaggattaaggaggaaaaaaatatggatcaagaaatgctttatgaattcttggcagtaa

SEQ ID NO: 587261 - DNA, 647 bp, Homo sapiens
gctacacagaatgtacaagctatgattgcaggcttggtccattccatgactcttattatatcacataaatcaaccaaccagtaatgatttatttggtgtcagtgtcatgcttattcccattttaagtgcactgaagttgatagggaaaaaataactaaaagtaatagttcgttcatggtattcattcactaaatttgctgaatgttatgaatgaataaatgaatgaaagattattttattgcctttctgggaaattgctatgccttttcaaaaatctttgtttagagtttcttctaccactaccatccactacaaaccctggatgttctaaatctgctttcctatgtgactgtactaacacacttactttttaaagaaatctttctacacttcacattttatctcarttaaccatgtacatgtctgtttaccagaaactatgtctcattcatttttatatcagtgcttatacaatagttggaacatattagatatattagatgcttcatacaattattaattcatccataaattcatatgcttatgtattaaatgaaaacctgttataatgagtccctatgctaggtgttggcaaggtacctgtcacagtctccaaaactctgtagctgctttagatttctgttatt

SEQ ID NO: 587262 - DNA, 603 bp, Homo sapiens
cctcaccacaattctgtatgatagctatcatttttgtcatgcaccaataagcaaactgaggcatgaagtcttttaataaatgtcctgaagatagtaaaccagtgtatggtgcatccaggatttaaacccaggtagtgtaactctagaaacacaccatttattcattatctgattaattagctagtaaccatgaatattactcttgatcttgctgagcttttgtttttttcatgggtagttttgttaaaaactttcttacctttaactayatgaaccacatgccagcagtgtgataagcactttcattcattatctcaagcttctgtacctccagagcctacaacaatgtgtggcacattatgtgtgttctataactttaaataaatgaataatgcaaaaagaatatgtgcttaataaggaaggaatggaatttatttccagttctgtggccagaagccatttgtatctcgtttgtgtgtctaggacccattggaatgcaatgcagccaagttaatattcagacaaactgcaaactaataaatattaagtttccctaagtttcctattgcctgatggtacttctttgatgtcagtacggaaatg

SEQ ID NO: 587263 - DNA, 565 bp, Homo sapiens
gggagattttgcttaagttgtgtttttgtaatttgtataaaaattatatgttgtgtcgactaaaataaactagaaataattaaaaatcatacatactatgtgattatacatttagacatttacacttgtgtgtgtatttggggaaaaagactacaggtaaatacatccatattaatagtatttctggattgtggaattatggcatttttttctttgaacacttcagatttacaaagcactggataagcaggaagaattacttttataatmagctatgacggtaagtttgtttgaggtgcagtctcatttttcccatgtaacaaaggagtgggccttgacccaatcagagctaagtgttgtttttgttttaacttacatcaatctgtttatttcactcatatgaaaagcacaggcatgtcccaggttcacaaaaagcaaataaaagcattgccctttactcaccttgctctcaattcaataaactaaaaagaaaggatatttattgtgaaaggcatgattatctcttctacatatgtatattgagaatatagcatgtgcaaggaat

SEQ ID NO: 587264 - DNA, 565 bp, Homo sapiens
gggagattttgcttaagttgtgtttttgtaatttgtataaaaattatatgttgtgtcgactaaaataaactagaaataattaaaaatcatacatactatgtgattatacatttagacatttacacttgtgtgtgtatttggggaaaaagactacaggtaaatacatccatattaatagtatttctggattgtggaattatggcatttttttctttgaacacttcagatttacaaagcactggataagcaggaagaattacttttataataagctatgacggtaagtttgtttgaggtgcagtctcatttttcccatgyaacaaaggagtgggccttgacccaatcagagctaagtgttgtttttgttttaacttacatcaatctgtttatttcactcatatgaaaagcacaggcatgtcccaggttcacaaaaagcaaataaaagcattgccctttactcaccttgctctcaattcaataaactaaaaagaaaggatatttattgtgaaaggcatgattatctcttctacatatgtatattgagaatatagcatgtgcaaggaat

SEQ ID NO: 587265 - DNA, 565 bp, Homo sapiens
gggagattttgcttaagttgtgtttttgtaatttgtataaaaattatatgttgtgtcgactaaaataaactagaaataattaaaaatcatacatactatgtgattatacatttagacatttacacttgtgtgtgtatttggggaaaaagactacaggtaaatacatccatattaatagtatttctggattgtggaattatggcatttttttctttgaacacttcagatttacaaagcactggataagcaggaagaattacttttataataagctatgacggtaagtttgtttgaggtgcagtctcatttttcccatgtaacaaaggagtgggccttgacccaatcagagctaagtgttgtttttgttttaacttacatcaatctgtttatttcactcatatgaaaagcacaggcatgtcccaggttcacaaaaagcaaataaaagcattgccctttactcaccttgctctcaattcaataaactaaaaagaaaggatatttattgtgaaaggcatgattatctcttctacatatgyatattgagaatatagcatgtgcaaggaat

SEQ ID NO: 587266 - DNA, 574 bp, Homo sapiens
ccctcatgattcagttgcctccctctggatccctcccactacacgtgggaattctgggagatacaattcaagttgagatttgggtggagacacagccaaaccatgtgatatcataatgtaaaattgcactcagtatcactcagcctcstctcaaggacaatatatcaaaatatatggcatgtttcagtttatttagcatcgcaaaactctaaaattgcacttacttttagaaacctggaatagtaatataaatgccagctcatagacagatataagactacatatgacaattttctaaattcaatctaaccactttttaattctgtattctcaatgtttttcctcctcttgaaattcactcactcttttttttaatttattttttatttcaataggtttttggggaacatgtggtgtttggttacataaataaattctttagtggtgatttgtgacattttggtgcacctgtcacccaagcagtatacactttacccaatgtgtaatcttttatccctcactctgctcccatgctttccctcaagtccccaaagtccattgtattattcttgtg

SEQ ID NO: 587267 - DNA, 574 bp, Homo sapiens
ccctcatgattcagttgcctccctctggatccctcccactacacgtgggaattctgggagatacaattcaagttgagatttgggtggagacacagccaaaccatgtgatatcataatgtaaaattgcactcagtatcactcagcctcctctcaaggacaatatatcaaaatatatggcatgtttcagtttatttagcatcgcaaaactctaaaattgcacttacttttagaaacctggaatagtaatataaatgccagctcatagacagatataagmctacatatgacaattttctaaattcaatctaaccactttttaattctgtattctcaatgtttttcctcctcttgaaattcactcactcttttttttaatttattttttatttcaataggtttttggggaacatgtggtgtttggttacataaataaattctttagtggtgatttgtgacattttggtgcacctgtcacccaagcagtatacactttacccaatgtgtaatcttttatccctcactctgctcccatgctttccctcaagtccccaaagtccattgtattattcttgtg

SEQ ID NO: 587268 - DNA, 612 bp, Homo sapiens
ccaattccatccagattgctgcaaatggcattattttattcctttttgtggccgagtagtattccatggagtatatgtatatataccagattttctttatcccctcattgacggatgggtatttgggctggttccatacttttgcaattgcaaattgtgctcttgtaaacatgcatgtgcaagtgttttgttcatataatgacttcttttcctctaagtagataactagtagtgggattgctggatcaaatgtagccaactgwtcttcaacaaagcaaacagaaacaaagtggggaaaggacaccctattcaacaaattgtgctgggctaattagcaaaccacatgtagaagaatgaaactggatcctcatctctcagcttacacaaaaatcaactcaagatggatcaaagacttaaagacctgaagccatacaaattctagaaaataacattggaaaaacccttgtagacattggtgtaggcaaagacttcataaccaagaaccaaaaggcaaatgcaacaaaaacaaagataaatagatgggacttaattaaactaaaaagcttctgcacggcaaaataaaccatcagcagagttaacagacaacccaca

SEQ ID NO: 587269 - DNA, 565 bp, Homo sapiens
tctgttgggaataatgagtcagcactggctacacaagtctggatttcagaagaaaaaaggctttttggctagaaatgcaaycttaggaattgttggcctacatagcattctacaattttgtggacagatgtcaggacttaggtgtaaggcatacgagcttttagagctgagttcgatgcagtaaaatcagcaaagggaactgagaaggaggactaaacatagggtaggaggagtaagtaaaactagaaatgaaaatctctgaaggaagagagaatgatgaaatgtaccaaatggggtctgtttgatatagaataagaaggagatgaattagagagagtaaatacagacaactccttcaaagaattataaataggtaagaaatgtgccagtaagtagaacagaaagtgtaagaaaaggaagaaggctcttgtttgttttgagaagaaataataacatttatttactcttgggaatgacagtgaaaacaaatagtaaaagggaaagagaatgtggggcaaagtccttgattgagtgtcctagtgcttaactgaggcgaatccaagta

SEQ ID NO: 587270 - DNA, 565 bp, Homo sapiens
tctgttgggaataatgagtcagcactggctacacaagtctggatttcagaagaaaaaaggctttttggctagaaatgcaatcttaggaattgttggcctacatagcattctacaattttgtggacagatgtcaggacttaggtgtaaggcatrcgagcttttagagctgagttcgatgcagtaaaatcagcaaagggaactgagaaggaggactaaacatagggtaggaggagtaagtaaaactagaaatgaaaatctctgaaggaagagagaatgatgaaatgtaccaaatggggtctgtttgatatagaataagaaggagatgaattagagagagtaaatacagacaactccttcaaagaattataaataggtaagaaatgtgccagtaagtagaacagaaagtgtaagaaaaggaagaaggctcttgtttgttttgagaagaaataataacatttatttactcttgggaatgacagtgaaaacaaatagtaaaagggaaagagaatgtggggcaaagtccttgattgagtgtcctagtgcttaactgaggcgaatccaagta

SEQ ID NO: 587271 - DNA, 592 bp, Homo sapiens
catgtgtgtaatacatttttgtaaagcacaggaaattctggtacatgcagatcgacatgagatttaagtattctgttgggaataatgagtcagcactggctacacaagtctggatttcagaagaaaaaaggctttttggctagaaatgcaatcttaggaattgttggcctacatagcattctacaattttgtggacagatgtcaggacttaggtgtaaggcatacgagcttttagagctgagttcgatgcagtaaaatcagcaaagggaactgagaaggaggactaaacatagggtaggaggagtaagtaaaactagaaatgaaaatctmtgaaggaagagagaatgatgaaatgtaccaaatggggtctgtttgatatagaataagaaggagatgaattagagagagtaaatacagacaactccttcaaagaattataaataggtaagaaatgtgccagtaagtagaacagaaagtgtaagaaaaggaagaaggctcttgtttgttttgagaagaaataataacatttatttactcttgggaatgacagtgaaaacaaatagtaaaagggaaagagaatgtggggcaaagt

SEQ ID NO: 587272 - DNA, 645 bp, Homo sapiens
cgaggctttggggaaaaagtgctgggttaaatttttgacaatgctgtgtgatgcccaagtggagtttttgaaaaagacagaaatgagtctaaaactcaagggaagttgttgtttgattggaattataaatttgggagttatcggcatagctataattcagtttctaaccaactacaaagaaaaaaataaaaacctcaaagaacaaataggccaaaaaattgacattcaggtcactgttaayttttcttatcactaagcctgaaggccattgtccttttattcaggttttcctttgttctttagagggtgaattagcatgttcctttaatgtttccatatggaattctcatgcattttgaagtgaaagggttataaatgtcatataattttccttggcatttttattttctgcaagtaaagaacatttcactataaagcattcataatgatactgattttgttggtcatattctccagctactaattttccataaaagttcgcttgggggaaaaaaaaggaaaaacactttttattaggatttgagctaaactgagttagctcgttcacggcaaagaagtcatttattgctgacatgggccctgttgctgatggtctttctccataaatctagcatgtcctgtgaa

SEQ ID NO: 587273 - DNA, 614 bp, Homo sapiens
tcataatgatactgattttgttggtcatattctccagctactaattttccataaaagttcgcttgggggaaaaaaaaggaaaaacactttttattaggatttgagctaaactgagttagctcgttcacggcaaagaagtcatttattgctgacatgggccctgttgctgatggtctttctccataaatctagcatgtcctgtgaaaggttaatgctgcagtttagcagccaattccatccaaagtgtagtgaaaattagcatacccttttttacttagttrtgtgtatgcatatcaagagtctttttaaaattcagactcgaaataatccaatgttaaataaataaaaataattgattgtgtcatgtattatgctagagttttatattcctaaactcattaaagcttctcaatcatactttccaattggtattgttatctttaataatgtagatgaagaaaatgggtgcctgaaaggtgggtctttctccagaagtgacaagtcataattcccaagtccaaaacgtcaacaaaaatgcaaaacgttatggataaataataccctaggaaggcttgaacattcgtcattgtgcaagcagagggtcattgagaact

SEQ ID NO: 587274 - DNA, 373 bp, Homo sapiens
tgcatagaaggtagaccacaatcagaaccgagcctcgatgtagaattttggcctttttatttcaccactgccaaattctgtgaagtttcccaaacgtgctacatggcttatgccttctgtatctgcccataattttctctttcctaaacttamactttttcatataaactcctgaaaattccaaaattccttcaaaactctcatcgggtaacattgcttaaagcttcagttgcttattctttctattgttttctcttttttattttatataagtttattttacacctattacatttcattagaatattgtggttgttgctgtttttgtttatgtatttttagcacagatactttaaccttttgacttcagcag

SEQ ID NO: 587275 - DNA, 597 bp, Homo sapiens
attccatatggaaacattaaaggaacatgctaattcaccctctaaagaacaaaggaaaacctgaataaaaggacaatggccttcaggcttagtgataagaaaarttaacagtgacctgaatgtcaattttttggcctatttgttctttgaggtttttatttttttctttgtagttggttagaaactgaattatagctatgctgataactcccaaatttataattccaatcaaacaacaacttcccttgagttttagactcatttctgtctttttcaaaaactccacttgggcatcacacagcattgtcaaaaatttaacccagcactttttccccaaagcctcgttatcttacttcatttaaagttatcaccaagccatattctgttagtgacgcttgagtttcttcactcaaccatccacattcaatcactactcacacccacttgatccttcttcctgaatattctcgagtggacccactttcctgcaacaccatgactgctagtcttccaacacaccgcctctcaccttgtctactgaaatagtgtctcacctgctctccttgacttcccctcaattcactccattccatttgt

SEQ ID NO: 587276 - DNA, 597 bp, Homo sapiens
attccatatggaaacattaaaggaacatgctaattcaccctctaaagaacaaaggaaaacctgaataaaaggacaatggccttcaggcttagtgataagaaaagttaacagtgacctgaatgtcaattttttggcctatttgttctttgaggtttttatttttttctttgtagttggttagaaactgaattatagctatgcygataactcccaaatttataattccaatcaaacaacaacttcccttgagttttagactcatttctgtctttttcaaaaactccacttgggcatcacacagcattgtcaaaaatttaacccagcactttttccccaaagcctcgttatcttacttcatttaaagttatcaccaagccatattctgttagtgacgcttgagtttcttcactcaaccatccacattcaatcactactcacacccacttgatccttcttcctgaatattctcgagtggacccactttcctgcaacaccatgactgctagtcttccaacacaccgcctctcaccttgtctactgaaatagtgtctcacctgctctccttgacttcccctcaattcactccattccatttgt

SEQ ID NO: 587277 - DNA, 640 bp, Homo sapiens
catgagaattccatatggaaacattaaaggaacatgctaattcaccctctaaagaacaaaggaaaacctgaataaaaggacaatggccttcaggcttagtgataagaaaagttaacagtgacctgaatgtcaattttttggcctatttgttctttgaggtttttatttttttctttgtagttggttagaaactgaattatagctatgctgataactcccaaatttataattccaatcaaacaacaacttcccttgagttttagactcatttctgtctttttcaaaaactccacttgggcatcacacagcattgtcaaaaatttaacccagcactttttccccaaagcctcgttatcttacttcatttaaagttaycaccaagccatattctgttagtgacgcttgagtttcttcactcaaccatccacattcaatcactactcacacccacttgatccttcttcctgaatattctcgagtggacccactttcctgcaacaccatgactgctagtcttccaacacaccgcctctcaccttgtctactgaaatagtgtctcacctgctctccttgacttcccctcaattcactccattccatttgtcacacttgagccaatgctctttctagagtgtaaatg

SEQ ID NO: 587278 - DNA, 616 bp, Homo sapiens
tccataatttgttcatgaatgctatgtataaaaatgtgataaataaaattaccattttaacactgactttataaaaaacatttaccaaatttattaagttcttagagcatttcagacaatatcagaactaacatcagaacattacttattccatagactttaagtttgtaagctctatgaacttattaagcttctaattaaagaagaaataaagtaagatgaaatactcatgcatttagggcagtataactcagtaaattaactagagttagcttggcttaatggaaaatctccctaactcagaaaaagtcctagcayggttaccaacgggtattttttcttgaacaagttgcttctcttaggctcaatgtcttctaaaaatgaggattttagagccctatttcactagactattataaagatctaacaagataacattttaaaaatgctcaaagaaatagtgaagcaatgaaataatttgttcttgaacctaattgctgaaactgttttaaaattcccaataaaacccaatgtgttggcctggtgcagtgcctgacgcctgtgatgcaagcactttgggatgctgagacaggagaattgcttgagcccagaagtt

SEQ ID NO: 587279 - DNA, 655 bp, Homo sapiens
taccaacgggtattttttcttgaacaagttgcttctcttaggctcaatgtcttctaaaaatgaggattttagagccctatttcactagactattataaagatctaacaagataacattttaaaaatgctcaaagaaatagtgaagcaatgaaataatttgttcttgaacctaattgctgaaactgttttaaaattcccaataaaacccaatgtgttggcctggtgcagtgcctgacgcctgtgatgcaagcactttgggatgctgagacaggagaattgcttgagcccagaagttcatgacaaccctgggcaacatagggagaccctgtctctacaaaaaattaattttttaaaaaaagtgtttcttcataggttataatgttcaaatgttgcagttttctgttattaattcctacttttggttattagatgttctattmtttgtggcatgtaattcaaggcatctaagctattttataatttgtaatgaaatttatttataaatatattaattcatcaaattggataacctgattatcctctattactgagctcatcaatcacaccaagggcagaaaactaatagatgtcagcatctggcttggactattgctactctttatttacctccttaaacctgaactaacaaatcttt

SEQ ID NO: 587280 - DNA, 566 bp, Homo sapiens
agctctcagtaaatgttggttgaatgaaagaatgttagccactgacgttttttccttcatgggtcatggcagctgagaaagaccaaggtcagagataatgagacttcacaacctcatagctacagtgaaagttatggaactgctttagaagtgagttatttgaagctcagtgggaaaagattcttcatcttcccagatctctgctgtcacttacaaagagaaataaagacttatcttgatagcaagggacattcagggataaggatcccgaatagggtctgagtctggagctctgacagggcagttggtgaagcagcttgaataacagaagagtcaatctttagaatcctccacagaggcttagaaagatgtgtaaagcgcttgggatttgattttacttttcagggttttctattctgttcttatacttactgtcactgaatggaacagaaagcagacctgttacaatgttcaagttgtatagtttgtgtgtgttttaaasaagaagaagaaagttgtggaaggcttgtgagaaggatgcctttttctgataaaaatgccttaca

SEQ ID NO: 587281 - DNA, 595 bp, Homo sapiens
aaatcaactttgccagattagatgttcaaaaataatgttggactgaaccatagtcatgctctttcatttttagtaaatatgtacttggatctgcttgcacagaacggtcttcatttcttgtttttacccctagagtctaatagagaccctgttcattgtgtaagtgctcaaaacatgcttgtcattattcttacctstgcaaccaccagcaaatccactcttactagacaatgtagtaaattgaaaggaacattagaattggagcccaaaatctttggttgtagcctgaacacatcaggtgctaggaatgtgaccaggcccaagtaacacaaatttcttcatcttcgctttttctgtttgtaaaatgtaggtaacaatgatgtctatcgaaccaaggtaatattctagggcctagaatctcactcttagaaatccttacaactgtaaagaaagttcagttgagttttaaacattatcccttaactccaaatattgctagcaattgcaagtatccaatattacctttttgaagacttaaaagtgtttcatcatcctttgttagtttcagttaagctattttttgtttgttccttta

SEQ ID NO: 587282 - DNA, 595 bp, Homo sapiens
aaatcaactttgccagattagatgttcaaaaataatgttggactgaaccatagtcatgctctttcatttttagtaaatatgtacttggatctgcttgcacagaacggtcttcatttcttgtttttacccctagagtctaatagagaccctgttcattgtgtaagtgctcaaaacatgcttgtcattattcttacctctgcaaccaccagcaaatccactcttactagacaatgtagtaaattgaaaggaacattagaattggagcccaaaatctttggttgtagcctgaacacatcaggtgctaggaatgtgaccaggcccaagtaacamaaatttcttcatcttcgctttttctgtttgtaaaatgtaggtaacaatgatgtctatcgaaccaaggtaatattctagggcctagaatctcactcttagaaatccttacaactgtaaagaaagttcagttgagttttaaacattatcccttaactccaaatattgctagcaattgcaagtatccaatattacctttttgaagacttaaaagtgtttcatcatcctttgttagtttcagttaagctattttttgtttgttccttta

SEQ ID NO: 587283 - DNA, 595 bp, Homo sapiens
aaatcaactttgccagattagatgttcaaaaataatgttggactgaaccatagtcatgctctttcatttttagtaaatatgtacttggatctgcttgcacagaacggtcttcatttcttgtttttacccctagagtctaatagagaccctgttcattgtgtaagtgctcaaaacatgcttgtcattattcttacctctgcaaccaccagcaaatccactcttactagacaatgtagtaaattgaaaggaacattagaattggagcccaaaatctttggttgtagcctgaacacatcaggtgctaggaatgtgaccaggcccaagtaacacaaatttcttcatcttcgctttttctgtttgtaaaatgtaggtaacaatgatgtctrtcgaaccaaggtaatattctagggcctagaatctcactcttagaaatccttacaactgtaaagaaagttcagttgagttttaaacattatcccttaactccaaatattgctagcaattgcaagtatccaatattacctttttgaagacttaaaagtgtttcatcatcctttgttagtttcagttaagctattttttgtttgttccttta

SEQ ID NO: 587284 - DNA, 560 bp, Homo sapiens
tcttcatcttcgctttttctgtttgtaaaatgtaggtaacaatgatgtctatcgaaccaaggtaatattctagggcctagaatctcactcttagaaatccttacaactgtaaagaaagttcagttgagttttaaacattatcccttaactccaaatattgctagcaattgcaagtatccaatattacctttttgaagacttaaaagtgtttcatcatcctttgttagtttcagttaagctattttttgtttgttcctttagaagcttaaagggaatagaacaaacatggggaaaaaataactgtacccatctttccaaaataaatactaggttttgatctacaaaataaaaacacaaaaaactttttccttcaccatcttttttttttagtggaagttaaacataatgtattttacaattaaaagtgttttccactgtttttgctgagrggaaccagagctactggcgaatgacaacaccactaaagctttgagcctcaacaagataaatcctggttcaccacttgctgtcaagcccaagtaaggagataaaggtgacaa

SEQ ID NO: 587285 - DNA, 599 bp, Homo sapiens
aagcacaccacagacaatatgaagacaaatgattatggccatgttctaataaaactttatttacaaaaataggtggcaatcaaaatttggctcatgaatcgtagtttactgatctctgccataatggtatgaaaaatcttgacactcttttgattacataatagtagatgtagtcatgaactatagtaatgtatttaaggatgtttaagccagctgaatatcatttgccatcactctgtaagttaaatttgttctttatccccagctctctaaggaggatgtatgtgataatgcacatgccaagaaaacttctctttaaaagagccctgacgtrcatacttgtgttctctccaattattttaacaggaaaaatatagatatagcctacatattttatgcccaaagcattaataagatactttctttaactttttggggttccagttgcctcttgtgtgttgtatcatatgtaacacataggagatgatacattctcgttttcagtactgtcacagaaatagcaacgttgaaaactctagaaacttagtgtggctcaaagacaagagaagaatatatgcagggccctaaatagcaggagt

SEQ ID NO: 587286 - DNA, 599 bp, Homo sapiens
aagcacaccacagacaatatgaagacaaatgattatggccatgttctaataaaactttatttacaaaaataggtggcaatcaaaatttggctcatgaatcgtagtttactgatctctgccataatggtatgaaaaatcttgacactcttttgattacataatagtagatgtagtcatgaactatagtaatgtatttaaggatgtttaagccagctgaatatcatttgccatcactctgtaagttaaatttgttctttatccccagctctctaaggaggatgtatgtgataatgcacatgccaagaaaacttctctttaaaagagccctgacgtgcatacttgtgttctctccaattattttaacaggaaaaatatagatatagcctacatattttatgcccaaagcattaataagatactttctttaactttttggggttccagttgcctcttgtgtgttgtatcatatgtaacacataggagatgatacattctcgttttcagtactgtcacagaaatagcaackttgaaaactctagaaacttagtgtggctcaaagacaagagaagaatatatgcagggccctaaatagcaggagt

SEQ ID NO: 587287 - DNA, 637 bp, Homo sapiens
gtttatgcaatgcaggtggccaaagttatacctgtcctagcaggtcccacctgaagggctgcagagctactgcctaagaaggcatggtggcaggtgattttctgaggctaaaagtgggagcttgggagccagcctgtgctgtgtggccataaaagagatgggttttgtgtgtgacctaaaaagtgacttctgaagctaatgttctgtgaagtctgcagctgtgatggctatcttgggccatcatctcaggakgaagcctggttcctcacagccagccacactctgaacagacatggtcacctccctgcttctgtgagctgccttttggtccatgaactccatctgtggctattgtcaatgtgctccaagaagaaaagaaatcaaccctagggcctgactctgaattgccagcctgaaggacttgccttcttttatgggccatggaaaattgccctgttgtctgagcttttaccctcttatttatcttagagttaaagacatagccatatttcttctctcaggtcacttgggacttcgagtctgttcagaaaaaggctgaaattgaatacaccacagaataatctacttggaaagtgccaagtaattttcataacactgtgaagcatatggcagatcc

SEQ ID NO: 587288 - DNA, 637 bp, Homo sapiens
gtttatgcaatgcaggtggccaaagttatacctgtcctagcaggtcccacctgaagggctgcagagctactgcctaagaaggcatggtggcaggtgattttctgaggctaaaagtgggagcttgggagccagcctgtgctgtgtggccataaaagagatgggttttgtgtgtgacctaaaaagtgacttctgaagctaatgttctgtgaagtctgcagctgtgatggctatcttgggccatcatctcaggatgaagcctggttcctcacagccagccacactctgaacagacatggtcacctccctgcttctgtgagctgccttttggtccatgaactccatctgtggctattgtcaatgtgctccaagaagaaaagaaatcaaccctagggcctgactctgaattgccagcctgaaggacttgccttcttttatgggccatggaaaattgccctgttgtctgagcttttaccctcttatttatcttasagttaaagacatagccatatttcttctctcaggtcacttgggacttcgagtctgttcagaaaaaggctgaaattgaatacaccacagaataatctacttggaaagtgccaagtaattttcataacactgtgaagcatatggcagatcc

SEQ ID NO: 587289 - DNA, 610 bp, Homo sapiens
actctaagactcaagcatgcttagatttgaccctaagtccagctatttacttcttccatgactgtgggaaaattattctttctttgtaacttttaagaaattttgttaaatggaagcaatattttcaaccctaaaagatttctgtaaggcctcactaagcaaatgaatgtaaagtaccagctagtatagtaccaagagcacaaatgtgttccagtaaatgtgagacatcattatacccaataacaaatggcctttcttgtatgaggccaatgggaaggcaagcattatggtaacgcttttggaaaatggtttcccaacatatttcaggaaactaaaaggcatcttctatatcccagtaattcagtttctaggaatcttactttacagaaatctcaccgtactactttcccacataaaataccttaatagttctatactacccttggggttaaagtcagtatctcaaataaagtcttaaacttgtyctttataatctttgtgcttgttaatcttcaacctcaacattctcattgctcattttgagtatctcaagataataaatatatttgagatccccaaaggaatcatgcacaccattctaactatatta

SEQ ID NO: 587290 - DNA, 488 bp, Homo sapiens
atggcctttcttgtatgaggccaatgggaaggcaagcattatggtaacgcttttggaaaatggtttcccaacatatttcaggaaactaaaaggcatcttctatatcccagtaattcagtttctaggaatcttactttacagaaatctcaccgtactactttcccacataaaataccttaatagttctatactacccttggggttaaagtcagtatctcaaataaagtcttaaacttgtcctttataatctttgtgcttgktaatcttcaacctcaacattctcattgctcattttgagtatctcaagataataaatatatttgagatccccaaaggaatcatgcacaccattctaactatattaactagtttttccttttcttttttactcccattttttatttttatcctttaaaatcacttactccaggaagccttatcataaactttacatctgggttatctgccctcctttgtactcctaaaga

SEQ ID NO: 587291 - DNA, 588 bp, Homo sapiens
aagtagattctgccctcacagcctatagaccatcaaatcaattgatattgaacaaatgtatacaaatgcgatatgggttacatgaagacttgcatgggcatttaccttagatttgattgcaggcagccaggcaatggtttcctatgcagacggttttgaaatgtaatctttaatgatgaaaaggagttaaagcagaggagcttacattcgaataggttattaggtgtggaaatagcttttggggcaatggtacatttgaaagccctgttatgaagttccatcactagcattttagaagtagtcaactagactgtgagcttctcaacaacagagaccatattctttttgtctttgtgtttctaatatgttggacagtgacagcacactatagtagaactttyataactgcttattgaatgtgttagcagtttcatctggacactcaaataccctttctgtcttaaaaggaaatcatagtatctggatctgggtatcttaccacattcaaccttgaacgttctttttgctaaaaatctgactgaaacaactaacattaggttaaagtagcccaggggcatgcaattcacc

SEQ ID NO: 587292 - DNA, 588 bp, Homo sapiens
aagtagattctgccctcacagcctatagaccatcaaatcaattgatattgaacaaatgtatacaaatgcgatatgggttacatgaagacttgcatgggcatttaccttagatttgattgcaggcagccaggcaatggtttcctatgcagacggttttgaaatgtaatctttaatgatgaaaaggagttaaagcagaggagcttacattcgaataggttattaggtgtggaaatagcttttggggcaatggtacatttgaaagccctgttatgaagttccatcactagcattttagaagtagtcaactagactgtgagcttctcaacaacagagaccatattctttttgtctttgtgtttctaatatgttggacagtgacagcacactatagtagaactttcataactgcttattgaatgtgttagcagtttcatctggacactcaaataccctttctgtcttaaaaggaaatcatagtatctggatctgggtatcttaccacattcaaccttgaaygttctttttgctaaaaatctgactgaaacaactaacattaggttaaagtagcccaggggcatgcaattcacc

SEQ ID NO: 587293 - DNA, 588 bp, Homo sapiens
aagtagattctgccctcacagcctatagaccatcaaatcaattgatattgaacaaatgtatacaaatgcgatatgggttacatgaagacttgcatgggcatttaccttagatttgattgcaggcagccaggcaatggtttcctatgcagacggttttgaaatgtaatctttaatgatgaaaaggagttaaagcagaggagcttacattcgaataggttattaggtgtggaaatagcttttggggcaatggtacatttgaaagccctgttatgaagttccatcactagcattttagaagtagtcaactagactgtgagcttctcaacaacagagaccatattctttttgtctttgtgtttctaatatgttggacagtgacagcacactatagtagaactttcataactgcttattgaatgtgttagcagtttcatctggacactcaaataccctttctgtcttaaaaggaaatcatagtatctggatctgggtatcttaccacattcaaccttgaacgttctttttgctaaaartctgactgaaacaactaacattaggttaaagtagcccaggggcatgcaattcacc

SEQ ID NO: 587294 - DNA, 523 bp, Homo sapiens
ttctcaacaacagagaccatattctttttgtctttgtgtttctaatatgttggacagtgacagcacactatagtagaactttcataactgcttattgaatgtgttagcagtttcatctggacactcaaataccctttctgtcttaaaaggaaatcatagtatctggatctgggtatcttaccacattcaaccttgaacgttctttttgctaaaaatctgactgaaacaactaacattaggttaaagtagcccaggggcatgcaattcaccccttcttctatatatttttctgggcagaaattaagatatataatctacctggagcatatttccatagtcaaccaacaaaatcttctgtctggagatttgagtgcaaggtccttggccttttwtaaatgatcacttttcttccagtagttgttttaggcattgttgttcctattcacctctccactcctgccatgacattttcatactacagatatcttgtatattcgtttatgtatttggggcctattggaag

SEQ ID NO: 587295 - DNA, 524 bp, Homo sapiens
acaatgagataatctatataaaatgcctagcaaaatgacatgaaaaattgtctctaaatttcattcyctcccattcattgataaatgcaagtttaatataatatttcaaaatacaaggtcatatgagagagagagaaagagagagagagagccaacataaagaatgctctgtgctgaaaagcaaaaacagattgttggtgtgcattgcagccaggaagaaactgtaaataataatgcaggagataggagactagtgacttgtgctacataaggagaggtctggatggagaggtaacccctgtatgaggagaatttaggtggaagtaaaatcagagttttcagcaccatctgaccttgataggcctggagttgagttggattttgaacccagatggtatctggctccaaaacatctactaagcaaccacacaggttcccccatgttctataaaaaccagaaagaaattccttgtaagtttatatcttaacacaattcttccaagaaagcctcactaacaacattg

SEQ ID NO: 587296 - DNA, 530 bp, Homo sapiens
aagcctcactaacaacattgtaagtggtgtttgttctgttaatctttgttgaatgaatgattggataagggaattaattgggkcatggataaatggaagaatggatgagtagctgggtggctggctggctagctggacgaatacatgccagtaagtggctaaactacttcatgcagaaggtgcagctatgccaaaaatagattacaaaggaagtaaaatgcataatctctgttattgagcaagatcaataaaattggtcacctgaaacaactctagaaagaccaagtcattgtgagaatctggtgtagatggtagaaacactgattcacacacgattcatcctggaagtgtcctcaagagtctagccttcttaatttatagaagaagatacccaggaggcagtgacatgcagagagctgcacagttaatatgtgacagaactaatgaaacctagttctcaagacaattacctgtgcagtgcacttttggttataccttttctataaaatagttccaaacatcaaggcaac

SEQ ID NO: 587297 - DNA, 621 bp, Homo sapiens
tattatgttatcattattagggaattactgataaccaaactttttagtaggttaaattctcgcatactatatgtgagtgagaaaatatataccttaccgactaaaaaggggatatgaaatgtgatatggtatttaataaccrctgagctacctcagctttcataatgagaaatctctctggagacattgatagtttaaacgggcacaggaagagacaagtgaagtttacttctgctacctcccccatgggagggagtacccctagacagtgatactttccaccccccatgcctgagaacagagccttgactgaccagatggtaatatttcatagcaatctctaacattagccttacagatgtgtaacagcacagcaatatcgttccactatccacaagtaaggtgtattttgtttatctttctttttccttttaaacatcagagaactatgactaaatagagttcttcagtgaatggtcattatcatggctatcttttcccaagcatctattatgagacaaacactgtgcttgatattttcatgcattatattttttaatcctcttcacaataccatgaattaagttgctgcagcccaggaagctggagatctgaaaatgt

SEQ ID NO: 587298 - DNA, 502 bp, Homo sapiens
taaaagctaactttcatttgagaagtatctgtatgggtcctttgcccatattttaattaggttatatgctttcttgctattgagttgtttgagttctttatatgctttggctattaaccccttatcagatgtatgatctacaaatattttctcccattctctgagttgtctcttcactttatttttttctgtgcaaaagccttttaatttgatgctatttcatttgtctatttatrcttttgttgcctatacttttggggttctaatgctgactatatatccaaagatacttaaatcaacatgtcaaagggatatctgcaagcctttgttcattgcagtattactcacaatagccaagatataacatataaaatttgcctgtctatcaacagatgaattgacaaagaaaatgtggcctataggccaggcgcagtggctcacgcctgtaatcccagcaatttgagaggctgaggcaggcggatcatgaggtcaggagttcgag

SEQ ID NO: 587299 - DNA, 603 bp, Homo sapiens
aagcctttgttcattgcagtattactcacaatagccaagatataacatataaaatttgcctgtctatcaacagatgaattgacaaagaaaatgtggcctataggccaggcgcagtggctcacgcctgtaatcccagcaatttgagaggctgaggcaggcggatcatgaggtcaggagttcgagacctgcctgaccaacatagtgaaacactgtctccactaaaaaaataaaaatattaggtgggtgtggtggcgyacacctgtagtcccagctacttgggaggctgaggcaggagaatcacctgaacctgggaggtggaggttgcagtgagccaagatcgcaccactgctctccagcctggatgacagagtgagacctcatctcaaaaaaaaaaaaaagaaaagaaaagaaaagaaaagaatatgtggcaaacatagacaacataatactgtttagtcttggaaaaagatgacaatactgcaatttctgacaacacagatgaatctagaggacattatgctaactgaaataagccaggtacagaaaaacaaatactgtataatctcaattatatgggaaatctagtaaagttaaatcatagaa

SEQ ID NO: 587300 - DNA, 603 bp, Homo sapiens
aagcctttgttcattgcagtattactcacaatagccaagatataacatataaaatttgcctgtctatcaacagatgaattgacaaagaaaatgtggcctataggccaggcgcagtggctcacgcctgtaatcccagcaatttgagaggctgaggcaggcggatcatgaggtcaggagttcgagacctgcctgaccaacatagtgaaacactgtctccactaaaaaaataaaaatattaggtgggtgtggtggcgtacacctgtagtcccagctacttgggaggctgaggcaggagaatcacctgaacctgggaggtggaggttgcagtgagccaagatcgcaccactgctctccagcctggatgacagagtgagacytcatctcaaaaaaaaaaaaaagaaaagaaaagaaaagaaaagaatatgtggcaaacatagacaacataatactgtttagtcttggaaaaagatgacaatactgcaatttctgacaacacagatgaatctagaggacattatgctaactgaaataagccaggtacagaaaaacaaatactgtataatctcaattatatgggaaatctagtaaagttaaatcatagaa

SEQ ID NO: 587301 - DNA, 358 bp, Homo sapiens
acaagtacaatacacttgctacctgccataacacatgttggggttcaatcagactggtggaaaaaatattagagatagttatataaatagacacaaatcttcttggaaggccgagaagtttgcataactttggtaatagatatggttgaaggcaacctgatctttacctttagttaaacaaattaaagtagtcataaaggaaggcagagtagcttacctagctagcttgtttactcatataatcttaagactcacctttgatgtaccacargtgcttaagtgctttttactcaggactaccccaggaagtccacaatgtcaattaccctctaagggtattgactcaagcttttgttaa

SEQ ID NO: 587302 - DNA, 628 bp, Homo sapiens
atgtagactgtgggctctggggtgaattataaggggttcttatcctgactgtgaggttaacttcatgcccttgaggagctctctgtgcttcagcttcttcatcttttaaatgtgggtgagagcagcgccaaatatgtagtattgtcaggaggattagacraaatgtgtacaaaggatttcacatagttggccacatagtaaacactgcaaaatgttttattataacattttatagaagtttttaattatcttattattcagtggaaggagcatttgcctaatttgccatgtcactaacatcatctaactctttagtcattgtgtcgcttggactctatttgtttcaactttttgaaaacatatttttggatttgtaattctaatttaaactactgctgttttacatgctttacgactgcctttttaagctcttccaagcaatccactctttcgtagtggtccacttcccagtactttgttctcccccatagtttgttatgtacatgagcagatgttcacccatgctccccgatcctacactttgtggaatctatctactgacagtctttttagcctcttcactgttgctgctttaatttattcctttcactttactgagttaactaga

SEQ ID NO: 587303 - DNA, 552 bp, Homo sapiens
gtacatctaaattaagcacaaggctgaaaatgtcatcactctgttaaaggacttgagaatggtgagggtagaggagaggaaagttaatttcagctgcagaagacaggacagattttctgggaaggtgttatcagatcttacttttgaggtatgggtacaatttagaccaatggaggtcatgggtagcaataatacaggcccttggtgtgtaattacaaagtccaaaaatctcttaaaactaaaagcattttcatagctcaaatggtagcaaaacctaaaatacatgctagagccttcattaattttacttagcgtgaatatttatatgttgtgctccagaaatatgaatttattttggtaaaagaatgttgtcttaggccctgctgaagacactatataacatgcaattacattgstttatctctataaaatacttctcttgtgcccccatgaattcctccgtagatctggccatatatgtttgaaataagggatttattgtggttctttactataagtagaaataataatacaagcaataatgtagatata

SEQ ID NO: 587304 - DNA, 540 bp, Homo sapiens
tacatctaaattaagcacaaggctgaaaatgtcatcactctgttaaaggacttgagaatggtgagggtagaggagaggaaagttaatttcagctgcagaagacaggacagattttctgggaaggtgttatcagatcttacttttgaggtatgggtacaatttagaccaatggaggtcatgggtagcaataatacaggcccttggtgtgtaattacaaagtccaaaaatctcttaaaactaaaagcattttcatagctcaaatggtagcaaaacctaaaatacatgctagagccttcattaattttacttagcgtgaatatttatatgttgtgctccagaaatatgaatttattttggtaaaagaatgttgtcttaggccctgctgaagacactatataacatgcaattacattgctttatctctataaaatacttctcttgtgcccccatgaattcctccgtagatctggccatatatgtttgaaataagggatttattgyggttctttactataagtagaaataataatacaagcaata

SEQ ID NO: 587305 - DNA, 580 bp, Homo sapiens
agctttctccccgcctccccaccccgccacccggcgtttttttgttttgttttgttttttgtttttttgagacagggtcttgctctggggtacagtggtgcaatctcagctcactgcaacctccacctcctgggttcaagcgattctcatgccccagcctccccagtagctgggactacaggtgtgcaccaccatgcctggctaatttttgtatttttagtggagacagggtttcaccatgttggccaggctggtcttcaactcctggcctcaagtgatcggcctgcctcagcctcccaaagtgctgagattacaggcgtgagccactgcgcctggctaacctttttggattcttaaatgtgttcatgggctgcatcaggaagccaggccaccgctggtccctaggtctggggtgttcacaagaaragaagatcataaacatcatgtcaaaggcaggaaaaacaaaactctgccctctgtggtattaagtcccagtacttgaaattccaaatgtccaaaggggagcagagagcagcacacacatgtatcagttgcttgtccacctggtagttgagtgcct

SEQ ID NO: 587306 - DNA, 634 bp, Homo sapiens
tgcttaacgtctacatagctatttttacttaactgaagaaaagctcatgagtcctttactctcaccccgtgaagaaatccttgctctaacatccccaaggaaccggaagaaggctcccgtgattggcacagagagtaagcatggcctggtgcaaaaggagctgaagacttaggaagagccggagcattgaaggggagccactgaatggccttaagtagaaaaggggacaccccaccacaccagtgtccccagctgtactctttccatgtattagcaagctcatagttttgggtaaagagagctttattcaatgctatgtcaaaatgtgaccataacgaggtcaaagattaaactgaggttcaatgaatgaagtaactctctctgaccacagtcatcattatcagtacagctctatcttctcttctgacttattctgtmaagtgacttgtccacagaattctcctgctcagctcaggcatcactttctgcaggaaactttcccttccctttttaagcagagtgaggcatctcagggcctctatgttcccatcatgctctagggatatccatcgtcaaagctttgctgatgccacacacattgtctttctaaaaacgaagtccaaaaaattaaggc

SEQ ID NO: 587307 - DNA, 458 bp, Homo sapiens
actaacacaattacatttcgccacttctccatgctgttactccctctttgttctgaagacgtgattcttgttgtttccctgctcactttgttttgttttgtttgtttttgtttgtttgtttttgagacagagtcttgctcttgwcacccaggctggagtgcaattgctgcaacctctgcatcctgggtacaagcaattctcctacctcagcctcccgagtagctgggattacaggcacctgacaccatacccggctaatttttgtatttttagtagagatggggtttcaccatgttggccaggctggtctcaaactcctgacctcaggtgatctgcccgcttcagccacccaaagtgctgggattacaggcgtgagccaccgtgcccagcctcccctgcttactttggatttaagacagcccttgggatctgagcttgccatgcatggatggtgtgtg

SEQ ID NO: 587308 - DNA, 544 bp, Homo sapiens
ctaattctggctagcaaagaagtggttgttaatatggaagtcaccaagacaataggagacagtgatcaccttgccttaacttagagcctgtgatggctgaccacttaaccggactaaggttttggggattcaaacttcaaaacaagatataaacctatggataaaaaaaaaaaataaacaaatgaaaacgcaattgaaaaaggaaagaacattctagaaaattggcaaattctgaaaaactaaattctcactacaaaatcaggaataattttggggggkgcaaaaaaggagaaccctctaaagaaatcaatctaagcagaaatccaagaggctccatggaactttctgaccattttatgggtacacatacgaactagctaaactttgggaaatggcacagaaaaatattgttgaacattagaaaaaatgtctaattttaaggctgtgactagggcaaatgaaagagggaaacacggatggcatggatgctttcagaagagagtgtgatgtcaatgaagaggaggtagaaacatgcctagtttga

SEQ ID NO: 587309 - DNA, 504 bp, Homo sapiens
atactagacacaacacagaatataatacatgtgtatacacataaacacattaaaacatacacrtccacacacaaagatccaatagcttttatctcaaaattttagccatgagaaagtatcacaaactcattattttacaaaagacagcaggattcaaattatttttgacaaaattgggacctgttcatacagctaaactttatttgccctgatagatagtctaaggaaaactggattaaaattttgggtaaagccatttccatgacaatttgataaaaaaaataaacaaacaaacaaacaaaaaaacttctttgtgtctttacggtttctttagttccagatgagtttcattgtttatatcttagttacaacttgctgacctgtataagaaaaacaaaatctccaaataacctttaattagttttactataaacagttttctctcaactccagtagcttgtatgactgcagattaaaaggagatagaaaaggaaatagctttag

SEQ ID NO: 587310 - DNA, 504 bp, Homo sapiens
atactagacacaacacagaatataatacatgtgtatacacataaacacattaaaacatacacatccacacacaaagatccaatagcttttatctcaaaattttagccatgagaaagtatcacaaactcattattttacaaaagacagcaggattcaaattatttttgacraaattgggacctgttcatacagctaaactttatttgccctgatagatagtctaaggaaaactggattaaaattttgggtaaagccatttccatgacaatttgataaaaaaaataaacaaacaaacaaacaaaaaaacttctttgtgtctttacggtttctttagttccagatgagtttcattgtttatatcttagttacaacttgctgacctgtataagaaaaacaaaatctccaaataacctttaattagttttactataaacagttttctctcaactccagtagcttgtatgactgcagattaaaaggagatagaaaaggaaatagctttag

SEQ ID NO: 587311 - DNA, 504 bp, Homo sapiens
atactagacacaacacagaatataatacatgtgtatacacataaacacattaaaacatacacatccacacacaaagatccaatagcttttatctcaaaattttagccatgagaaagtatcacaaactcattattttacaaaagacagcaggattcaaattatttttgacaaaattgggacctgttcatacagctaaactttatttgccctgatagatagtctaaggaaaactggattaaaattttgggtaaagccatttccatgacaatttgataaaaaaaataaacaaacaaacaaacaaaaaaacttctttgtgtctttacggtttctttagttccagatgagtttcattgtttatatcttagytacaacttgctgacctgtataagaaaaacaaaatctccaaataacctttaattagttttactataaacagttttctctcaactccagtagcttgtatgactgcagattaaaaggagatagaaaaggaaatagctttag

SEQ ID NO: 587312 - DNA, 507 bp, Homo sapiens
agatctcttgaaggtgactgattcccaagtctgtgtgtgggtatggctgaaaaggggaaggcctctcagtttcgctacaagaaaagtctctcttggctttacattcgtaaaacaatatggcagctctagttttatccaagcagggcccacctataatgagtacctattaagcatttcttgaatgcaattgggagcccaaatgagcaaacctaagggaggttgtcacaattctagagatggtaatatttctagagccacacaagaactgttaaacagtaacaagcaagaatgtgccagtmaaaatcagtaaaacaatgaacctcacccaaaccagtcaaatctgcttattgacttgacttgcttttcttaaccaatttgtcttgggaagtaactttttctttttcctccgatcaacctaatcagcaggtatccattcacattctaatacattgtatatttaaaagaaagctaaatctgaattgaatcaataacacattaactactgaa

SEQ ID NO: 587313 - DNA, 302 bp, Homo sapiens
taaatctgaattgaatcaataacacattaaytactgaagaagtctgattcttttctcaagatctctaggaataattttcaaataaaccaaccacaaaaaccaccactgctttggtagtaattggcttctaaggatgatatttttacttgactagataccactaatgaacaattacagtaggctggtcttaatgacagccttgacttgcggttgcattattgaatggtcccaatggctgatgactttcttttgtaaccagaagtacccaatttcgcagtcctgtgactttttaaccgataatc

SEQ ID NO: 587314 - DNA, 227 bp, Homo sapiens
aaaccatcccacaaggacttagcaagcaatgtagattttattttaaaatttgtgagcagatgacacaaaattttgtggagagggaagagggttttaactgcaaactacatgcaaaaaaaaaaaaaaaaaaaaacctcgataaaatcctctttgaacccttttatttactcccatagccttttttagattctagctactggctgtycccttccccaacagaacccatt

SEQ ID NO: 587315 - DNA, 612 bp, Homo sapiens
aagctttggatcaagaaaagctgtatccatacctgatacagagactgtctcctatcacctgaagatactgactggccttttccttagcagtaaaggtgaagtccaaattactgtttaggacttctggttgtctttcttggagaaggggtgagtatgttcagcttgtgggaaaaggaggatgtgaatagctgaataccagaaaggtggactgtgagagtttgtattacctttcaccaaatatttttgtttctacctctgtggtgccacctgttgtaagattataaacaccaccccacattgaattcaagagtagccatgtgacgtaccttggccaatgaaatgtgggtgaaagtgatgtttgctattcctggacagaagtgttgagagacatgggtcaccatgtctcttttctctgccatgagactgacaacattcaagtgaaagcctgggccccaaattaggaaaacatacatctgggcttcagctgacctgtaatgggcatttagtrtgaggaagaaatcagcttttgatgttggaagccactaagacttgaggtcatatgcagcataacctagttcattctgatagtcacagcaataaacggtgctaata

SEQ ID NO: 587316 - DNA, 667 bp, Homo sapiens
gtgacgtaccttggccaatgaaatgtgggtgaaagtgatgtttgctattcctggacagaagtgttgagagacatgggtcaccatgtctcttttctctgccatgagactgacaacattcaagtgaaagcctgggccccaaattaggaaaacatacatctgggcttcagctgacctgtaatgggcatttagtatgaggaagaaatcagcttttgatgttggaagccactaagacttgaggtcatatgcagcataacctagttcattctgatagtcacagcaataaacggtgctaataatattaagataatgtaaagattattcaccataatgccaagtaatgtgcctggacctataaagaaggagatataatcccacatatctaaaggatgaagcactaaaccctcagtgacacaaaatcttgatacatttgtttgcttcatagttgaactgattttcttatctagcatgtagtttttcctggactttctagttgcctttctttttttcctctagaaaagtttargattattgttttatctttagtgttccaaaatttcaccaggatacctctaagatgtcagtctcttttcatttatttaagttagtgttctctttctccactgcttcatctcaaaacctaccccagccacattcattatttagcttt

SEQ ID NO: 587317 - DNA, 586 bp, Homo sapiens
tatttagctttccccacctcatatacccacttgcaattttcttagaattatattcagtcctttctcttccattggattatgggccactgtgcagggactgagtctggctccactttttaatcccccccatgccaggcgtggtatctggcacagaaaatgaactcaataacgagatgctgaattttctacttcctgtatgcttcctggtgacaaaagtaattaatcacaatatagtaaatctaattttaagatacaactattttttctctctcagtaatatatgatggacattgcccactaataagacagaacaggaaacatgaatgggttccagtgtacaaatgccctaacagcatgaaacattaaaatggtatttttctgctttctgaaattcaaacagtgatgagagacagcattcatgacatagaataaggctgcttcaattataaaaacaattcagatcaagctcttagaacacttcratgtctaatttgcttccttaaccatttgacttatgcatttcacttttttctctagaacttctatggaagaagaattagagaaacctatattgaagttcctaaca

SEQ ID NO: 587318 - DNA, 540 bp, Homo sapiens
aggctgcttcaattataaaaacaattcagatcaagctcttagaacacttcaatgtctaatttgcttccttaaccatttgacttatgcatttcacttttttctctagaacttctatggaagaagaattagagaaacctatattgaagttcctaacacaagatcttagtcttaacagcttctttggcatcaggtggcagaacaatcttttcctctagctgtaaccttaaatatgaccttagttaggacgtcatgtagtgagcaatacatgtacagtaaatttcagagctacatgaaagtttctcatccctccaaaatatctaattgttggctgctatcccaaatgaagccttcacttccttaacttagaactttaaaaataaaacttttttttaatacctgggaggaaagatcagttagaatcccaactgtggcacacytttcctcccaaatcaggctctgtagaaactctatcaaacttaggtggttctgaggaacagtttgaaaagcactgcgaagctcaagtctatataaccctagaga

SEQ ID NO: 587319 - DNA, 621 bp, Homo sapiens
tcattgtggtcacagctaaatagcattacaagaaagacagatgcttactttcctgctagtctagaatctaagaggatatgaaaccagagctacagctgtggtcaccacatagaacttgaagatgaagygtgcagactgaggacagctgagctgaaatcgagtcccgctcacattgagctctcaatttagcctggtctaatgccagttctgcctctgatcttgtttatatgagccagtaaattccttttgtattgctgaaatcagatggatttggctttttctatccaacttgcaatcagaagaatcttaactaataccaaagtatacaggtaaccaatgatagaaataaattcataaaaatgagaagagaggggtgggggagtggcgtacacaaaataatttctcatcttacacggcatggacaacataatgttcaattcagtaaatcaagaaatataaatataggcatgttttatggagatgatcatgggaaaggactgaaataagaaataaagttggttttactgggacagagaatatgaccaagggatgaggtgttcatttttttttttatcttatggagatctgtggtgtcccatgggtggccactagcagcagttg

SEQ ID NO: 587320 - DNA, 579 bp, Homo sapiens
tagaactaagtaaatttagcaagattgcagaatacaaaatcaacacaaaaatcaatcatatctatgtgatatgagcaaatcaaaacagaaatcaacaaaataatagcaattgctatagctccaaaacaagtacttagctatcaatctacaaattatgtgtggccttaaatctgcaaaatgctgatgaaagaaatcaaagaagacctaaatgaaaaagagagattgggttttcttgggtctgttgggtcattctcaatgggttgagagactccaagagaattaagacgtyaattttccccaaattgatctatagaattaatgcaattccaggcagatttttttggtaaatataggaaaggtgatcctaaaatgtatatgggaaaggaaagtttttaagacttatgataaagctatagtaatcaagacatgtggtattgatgaacagacagacacataaaccaatggaatacaatagacagttcagggaaagatgcacacaaatatgaccaattcatattggaccaaagtggaaatacaattcaatgaagaaaaaattgtcttttcaacaagtgatgatag

SEQ ID NO: 587321 - DNA, 564 bp, Homo sapiens
cctgtcagcgtttttctgtcctttacaagttaactgcccagtccaaggcatgccccaccaaagccttcttattctaaccttgcctgcctttccagtcttttaaccccccaccaaatgtatccaagtctccacccacaaaccacaaggaggaacattcttctaccccttctccatttccagttggaagtcccatttatcccacaagatgtgcctaactttgcactaatctccaaaagcagagctcagagctcccactccaatcagcaccactgtctcagagcctgttctactgaacagcaattatttgtttacattccagactcaccctcaagtatgcgctccttgagggtgtggcatctttgccttcctgtgtccagcccagaaattgacaccaaatagtgcttaataaatggttgttgcacggattcaggaagaaattgttttaattaagatagtaaatgttcactgcagaaaattagaaagtctagataaatcagaagcaaaraaaaaaaaacatgaagcacatgtaataccacctctcagtaacatcaacaccttggtata

SEQ ID NO: 587322 - DNA, 641 bp, Homo sapiens
ttggactttttatggggattcaaccaaacaatgtagataaagcacaaagaatactcataataatcatcaattatgagtaagtgaatatttaaataatttatttgtcttcttagttatcaaggaaaatattttgcccacttgaagagggccttttctcttttgtgagggaaatatttgcctcatcacataaagacattaggttttaaaggaatgactttagagatcggatgatgtattcattctgttatttactaaatatctaatatgtaggaaggactttgccaggcactgaggcagtaattcacaagtgagtaaatcacaagtgattcctgggtgtactttcagacattttgtttctgtagttttaaggtagggaccaggaatcggatttcagcaaagctccagctgattctgaataatgagatgacacttttacaaacactactatagagatacacaattagtaaggcagtattttcatttcaaggaacttamaattctctatctcatatctgtcaatttgctaaatgcattttgctgcttctaactttcttcccttctctctccccctacttattcacccattgtctgtaaactctgtacaaggcacagtgctggtagacataaagatagaagaaaaa

SEQ ID NO: 587323 - DNA, 622 bp, Homo sapiens
ctcattttttggtaacagcttgccattgtggctgatttcctctgtagatttcctctccttatttcattatgttaacgttattttcttggtgtctctttttgttttctgttatagagtatggatagcaagaaggtgttatgagagtgactgtgcccagagtagggtctcttgttagaccattggccaggaaactgtccttgggttttggggttttcaggagtgcggaggaccatacagaaggcaggaagggagcaggttcctttgtccaaagatattagtatgcacaacttcagtggaggagttcagcatctatgttaacacacattatgcagcctgccaatatggtatccagcgtaagatatgccattgatgataaattggaaaaatagaagagtagagcgtgcttagaaagaaaggaagatggtagaagcatttagcaattttrgggggcaagaataccagattacatcaacagttcctagaacaacaaaaataacaacaaccacaacaacaaatatctatatctatatataattagaatttattatgtaagctaaattaaatttaacatattatgtttaagaaagcacaatatgcacaatatttttcagtactattttta

SEQ ID NO: 587324 - DNA, 567 bp, Homo sapiens
cgatggcgcagtctcagctcactgcatcctcctcctcctgagttcaagcgattctcctgcctcagcctcctgagtagctgggattacaggcatgcaccatcacgcctggctaattttttatttttagtagagatggggtttctccatattggtcaggctggtctcaaactcccgacctcaggtgatccacctgcctcagcctccaaaagtgctgggattataggcgtgagccactgtgccctgcgggaaaatttgcttatatgcaacacctctttctctgataatgcctaataaatgaaagattactgtattggatatkgtcctgccgaaaggtaagttcttcaaaaagtccctctgtgtgttctaaaggttccaaggaaagtatttctcatattttgaaagtaaatgccatatctaaaatgcagatgcaggacaaaaagtaaagcccctgggtcaccaataccatgggatcaaatgctaatggctagagttcagggcaatagtgggatgtccagtactggttgcccaagactatgtctttcctctctcagccaaagagcccctttc

SEQ ID NO: 587325 - DNA, 469 bp, Homo sapiens
atttcctgtggctgtatgtccttccattagtcatgtctcatccacagcacattactactttgagcttttgtccattttgcctggaaattggatgaaatttcccctttgccttaaactgtaagtctggacacttttgcaaccaaattaagtccaacttgggtcaaacagttcttgacrgtgataacgagtggaaacaatagattcagtcttcaaatggttgaattagtgtgttcttgtcctagttttcaggtaatgtaggtaactggccctgaaaatcaatctaatataagatagcattctaaattgtgagtatgatttgttagagtataaaagactctgggaccatgtcaattttctcctttttatttaattcagatgaggatttcttagtcagtaattgcagtgaacccagaagaaggggtgatggtgagaggaggcgagataaattaaggaataatgcataagagcc

SEQ ID NO: 587326 - DNA, 469 bp, Homo sapiens
atttcctgtggctgtatgtccttccattagtcatgtctcatccacagcacattactactttgagcttttgtccattttgcctggaaattggatgaaatttcccctttgccttaaactgtaagtctggacacttttgcaaccaaattaagtccaacttgggtcaaacagttcttgacagtgataacgagtggaaacaatagattcagtcttcaaatggttgaattagtgtgttcttgtcctagttttcaggtaatgtaggtaactggccctgaaaatcaatctaatataagatagcattctaaattgtgagtatgatttgttagagtataaaagactctgggacmatgtcaattttctcctttttatttaattcagatgaggatttcttagtcagtaattgcagtgaacccagaagaaggggtgatggtgagaggaggcgagataaattaaggaataatgcataagagcc

SEQ ID NO: 587327 - DNA, 587 bp, Homo sapiens
ctccacctccacataccaattaataggtgacaggagtgtcacgcatccagattcagccctatgtatttgtggcaataggaccaaatagttaaaactaatatgaattggatttattcattcaataaacattgtttgagtgcctactatattccaggcaccattctaggccctagagaaacagctctggatataatagagtcttctcttatagagcttacattctaagggagagggggtagacagaaagtaaataaatatgtaatataacagttagtgataagtgctgtgaagggaaaagtagagcaatgcaaggagagagtgggggtgatggtgctattttatcaagcgcagccacaggaagactttctgattaggtgacatttgagcaaaaatctggtcaacactatgacawaatcagagaaaagattgtcttagtcactgtattctgctaagccaatggacagagtagattcctttcagaaatagttgcaacaaagttttcagaggactattaaccctcaggtaattagaaaatccaatctgtcacaattcctcctaaccccatttcttagacactgcagtcaaaa

SEQ ID NO: 587328 - DNA, 589 bp, Homo sapiens
caccatttaatcattttggtatctgtgtggcacttgggggggtttctaagccttaagaatttgaaatcattagcacaaaactggaactcatcttggccttggcattttgtcttgggaacaaaattggccctgagatccataagtgactcattgaggaaatactggggcatgctgcacaatgtgagggcaatattttaacaacaggcaaacatgtattacatgaggargaattataaatgaaaggaaaattaattaaggagtcaagaaaccagaggaaggatcacagcaagaggcagataccattaccctggaagtgaaacgccagcactttggaaacaaaacatatgtgctagaatcatcaatgagcttgagacgagacttgagaaatacccacaccagtttgccttcacttccttttgtgccttctgcatgccaaacagttgaatataaagtatcctaatggatgtaagagcattttataaattaagtgctctgaaaatatatgccattatcatcattattgaagaaaagcagaccaccgtgttactcaaatcatgtctactagccaaatagtttgcccagaaggaag

SEQ ID NO: 587329 - DNA, 539 bp, Homo sapiens
caagcatgtacattttctgatttagcagacaggaatttaggaatgccartagtccagggaccaatcttctgatctgtagagatttccaccttgtcttttaaaagtcagattttataaaggtttgtaaaaattagaaaataattttccccccgattatcccacttagagctttttctatccaaataaattagagataattggtgaagactagcaagttttatgtcctaaggtcttcatcattaaaactattcttatgtaatttccttgtaaaattttatatcatggtaattattaccaataactatttcttagagaatttttactttgtaaagcaaaaataagcttctgtcttaaagattcttataccagcacacatactcacatttggcttccaatgcgagcattttctatttcccaccctctattccctcttcaattttgaaaattgtgttataaaaattagtggtaaagatgcagaatagtcaagaaagaatgttgaaaaagaaacgaacaaacttggaggatgcacacttcccaaa

SEQ ID NO: 587330 - DNA, 413 bp, Homo sapiens
agtgctctgaggactgtgattgaagagtataatgtttcaactagcatgcaactttgcctctgaacaagaggagagtcaacmccaggattcttttgagaactggaccctggtatgggcgactggtgcttgctccccacagggccatatgaaaagtcttataaaacatggtcccagaaccatctgcatggagggcagaaggaagatttatccattggattctatcccctattggtaaagggggctccacatttccatgttacccacatatgagtccggaaatgaaccttccacttggaggtcaaagaggcattgagaagtatcaccatagagctgtctcattgcacctgcaggaggctcctccaaaccataaagaaactggtttctgctgtagcatctggaggtgctgctacaga

SEQ ID NO: 587331 - DNA, 413 bp, Homo sapiens
agtgctctgaggactgtgattgaagagtataatgtttcaactagcatgcaactttgcctctgaacaagaggagagtcaacaccaggattyttttgagaactggaccctggtatgggcgactggtgcttgctccccacagggccatatgaaaagtcttataaaacatggtcccagaaccatctgcatggagggcagaaggaagatttatccattggattctatcccctattggtaaagggggctccacatttccatgttacccacatatgagtccggaaatgaaccttccacttggaggtcaaagaggcattgagaagtatcaccatagagctgtctcattgcacctgcaggaggctcctccaaaccataaagaaactggtttctgctgtagcatctggaggtgctgctacaga

SEQ ID NO: 587332 - DNA, 413 bp, Homo sapiens
agtgctctgaggactgtgattgaagagtataatgtttcaactagcatgcaactttgcctctgaacaagaggagagtcaacaccaggattcttttgagaactggaccctggtatgggcgactggtgcttgctccccacagggccatatgaaaagtyttataaaacatggtcccagaaccatctgcatggagggcagaaggaagatttatccattggattctatcccctattggtaaagggggctccacatttccatgttacccacatatgagtccggaaatgaaccttccacttggaggtcaaagaggcattgagaagtatcaccatagagctgtctcattgcacctgcaggaggctcctccaaaccataaagaaactggtttctgctgtagcatctggaggtgctgctacaga

SEQ ID NO: 587333 - DNA, 575 bp, Homo sapiens
ttgcttctagccttggtggactctaacaacaaatttacaaatatttgatttcttgtttctctttatgaagcacattgctttcatctggctgttcaggattattctttgtctttagttttcagcagtttgattatactgtgttaggcatgaatttcttttgttttattccattttggattcaccagtcttcttgaacataaaaaattatggtttttttttttttttttttttgccaaatttaggaccttttcagccattgtaactttaaatgatttttctggcscacgcacttagttgtgtctttgtaaaactgatgacatgacattgatgttagaacttttggtatttctcatagctccctaaggttctgtttatttaaaaaaattttttctccctcttgtgtaatatttattaataatattaataattataaataaattttgtgtaatttccattaatctatttttaagtttactgactctttattctgttatctctgttctgctattggatctatccagtgaattttttagtttggacagtatatttttcagtttttaaatttctatttggtt

SEQ ID NO: 587334 - DNA, 592 bp, Homo sapiens
ctagagttgagacaaatttagagagctaagcaaaatacaagggtagaagtagtgggaagagccctgtgggctctctcggtccccagggaagccatttctgacttagtctcacagagatccttgggaagggctgccagaggaactgggaaaagaccacagggagaaagaaacttccagctgaactttgtaacaatttcaactgaacacaaatttcctcgatagaaactgggggaggaggtgaatcgggagtggatacacagcacagaagccgcagcaggcagggaggcacaagacctgaaagccctgcttgctttctcagctraaaggctagtagcctgtggcaagttctcagccctgctcactggctgcctggaaataaactcagtgctgttggtgggggcatggtgggagtgagaccagcctcttgggctgcatgggagctaggtgaagcctgtaactgccagctttccccgacttccctggtgacctgcatgacacatcagaggcagctacaatccccctgggaacataacttcactggcctgagaaccacatccccataccccacagcagctgcagcaagccccaccca

SEQ ID NO: 587335 - DNA, 630 bp, Homo sapiens
aaagtgatacatacacacatacacacacacacatatacatcatggaatactactcagccattaaaaggaatgaaataatggcatttgcagcaaccttgatggaattgtaggccactattctaagtgaagtaactcaggaatggaaaaccaaatgttgtatcttctcactcayaagtgggagctaagctatgaagatgcaaaggcataagaataatacaatggactttaggggcttgggggaaagggtgggaggcagtgaggcataaaagattacacactgggtacagtacacactgcttcagtgatgggtgcaccaaaatctcagaaatcaccactaaagaacttattcttgtaaccaaacgcgacttgttccctaaaaacctattgaaatttttttaaatgcaaaaaaaaaagaaagaaagaaaaggaaagaaaagaaaagaaaaggcatttatttcttacggttatggaggctgagaagtcccaggtcaaggggctgtatctggtgagggccttcttgctgttggggactctgtgcagagtcctgagatggtaaagaacatcacatagcaaggggactgagtgtgctagctcgggtctctcttcctcttcttacaaagctagaagtcc

SEQ ID NO: 587336 - DNA, 558 bp, Homo sapiens
attacctctccatttagtgggtacttataatcaagtttcagtgttagggggaacagagacatgaaacttgtgaaagatactgatgtttgtgacaacaggtgaatactagtgttttctctttaagctttgctctctatagtttgttcaaacggagttgttgtggaagttgcctaagtcagtgacagtcattttgcttgttaacagattccactctgtcctccccactctcgtatttcttaaagtaaaaaatgttaagtgcttacaaaagtaccagcactgtgtttagtactctatatgcgttatcttattatattttcataacaatattttgagaaacctaataytatcattttgcagatgaaaaacagagatgtaataattttcctgagctcacatgactagtatggttagcagaataatggtctccaaagatgtccatgtcctattctcagaacctgtgaatatgttacctttgcagatatgaagaagttaaagatttgagatgagaagacaattctggattatctgtgagtcaaatataatcacaagagtacttat

SEQ ID NO: 587337 - DNA, 335 bp, Homo sapiens
attttaaagatatgaatttatctaaagataaattcacttaatttgattcttgagcccatcctccctgggaagttaaaaagagttctaacttgtctttattccagcattaccacaacacctatcatgtaattgaatcaacaaacgaattcagcctagtcaatgtccatcttgcyttcactgtgctcattctttcagtttcccaagtagcatactctaatggaaagaataaagaatttacagccagcaagatctggttcaaattttcactttgccacatactaggtgagtggatttgggcaaattattcaatcactttttctcagtgtttccagttg

SEQ ID NO: 587338 - DNA, 335 bp, Homo sapiens
attttaaagatatgaatttatctaaagataaattcacttaatttgattcttgagcccatcctccctgggaagttaaaaagagttctaacttgtctttattccagcattaccacaacacctatcatgtaattgaatcaacaaacgaattcagcctagtcaatgtccatcttgccttcactgtgctcattctttcagtttcccaagtagcatactctaatggaaagaataaagaatttacagccagcaagatctggttcarattttcactttgccacatactaggtgagtggatttgggcaaattattcaatcactttttctcagtgtttccagttg

SEQ ID NO: 587339 - DNA, 481 bp, Homo sapiens
catcatgccgtggtgctgtttgaattttatgcaataaggatgtgtttgtattttgaaatccccttatcttcacccatatctattttctttctaggctagcttctcttcaggctgtgaatccggttctttccagctccttcagtactttatcaactgcttctcagtctctctttccagaggctcctaaccctgatacttgcccagataatctccaatcttaaaaagcaaaatcatttacgtgcactcgaactctcctcctctctctccccttctttcgccatcaggcttctcggaagattaatctgaattattcttcatggacacctgagcatcttgcagagtggtttctatctatttcaagcctctactgcagccactttctcaraagctacctgaggcttgtaaccaccaccatcccatgactttttttgccactgttttgccaaacgtctctgttgcattttaccctgtggaccatact

SEQ ID NO: 587340 - DNA, 596 bp, Homo sapiens
aagttttatcatagatatgtatgcataggaaaaaacacagtatttgtrgggtccattaccacctgcagtttcaggcatccaatcttggcacatttccactgaagataagaagggactactgcatatcaataatataatccacaataatttatgtagctattcttgaatgacaggaggtttagtttgcttctaatttctggaaatcaccaatgaacacttattttaagatgtgaattggttgaaaatataaagcaactacactcattgtggaaataacagtacaaatggcctaggaagaattgcttgatgctgccaatttgcctaagcccccagtttccaataagggatggtgttaataaaggaatatttttagcctgattgcaaaggtttacaataaatttcaataaagtgctcaggataaacatacaacaattctacttctaccagaaacattttctgagactgagaatcaattaatactatttataaaaccataagaacttcattctatgaaattctacccagagagaaggtcaggagtaacagaatactctatcagatgaagctctgtacatatctaccttcaaatattcttg

SEQ ID NO: 587341 - DNA, 620 bp, Homo sapiens
aactatcaatttgcagcaggactatattgagtaatattagacatcattaatttaacgatggccacatttagactgactaaattaaagtgtttcacctttttcctggcatgcacctgatgtgataatcactaggttggagwttgcagagatgagataatctttgctggaagcactatctggcagttttaggaaaagactgccatgtttaagatccattgtctcacacccttcaattcaccattatcaacagctacaaaggcaacttcatccctcaagtcttttaataacatggtgattgcacgggccatgctaactgatccagttcttataatggagaccttactgtggtgaataacctcctctgaagcaaaattctcaataaattcattctggatagttaccatcacgtaaccagaggtgggaaggttggttaagggccagctgaccctgtgatgtgcgttctctgttggtgacacagatttatcctggggccaagaaaatttactcccatagtgcctacgctccagctggaccacagaactcctgcagcccaccttggggatacacacacaagaggtggatggagcagagaatggaagaaagtggtgggcaagctgcag

SEQ ID NO: 587342 - DNA, 585 bp, Homo sapiens
gtagttcatttctttttggtgatgaataatgttccattttctagatgtaccacagtgtatttatccattcacctactgaaggacatcttgattgcttccaacttttggcaattattaataaagctgctagaactattcacatgcaggtgcaggtttttttgtggacatgtgttttcagcttctttggagaaataccaaggagcacaattgctggatcatatagtaagagtatgtttagttttgtaagaaaccaccaaactatcttccaaagtgactataccatttgcattcccaccagcaatgaataagtgcaggtacacatccttgccagcatttgtttttgtcagtattctggatttcgaccatttcaatgggcgtgtagtggtatctcattattgttataatttgcatttctctgatgatatatgatgtgaggcrtcttttcatgtgcttatttgtcatctgtttatcttctttgatgaggtgtctgaggttctgtggcccatttttagttgagttgtttgtcagttttagattttgtttgtttgttgagttttaggagttctttgtatatttttaataata

SEQ ID NO: 587343 - DNA, 536 bp, Homo sapiens
atcgtaatcccttttttaaattaagaatcctcctctggcttatatatacttcaatgtatactactatactttaaatatacttgaattttagcttagtttttaaaaattttcattgtttaagttccctctccatcaaatggatgaaacacttaacttacagcaaagagactagctctgatgcttctggctatgtgaatgtagacaagccgatttacytaagcatcggtaaaataggacttgtaatactttaaagggctttgatcctctaacaggaaaatatatgtgaaatgctttaaaatctacagattgctgtaataggttattaggataagaaatttaaattagaaaaaataaatcatttgaagtgtgcttaggacattttatttgcattccattttacaaatttattttttgtcatttatcttcactattaaagtaagtatcataattaactataatataaaattctgtttttaaaaaaggcatttaaatcttctgagtttcaaaaattccaaataatatattttaaaagattt

SEQ ID NO: 587344 - DNA, 573 bp, Homo sapiens
tattatttcatttggatatccagttctttcagcactgttttttaaaaagactatcctttctctattgcatttgcacttttgtcaaaagttaatttggcccattcttgtgtgtctgtttctggactttctattctggttcattgatctttgtggctgtctacgctgtaattactgtagctttatagtaagtctttaaaattgattagcgttactcctcccttcattactcttcttgccttttcatactgattttatttttatttttatttttgagacagagtctcactctgtcgcttaggctagagtgcagtggagtgatctcagctcactgcaacctccaccttttgggttcaggcgattctcctgcctcagcctcccaaatagctgggattacaggatcccacaccatgcccggctaattttttgtatttttagtagagacgggrtttcaccatattgtccaggctggtctcgaactttcaacctcaagtgatccgcctggctcagcctcccaaagtgctgggattacaggtgtgagccaccgtgcccgtcccatactgattttataatcag

SEQ ID NO: 587345 - DNA, 573 bp, Homo sapiens
tattatttcatttggatatccagttctttcagcactgttttttaaaaagactatcctttctctattgcatttgcacttttgtcaaaagttaatttggcccattcttgtgtgtctgtttctggactttctattctggttcattgatctttgtggctgtctacgctgtaattactgtagctttatagtaagtctttaaaattgattagcgttactcctcccttcattactcttcttgccttttcatactgattttatttttatttttatttttgagacagagtctcactctgtcgcttaggctagagtgcagtggagtgatctcagctcactgcaacctccaccttttgggttcaggcgattctcctgcctcagcctcccaaatagctgggattacaggatcccacaccatgcccggctaattttttgtatttttagtagagacggggtttcaccatattgkccaggctggtctcgaactttcaacctcaagtgatccgcctggctcagcctcccaaagtgctgggattacaggtgtgagccaccgtgcccgtcccatactgattttataatcag

SEQ ID NO: 587346 - DNA, 573 bp, Homo sapiens
tattatttcatttggatatccagttctttcagcactgttttttaaaaagactatcctttctctattgcatttgcacttttgtcaaaagttaatttggcccattcttgtgtgtctgtttctggactttctattctggttcattgatctttgtggctgtctacgctgtaattactgtagctttatagtaagtctttaaaattgattagcgttactcctcccttcattactcttcttgccttttcatactgattttatttttatttttatttttgagacagagtctcactctgtcgcttaggctagagtgcagtggagtgatctcagctcactgcaacctccaccttttgggttcaggcgattctcctgcctcagcctcccaaatagctgggattacaggatcccacaccatgcccggctaattttttgtatttttagtagagacggggtttcaccatattgtccaggctggtctygaactttcaacctcaagtgatccgcctggctcagcctcccaaagtgctgggattacaggtgtgagccaccgtgcccgtcccatactgattttataatcag

SEQ ID NO: 587347 - DNA, 573 bp, Homo sapiens
tattatttcatttggatatccagttctttcagcactgttttttaaaaagactatcctttctctattgcatttgcacttttgtcaaaagttaatttggcccattcttgtgtgtctgtttctggactttctattctggttcattgatctttgtggctgtctacgctgtaattactgtagctttatagtaagtctttaaaattgattagcgttactcctcccttcattactcttcttgccttttcatactgattttatttttatttttatttttgagacagagtctcactctgtcgcttaggctagagtgcagtggagtgatctcagctcactgcaacctccaccttttgggttcaggcgattctcctgcctcagcctcccaaatagctgggattacaggatcccacaccatgcccggctaattttttgtatttttagtagagacggggtttcaccatattgtccaggctggtctcgaactttcaacctcaagtgatccgcctggctcagcctcccaaagtgctgggattacaggtgtgagccaccgygcccgtcccatactgattttataatcag

SEQ ID NO: 587348 - DNA, 469 bp, Homo sapiens
  misc_feature 78: n = A,T,C or G
ttggactttttttattttttattttttttatttgagacaaggtcttactctgtcaccagcttgggaatgggcaagggngcaatcatgggctcactgcagcctcaacctcccggggctcaagcagtccttccacctcrgcctcctgagtagctgggaccacaggtgcacaccatcacacccggttaatttttgtatttttagtagagatggggttttgccatgttgcccaggctggtcttgaactcctgaccgcaagtgataaattttttttatgtgatgtttagctaatgagacatttgtagtaaccttctagcttatggtggctctttttctattgagtcacttgtatatgcggagatggcattgtctgtgtaccatttgttgaaatgagggaaaggaaggaagtgagataacatttattgggagcctgttgtcttcaaggaactttatgtatgttttctcatttaat

SEQ ID NO: 587349 - DNA, 469 bp, Homo sapiens
  misc_feature 78: n = A,T,C or G
ttggactttttttattttttattttttttatttgagacaaggtcttactctgtcaccagcttgggaatgggcaagggngcaatcatgggctcactgcagcctcaacctcccggggctcaagcagtccttccacctcggcctcctgagtagctgggaccacaggtgcacaccatcacacccggttaatttttgtatttttagtagagatggggttttgccatgttgcccaggytggtcttgaactcctgaccgcaagtgataaattttttttatgtgatgtttagctaatgagacatttgtagtaaccttctagcttatggtggctctttttctattgagtcacttgtatatgcggagatggcattgtctgtgtaccatttgttgaaatgagggaaaggaaggaagtgagataacatttattgggagcctgttgtcttcaaggaactttatgtatgttttctcatttaat

SEQ ID NO: 587350 - DNA, 469 bp, Homo sapiens
  misc_feature 78: n = A,T,C or G
ttggactttttttattttttattttttttatttgagacaaggtcttactctgtcaccagcttgggaatgggcaagggngcaatcatgggctcactgcagcctcaacctcccggggctcaagcagtccttccacctcggcctcctgagtagctgggaccacaggtgcacaccatcacacccggttaatttttgtatttttagtagagatggggttttgccatgttgcccaggctggtcttgaactcctgaccgcaagtgataaattttttttatgtgatgtttagctaatgagacatttgtagtaaccttctagcttatggtggctctttttctattgastcacttgtatatgcggagatggcattgtctgtgtaccatttgttgaaatgagggaaaggaaggaagtgagataacatttattgggagcctgttgtcttcaaggaactttatgtatgttttctcatttaat

SEQ ID NO: 587351 - DNA, 469 bp, Homo sapiens
  misc_feature 78: n = A,T,C or G
ttggactttttttattttttattttttttatttgagacaaggtcttactctgtcaccagcttgggaatgggcaagggngcaatcatgggctcactgcagcctcaacctcccggggctcaagcagtccttccacctcggcctcctgagtagctgggaccacaggtgcacaccatcacacccggttaatttttgtatttttagtagagatggggttttgccatgttgcccaggctggtcttgaactcctgaccgcaagtgataaattttttttatgtgatgtttagctaatgagacatttgtagtaaccttctagcttatggtggctctttttctattgagtcacttgtatatgcggagatggcattgtctgtgtaccatttgttgaaatgagggaaaggaaggaagtgagataacatttattgggagcctgttgtcttcaaggaacttyatgtatgttttctcatttaat

SEQ ID NO: 587352 - DNA, 458 bp, Homo sapiens
atggcggtaggaggcaggtaaattctcagatgaaactcaaccttcaagccaaggacagtcgaaagcctgaaaaccaagctacaagttctggataaatccatggactagagagctctcattcctgtttggcatgctctctcctgattggtccttatccttcacctacyttacatatacctgcccttccccagttggtcctctacactatcgtgcctatttctaaatggtgctttttcaagcatacccacagaccaatcagcatgtacctcccccatttcaagcccataaaaacctctagactcagcctcgtggctggcaacccaccttcgggtcccctctcgctgttgagagctttcttgtcactcattaaattctactctgccttactcaaggaaaaaaaaaaaaaaaaaaaagcaatgggagatcattaattaaatggctttgaccagggaagtgac

SEQ ID NO: 587353 - DNA, 458 bp, Homo sapiens
atggcggtaggaggcaggtaaattctcagatgaaactcaaccttcaagccaaggacagtcgaaagcctgaaaaccaagctacaagttctggataaatccatggactagagagctctcattcctgtttggcatgctctctcctgattggtccttatccttcacctaccttacatatacctgcccttccccagttggtcctctacactatcgtgcctatttctaaatggtgctttttcaagcatacccacagaccaatcagcatgtacctcccccatttcaagcccataaaaacctctagactcagcctcgtggctggcaacccaccttcgggtcccctctcgctgttgagagctttcttgtcactcattaaattctactctrccttactcaaggaaaaaaaaaaaaaaaaaaaagcaatgggagatcattaattaaatggctttgaccagggaagtgac

SEQ ID NO: 587354 - DNA, 458 bp, Homo sapiens
atggcggtaggaggcaggtaaattctcagatgaaactcaaccttcaagccaaggacagtcgaaagcctgaaaaccaagctacaagttctggataaatccatggactagagagctctcattcctgtttggcatgctctctcctgattggtccttatccttcacctaccttacatatacctgcccttccccagttggtcctctacactatcgtgcctatttctaaatggtgctttttcaagcatacccacagaccaatcagcatgtacctcccccatttcaagcccataaaaacctctagactcagcctcgtggctggcaacccaccttcgggtcccctctcgctgttgagagctttcttgtcactcattaaattctactctgccttactcarggaaaaaaaaaaaaaaaaaaaagcaatgggagatcattaattaaatggctttgaccagggaagtgac

SEQ ID NO: 587355 - DNA, 565 bp, Homo sapiens
acttaatcttcttgctaatatggagaaagataattttctattttgtttatgaaataatatcaggtatatgtgactcmgattttatctgttcattgttttacctatcctgcaagtattttttttttggttgttctttttattttttcatttattctttttgttttttaatagagatgggggtctcactatgttgtccaggctggtcttgaacccctgggctctagtgatcctcctggcttggcctcctaaagtgttgagattacaggcgtgagccactgtgcctggtcttctgcaagtatttagtctcactctgtttcagccattatgctggggctacaaaggtgaatgtagtttctgccattgaaggactcatagcctagaaaggagaacaaacagatcacctgaaatgctgtattctgaatgctgtataataactacctgtccacagagtgatgagagcccaaaggactgagtgccaaagggagggtttttcaaagaagatgctatttgtgttataaaatggtggcagaagggcattctaggcagaggaaatcacagcaaaaag

SEQ ID NO: 587356 - DNA, 565 bp, Homo sapiens
acttaatcttcttgctaatatggagaaagataattttctattttgtttatgaaataatatcaggtatatgtgactcagattttatctgttcattgttttacctatcctgcaagtattttttttttggttgttctttttattttttcatttattctttttgttttttaatagagatgggggtctcactatgttgtccaggctggtcttgaacccctgggctctagtgatcctcctggcttggcctcctaaagtgytgagattacaggcgtgagccactgtgcctggtcttctgcaagtatttagtctcactctgtttcagccattatgctggggctacaaaggtgaatgtagtttctgccattgaaggactcatagcctagaaaggagaacaaacagatcacctgaaatgctgtattctgaatgctgtataataactacctgtccacagagtgatgagagcccaaaggactgagtgccaaagggagggtttttcaaagaagatgctatttgtgttataaaatggtggcagaagggcattctaggcagaggaaatcacagcaaaaag

SEQ ID NO: 587357 - DNA, 565 bp, Homo sapiens
acttaatcttcttgctaatatggagaaagataattttctattttgtttatgaaataatatcaggtatatgtgactcagattttatctgttcattgttttacctatcctgcaagtattttttttttggttgttctttttattttttcatttattctttttgttttttaatagagatgggggtctcactatgttgtccaggctggtcttgaacccctgggctctagtgatcctcctggcttggcctcctaaagtgttgagattacaggcgtgagccactgtgcctggtcttctgcaagtatttagtctcactctgtttcagmcattatgctggggctacaaaggtgaatgtagtttctgccattgaaggactcatagcctagaaaggagaacaaacagatcacctgaaatgctgtattctgaatgctgtataataactacctgtccacagagtgatgagagcccaaaggactgagtgccaaagggagggtttttcaaagaagatgctatttgtgttataaaatggtggcagaagggcattctaggcagaggaaatcacagcaaaaag

SEQ ID NO: 587358 - DNA, 565 bp, Homo sapiens
acttaatcttcttgctaatatggagaaagataattttctattttgtttatgaaataatatcaggtatatgtgactcagattttatctgttcattgttttacctatcctgcaagtattttttttttggttgttctttttattttttcatttattctttttgttttttaatagagatgggggtctcactatgttgtccaggctggtcttgaacccctgggctctagtgatcctcctggcttggcctcctaaagtgttgagattacaggcgtgagccactgtgcctggtcttctgcaagtatttagtctcactctgtttcagccattatgctggggctacaaaggtgaatgtagtttctgccattgaaggactcatagcctagaaaggagaacaaacagatcamctgaaatgctgtattctgaatgctgtataataactacctgtccacagagtgatgagagcccaaaggactgagtgccaaagggagggtttttcaaagaagatgctatttgtgttataaaatggtggcagaagggcattctaggcagaggaaatcacagcaaaaag

SEQ ID NO: 587359 - DNA, 508 bp, Homo sapiens
ccatgacaatttcttaaatagatttggggaaaaaaaaaacacacacacacacaaacacccaaatgaagagtgagttgggagagcaaaagacaacctgaaagaaaaaaagagatccactaaggattaatgtatggagacagcatttatgtcctgccctacattatcctaatttgaaataagcaagtacttttttttagaaacagacttttccagaaaaccttgaagctggatgagatctcttccacataccagagctcagagagctaagataaaagataccttgcaacgtaacaccacctccagacttgcataatttggccaaggactcaaattgataaaagaaagctaaatcagcagcttgagacaagaattgatggataamtttttctcagaagatgttgtgattcattaaaatttagctgagaacttctagaattagatgtttccatctgaagctttttttgggggacaaagagtagtaaatggttaaaaatctgaattctgaact

SEQ ID NO: 587360 - DNA, 508 bp, Homo sapiens
ccatgacaatttcttaaatagatttggggaaaaaaaaaacacacacacacacaaacacccaaatgaagagtgagttgggagagcaaaagacaacctgaaagaaaaaaagagatccactaaggattaatgtatggagacagcatttatgtcctgccctacattatcctaatttgaaataagcaagtacttttttttagaaacagacttttccagaaaaccttgaagctggatgagatctcttccacataccagagctcagagagctaagataaaagataccttgcaacgtaacaccacctccagacttgcataatttggccaaggactcaaattgataaaagaaagctaaatcagcagcttgagacaagaattgatggataactttttctcagaagatgttgtgattcattaaaatttagcygagaacttctagaattagatgtttccatctgaagctttttttgggggacaaagagtagtaaatggttaaaaatctgaattctgaact

SEQ ID NO: 587361 - DNA, 452 bp, Homo sapiens
tagcaaatcttcttccagagtatcagctaaagcgagtcactgacggggtagtatagagagaaggtgagttgaggatggcttcacatttaagaaaaaacayctttcagcataactgagacaaatatctgtttgtgttcaattcaaactttacattttttctgaaggaaggatatctttctacccaaaagaaagtagaatcacagaggcagcacagagatgcctcaaaaacagaaagctgacactattagaatttactaattattctcctttctgccctcattcttaacatgcttcttcctgccctcatatttaactctgcccaattttgcttcctttagttaagtgtttcccccatttctgtattatgaattcaaacaagactgagaccaaatattgtatctctctttgtattgttccctcgccttgcccactaagcgcgcgtataataagca

SEQ ID NO: 587362 - DNA, 594 bp, Homo sapiens
tacaaagggcttcagggagctgttttaattaagtaattcatggagagaacacctgttcaggtgtgccttggctttacttggaaaacaatgattaaaaaccaaaatcttactattcctgggaggagatgggcatctcttgtttgaagacatagataatatttgcaaaagaggggagggcagtgcaaacatatgttaggctgcatgtagattcatgtaccatctaatattgatgcactgaggtctgatttcatgctgccattctaggcactgcagatggctatgcagtttttcccttttttcaaataaattttattgtgcccatttggagctaacaacatgattgatgtgatacacatagatcataaaatgaagcttttcaaatagaataatcctaaattggaggttccaagatggccaaataggaacagctccagtccacagctcccagagtgagcaacacagaagacggttgatttctgcatttctaactgaggtactgggttcatctcactggggcttgtcggacagtgggcccagcccayggagcatgagccgaagcagggtggggcatcacctcacctgggaagcacaagg

SEQ ID NO: 587363 - DNA, 601 bp, Homo sapiens
aaatgccatttgactcagcaattccattactgggtatatactcaagggaatgtaaattgttcaactataaagacacatgcacacgtctgttcactgcagcattattcacaataacaaagacatgcaatcaacctaaatgcccctcaacgataaactggataaagaaaatgtggtacatatacaccatgtaatactacacagtcataaaaaagaatgagatcatgtcctttgcagggacgtggatggagctggaggccattatcttagcaaactaatgcaggaacagaaaaccaaataccacttgttcttataagtgggacstaaatgatgagaacacatggacacatagaggggaataatatacacaggggccctcttgagactggagggtgggaggaggaaaaaaatcaggaaaaatatctaatgggtactaggcttaatacctgggtgatgaaataatctgtaccagaaacccccatgacacaagtttacatatgtaacaaatctgcacgtgtatccctgaacttaaaaagaacagttaataaaaaagaaaaaaaaagaaatgtctttttctcttgaatgctatttcctaggaggaagc

SEQ ID NO: 587364 - DNA, 556 bp, Homo sapiens
ctcagggctgtgtcaggagtttggatgcaacccatgggcaaagggaagctcattaaacatgaacagtaatccagttaagtttaaaagcacattccttctgcaaggtggagaactgatcccagatggcttgaccaaagactttggaaggccagtgtgatagcatgttcttggtctctgcgtcttccactcttctgttgctttgtagtggtttccagccccagaattgaactgcagaacttatcatggtgcgtgcatgctggtgaaactggtggtctcctaaattgagtttggggagatgcatatgagaaaggcagtggagcacatctagaaataacttaggtgttggtgccagttatgtggcatgttgagctttgatcatttcacctccctgggccttgattttgttcatctttaaagaaaattaaacagcatcctctctactttccctgtacagggtggggrgtgaggagtcatgagataacaaatgacttagaggcatagtacttttataacctggaattagatggcaggaaaacaacaaaaaaatagcatggta

SEQ ID NO: 587365 - DNA, 583 bp, Homo sapiens
aaaacatctcatatttatagattagaagactctttattgttaaaatgtccatactacccaaagcaatctatacattcaatgcaatccttttcaaaatctcaaggccattttttacagaaatagagaaaacaattctaaaattcatttggaattacaaaagacaacgaatagccaaagctatataaagaatgaacaaagctggaggttttacacatccttatttcaaagtatattacaaagctatagtaattaaaacagtctggtactggyatataaaagatgcatagatcaacgaaataaaaagcagaaaaataaacccatgcctatacagtcaactgatctttgacaagggttctttaagaatacacaatggggaaagaatactcttccacaaagggtgcaagaatactcttccacaaatggtgctaggaaaacttgatatctatatgcaaaagaatgaatgtgggcctttatcttatatcatacacaaaaattcttcatttagcttcctaattgctcattcttctgccctcgctaacttaatccttcttcaaatccccgaagtaacacttctaagagagac

SEQ ID NO: 587366 - DNA, 583 bp, Homo sapiens
aaaacatctcatatttatagattagaagactctttattgttaaaatgtccatactacccaaagcaatctatacattcaatgcaatccttttcaaaatctcaaggccattttttacagaaatagagaaaacaattctaaaattcatttggaattacaaaagacaacgaatagccaaagctatataaagaatgaacaaagctggaggttttacacatccttatttcaaagtatattacaaagctatagtaattaaaacagtctggtactggtatataaaagatgcatagatcaacgaaataaaaagcagaaaaataaacccatgcctatacagtcaactgatctttgacaaggkttctttaagaatacacaatggggaaagaatactcttccacaaagggtgcaagaatactcttccacaaatggtgctaggaaaacttgatatctatatgcaaaagaatgaatgtgggcctttatcttatatcatacacaaaaattcttcatttagcttcctaattgctcattcttctgccctcgctaacttaatccttcttcaaatccccgaagtaacacttctaagagagac

SEQ ID NO: 587367 - DNA, 578 bp, Homo sapiens
tgttcattgagaactacaaatcattgatgaaagaaatgagacaaaaataagtgataaaacatctcatatttatagattagaagactctttattgttaaaatgtccatactacccaaagcaatctatacattcaatgcaatccttttcaaaatctcaaggccattttttacagaaatagagaaaacaattctaaaattcatttggaattacaaaagacaacgaatagccaaagctatataaagaatgaacaaagctggaggttttacacatccttatttcaaagtatattacaaagctatagtaattaaaacagtctggtactggtatataaaagatgcatagatcaacgaaataaaaagcagaaaaataaacccatgcctatacagtcaactgatctttgacaagggttctttaagaatacacaatggggaaagaatactcttccacaaagggtgcaagaatactcttccacaaatggtgctaggaaaacttgatatctatatgcaaaagaatgaatgtgggcctttatcttatrtcatacacaaaaattcttcatttagcttcctaattgctcattc

SEQ ID NO: 587368 - DNA, 497 bp, Homo sapiens
ttttcaaagagggttcttgtttttttttcaatgacatgagtaatatgtgttcatcacaaatttttttaaaccacaaataaaaaaaaaatgtaaatcttatctaccatcccataatgcagatatattttggtgtatatgcttctaacttgttgtatacatatggcctaatcttaatgtacataattattgaatgtgttctttatgtgtaacagtatgcaataatcattttctatgccatttaatgcacttctacattaaatacatttcataaacaatacttcacctaatggcagtagcacatacattaacacctgtgtaaagggaaaagaatgaggacaatttgggaaaatcatgaaaggaggtatatttagaagttaagagctgagactctggaggggacggaggttcaatcctatctctgcatttacaagaggcagggcatcagcaagccatgaacttgtcactgcatcrttttgctcatctataaaatgggaatc

SEQ ID NO: 587369 - DNA, 477 bp, Homo sapiens
attcccctttgcccagtccctggcaaccactcagctgctttctgtctctttggatttgactattctggatattttataagtgctattatataacatgtggctctttgtgtctggctttcacttagcaatgtttctgaaattgcttttctctgtagcaggcatcagaactttatttctttttatggccgagcaacattccattgtactgatatgccatattatgtttatccattcatcatctgatggccatttgagttgttttcatttttttttctcttttatcttttagagccagggtctttctctgttgcccaggctgtagtgcagtggcacaatcacagctcaccgcagcctctaactcctgartacaagtgatcttcccagcttcctgagtagctggagctacaggcatatgctgccatgcctggcaattgttttttatgttttgtagagacaggtctcactatgttgaccagg

SEQ ID NO: 587370 - DNA, 475 bp, Homo sapiens
aaaagtttaaactggaagaaaaaagaaacagcaaacacgaataaataaatagaaacaatacaatctggaaaacatattaaaaatgaagaaaattaacagtgcctcagagacctgtggggcaatatcaagagtaacaacttgtgcatgttgaaaattccagaaaaagagaagagagaaagaaagggacagaaaaaaatatctaaagaaatactggctgcaaacttgcaaaatgtataaaagattaacctatagatccaaaaagcacaataaaattcaaatataataaagacaaaaatattaggctgggtgtggtggctcatgcctgtaatcccagcacttkggaaggctgaagcaggtggatcacttgaggtcaggagcttgagatcagctgggtcaacacgatgaaaccctgtctcttggctgggtgtggtggtgcacatctgtaggtccagctacttgggagggcaaggcagga

SEQ ID NO: 587371 - DNA, 541 bp, Homo sapiens
ctgcaggccgtacagaaagcatagtggcatctgcttctgaggagacatcaggaaacttacagtcatggcagaaggcaaactgggagcaggaacatctcatggagaaagaaaaagcaagaaagaagagagagtgtagggggcaaggtgccatatacttttaaataaccagatctcatgaaacctcactcactattgcaaagacagcaccaagccaygagggatcctcctccatgatccaaacacctcttaccaggcccagtttcagcattgaggattacaattcaacatgagatttgggtggggacaaaaaatccaaattatatcactgactgagatctgctcagagccaagagggactcccagtgcaagaaaagggaaaaggagatacccagcagttcacattcccatcacagatgcctgcaatcctagctgcaagagagccccacagtcctcacaggccctaagcccattgtagggaactgtctgtaatccacatgactgtattattcaagagaaggcactcatgctgggtcctccccta

SEQ ID NO: 587372 - DNA, 541 bp, Homo sapiens
ctgcaggccgtacagaaagcatagtggcatctgcttctgaggagacatcaggaaacttacagtcatggcagaaggcaaactgggagcaggaacatctcatggagaaagaaaaagcaagaaagaagagagagtgtagggggcaaggtgccatatacttttaaataaccagatctcatgaaacctcactcactattgcaaagacagcaccaagccacgagggatcctcctccatgatccaaacacctcttaccaggcccagtttcagcattgaggattacaattcaacatgagatttgggtggggacaaaaaatccaaattatatcactgactgagatctgctcagagccaagagggactcccagtgcaagaaaagggaaaaggagatacccagcagttcacattcccatcacagatgcctgcaatcctagctgmaagagagccccacagtcctcacaggccctaagcccattgtagggaactgtctgtaatccacatgactgtattattcaagagaaggcactcatgctgggtcctccccta

SEQ ID NO: 587373 - DNA, 467 bp, Homo sapiens
cctttcttttgattgagcagtttggaaaatccctttaggagaatctgaaagtggatatttggatggctttggggcctattttggaaaagcaaatttcttcacataaaaactacccagaagcattctgagaaacttwtttgtgatgtgtgccttcatctcacagagttgaagctttcttttgattgagcagtgttgaaagagtctttttgtagaatctgcaagtggatacttcgggggctttaaggcctattttggaaaaggaaatatcttcacataaaaactacacagaagcattctgagaaacttctttgtgatgtgtgtattcatctcacagagttgaacctttcttttgattgaacagatttaaaacactcttattgtagaatctgccattggatacttggtgtgctttgaggcctatattgcaaaattaaatatcttcacataaaaactacacaatagaattc

SEQ ID NO: 587374 - DNA, 467 bp, Homo sapiens
cctttcttttgattgagcagtttggaaaatccctttaggagaatctgaaagtggatatttggatggctttggggcctattttggaaaagcaaatttcttcacataaaaactacccagaagcattctgagaaacttatttgtgatgtgtgccttcatctcacagagttgaagctttcttttgattgagcagtgttgaaagagtctttttgtagaatctgcaagtggatacttcgggggytttaaggcctattttggaaaaggaaatatcttcacataaaaactacacagaagcattctgagaaacttctttgtgatgtgtgtattcatctcacagagttgaacctttcttttgattgaacagatttaaaacactcttattgtagaatctgccattggatacttggtgtgctttgaggcctatattgcaaaattaaatatcttcacataaaaactacacaatagaattc

SEQ ID NO: 587375 - DNA, 467 bp, Homo sapiens
cctttcttttgattgagcagtttggaaaatccctttaggagaatctgaaagtggatatttggatggctttggggcctattttggaaaagcaaatttcttcacataaaaactacccagaagcattctgagaaacttatttgtgatgtgtgccttcatctcacagagttgaagctttcttttgattgagcagtgttgaaagagtctttttgtagaatctgcaagtggatacttcgggggctttaaggcctattttggaaaaggaaatatcttcacataaaaactacacagaagcattctgagaaacttctttgtgatgtgtgtattcatctcacagagttgaacctttcttttgattgaacagatttaaaacactcttattgtagaatctgcmattggatacttggtgtgctttgaggcctatattgcaaaattaaatatcttcacataaaaactacacaatagaattc

SEQ ID NO: 587376 - DNA, 518 bp, Homo sapiens
gcattctgagaaacttctttgttttgtgtgcattcaactcacatagttgaagttatcttttgattgagatgctttgaatctcctttttgcaaaatcttcacgtggatatttggagccctatttcaccctatagtggaaaagcagatatcttcacataaacaaacactacacagaagcattcagagaaagttctttgtgatgtgtgcattgaacatgcagaattgaaactatcttttcattgtacagttttgaatatctctttttgtagaatctgcaagtggaagtttggagctctttgcaccctgtggtgtagaagtaaatatgttcatataaaaactacacagaagcattcagagagacttctttgcgatgaatgcattcctcacacagagtttaatctttctttttattgagtactattgaaatcttctttttgcagaatcaycaagtggatatttggagagctttgaggcctgttttggaaaaggaaatatcttcaaattaaaactacacagaag

SEQ ID NO: 587377 - DNA, 518 bp, Homo sapiens
gcattctgagaaacttctttgttttgtgtgcattcaactcacatagttgaagttatcttttgattgagatgctttgaatctcctttttgcaaaatcttcacgtggatatttggagccctatttcaccctatagtggaaaagcagatatcttcacataaacaaacactacacagaagcattcagagaaagttctttgtgatgtgtgcattgaacatgcagaattgaaactatcttttcattgtacagttttgaatatctctttttgtagaatctgcaagtggaagtttggagctctttgcaccctgtggtgtagaagtaaatatgttcatataaaaactacacagaagcattcagagagacttctttgcgatgaatgcattcctcacacagagttkaatctttctttttattgagtactattgaaatcttctttttgcagaatcatcaagtggatatttggagagctttgaggcctgttttggaaaaggaaatatcttcaaattaaaactacacagaag

SEQ ID NO: 587378 - DNA, 518 bp, Homo sapiens
gcattctgagaaacttctttgttttgtgtgcattcaactcacatagttgaagttatcttttgattgagatgctttgaatctcctttttgcaaaatctkcacgtggatatttggagccctatttcaccctatagtggaaaagcagatatcttcacataaacaaacactacacagaagcattcagagaaagttctttgtgatgtgtgcattgaacatgcagaattgaaactatcttttcattgtacagttttgaatatctctttttgtagaatctgcaagtggaagtttggagctctttgcaccctgtggtgtagaagtaaatatgttcatataaaaactacacagaagcattcagagagacttctttgcgatgaatgcattcctcacacagagtttaatctttctttttattgagtactattgaaatcttctttttgcagaatcatcaagtggatatttggagagctttgaggcctgttttggaaaaggaaatatcttcaaattaaaactacacagaag

SEQ ID NO: 587379 - DNA, 318 bp, Homo sapiens
tggagcggagtggaatggaatggartggagtggaatggcatggagaggagcagaatggagtggagtggagtggaatggagtggagtggggtggagtgcagttgagtggagtggagttgagtggagtggatcagagtgcagtcgaatggaatggaatggagtggagaggagtggagtagggaggaatttaatggaaaggagtggattgaaatgaagtggagtggaaaggaatggaatggaaaggaatggaatgtaatggaaaggagtggaatggaacggaatggagtggagtggagtgcagaggagttgagttgagtgg

SEQ ID NO: 587380 - DNA, 318 bp, Homo sapiens
tggagcggagtggaatggaatggagtggagtgsaatggcatggagaggagcagaatggagtggagtggagtggaatggagtggagtggggtggagtgcagttgagtggagtggagttgagtggagtggatcagagtgcagtcgaatggaatggaatggagtggagaggagtggagtagggaggaatttaatggaaaggagtggattgaaatgaagtggagtggaaaggaatggaatggaaaggaatggaatgtaatggaaaggagtggaatggaacggaatggagtggagtggagtgcagaggagttgagttgagtgg

SEQ ID NO: 587381 - DNA, 318 bp, Homo sapiens
tggagcggagtggaatggaatggagtggagtggaatggmatggagaggagcagaatggagtggagtggagtggaatggagtggagtggggtggagtgcagttgagtggagtggagttgagtggagtggatcagagtgcagtcgaatggaatggaatggagtggagaggagtggagtagggaggaatttaatggaaaggagtggattgaaatgaagtggagtggaaaggaatggaatggaaaggaatggaatgtaatggaaaggagtggaatggaacggaatggagtggagtggagtgcagaggagttgagttgagtgg

SEQ ID NO: 587382 - DNA, 514 bp, Homo sapiens
tttgcctttctgtccttggcttatttcacttaacataatgatctccagttgcatacaagttgctgaaaatgactggatctcattctttttttatagctgaatagtrcttcattttgtatatgtaccacattatctttattcattcatgtgttgatggacacttatgttgctcccaaatcttagctattataaacagtactgcaacaaacataggagtgcagatatctctttaatatgctgatttccttttttgggagtatgtacccagtagtgggagtgctggatcataaggaagcagcgctgttttttgtggaaccaccatagcacctgtactaatacacattcccaccaacagtgtacgagggtttccttttatccatatcgtcgacagcatttgctattgcccatcttttgaatataagccgttttaactggggtgagataatatagcattgtagttttgatttgcatttctctcatgatcaatgatgttgagcaacttttcatatgcctg

SEQ ID NO: 587383 - DNA, 498 bp, Homo sapiens
gttggtttttttgtggggttgtcttacagtgacactagtctgtgtatttacgtgtgtttttgtattagctgatagcagtctttcctttctatatttagtgctccattcatgatctcttctaaggcacatcaagtggtaatgaaatccctcaagatttgcccaggtgaacagtatcttatttctcctatgcttaggaagcctagtttggctggatataaaattcttggttgaaaactttttttctttaagagtgctgaatatatgctctcaaactcttctggcttgtagggcttctgttgagaggtcttctgttagcctgatggtgttcctcttgtagttgaccagccctttctctctagstgcctttaacattttcttctttcatttgaaccttggacaatctgacaattatgtgtcttggggatggcattcttgtgtagaatcttgcaggagttctctgtgtttcctgaattggctgttgacttctctagcaaggtt

SEQ ID NO: 587384 - DNA, 498 bp, Homo sapiens
gttggtttttttgtggggttgtcttacagtgacactagtctgtgtatttacgtgtgtttttgtattagctgatagcagtctttcctttctatatttagtgctccattcatgatctcttctaaggcacatcaagtggtaatgaaatccctcaagatttgcccaggtgaacagtatcttatttctcctatgcttaggaagcctagtttggctggatataaaattcttggttgaaaactttttttctttaagagtgctgaatatatgctctcaaactcttctggcttgtagggcttctgttgagaggtcttctgttagcctgatggtgttcctcttgtagttgaccagccctttctctctagctgcctttaacattttcttctttcatttgaaccttggacaatctgacaattatgtgtcttggggatggcattcttgtgtagaatcttgcaggagttctctrtgtttcctgaattggctgttgacttctctagcaaggtt

SEQ ID NO: 587385 - DNA, 611 bp, Homo sapiens
attgactcacagttcagcatggctggggagtcctcgggaaacttacaatcatgggggaaaaggaagcaaacacgtccttcttcacatggcagcagcaaggagaattgccaagcaaaaggggaaaagccctttataaaatcgtcagatctcatgattattcactattattagaacaccatggaggtaaccgcctccatgattcaattacctcccacggggtctgtcccacaacacgtagggattataggaaatacaattcaatatyagattcgggtggggacacagacaaatcatatcagtgctctattgagaaagaggaggacagtaggctgacaatgtcaccctctatgtatttttacctctttaagccttctcttaagcaccacctattaaattacaggagcaagtcccacatgtatcattgaaaatgcttcatctgaaaacaaagtttttatgctccatgaatcgggagtcctcctgatactttgctattattgttaagtgccgcagaatatgaatagtgtaggttggaagagttgttaagttttaacgttttttgttattttctttttaaattatttattgttcatttttatgttattcatatttct

SEQ ID NO: 587386 - DNA, 585 bp, Homo sapiens
agcttctcttctcaagacctgtaatttaatccccacatgcaaacatcatttacaaaataaggtaataatcttattttggaggacaccatctagaccattacaatctgccctctgttactcaaaattcacatctgttccacattcacagtatattcaccccaacccaacttccccgaaatactcagcctatttaaagcattaatgctaaayccaaaatctcatctaaatattattagttcaaaggtgccaaatttcatcatataattcatctaaatcaggtatggataggactttggatatgatccatcctcatgcaaagtttttctattacatttgtggacctatgaagccagaaaaaattatctacttccaaaaggcttatttatctacttccaaattgtctacttccaaaatggtacaacaggattactataacagtcacagctatttccattttaaaaatagaacatggaataataaagtggttattgatcccaagcaagttctaaatccaacagggaaaatttcattaggtttcaaggcctaagaatcatcccctatcacttgaggctctatttctaggtc

SEQ ID NO: 587387 - DNA, 585 bp, Homo sapiens
agcttctcttctcaagacctgtaatttaatccccacatgcaaacatcatttacaaaataaggtaataatcttattttggaggacaccatctagaccattacaatctgccctctgttactcaaaattcacatctgttccacattcacagtatattcaccccaacccaacttccccgaaatactcagcctatttaaagcattaatgctaaatccaaaatctcatctaaatattattagttcaaaggtgccaaatttcatcatataattcatctaaatcaggtatggataggactttggatatgatccatcctcatgcaaagtttttctattacatttgtggacctatgaagccagaaaaaattatctacttccaaaaggcttatttatctacttccaaattgtctacttccaaaatggtacaacaggattactataacagtcacagctatttccattttaaaaatagaacatggaataataaagtggttattgatcccaagcaagttctaaatccaacagggaaaatttcattargtttcaaggcctaagaatcatcccctatcacttgaggctctatttctaggtc

SEQ ID NO: 587388 - DNA, 575 bp, Homo sapiens
ttgtgcttctggactgaaaacttgtttctttggtggtattttagcacccatgccagcattatcgttatttgctccatactgattgtatcctggttttcatgtttcttaacatgagacatttcattattacgatctttcttattaaaattgttttattttattattcgattaacttcttggcacagatgtactttttatgctaatcatagatttgtgcctttttaactttttattttccatctttttcatgatagttcaactttgcttggttattttatttttttgctgtatacttataaaacctgtcttccatatttagtcataaaagattcattcaccttagagattccaatattcatttttttaaaagcctacagtccatctgttaccatctcctcagatattaaattttattaccctttgttgtttcctgcaacttttggcagaagagactattctccagtaagctcacttacttcatatggcaagaaatatatcaagtttttgtcagcattygctatagacaaattattaagcatgtccaaaaaaatgtttatatttaccactttttatgt

SEQ ID NO: 587389 - DNA, 514 bp, Homo sapiens
tcccacagccagcattatactggacaggcaaaagcaagaagcattmcccttgaaatcaggcacaagacaagcatgccttctcccaccactcctattcaacatagtattggaagtcctacacagagcaatcaggcaagaaaaaggaataaagggcatccaaatgggaagacaggaagtcaaactatctctgttttagataacataattctatatctagaaaaccctagcccaatagctgctccagcagataaacaacttcagcaaatttgcaggatacaaaatcaatgtacagcctcactagcattttgatacttcaataacagccaaactgagagccatatcagaaaggcaatcccattcacaattgccacaaaaagaataaaacacctaggactacagctaaccaaagaggtgaaagatctctacaatgaaataataaaaaactgctcacagaaatcagagaagatacaaacaaatggaaaaaaaatcccatggtcataaataggaagaatca

SEQ ID NO: 587390 - DNA, 387 bp, Homo sapiens
caaactatctctgttttagataacataattctatatctagaaaaccctagcccaatagctgctccagcagataaacaacttcagcaaatttgcaggatacaaaatcaatgtacagcctcactagcattttgatacttcaataacagccaaactgagagccatatcagaaaggcaatcccattcacaattgccacaaaaagaataaaacacctaggactacagctaaccaaagaggtgaaagatctctacaatgaaataataaaaaactgctcacagaaatcagagaagatacaaacaaatggaaaaaaaatcccatggtcataaataggaagaatcaatatctttaaaatggctttkctgcctaaatcaatttacagattcaatact

SEQ ID NO: 587391 - DNA, 546 bp, Homo sapiens
aaatatattttcatatttgactgttttggaggcaaaggaagacatagktgtatttgtagcctacaacagaatgaacttatacacttattgtccaaactgggacatttttgagagtgaaaaaagatgccaaataataaccatgctatttgatttacaacaggcataaagtagtactttccccagaatgctggatataacagtcactctgaataagaggagacagctaggggacaattgcagactatatccttgctaacaggagagtaagcacttggtaaactcagacaagagaggagaaacgaaatcaagcgcataagcagagtagttagctttgataagaaagagggagtgttcttcctaaacatcaatagaaaagtaagagtagcaacacaatggcccagaggcatttttaaatggaaagagggcactaaaggatttatctttagagcacctcagtcgttttagtacggtaggcaggaaggtcacctaatgaaagtaaaaggtactgctggggatttgaagattgcagaaagcttttcaaaggcc

SEQ ID NO: 587392 - DNA, 594 bp, Homo sapiens
aaaaaaattaatgaccttctaatttgtcttcataagtctatccttaccacttgtacaatctattcttaaaagaaaaaccaaagtaatccttttgaaatgtaagtaagctcatgatagttctctggcaaaaactggccatttcctctcagtaaaatccaaaatccttaaaatgtcctgtwagtcaagatgactagacttagaggactagcctagatgacccaggctcccatggcttctctgatttctcctacttttctcatcctggatctctacactgcagcaacactggcctccaaacactttctggaatatacaaagtaaactatctcaggactaagctccagctctcctctttgcctacaatgtttttgtcctaaatagctgtttggtcaactcacacctccttcaagtctttgctcaaattttaactcctcaatgaaccctacccttaccatgtcatttaatattgcacctgttccactcacactattgcctgaacttgtaaacctaattgccctcctctacttatactgttttcctgtataatttatcattacctgtatattttgttattttctttttttacatttattt

SEQ ID NO: 587393 - DNA, 250 bp, Homo sapiens
tctttggatatgtaccgccttggagaaakgcataaatcatttttatacatggaactgtcttagaaaactagagattttagtacaaagaaagcaattcactgaaagaatgcccacatgccattgttataagttactatatatacacaagaggaacttacaaagaacccctgttttacagttactgatgtacattagcatagtgggcttacaccttctccaggcctgagttacacttagtattacaaataat

SEQ ID NO: 587394 - DNA, 460 bp, Homo sapiens
gaggctgctgcggtctcgccacatcttcaggctctgtctctgtttctagtgctcttgttatttccaccatatctgcagttacttcctacasagaagtcgtgaacccctcagtgtcatctgtgagggttggaataatcttcccaacttctctctctcttttttttttttttgagatgaaatcttgcctgggctggagtgcagtgatgcgatctcagctcactgcaacctccacctcccgggttcaagcaattctcctgcctcagcctcccaagtatttgggattacagtcactcccgaccaggcccagctaattttttgtgtgtttttagtacagagaggatttcactttgttggccagtctggtctcaaattcctgacctcgtgatccacgtgccttggcctcccaaagtgctgggattacaggcatgaaccaccaagcccggccccaacttctcctaat

SEQ ID NO: 587395 - DNA, 525 bp, Homo sapiens
atagctttatgaaatatatttttaagtgataagacttgaaagttgaaattattctgtgatccaagggcactagaatgaatgttgggttagtaggcatgaaaacaatattcagctctttatacatctctgtaaaagcccttgagtaccaggggcattgtcagtgagcggtaatactttgaagtaatcttatttcttgagcagtaggtgtcaacagtgggcttaagatattcagtaaaccatatttgtaaaccgatagtctgtcatccaggctttgttcccatttgtagagtacaggcagagctgtgttttatcataattcttcagggcccttggattttcagaatagtaaattatcattggtttcaagttaacatcaccaactgcattagcccttaacaaaagagtcagcatgtcctttgaagccttaaagccaggcatcaactccwctctagctgggaacatcctagatggcatctccttctagtagaaggctgttttgtctccattgcaaatctgtttagtgta

SEQ ID NO: 587396 - DNA, 386 bp, Homo sapiens
cgagggtctaaatgtttgttcctcacataggattccagaacactcctgctgttgtttgtatgtttgtctgtcacataggattccagaacactgtggctggggtatgtatgtccctgatatgggatggaagaacgctgataccaggttctgaatgtttgtctgtcacacaggattccagaacaccactatgagggtctgaatgtctctccctcacaaaggattccagaaaactgctgcaagggtctgaatgtttgtccctcccataggactccagaacacagctgcgagggtctaaatgtctgtccctcacatacgattgcataacactgttaggagggtcaggatgtttgtccytcatgtagcattccagaacactgctgtcgtgg

SEQ ID NO: 587397 - DNA, 542 bp, Homo sapiens
tgatgctagggtctgtatgtttgcccttaacatatgatttcaaaacactgctcctgggttctgaatgtttgtccttcacataggaatacagagcactgctgctggagtctgaatgtttgtcactcacatagtattccagaacactgctgcgaggatctgaatgtttgtccctcacatgggattccagaacactgctgcgagggtctaaatgtctgtccctcacataggtttccagcacaatggtaccaggttctgaatgtttgtccctaacatgggattccagagcactcctgctgtgctctgaatgcttctccctcacataggattccagaacactgctacgagggtctaaatgcttatccctcatataggataccagaacactcctgctgaggtctgaatgtttgttccttacataggattccagaacactcctgccgtggtctgaatgtttgtccctcacataggattccagaacattcgtgctggggtctcaatgtttcccttaacttargatttcagagcactgctcctggggtctg

SEQ ID NO: 587398 - DNA, 624 bp, Homo sapiens
tgctgcaactgctccccccgccttttcactccacccgggaacctccggcctctccgctcatgtccagtgtcctctcacacttcagcccttctcccatactgcttccctcctcctagcatttccccggttgcttctctccttggcgaatttccatttctgtctccagcgctcatgcaaatgttaccttcctcctgaagtttcatcctagtctctcacaacaccctcattgttcacgtcccttcgtgaaaacaaagctaccatattacattgtatttccttcttgtgtgaaggtctgggggaagactgatgctgtgggctgaattgtgtcccccccaaaaatgatatgctraagtcctcactctctatacctgtgaatgtgaccttatttggaaatagggtcttcgcagatgtcatcaagttaaaatgaggttataccgggttagggtgggtccaatccagtgactgacgtccttataagaagaaggagatttgaacagagacacagatacagagggagaaggccgtgtgatgatggaggcaaagatttgcgtgactgatacatctacaagctaaggatgtcagactggcggcaacctctagaagcaaggagagaggcacagaaaa

SEQ ID NO: 587399 - DNA, 455 bp, Homo sapiens
ttcactcttgtcactgaagctggcatccagtggtgcaatctcagctcactgcaacctctgcctcctgggttaaagcaattctcctgcctcagcctcctgagtagctgggattacaggcacctgccaccacacctggctaattttttgtatttttagtagagatggagtctyaccatgttagtcaggctggtcttgaactcctgatctcaggtgatccacccacctcagcctcccaaagtgctggattacaggcgtgagccactgtgcctggcccgggtttttaattttttaaatttaattcaatttaatttaattttaggttccaggatacatgtgcagaacgtgcaggtttgttacataggtaaacatgtgccatggtggtttgctgcacctgtcaacctatcaactaggtattaagccctgcatgcattagctatttgtcctgatgctctccc

SEQ ID NO: 587400 - DNA, 528 bp, Homo sapiens
atatgcataggttatatgcaaatactatccattttatgtccaagacttgaacatccgtggactttggtgtccttgagggggtcctgaaaccaatcccccacagacactgagggatgaatgtacattttactatattcattaagactctgttcactgaccaagctaatggacactagcccaaatcactccatggccatcatgtctaattaagaagtgatgggatgcttccaacaaaagccttaccatcaaatttaccacagcccatttctgtgtgttcatgtagtcaacaaacaagtattgagcaccagtgataaactagttatagtatcccctgcccacaaggaacccattgtggtgaatgatgtgtcactcagcaatcatgacatcatgattatgttaggtggaattataatgagtagatgatatmaaatgaaacttagtagagaaaatctaagtctgcctggggagtcaaggaaaatttcaaggagatagcttctaaatcgagccatgaatatcatgtaagagttt

SEQ ID NO: 587401 - DNA, 562 bp, Homo sapiens
gtgttagcttgggttttgttgttattttgagacagagtctcactctgttgcccaggttggagtgcggtggcacaatcgttgctctttgcagcytcggcctcatgggctaaagtgatcctcccacctcggcaactgagtagctgggactagaggtgcgtgccaccaggcccagctaattttttttttggagagatgaagtctcactatgttgcccaggcttgtctcaaactcctaggctcaagcgatttccccacctcggcctcccaaagtcctgagattacaggcatgagccaccacacccagccttgttggggtttgtttgttttgtatttttcagttttaatctaagatatgtaggtataaatgtatttttatttaggatttggggagattcttgaatctgaaagatgatgaaatctttcatcattttggaaaattcttagatattctctcttcaaacattccctttccacgtttttctctattttgtctttgtggaattccaattagataaatgttctttcttctcaagctctcatctgtgttatttagacttgctttc

SEQ ID NO: 587402 - DNA, 562 bp, Homo sapiens
gtgttagcttgggttttgttgttattttgagacagagtctcactctgttgcccaggttggagtgcggtggcacaatcgttgctctttgcagcctcrgcctcatgggctaaagtgatcctcccacctcggcaactgagtagctgggactagaggtgcgtgccaccaggcccagctaattttttttttggagagatgaagtctcactatgttgcccaggcttgtctcaaactcctaggctcaagcgatttccccacctcggcctcccaaagtcctgagattacaggcatgagccaccacacccagccttgttggggtttgtttgttttgtatttttcagttttaatctaagatatgtaggtataaatgtatttttatttaggatttggggagattcttgaatctgaaagatgatgaaatctttcatcattttggaaaattcttagatattctctcttcaaacattccctttccacgtttttctctattttgtctttgtggaattccaattagataaatgttctttcttctcaagctctcatctgtgttatttagacttgctttc

SEQ ID NO: 587403 - DNA, 216 bp, Homo sapiens
cctattggcacagctgccagcatttgcccgtgcaagcttccagcttgcttatctgtgtctgcagctcgattttatgggttgctctttgttagaaaagaaattgattttggkgctgcttttcattaaaaggaaaatcttaccaaggacttccttaccctcactatctgcctaaataatttcttcctaactcctatatcattacctctcccctcccct

SEQ ID NO: 587404 - DNA, 588 bp, Homo sapiens
atgaggttaaataccttgtccaaggctagctagtcaaaagtggatctggccccaaagtctaacttcctaactaaaactttacagtggaacagctttctccttcttttttatctggtcaactcctgtgtacccttcaaagttctactgaaatatcacttcctcagtgaagtcttccctgatctctttgataaagccaatcctactgtcactccactccagtcaattctatttcattattctggttgatttagtgttttatcatgacttgaaatcattttacacacacacatacactccttacttatgtgtttgcctactgtctggctccaccagaatataarctccatgtgaactcaggctttatctgtcttgtttactgttgtatccccaggatttaaatctgtggttaatgcacagtaggaagaactaacacttctaccagcagatttaggctggttgttaggctttgcaatatcaaagtccctttaggcataaaaaagaaagggtggggccaggcgtggtggctcacgcctgtaatcccagcactttgggatgccgaggcaggcggatcatggggtcaggagttca

SEQ ID NO: 587405 - DNA, 588 bp, Homo sapiens
atgaggttaaataccttgtccaaggctagctagtcaaaagtggatctggccccaaagtctaacttcctaactaaaactttacagtggaacagctttctccttcttttttatctggtcaactcctgtgtacccttcaaagttctactgaaatatcacttcctcagtgaagtcttccctgatctctttgataaagccaatcctactgtcactccactccagtcaattctatttcattattctggttgatttagtgttttatcatgacttgaaatcattttacacacacacatacactccttacttatgtgtttgcctactgtctggctccaccagaatataaactccatgtgaactcaggctttatctgtcttgtttactgttgtatccccaggatttaaatctgtggttaatgcayagtaggaagaactaacacttctaccagcagatttaggctggttgttaggctttgcaatatcaaagtccctttaggcataaaaaagaaagggtggggccaggcgtggtggctcacgcctgtaatcccagcactttgggatgccgaggcaggcggatcatggggtcaggagttca

SEQ ID NO: 587406 - DNA, 588 bp, Homo sapiens
atggacacagggaagggaacatcacacactggggcctgtcacagggtggggggctaggggagggatagcattaggagaaatacctaatgtagatgacaggttgatgggtgcaacaaaccaccatggcacacgtatacctatgtaacaaacctgcacattctgtacacgtatcccagaacttaaagtataataataaaaacaatgggtcatcctaacacagaccagttccagctttacccactgttcaggttgggacgggagccctcctgcaaatgggctccagacagctgacattctgcttcagtgggtggtctaatatcaaacacagagtgtctatctcccttcaagctgcctggtgtctctgccacaagcctcagtgacccaaactctcttcccttatctacaaattccccacctgatttggtcctgcctaccattccaacttcatcttttatctccacctcccactccctcgactcacccacagacactggactccttgtttcttcaracaggccaagcttgtacctgtcttggggcctttgcatccgtatcccctctgaagtggattgctctactgcaaggttt

SEQ ID NO: 587407 - DNA, 639 bp, Homo sapiens
tgatttacaatttaacaggaccatattaggagtggtttgcaaaagagattgggcagaaacagagagaagagttaagagactaatgcaataacagaggtgaaagtttatgrgggcttaaacaagatgatgacaataaaaatgcgaagatgtgaccagatagagtctaaatgtattttgcagggagtcaacaggatttactaatgaattgaaattgcaatggaagaaacagaaattaagaatgactccagaggtttcagcctaagcaactggaataattgcctttaattgatgggaaagactaaagaagatgcaggtttggggagggcaagttgttggggaataactggagctcattttgggacatgttaaattttgcattcattttcaacgtcaagtggagatataaagcaatcagtaaaatatcagtctaggctgaaatcagatgtaaacatgggcatcacttctacatagatgctatctaaaaccacagaacaagatcagatcacgaagggagtgagtataaacagaaagaaaagtccatgaagagagtcctgggacattttaatgtttagaactcaggcaagtgaggagaaaccagcaaagagagaattagaggaaatccaggatatatacataatg

SEQ ID NO: 587408 - DNA, 639 bp, Homo sapiens
tgatttacaatttaacaggaccatattaggagtggtttgcaaaagagattgggcagaaacagagagaagagttaagagactaatgcaataacagaggtgaaagtttatgggggcttaaacaagatgatgacaataaaaatgcgaagatgtgaccagatagagtctaaatgtattttgcagggagtcaacaggatttactaatgaattgaaattgcaatggaagaaacagaaattaagaatgactccagaggtttyagcctaagcaactggaataattgcctttaattgatgggaaagactaaagaagatgcaggtttggggagggcaagttgttggggaataactggagctcattttgggacatgttaaattttgcattcattttcaacgtcaagtggagatataaagcaatcagtaaaatatcagtctaggctgaaatcagatgtaaacatgggcatcacttctacatagatgctatctaaaaccacagaacaagatcagatcacgaagggagtgagtataaacagaaagaaaagtccatgaagagagtcctgggacattttaatgtttagaactcaggcaagtgaggagaaaccagcaaagagagaattagaggaaatccaggatatatacataatg

SEQ ID NO: 587409 - DNA, 619 bp, Homo sapiens
agatgtaaacatgggcatcacttctacatagatgctatctaaaaccacagaacaagatcagatcacgaagsgagtgagtataaacagaaagaaaagtccatgaagagagtcctgggacattttaatgtttagaactcaggcaagtgaggagaaaccagcaaagagagaattagaggaaatccaggatatatacataatgtaaacttcctatacattaaatttgttcacctaattatgcaggtagccatgcatctattcatctagtatagcaaaacaagttaagaaaatgggctctagaatgagattaacctgaattcaaatccagattccctcacttaccagctctgagaccctgggaagttacttaaccttgctgtccctgctttcttgaactatgaaataaggagaatagcaccaaccttacagaattgtgagaattaagtgaagtttcgtatctaaagcataaggcttggtataccaaaagctcaatagagaatgctatggtttttataattattattcaagtactttttgagcacctgtaatggatgcacaaataaccatgtcaggtacagggaagcggattctacctcagaaggataacaacctaaccaacaat

SEQ ID NO: 587410 - DNA, 449 bp, Homo sapiens
tttggcctaagcccaagaatgaacaaagggcagcttggaggttaaaggcaagattgagtcagttargtcagatctcttttactgtcacaattttatcactgttctaattttttgcaaaggcaatttcatcgtggccctctttttgacctcataagcagaactttggccacccgctgggacctgctggcttatgccctgtgttggaatggacacttgagtcaggccctcattctggccacagggtataggaaatagtgctccaggaagattagagctgcttggagatggttgagaggggccaatttggctccaaatattgaggcaagtggtgaaaatggagagctgcagcactgggctatggacaaggcatccaaggaagtaaccagccagaagatatcacctgcctatggcagctgcctaaatggactgctgaggaataaatgggtcct

SEQ ID NO: 587411 - DNA, 449 bp, Homo sapiens
tttggcctaagcccaagaatgaacaaagggcagcttggaggttaaaggcaagattgagtcagttaggtcagatctcttttactgtcacaattttatcactgttctaattttttgcaaaggcaatttcatcgtggccctctttttgacctcataagcagaactttggccacccgctgggacctgctggcttatgcccygtgttggaatggacacttgagtcaggccctcattctggccacagggtataggaaatagtgctccaggaagattagagctgcttggagatggttgagaggggccaatttggctccaaatattgaggcaagtggtgaaaatggagagctgcagcactgggctatggacaaggcatccaaggaagtaaccagccagaagatatcacctgcctatggcagctgcctaaatggactgctgaggaataaatgggtcct

SEQ ID NO: 587412 - DNA, 507 bp, Homo sapiens
aaactaggctagttgcatttgcagagttattaaaaagagcaatggctttggcatcaaagacttgtctacttgaatcccagctctggcatttgctacctatgtgatctcaaataattgtgttatgctttctaggattcagattcatcatctataaacaaggaatactagtacctacattaaagggctttcctaagaattatacataaattgtttatgtatattatatgtgtatatattgttcttacaccattatgcctctttatcaccccaatttacaataattattccctcctccaatattctgtaagactgttgtcattccactgaactcagtattgtagtttaaccatagttaatgctgttgcttgggtatcaaagcccattaaaagctcttaaaggcagatgacacatggtcctcaacataataaacactcatgattgatctgtggtctgaaaagaaagcttagcacraggtggaataatttctagaaaatagaaaaaatattg

SEQ ID NO: 587413 - DNA, 473 bp, Homo sapiens
aaccctggactcagccagacttgaggagacaacaggttcaccaattgtggagaggagctacccaccacagagtctcctctctgctgagagctgaacactcaacaggatgaccagctgcagagaggagctacccaccccagggtctcctctctgctgagtgctgaccattcaaagggacaccccaactgtgtagagtagctaccctactgtgggtcttctctgagctgttctgttactcaataaagctcctcttttctttactcactctccacttgtctgcctacctcattyttcctcaaggcagaataagaacttgagacccactgaatggtgggactaaaagagctgtaacacaaacagtgctgaaaaatgttccttgcttgccaggttgtgagcgacaagaaaaagggaagaaagaaggagagaagagctgctgccttttggatatcccaggcctaggagctccccaagcc

SEQ ID NO: 587414 - DNA, 571 bp, Homo sapiens
agatgggaattttcagccctctccacctccatctctggggaagggaagggggctgaagaccaagttataaaaactctcggaagtatgagcttcagagagcttgtgggctggcaaacgcttagatgtgcatggagaatggcattcccagagagggcatggaagctctgcacactccttacacccagctcttccatgtggctatttctgagttgtatcctttataacaaaccagtaaactttagcattttcctgaattctcggagttattctaatgaattatcaaacctgggcgagggtatgaaaactccaaaatttgtagccaagtcagacacaagtgcagatgactgggatctgggacttgcaattagcatctgaagcgagagcagttttgtgagattgagcccttaagcctgtggagtctgaggctaactcgagraagtaagtatcagaatagaactgagtttttgaaaacccagctggggctggagaatcagagaactggtatagaagagaaccgcatattccacaagtacaggttagccactgatacatgaacacagtctactgagca

SEQ ID NO: 587415 - DNA, 274 bp, Homo sapiens
ctttgctttgctaggagcagaagtgacacttactctcaatgcatccctctttattctctcaccaagcagggtaaatgcagccactgccttttactgttggactttgtaggcattaggaaaatatggccacttgtgttttccaaactttaaaggactcrtctaaagctttccattcattcctttcaagatccttccttttggcttagagcaatgggaagaaaacaacaacaacaacaaaaaacactctttcatcaatggatgaagaaagagtaaa

SEQ ID NO: 587416 - DNA, 585 bp, Homo sapiens
ctaaagaatgaatacatataaacataaagttggaaataatagatattggggaagtgaaaaggggggaggctaggaaagtggtgagggttacaaaaaattacctattaggtacaatgttcaccatttgggtgacgagtacacaagaagcctaaacctcaccaatacacaatatattcatgtaacaaacttgcagatgtacctcctgaacctaaaattgtaaataaatacaaattaagaaaaaaataataaaaatgyctgcatatgtagattgactatcaggtgagttttctgtggcatgtatactctgtacaatcactaaaactggatttctttgagttatagaattataaaacttaagacaaaccttaagagacaaagaaaacagagggcgaggtgacaaatcagtaacctgtctgagccaacactcagtaatctgtcctcctcacttctgagatctctcacttggagttctcaaaccccaaacagagaagcgagctttgcggcttaagagactctaatgaaatggtgttagtctgcagccctcagctatgagactaacttacaaaagttagacagtcaccaaaa

SEQ ID NO: 587417 - DNA, 626 bp, Homo sapiens
cagcaatcctacttctgggtatatatccaaaggatttgaagttggtatatcaaagagatatctgcatccccgtgtttactgttgtgctattgtaatagctaagakatggaagcaacttaagtgtctatcaacagatcaatggataaagaaaatatagtatatgtacacagtggaatactacgcagccttaaaaaagaagaaaattctgtctgtggataaaataattgcaaggtgcatttcacatgcatggttttggttgattccaagtacagaattagcaaggacaaggttttggagagattacggcatatttcccaacagtaccatcaatcattagtaagggatttaaaatttaatgcatggaattcatggcttaaagagggcagttaaatataaatggatgaatcggagatatgaggttaatgatgtcacatatatcactctctgccttcattaaccctaatcttctgcagaccctacaggcttttaaactcaattagagctcttaccacttaccctttgtggaaataatcttgctgccttatgcctgacatttagtgtgtcagagctagatggttcatccaccttcagagtattaaaatgattgcatttcctatgactatgtg

SEQ ID NO: 587418 - DNA, 626 bp, Homo sapiens
cagcaatcctacttctgggtatatatccaaaggatttgaagttggtatatcaaagagatatctgcatccccgtgtttactgttgtgctattgtaatagctaagatatggaagcaacttaagtgtctatcaacagatcaatggataaagaaaatatagtatatgtacacagtggaatactacgcagccttaaaaaagaagaaaattctgtctgtggataaaataattgcaaggtgcatttcacatgcatggttttggttgattccaagtacagaattagcaaggacaaggttttggagagattacggcatatttcccaacagtaccatcaatcattagtaagggatttaaaatttaatgcatggaattcatggcttaaagagggcagttaaatataaatggatgaatcggagatatgaggttaatgatgtcacatatatcactctctgccttcattaaccctaatcttcygcagaccctacaggcttttaaactcaattagagctcttaccacttaccctttgtggaaataatcttgctgccttatgcctgacatttagtgtgtcagagctagatggttcatccaccttcagagtattaaaatgattgcatttcctatgactatgtg

SEQ ID NO: 587419 - DNA, 437 bp, Homo sapiens
agatgggatactaagaagtcaagaagcaacataaaaaatcatgaacatttgagcmtaaacttctctaagctaagagattctgttcccaaagatgctttttatcatggtacttaggctcaggaggcgagttctcctttttggtgagggtggagaggaaagataggagtagcaggtggaggagtgggagaaatggttttaagtcatgatggcccatgggcaagggttcttcggatggcaccattaggcaccttctgatagcgtcattatgcacctgccatcaggtgtacgtccgtgccatgactgagtactggccccaggaggatcccgacatcccctgcatggacgctggattgcctttccagaagggggacatcctccagattgtggaccagaatgatgccctctggtggcaggcccgaaaaatctcagaccctgct

SEQ ID NO: 587420 - DNA, 577 bp, Homo sapiens
tacctccaccccaaccaccataaaatgaggcccagcaccttgacgggctctgggyacaggatgtggcatgtgcctcactatggccttaatcttggctaacctacagactggcatccttttaatagggcccagtccaacaggctgagttagaagctgtccagcaagcttatgtcaggggctctgcaatcctaatgacttttttgagctatgaatctgtactgattagagcctctgcctgaagacaccctttggggttttggacttgtttccctctgacatagctatcaggtacactctttttgaaaagtagctattaccttgagtaactagtagcaagaggtactgagctcttctcaaaagtgaacactctagctgaggagaccttgtgactctttgactttttcccatcttgaggtgggtcaagttggactcagctactaacaaggtagaaagggcccaacaagcctcacttgtaaaatggaaatggtagattcaagaacacggacatcctggccccagcagtatttcatctttacagtaagaagtggcagttacccctttgggggaaaccttggcc

SEQ ID NO: 587421 - DNA, 577 bp, Homo sapiens
tacctccaccccaaccaccataaaatgaggcccagcaccttgacgggctctgggcacaggatgtggcatgtgcctcactatggccttaatcttggctaacctacagactggcatccttttaatagggcccagtccaacaggctgagttagaagctgtccagcaagcttatgtyaggggctctgcaatcctaatgacttttttgagctatgaatctgtactgattagagcctctgcctgaagacaccctttggggttttggacttgtttccctctgacatagctatcaggtacactctttttgaaaagtagctattaccttgagtaactagtagcaagaggtactgagctcttctcaaaagtgaacactctagctgaggagaccttgtgactctttgactttttcccatcttgaggtgggtcaagttggactcagctactaacaaggtagaaagggcccaacaagcctcacttgtaaaatggaaatggtagattcaagaacacggacatcctggccccagcagtatttcatctttacagtaagaagtggcagttacccctttgggggaaaccttggcc

SEQ ID NO: 587422 - DNA, 565 bp, Homo sapiens
tgggaaaatgagaagtgctatgagggcaagaagttgcaactgttttcttagctacctggagggagggaaaatcattttctggaagtttttttctwtgagttttgtcttagctttggctgtcataacaaagtaccatagacagtggcttaaacaacagaaatgtattttctgatacagttctggaggctggaagttgaagattgggatgccagcatggttgggttcttgcgagggttctcttcctggctttcagatggccgcgttttcactgtgccatcatctggcagggagagagagaacacatgaactctgatggctcttacccagacgctaatgacatcttgaggcctctacctcatgaccttaacccagttacctcccaaaggccccatcttcaaatgccatcaacaatggggattagggcttcaacatctgaattgggggtggggacacaacattcagtccaccataaatttgtcataggaacctgaagatgaggagccaagcacagtttttagaatttgcataagttgtagattactgtaattattgtttttgcctctat

SEQ ID NO: 587423 - DNA, 555 bp, Homo sapiens
attcactcaagaaaccaccgcctatctgtgaagcacagtctatctgtaaagctccctcacaataaattcatctcagaaatatgtagtctctagtgtgtgcccccaactgctgaatgggtaggcctagctcagcacagtcattcgggcattaaatatggcagaaatgtggtccacctcatgacgtgcaaacaacagttggcttgtttaatctgcactgctttgccaaggacgtgtgatttgtgaggtgctggaggggaaccaattttaagagtcagcctgagtgtcagcctcatctgtctgctctgacttttgtctgctctctagcaggcactccatctcccttttcaattttctaccctggaagtgctcccctccagggaggaagatgagtcagatatgcagctgtgatgctaaatgattcaatagagtcaaaaacaacacagaacacagraaaacgcattgtttaatctgactcaattacaagtgggcaaggtaggtgatggagggcaagtcaaaagcataacgatgtcaagctttggtagaacctagcaaacc

SEQ ID NO: 587424 - DNA, 492 bp, Homo sapiens
aatactccagtctttaacaactaatttgaagtgttccttttataacaaaaaccttaatgtattctttattgtcctactataacaatgttgttggtccctacccccaccgcataccccttggttgttaccattttggtgcactctgagcccactccagctgctagcccctccacttcctatccgaaggtatacatgttgcatgctggaagagtcagaaataatgctctctgggaagagctcttaacctgttggctctaacaggggccaagagagtgagggtatttatataccaaggttgccattggtgtataaaaaccctcatgttgccattggtgtgtaartactctcactcccttggcccctgttcccccgtgggattaagctctagttgcctacagtggttacttcttgatgacaacctattactggctttttcaccttccctgcctcaataccctactccccattgtatattaaaccagtgcaaaagtg

SEQ ID NO: 587425 - DNA, 492 bp, Homo sapiens
aatactccagtctttaacaactaatttgaagtgttccttttataacaaaaaccttaatgtattctttattgtcctactataacaatgttgttggtccctacccccaccgcataccccttggttgttaccattttggtgcactctgagcccactccagctgctagcccctccacttcctatccgaaggtatacatgttgcatgctggaagagtcagaaataatgctctctgggaagagctcttaacctgttggctctaacaggggccaagagagtgagggtatttatataccaaggttgccattggtgtataaaaaccctcatgttgccattggtgtgtaaatactctcactcccytggcccctgttcccccgtgggattaagctctagttgcctacagtggttacttcttgatgacaacctattactggctttttcaccttccctgcctcaataccctactccccattgtatattaaaccagtgcaaaagtg

SEQ ID NO: 587426 - DNA, 541 bp, Homo sapiens
acgcttccagaagaaggatcagacagtaacatttgctgttctgcaatatttgctgttctgcagcctccactggtgatacccaggcaaacagggtcagagtggaccyccagcaaactccaacagacctgcagctgacggtcctgactgttagaaggaaaactaacaaacagaaaggacatccacaccaaaatctcatctgtacatcaccatcatcaaagaccaaaggtagataaaaccacaaagatggggagaaaccacagcagaaaagctgaaaattctaaaaatcagagtgccgtttctcctacaaaggaacacagctcctcgccagcaagggaacaaagctggacagagaatgaatttgacgagttgagagaagaaggcttcagattatcagtaataacaaacttctccgagctaaaggaggatgttcgaacccattgtaaagaagctaaaaaccttgaaaaaagatcagatgaatggctaattagaataaacactgtagagaagtccttaaatgacctgatggagctgaaaaccatgg

SEQ ID NO: 587427 - DNA, 617 bp, Homo sapiens
tgtgttcccaaaaagatatgttgaactcctaacctggagtacttatgaatgtgaccttatttggaagcagggtctttgcagatgtaataaagataagataaggtcattaggatgaaccctaatccagtatgactgctgtccttattagaatagacacagatacagagatacacagggggaaagtgctgcatgacgatagaggcaaatattggaatgatgcatctacagccaaggaatgccaaggactgtcagcaaccactgaagtgaggggaaggtcatgaaacagactmtccctcagagccctggaaaaaggaatcaaccctggccacatcctgattgcagactgctcgcctccagacccataagagaataaatgtgctgttttcagccagccagtgtgtggtactttgttacagcagtgctaggagacaaatacaaatgctctgagtttcacctatacctgatttagatgacatttaggaacttctgagttgactatatttggatgaaattttggacttatgaattgatgctggaatgggtgaagtcttttgggaatattttgtttacaatggtctcatcccctcaaaaaagaacagaagtagactggccttaaa

SEQ ID NO: 587428 - DNA, 452 bp, Homo sapiens
  misc_feature 155: n = A,T,C or G
ataggaagaatcacctttgttagaatggccatactgcccaaggcaatttacagattaattactatttctatcaagcttccaaaggcattcttcagggaactaggaaaaactattctaaaattcatatggaaccaaaaaagagcccaaggcaatcntaagcagaaagaaaaaagccgggggcatcacatttcccaacttcaaatgatactatcaagctaaagtaacmaaaacaacttggcactggtacagaaacagacacatataccaatgtagcagaatagaaaacccagaaataaagccacacatgtaaaactatctgatcttcaacaaagttgacaaaagcaagaaatgtggaaaagactccctattcaataaattgtgctgggataattggctacccatatgcagaagattgaaactggactccttccttaccctatataaaaaaatca

SEQ ID NO: 587429 - DNA, 587 bp, Homo sapiens
  misc_feature 395: n = A,T,C or G
aacttcagcaaaatttcaggatacaaaatcattccacaaaaatctgtagcatttctacataccaacaacatccaaggtgagaggcaaatcaagattgcaatcacatttacaatactcacaccaaaatttacctaggaatacagctaaccagggaggtgaaagatctctataacaagaattaaaaacgttgctgaaaaaaatcagagaggacacaaacatgaaaacattccatgctaatggataggaagaatcacctttgttagaatggccatactgcccaaggcaatttacagattaattactatttctatcaagcttccaaaggcattcttcagggaactaggaaaaactattctaaaattcatatggaaccaaaaaagagcccaaggcaatcntaagcagaaagaaaaaagccgggggcatcacatttcccaacttcaaatgatactatcaagctaaagtaacaaaaacaacttggcactggtacagaaacagacacatataccaaygtagcagaatagaaaacccagaaataaagccacacatgtaaaactatctgatcttcaacaaagttgacaaaagcaaga

SEQ ID NO: 587430 - DNA, 452 bp, Homo sapiens
  misc_feature 155: n = A,T,C or G
ataggaagaatcacctttgttagaatggccatactgcccaaggcaatttacagattaattactatttctatcaagcttccaaaggcattcttcagggaactaggaaaaactattctaaaattcatatggaaccaaaaaagagcccaaggcaatcntaagcagaaagaaaaaagccgggggcatcacatttcccaacttcaaatgatactatcaagctaaagtaacaaaaacaacttggcactggtacagaaacagacacatataccaatgtagcagaatagaaaacccagaaataaagccacacatgtaaaactatctgatcttcaacaaagttgacaaaarcaagaaatgtggaaaagactccctattcaataaattgtgctgggataattggctacccatatgcagaagattgaaactggactccttccttaccctatataaaaaaatca

SEQ ID NO: 587431 - DNA, 618 bp, Homo sapiens
  misc_feature 287: n = A,T,C or G
acaatactcacaccaaaatttacctaggaatacagctaaccagggaggtgaaagatctctataacaagaattaaaaacgttgctgaaaaaaatcagagaggacacaaacatgaaaacattccatgctaatggataggaagaatcacctttgttagaatggccatactgcccaaggcaatttacagattaattactatttctatcaagcttccaaaggcattcttcagggaactaggaaaaactattctaaaattcatatggaaccaaaaaagagcccaaggcaatcntaagcagaaagaaaaaagccgggggcatcacatttcccaacttcaaatgatactatcaagctaaagtaacaaaaacaacttggcactggtacagaaacagacacatataccaatgtagcagaatagaaaacccagaaataaagccacacatgtaaaactatctgatcttcaacaaagttgacaaaagcaagaartgtggaaaagactccctattcaataaattgtgctgggataattggctacccatatgcagaagattgaaactggactccttccttaccctatataaaaaaatcaactcaagatgaattaaagacttacatgtaaaacc

SEQ ID NO: 587432 - DNA, 618 bp, Homo sapiens
  misc_feature 287: n = A,T,C or G
acaatactcacaccaaaatttacctaggaatacagctaaccagggaggtgaaagatctctataacaagaattaaaaacgttgctgaaaaaaatcagagaggacacaaacatgaaaacattccatgctaatggataggaagaatcacctttgttagaatggccatactgcccaaggcaatttacagattaattactatttctatcaagcttccaaaggcattcttcagggaactaggaaaaactattctaaaattcatatggaaccaaaaaagagcccaaggcaatcntaagcagaaagaaaaaagccgggggcatcacatttcccaacttcaaatgatactatcaagctaaagtaacaaaaacaacttggcactggtacagaaacagacacatataccaatgtagcagaatagaaaacccagaaataaagccacacatgtaaaactatctgatcttcaacaaagttgacaaaagcaagaaatgtggaaaagactccctattcaataaattgtkctgggataattggctacccatatgcagaagattgaaactggactccttccttaccctatataaaaaaatcaactcaagatgaattaaagacttacatgtaaaacc

SEQ ID NO: 587433 - DNA, 523 bp, Homo sapiens
tcaagcagctggggagtggtgagtaaaggctccatggtggcaaatgcttgattaaaggtgctgtggcttggcagaggccagctgagcctactgagcgaggcccttctgaaatggccctcaggtgggccctggaaagggggtaagggagggaactgggcaccagaaggacggrggggaggcaaagagaggagactggaaggacacaaaaagtatcaacatcacagatctgcccggggcaagcctcacccactttattatgtctcccttctccaagccaaaaattacttttccttttattttcttattgaaaagatgtgaggacaactataaaggcagtttttgacaaaagaaaacatgccttctcaatgacaatattttcatattaacttccagtggtgaacacatattttagatggttatagtaatagctgcaataccactttttatttttttaaacttaacatctttttttttcttttttaattatactgtaagttctgggatacatgtgcagaacgtgcag

SEQ ID NO: 587434 - DNA, 412 bp, Homo sapiens
tagtttccaccagattaaaaattaaaaggtagctttcaaagccaagacccaaaagaaggccttgagctcaaggtgtctgcccttatattagaagtataagactagggagacaaaataatctattttaaaaaattaaatacaaataaatcgaaaatgcattcaaatgtctccaagtggaaatgtgtctaagtatattaaatattcctgctttacttatatcaatcaagaaatgaggataaaaaactttcaagaaaagcaaagtgatttgagatgccagtaatacaaattaatctcttgggttrgtaattcagctgaaagtgtaacgacaataacaaaatgtaaattcaaaggaaatttaaaagcctgaggagttatttcagtggaaattcttaataaaactattatattatag

SEQ ID NO: 587435 - DNA, 412 bp, Homo sapiens
tagtttccaccagattaaaaattaaaaggtagctttcaaagccaagacccaaaagaaggccttgagctcaaggtgtctgcccttatattagaagtataagactagggagacaaaataatctattttaaaaaattaaatacaaataaatcgaaaatgcattcaaatgtctccaagtggaaatgtgtctaagtatattaaatattcctgctttacttatatcaatcaagaaatgaggataaaaaactttcaagaaaagcaaagtgatttgagatgccagtaatacaaattaatctcttgggttagtaattcagctgaaagtgtaacgacaataacaaaatgtaaattcaaaggaaatttaaaagcctgaggagttatttcagtggaaattcttartaaaactattatattatag

SEQ ID NO: 587436 - DNA, 503 bp, Homo sapiens
agtggaaaatccatatataacttttgactcccttacaacttaactactaatagcctactgttgactggaagccccaccaataacataaacagtcagcaaatatttcatgttttacaaaaagtgcaaagtttttgcacctgctggtgtggtttcagcaatggcttcatgaatttttctttcttcttttctttaacaatagtccttatgctggattcatttatcttgaaatggtgggcaacctcaatctatggtacatatcaagcaactcaacttattcttgtaatgtcataatttttctctgtttcttaggagcacttctagcatcactagtggcacttcgtacaggtcccatggtgttattcaaggtttacactrcgaagctcaatgaaaaatatacaagggctgggcgcagtggctcacacctgtaatcccagcactttgggaggagaggatccctgagttctggagtttgagaccagcctgggcaacatggtgaaacctca

SEQ ID NO: 587437 - DNA, 576 bp, Homo sapiens
cccactgggcgtgggagaggaaacatccccctcttgaaggctgcaggagaagcagaccacagggagagttgggctgcagttaaagcaagaagaaagggctcaaagaagaggctgaggtctaagagagtttgctgaagatttgctgtgggttccagagggcgtgggtgggtggaaggggtcttatagggattaaagcacaggggataaggggtgacctgagcttgggggctgaaggacatgaacagggataaaggcctaatgagattagtcctcatggtttcaggtcaraaagtggtgaggagggtctggcaggggccttgcaaggagcacacaaaacccaattatgggtttcttgggggggcacacaaacaaagaatgataggaagttctcatgctgcttttagtcattgccacgtgaaaacctaatatgaaaataagaaattaagcaatttcatttagaagcaatatgtcaatagcagagtctacacaaatgtcttgttggggacagaataatggaaggcacctcggactctcctgaatctcattcagaaaaccaggaggcacattggaggactg

SEQ ID NO: 587438 - DNA, 576 bp, Homo sapiens
cccactgggcgtgggagaggaaacatccccctcttgaaggctgcaggagaagcagaccacagggagagttgggctgcagttaaagcaagaagaaagggctcaaagaagaggctgaggtctaagagagtttgctgaagatttgctgtgggttccagagggcgtgggtgggtggaaggggtcttatagggattaaagcacaggggataaggggtgacctgagcttgggggctgaaggacatgaacagggataaaggcctaatgagattagtcctcatggtttcaggtcaaaaagtggtgaggagggtctggcaggggccttgcaaggagcacacaaaacccaattatgggtttcttgggggggcacacaaacaaagaatgataggaagttctcatgctgcttttagtcattgccacrtgaaaacctaatatgaaaataagaaattaagcaatttcatttagaagcaatatgtcaatagcagagtctacacaaatgtcttgttggggacagaataatggaaggcacctcggactctcctgaatctcattcagaaaaccaggaggcacattggaggactg

SEQ ID NO: 587439 - DNA, 242 bp, Homo sapiens
catgtttagtatttaaaaccaagtaaaaayaacagaaatattatattaaacattgtatatgataggaggtagagggacaagaaaaattcttatttcatacccagttaccactctaatagtgttcagaaaataaaaataactgtaaatgaatgtcataatatttgacagttctatatgcatgtagattctcatgtcttgttctgtactttgaaaacagaataacagatttttctggttctcag

SEQ ID NO: 587440 - DNA, 586 bp, Homo sapiens
tcgaactcctggcctcaagtgatcctccagtctcagcctccgaaagtgctgggatttcattgtgcctagctgaggtgaaaactcatttatgagggataaagcataattcttgctgtctcctcattcaccagtgtatttcgtaggtctcgtgcttttttttttctttctgtatttcttgtccttttttttgctatgcttcagtctgggtattttcttctgacttatattctagttcacaggctctttcttgtttctattctgccattaaatcaattgaattcttaatttcagttattttatttctcgactatggaatttcccttcatttttatagtttctatttatctgccacaatccacagccttgtcttttaattctttgaacrtatttattattgtctcggtcagctcaggctgctataacaaataccatagattgaatggtttgaacaatagacttttatttattacagttctggaggctgggacatccaagattaaggtgccaactgatttgattcctgctgagggccctcttcctggtttgcaaatggccttctatttaccatatcctcacactgtggagg

SEQ ID NO: 587441 - DNA, 472 bp, Homo sapiens
tttcagcttttttccatttcttattcttggataacaccatagattaaatctctttctcaggtgctcatttttctataatctatttttattgttgaaatttcaagattgattagcatactatattttaagttacttttggtttgctaatgacatttgttttaccatagactttttacagatgattttgtagcaattggagtggtgtrgaggtaagggtaacattactataccgcagagcagaaaactgataactatcagacagtcttatgttaagtctctcacctcttttcccaaaaggggtatctccttggcctgctttccttattaagctactcctcccttccctccttcagccatgaacttggcactccttctcttcttttatctccatacgtcctcaactcctctatccagggctatatccagaaattcaaaatttctccctgttattaagcaaaacaattcactactc

SEQ ID NO: 587442 - DNA, 480 bp, Homo sapiens
agaagtgcaataaaaagagatatgccagtctacatacaatgggatatcattcagcatttaaaaataaggaaatcctgccatatgtgacaacgtggatggaccttgaggacattatactaagtgaaataagccagtcacagaaagacaaatattgcatgatgccatatatgtgaggtatatgaaatagtcagagtagaatgctggttgcctgaggctagggggaggggcaaatagggaattgcttttcaacaagtataaagtttaagttatgcaagatgatgaagttctagagatctgctttacaacattgtgctgatagttaacattattrtgttttgcactagaaaatttaagaggataggtctcatgtgaattgttcttaccaccattaaaagaaaaaagaaagagctgaacgaagtcatgtagttgtgaccatagcaaatttttttgctagaattctgcttcagttatttattttct

SEQ ID NO: 587443 - DNA, 452 bp, Homo sapiens
ctaatattcagtaaatatttattaaattttcctaattgtcccaagaatgtcttttatttatgtttatgttttattttttgagacagggtctcactctgttgcccaggctggggtgcagtggtgcaatcatggctcactgcagcctcgacctcactgggctcaggtgattttcctgcctcagccccccatgcagctggtactacaggcaggtgtcaccatgcctggctaattttttgtgggtgtttttttgtgggttttgtttttgttttgctgttttgttttgtttttagagaaagggtttcaccatgttccccaggctggtctcaaactcctgggctaaagcaatccacctccctcagcctcccaaagtcctggaattacaggtgtgaaccaccawgcctggctcccaagagtcttttacaactttttcgaatctgtattcagtcaaatgt

SEQ ID NO: 587444 - DNA, 525 bp, Homo sapiens
gtccaacttccagggggagaaaggaagagtgtccttagtgaagtggagggcctcacagcaagatgcctggcttaatcaaacttggacatacctgaagcacgttcagtgactaaaagtgcctaccatgagcagctggaacccactccctgagagcttcaagaagcatgggtacctcttgtacctgtttgtaattacagccaaggaccagcaggcagcattactgcatccacatggggcttttactggaaccagtaagtctctgccagcccctcacaggctcctgggatgccactcgttctgggtctgtggacagacaaccaggacacttgctcagtgcccacccactccttgtggcccacagcccatcactcaaccccakccccaccatcccctgcttcctaagccgttcctcatgccagaagaaaaggcaatgcctttgtcccacagcctctgccttgtgtcatgtcatgtgggggtatggaatgaaccggccagcctaaactccagtgcttctgcctgaagaat

SEQ ID NO: 587445 - DNA, 453 bp, Homo sapiens
catggaggaggaagttgccgccctgagagcctgagggagctgtgtctgactggggcttctgcctggggttttgcaaagagctacttatgaatatagtctctccagattccttgtttcaaaggaagtgagcatgagctagcaagtgtagcaaccccacagctgataaacaactttgtcttggttttaaaccatcacatcttcatttcacattggaataaagtaagtgaaacctgctaccccagccttgcccgtgtgttctgtaacccagtctcctttggttgtgagggctgttgtcagaaatgttataagaaaagattatgcataaatgaaatcaaatgtaaaattatgcttataatgtcacttgagtgaaaggtaagagggtagagtcacaggcactcagctggggtttrcccacccatcacttaccacgctcatgagagtgtggcacaggtg

SEQ ID NO: 587446 - DNA, 184 bp, Homo sapiens
caatatatccatgtaacaarcctgcaaatatactccctgaatctaaaaaatttaaggcagagacagagtaagagggcagaatagaagcctacactctcatcccccacacaaaaacaccaaattttcacaactcactacattcaagaagcactgtcaaagggaccaaaaattgggtgagcgatca

SEQ ID NO: 587447 - DNA, 184 bp, Homo sapiens
caatatatccatgtaacaagcctgcaaatatactccctgaatctaaaaaatttaaggcagagacagagtaagagggcagaatagaagcctacaytctcatcccccacacaaaaacaccaaattttcacaactcactacattcaagaagcactgtcaaagggaccaaaaattgggtgagcgatca

SEQ ID NO: 587448 - DNA, 184 bp, Homo sapiens
caatatatccatgtaacaagcctgcaaatatactccctgaatctaaaaaatttaaggcagagacagagtaagagggcagaatagaagcctacactctcatccmccacacaaaaacaccaaattttcacaactcactacattcaagaagcactgtcaaagggaccaaaaattgggtgagcgatca

SEQ ID NO: 587449 - DNA, 426 bp, Homo sapiens
caggatattcctggggtctcttccatctctactaacccctgactacaaacagcctccacctatttcacctgacattgtactttatgaaagcagcagttctcagatggggctattttgcccyatggggacattaggcaatatctggagacgctggggtttgtctctacttggggggagttgtgttactgcatccagtgagtccagggatccagggatgccgctcaacatcctaaaatgcacagggaacccccacacatagaacagagaaattgctgagccaaaatgtcagcagtgtcacagctgacaccctgacatacacacaatcacacactgtctgctctttcgtgctcaggatctctttcattctaatcatctcataggaaacagaaatgtcatctggaggtaggtagagtccaaaacaaagaa

SEQ ID NO: 587450 - DNA, 426 bp, Homo sapiens
caggatattcctggggtctcttccatctctactaacccctgactacaaacagcctccacctatttcacctgacattgtactttatgaaagcagcagttctcagatggggctattttgccctmtggggacattaggcaatatctggagacgctggggtttgtctctacttggggggagttgtgttactgcatccagtgagtccagggatccagggatgccgctcaacatcctaaaatgcacagggaacccccacacatagaacagagaaattgctgagccaaaatgtcagcagtgtcacagctgacaccctgacatacacacaatcacacactgtctgctctttcgtgctcaggatctctttcattctaatcatctcataggaaacagaaatgtcatctggaggtaggtagagtccaaaacaaagaa

SEQ ID NO: 587451 - DNA, 426 bp, Homo sapiens
caggatattcctggggtctcttccatctctactaacccctgactacaaacagcctccacctatttcacctgacattgtactttatgaaagcagcagttctcagatggggctattttgccctatggggacattaggcaatatctggagacgctggggtttgtctctacttggggggagttgtgttactgcatccagtgagtccagggatccagggatgccgctcaacatcctaaaatgcacagggaacccccacacatagaacagagaaattgctgagccraaatgtcagcagtgtcacagctgacaccctgacatacacacaatcacacactgtctgctctttcgtgctcaggatctctttcattctaatcatctcataggaaacagaaatgtcatctggaggtaggtagagtccaaaacaaagaa

SEQ ID NO: 587452 - DNA, 584 bp, Homo sapiens
aaactctgtctctactaaaaatacaaaaattagctgggtgtggtggcgagcacctgtaatcccagctacttgggaggctgaggcaggtgaatcacttgaaccggggaggcagaggttgtagtgagctgagatcatgccrctgcatgccagcctgggcaacagaacaagactcagtctcaaaaaagaaaaataaggcatatcttgctttttatacactctatgcagaattgtttctctcatatctagtaattaagtcttaggagccccaatattcaatgaaaccctaaaaagttatttttcaactgtcttatatcagtatttttagataaaaaccattttacaacttttaagaaatatagttcttcaaattactgtttattaacagaactaaagatatttaggttttctataccatatacaagaaacatgtcatggtatatagaactaaactaatttttaatggttaatatttcactattttagcttacaaatgactcaagatattttatggctatctattacttaatttaacgtgactttaagattttaaattactgaacagaattttgaaaccatgacacagg

SEQ ID NO: 587453 - DNA, 526 bp, Homo sapiens
tgggggattttcaagttttcttattgttgttgacttttatttctactgtggtcggtgagcacactccattttattayaatcctgttaacccttttcctgattagaaaaaaaaaaaaagctttctgccagtgctcatttaattttacaaaaatatgctctctgaggctgaattaaatctgactggttttcactgtgaaaataaaatataaaaactgagctgggcatggggctcatgcctgtaatcccagcactttgggaggccgaggtgggtggatctcctgaggtcaggagttcaagaccagcctggccaatatggtgaaaccccacttctactaaacatacaaaaaaatgagtcaggcgtggtggcacacgcctgtaatcccagctactcgggaggctgagacaggaaaattgcttgaaccagggaggcagaggttgcagtgagtcaagatcgtgccactgcacaccagcctgggcaacagagtaagactccatctgaaataaataaataataaaatataaaaac

SEQ ID NO: 587454 - DNA, 526 bp, Homo sapiens
tgggggattttcaagttttcttattgttgttgacttttatttctactgtggtcggtgagcacactccattttattataatcctkttaacccttttcctgattagaaaaaaaaaaaaagctttctgccagtgctcatttaattttacaaaaatatgctctctgaggctgaattaaatctgactggttttcactgtgaaaataaaatataaaaactgagctgggcatggggctcatgcctgtaatcccagcactttgggaggccgaggtgggtggatctcctgaggtcaggagttcaagaccagcctggccaatatggtgaaaccccacttctactaaacatacaaaaaaatgagtcaggcgtggtggcacacgcctgtaatcccagctactcgggaggctgagacaggaaaattgcttgaaccagggaggcagaggttgcagtgagtcaagatcgtgccactgcacaccagcctgggcaacagagtaagactccatctgaaataaataaataataaaatataaaaac

SEQ ID NO: 587455 - DNA, 526 bp, Homo sapiens
tgggggattttcaagttttcttattgttgttgacttttatttctactgtggtcggtgagcacactccattttattataatcctgttaacccttttcctgattagaaaaaaaaaaaaagctttctgccagtgctcatttaattttacaaaaatatgctctctgaggctgaattaaatctgactggttttcactgtgaaaataaaatataaaaactgagctgggcatggggctcatgcctgtaatcccagcactttgggaggccgaggtgggtggatctcctgaggtcaggagttcaagaccagcctggccaatatggtgaaaccccacttctactaaacatacaaaaaaatkagtcaggcgtggtggcacacgcctgtaatcccagctactcgggaggctgagacaggaaaattgcttgaaccagggaggcagaggttgcagtgagtcaagatcgtgccactgcacaccagcctgggcaacagagtaagactccatctgaaataaataaataataaaatataaaaac

SEQ ID NO: 587456 - DNA, 554 bp, Homo sapiens
ttcgtgtctattcttccattctttgtatctatatgttcgcaattttattagtctgttctcacactgctaataaagacatacctgagactgggtaatttataaaaggaagaggtttaattgactcacagttcagcatggctgggraggcctcaggaaacttaaaatcgtggtggaaagggaagcaaacatgttcttcttaacgtggtggcagcaaggagaagtggcaagaaaaagggtaaaatgcctcttataaaaccatcagatctcatgagaactcactatcatgagaacagcgtgaaagtaactgccaccatgattcaattacctcccacttggtccctcctgtgacacatggggatcatgggaactacaattcaagatagcatttgtgtggtgacgtggccaaaccatataatttcatctctggttacctccaaaatctcatgtcctcacgtttcaaaacacaagcatacattcccaacagtcccacaaagtcttaactcattccagcattaacccaaaagtccaagtccagagcctcatctgaaacagaa

SEQ ID NO: 587457 - DNA, 554 bp, Homo sapiens
ttcgtgtctattcttccattctttgtatctatatgttcgcaattttattagtctgttctcacactgctaataaagacatacctgagactgggtaatttataaaaggaagaggtttaattgactcacagttcagcatggctgggaaggcctcaggaaacttaaaatcgtggtggaaagggaagcaaacatgttcttcttaacgtggtggcagcaaggagaagtggcaagaaaaagggtaaaatgcctcttataaaaccatcagatctcatgagaactcactatcatgagaacagcgtgaaagtaactgccaccatgattcaattacctcccacttggtccctcctgtgacacatggggatcatgggaactacaattcaagatagcatttgtgtggtgacgtggccaaaccatataatttcatctctggttacctccaaaatctcatgtcctcacrtttcaaaacacaagcatacattcccaacagtcccacaaagtcttaactcattccagcattaacccaaaagtccaagtccagagcctcatctgaaacagaa

SEQ ID NO: 587458 - DNA, 547 bp, Homo sapiens
agcagcatccactacctggtaccaatttactatattaatccattctcatgctactaataatgacatacttgagactggataatttataaaggaaagaggtttaattgactcacagtttagcatggctggggaggtctcaggaaacttacaatcatggtggaaggggaagaaaacatgtccttcttcacatggcagcagcaagtagaagtggtgagaaaaagcagggaaagccccccgtaaaaccatcagatctcatgagaactcactatcatgagaacagcatcaggataactgcctttatgattcagttacctcccacagggtccttcccatgacacatggggattatgggaactacaagttgagatttgggtggggacacagccaaaccatatcatcaatgtttagctcccatttataactgagaatgtggtatttggttttctgttcccatgcttacaataataatgtgcttaaaataatggcccacagytgcatccatgttgctgcaaaagacataatttctttcttttgtatggctgtgtag

SEQ ID NO: 587459 - DNA, 603 bp, Homo sapiens
ataaatcattctactataaagacacatgcacacctatgtttactggagcattattcacaatagaaaagacttggaactaacccaaatgtccatcaatgatagactggatatccatcacctccaaatatttatcatttgtatatgttgggaacatttcaagtcttaccttctagctgttctgaaatatacaacacattattgttaattatagtcaccctcccctgctattaaatattagaacttattctctctgcctacccatatgtttgtatctattaaccatcttttcttcatccctycccataacccttcccagcctctgataattatcattctgttaccgaaacaccaggagtttggtctagatcctgctgctcggcacactgaaagccaataattgagatgacaagtattgtgaaggaagaaggctttaattgggtgctgcagccaagagatgggagctcagtctcaaatccatctccctgactgactaaaactagaggtttatatagcgtggaggaattgtaacagcgtgtaagaaagcaggacctaggcaggggaaaggaggcatttggagcagtgacctggtgagttttagttctt

SEQ ID NO: 587460 - DNA, 589 bp, Homo sapiens
catcaattttcctctggctatttttcagattttttttttctgaatcttaattttcaacagttagattatgatgtggctgggcatgagtctatttggatttatagttttgaagttttactgagcttcttaaatctgtaagttcttctrtgaaacttgggaaattttagccattatttaaaaatatttattttagtagtctgattataccaatgttagatatttggttttgtctcacagattcctgtattttcttttttgtttcagtctattttttctgtttttagattaggtattttaatttatatatcttcaagttcaataactatcttttttgtcatttccattctgctattaaacttattttataattgcctttttaatgttttgtttgcttttgtatgtcttccattttattgtttaaattttctctctatttaagagtatttgcccttatttcttagagtatttgtatgaaagctactttaaaaagatttaatagataaatctaaattatggctgatctctatgtggatgtcctttttttctcccaggcaaagtgagactttcctggttcttcatatgttaataa

SEQ ID NO: 587461 - DNA, 589 bp, Homo sapiens
catcaattttcctctggctatttttcagattttttttttctgaatcttaattttcaacagttagattatgatgtggctgggcatgagtctatttggatttatagttttgaagttttactgagcttcttaaatctgtaagttcttctgtgaaacttgggaaattttagccattatttaaaaatatttattttagtagtctgattataccaatgttagatatttggttttgtctcacagattcctgtattttcttttttgtttcagtctattttttctgtttttagattaggtattttaatttatatatcttyaagttcaataactatcttttttgtcatttccattctgctattaaacttattttataattgcctttttaatgttttgtttgcttttgtatgtcttccattttattgtttaaattttctctctatttaagagtatttgcccttatttcttagagtatttgtatgaaagctactttaaaaagatttaatagataaatctaaattatggctgatctctatgtggatgtcctttttttctcccaggcaaagtgagactttcctggttcttcatatgttaataa

SEQ ID NO: 587462 - DNA, 589 bp, Homo sapiens
catcaattttcctctggctatttttcagattttttttttctgaatcttaattttcaacagttagattatgatgtggctgggcatgagtctatttggatttatagttttgaagttttactgagcttcttaaatctgtaagttcttctgtgaaacttgggaaattttagccattatttaaaaatatttattttagtagtctgattataccaatgttagatatttggttttgtctcacagattcctgtattttcttttttgtttcagtctattttttctgtttttagattaggtattttaatttatatatcttcaagttcaataactatcttttttgtcatttccattctgctattaaacttattttataattgcctttttaatgttttgtttgcttttgtatgtcttccattttattgtttaaattttctctctatttaagagtatttgcccttatttcttagagtatttgtatgawagctactttaaaaagatttaatagataaatctaaattatggctgatctctatgtggatgtcctttttttctcccaggcaaagtgagactttcctggttcttcatatgttaataa

SEQ ID NO: 587463 - DNA, 620 bp, Homo sapiens
accagaaagaaatggaattagataaartaaagcctgtgttgtttttatttttttacctttatgtattatcaaaatttattctaagatattaaagagtatgtgcttagagcagtggctgtttaccaacgaatcctgtgttttatcatgcctctcttttccgctacatttattcatttgtttttaaactttcattttaggtttgggggtacacatgaaggttatataggtgaactcatgttatgggggtttgttgtacagattagttcattacccaggtattaatcccagtacctaatagttatcttttctgccccctgcctccttccattctccaatctcaagtaggccccagtgcttgttgttcccttctttgcggttcatgacttctcatcatttggctcccacttaacgtgagaacatgcattatttggctttctgttcctgtgtaaatttgctaaggataatagcctccagctccatccatgttcccacaaaagacatgatctcattctttattatggctgcatagtattccatggtatatatgaaacatggaattgcctttatacaatctgttggacatttaggttgatttcctgtctttgctattgtgactagtg

SEQ ID NO: 587464 - DNA, 552 bp, Homo sapiens
tccactctctggtgcttccttcctctttgccttctgccatgatagaagctcrctgaagccctcaccagaagcagatgctggccccttgcttcttctacagcctgcagaaccatgagccaaataaacctcatttattaaataaattacccagtctctatttctttgcaccaacacaaatgaactaagacagccagtaatcaaatctatttaagatatatgaaggggagatgataattctaatgtagaaggtgctttagggatggagagaagattttcaggaaaattcagcggtttcattattaccaacttccctgaagttgttagatgcctacatctagtttattcttttaagtaaataggtcagaggattaaggatactatctgttttctcacagggcttttccagatctcctgacattctacacatgaaaaaagatccaaaaataaataaatctatatacataaatagccatattactcaggtgcatcccctggagtcagtaaagtgatgttactgaaatgatggataaaatgtgtaacttatgaattcag

SEQ ID NO: 587465 - DNA, 552 bp, Homo sapiens
tccactctctggtgcttccttcctctttgccttctgccatgatagaagctcactgaagccctcaccagaagcagatgctggccccttgcttcttctacagcctgcagaaccatgagccaaataaacctcatttattaaataaattacccagtctctatttctttgcaccaacacaaatgaactaagacagccagtaatcaaatctatttaagatatatgaaggggagatgataattctaaygtagaaggtgctttagggatggagagaagattttcaggaaaattcagcggtttcattattaccaacttccctgaagttgttagatgcctacatctagtttattcttttaagtaaataggtcagaggattaaggatactatctgttttctcacagggcttttccagatctcctgacattctacacatgaaaaaagatccaaaaataaataaatctatatacataaatagccatattactcaggtgcatcccctggagtcagtaaagtgatgttactgaaatgatggataaaatgtgtaacttatgaattcag

SEQ ID NO: 587466 - DNA, 552 bp, Homo sapiens
tccactctctggtgcttccttcctctttgccttctgccatgatagaagctcactgaagccctcaccagaagcagatgctggccccttgcttcttctacagcctgcagaaccatgagccaaataaacctcatttattaaataaattacccagtctctatttctttgcaccaacacaaatgaactaagacagccagtaatcaaatctatttaagatatatgaaggggagatgataattctaatgtagaaggtgctttagggatggagagaagattttcaggaaaattcagyggtttcattattaccaacttccctgaagttgttagatgcctacatctagtttattcttttaagtaaataggtcagaggattaaggatactatctgttttctcacagggcttttccagatctcctgacattctacacatgaaaaaagatccaaaaataaataaatctatatacataaatagccatattactcaggtgcatcccctggagtcagtaaagtgatgttactgaaatgatggataaaatgtgtaacttatgaattcag

SEQ ID NO: 587467 - DNA, 552 bp, Homo sapiens
tccactctctggtgcttccttcctctttgccttctgccatgatagaagctcactgaagccctcaccagaagcagatgctggccccttgcttcttctacagcctgcagaaccatgagccaaataaacctcatttattaaataaattacccagtctctatttctttgcaccaacacaaatgaactaagacagccagtaatcaaatctatttaagatatatgaaggggagatgataattctaatgtagaaggtgctttagggatggagagaagattttcaggaaaattcagcggtttcattattaccaacttccctgaagttgttagatgcctacatctagtttattcttttaagtaaataggtcagaggattaaggatactatctgttttctcacagggcttttccagatctcctgacattctacacatgaaaaaagatccaaaaataaataaatctatatacrtaaatagccatattactcaggtgcatcccctggagtcagtaaagtgatgttactgaaatgatggataaaatgtgtaacttatgaattcag

SEQ ID NO: 587468 - DNA, 592 bp, Homo sapiens
tcagttgggttcagctaaaatctttattcatcggtttgtcataagccttaattattaacctttactcttaacatgtagtcattctggtcacagatatacctaccacgatgggttttctttctgtttttgtaactattggtttcatattattgctatcttcctttgaactttttataaagagcatctcatgtgggagattctgtatgtttcttgttaaggcagatgtcagtccccttatgtgggtggcttcaagaatatgtgaatataagtccacatatttgatgacagtggggaataaaggagcaacaagaggatttcttctaaaaggcacttcttctcaggagttggtctcaaaattaatctgtgtaggactgcatgcgttggtggtaatcataaaaacaggctttgaggactcttctcgacacatccagatgaagcagcctcctttttctgggcayagtctgcctccctgcagccttttatgaccacacctctctaaccaactcttttgtggggtacttttaaaattaaatgtacaagactctttagtctctggtttgtagcccctcacaacctcctcatcacgagttgc

SEQ ID NO: 587469 - DNA, 294 bp, Homo sapiens
aagataaagctaccagaaacatgatcattcagagagttgatctgagatgctaagatgtcaatctgaattttttcctggaattatgaagaagtgcytaaagacattctattaaagagagagatagaaaagtgatttttaacttgaattttgatattttttaaacttgaaacattacaggacttagtataatggaggataaaggataaattattataaggtaatgtgaatgtgtgattatgatataaatgtaatttttaaaagccttatatattttcactttttaaaatccttttc

SEQ ID NO: 587470 - DNA, 417 bp, Homo sapiens
gacccatccatgagctatattcaggagactcatctcacatagactgaaaataaagggatggaggaatatttaccaagcaaatggaaagcaaaaaaaaaaaaaaaaaaaaaaaccagaggttgcaatcctttgtaaacagactgtaacccaccaaagttcaaagaagaaaaagagggcattacatatcggtaaggggatcaatgcaacaagaagcactaactatcctgaatatatatgyacccaatacggaaaacccagattcataaaagaagttcttagagacctacaaagagacttagactcccacacaataatagtgggaggcttttacaccccactgtcaatattagacagctcagtgagacggaatattaacaatatgatcaggatttgaactcagctctggaccaagcagac

SEQ ID NO: 587471 - DNA, 618 bp, Homo sapiens
ctgacacatatgtcaatggcaaaagaaacattttgtggccaggtgctgtggctcatgcctgtaatcccagcactttgggaggccgaggcatgtggatcacctgaggtcaggagttccagaccagtcatggccaacatgatgaaacactgtctctactaaaaatacaaaaattaactaggcatgttggcatgcacctgtaagcctcaggcaggagaatcacttgagcccaggaggcagaggctacagtgagctgagatcgcgccactgctcttaagcctgggcaacagagcaagactctgtctcaaaaaacacacacaaaaaattttgttytaagccttgacatgaccctaaaaaccctaattattactcagaaaatatatgattccctaggaattatcaagataatattttaaataaacttttaattttagagtagctttcaatttactgaaaagttgtgaagatagtccagagagttttcataaaccatgcactgttttccttattgtaaacatcttacataactaaagtatctttgtcacaaccaatgaatattgatgcattattatcaactaaaattaacacaatttggatttccttaatttttaactaatgtgt

SEQ ID NO: 587472 - DNA, 576 bp, Homo sapiens
accatgttggccaggctggtcttgaactcctgacctcaagtgatccacccgcctcggcctcccaaagtgctgggattataggcrtgagccaccacacctggcctcattttggtatttttttgtggagacggggtttcaccacattgaccaggctggtcttgaactcctgggctcaagcagtctgcacaccttggcttcacaaaatgctggcattacaggtgtgagccaccgttcccagccccttcactgatttcaaattgaaataaaaattgggcagtgatagtaaaagtatagatatcagctctgatagaatttgcacccattcaggtaccagccatccatttcaaaatccacagaacttttttttttttttttgagacagtttcactcttgtcacccaggctggagtgcagtggcatgatctcggctcactgcaacttctacctcccaggctcaaaaaaatcctcccaacgcagcctcctgagtagctgagactataggtgtgtactaccacacgtggctaagttttctaatttttttgtagagatggggtttcaccatgttgctcaggctggt

SEQ ID NO: 587473 - DNA, 576 bp, Homo sapiens
accatgttggccaggctggtcttgaactcctgacctcaagtgatccacccgcctcggcctcccaaagtgctgggattataggcatgagccaccacacctggcctcattttggtatttttttgtggagacggggtttcaccacattgaccaggctggtcttgaactcctgggctcaagcagtctgcacaccttggcttcacaaaatgctggcattacaggtgtgagccaccgttcccagccccttcactgatttcaaattgaaataaaaattgggcagtgatagtaaaagtatagatatcagctctgatagaatttgcacccattcaggtaccagccatccatttcaaaatccacagaacttttttttttttttttgagacagtttcactcttgtcacccaggctggagtgcagtggcatgatctcggctcactgcaacttctacctcccaggctcaaaaaaatcctcccaacgcagcctcctgagtagctgagactataggtgtgtactaccacacgtggctaagttttctawtttttttgtagagatggggtttcaccatgttgctcaggctggt

SEQ ID NO: 587474 - DNA, 604 bp, Homo sapiens
gtgtataaaatgccccagttccctcacaccttcactaggataaccctgaagtgcttgttctacaatagctcctggaggtgctcagcaggattaaccccagttgcccacagcgttaatgttcttgatagtacaccctgaatttgctgtttccctttcctgctcactacttctccattcatatctcctgggatcatcgttcaaataaaytgcagtggacccttgaataatgcaagggctaggggcagtaggaaatatatgtatcatttctgatcccccaaaaacttaactaccaatagtctattgttcactggaagccttactgataatgtaaacagtaaattaacacatattttgtacatgatatgtattatgtactgcattcttataaaaatgtaagctagagaaaggaaaatgttattaagaaaaccataaggaagagaaagtctatttactagtcatcaagacaaaatgattcatcttaaaggtcttcatcctcattgtcttcacattgagaaagcagaggagaaggaagagggaggtttttgatgtctgagaagtggcagaggcagaaggaggaggtggaaggtgaggcaggaaaagagtt

SEQ ID NO: 587475 - DNA, 560 bp, Homo sapiens
ttttttaagtacattcctctcgccctcccatttcaacacatttctcacacgaggtggaacagatgctggggtaacgccggctaaaaataaaagcaacaggaggggaaaaaaaaaaaactattttacaataaatatctcagcaaaattttatatcctgaatggattcagcagcaaaagagcagctgccacctcttttgtggttcttccttctctcacttttataacttaattaatatgccaatcagatttttgtaatcaggagcaggggacattaacctcgtaaagcatgtaaagtgtatcttatctgaataaagaaggaagtattgtgtgaattggtctcttttgctcctttttatttctacttgtattgagaatctagcttgtcagagaggaccagaaatcttttctatctgtcagcgctccaggcccttgaaggaacacactggtattttcaccctcactcctccaatggagacatgatagcagcatcacaatgacctctactgtgctagggggcaatggcacccactgtggcygtcccagaggaccccagcctttaa

SEQ ID NO: 587476 - DNA, 574 bp, Homo sapiens
tgtcactggccagtccttttgagattttctgtggagtcaccaatggaatagtggtaactaaaatatttcagcagctagaactgacaaattgatggtcaatgtttatcttgtacctccttcctataagcacatgttatagagacagctattacacagtagaaattacttggaaagaagagttcaatgacctgggtttaaatcttaatcctgtcatttatcagtgaggtggcttggtaaattgcttaaaatcttttgaccctatagagtttcatgtataagcatcattattgaaaatgcatatacagatggatcaactggagctttggaggtcagggaaaatccagaaaaaaggaagagaaggaaagattctctggaaaagaaaaatagtcctataatatctgattaatttttcaagttactctctgtatatgcaactcagggactaggaattctctgatgttggccacttctgtatccttaatttttaaaaagctaataagggctcaggaagtcttctccaaggtagtatccaataacacttcctcctttycccctttcagggtgcaaaggaatc

SEQ ID NO: 587477 - DNA, 610 bp, Homo sapiens
aggaagccgatggtgtaactctcagtctcaggccaaaggcctgaaagctggtgggtggtggaggtggtagggacagggaatgctggtgtgagtcctacagtccaaaagccagaggaactggaattctgacatccaagggcagaaggagaagggcatccaagctctggaagagagagagaacaaattcaccattacgttrccttttttttttttttttttccatcagagccctcagtggagtgaatggtgcccccacattaggtgaggatggctctcccttattcagtccattgatgcaaatgccagtctctcctagaaacatcctcagagacacactcagaaataaagctctaccagctagctaggtgtccctgaatacagtcaagctgacacctacaattaactatcacaatgactaagaaagtaccttgatttcagtaagtcatcttctcagactccttttgcagccgtaccctgggatcctacaggaaatagaagaggagaattgtgtttctctgaaactcatcgcctctgcagtatgaccctgggctacacttccagataaatcttcccaaaactatcagcacttactccaagaactccagcccaa

SEQ ID NO: 587478 - DNA, 538 bp, Homo sapiens
ctcagcttgccaaataaggcagtcagcagatgatactcttcaggactcaacagaattgataactgtaggaaaccaaaagatttcccaattgctaagtgtattaaaaaagctaagaaatacctttgttgttagcaaaaaaaaagatattggtaaacacttctgttttgtgttctaacaaaagggaggccatgtgaaaaatggatttgtatctgttttatttttaaatctattcagtgttatgtggtgttttagttcattttcacgctataaagaactacctgtgaatgagtaatttatgaagaggtttatttgactaacatttccacatggctaaggaggcctcaggagacttaaaatcatggcagatggtgaaggggaagcaggcaccttcacagggcagcaggagagamgggggaggggagagagagaaacagtgtgagcaagcatgaggggggatgtgccacactctaaaactatcagctgttgtggcaactcactcactatcatgagaaccacatggaggaaactgcccccatga

SEQ ID NO: 587479 - DNA, 464 bp, Homo sapiens
gagcaatcactaaataataaacaataaggtatagttaataaaccaagacagagatacaattgattacaaaaataatttattcaaagaagtcagaaaaggggaaaaaggagcaaagaagacatggtttaaattttaaaaatttatacatgatatatttaaacccaaccacatggataagcacgttaaatataaatggtytgaacactccaatcaaatgacagagattgtcagattgaataggaaaagtatgacctctgatttcaacttcagcatgtaaacagtttggaagtcatcactctagtcatcacaagaagaagaaaagccaagcaaactaaaaatccatgtcatttctgtgatccatcagaggattaagatcacagggcaaactactaccctgacatttggagagactggcacatatgaagaaccacagccaagattagcccaagagtggaaggaactgc

SEQ ID NO: 587480 - DNA, 385 bp, Homo sapiens
aaaagattgattagaaaacaatatagcagttcctcaaaaaattaaacactgaattaccrtatgtcccagcaattccacttctgggttatatacccaaaggaattaaagacagggtcttaaagagatatatacacaaccatgttaattgcagcattattcacaatatgtccaaaggtggaagcaatgcaagtgtttatcaatagatgaatggataaacaaaatgtggtatatgtgtacaatagaatattatacagccttaaaaaggaaggaaattctgacacatgctacaacatggataaaccttgaattcatactgctaagtgaaataagcctgtcacaagaggttaaatgctatatgtttccacttatatgaagtacctagagt

SEQ ID NO: 587481 - DNA, 442 bp, Homo sapiens
tctttgtagtaagctctcatagaaggaagtggtcctagatttgtatatagatatgagctgagactagtgtggatggagaaagcagaggacagaaccaggcaacaacaggaggaggatctagagcaggaattaaaagagaatctacctcaataaatgctggctgaaaatttctgtaatgccaagtgaggagggagtgagggagctaataatgtatttggacttgatttacacatttaatagctcgttcttcagcgctaaatttatgacagattgtgaagctaccaaacaaacaacccaaaaggttttgtccttactgcatacaaaatacaggtrtatatctgagctcatgtaaatatttgggtttcatttttttatgtaacattatataactttacatatatatatatatgcttatacatatatagagatatgtgtaaacatt

SEQ ID NO: 587482 - DNA, 442 bp, Homo sapiens
tctttgtagtaagctctcatagaaggaagtggtcctagatttgtatatagatatgagctgagactagtgtggatggagaaagcagaggacagaaccaggcaacaacaggaggaggatctagagcaggaattaaaagagaatctacctcaataaatgctggctgaaaatttctgtaatgccaagtgaggagggagtgagggagctaataatgtatttggacttgatttacacatttaatagctcgttcttcagcgctaaatttatgacagattgtgaagctaccaaacaaacaacccaaaaggttttgtccttactgcatacaaaatacaggtatatatctgagctcatgtaaatatttgggtttcatttttttatrtaacattatataactttacatatatatatatatgcttatacatatatagagatatgtgtaaacatt

SEQ ID NO: 587483 - DNA, 531 bp, Homo sapiens
tatttatattttatatatatatatatatatatatatatatatatatatatatatatatagctacaaatgcctcccatccctgtatatatgcccccggcaatgtggggttgctactgttcccatcacttgccttggccaatggaaagaagcagaatgatgttaagcaatttctgagccaaggtctaagtcaagcaacctctgcattctttctcaaaattcacctaccaagtgaagaagcccaggctagctaaaccagtggaatggccatgtggataaaaaccaaagtgccccagctgacacttyagccaactgctaggcctgtaaattacatcatccaggatcaggcaacaccaatcaacatgccaagtgaccacaaatatgtgagtgaacccaacaaacaccacagagaatggaaatgaacaatctcagctgaaccctgcccaaatcaccaggccacaccagtcagataagtccctctggtataaggctagacaagcaatgtagctttaatattgttttctacagaatatg

SEQ ID NO: 587484 - DNA, 531 bp, Homo sapiens
tatttatattttatatatatatatatatatatatatatatatatatatatatatatatagctacaaatgcctcccatccctgtatatatgcccccggcaatgtggggttgctactgttcccatcacttgccttggccaatggaaagaagcagaatgatgttaagcaatttctgagccaaggtctaagtcaagcaacctctgcattctttctcaaaattcacctaccaagtgaagaagcccaggctagctaaaccagtggaatggccatgtggataaaaaccaaagtgccccagctgacacttcagccaactgctaggcctgtaaattacatcatccaggatcaggcaacaccaatcaacatgccaagtgaccacaaatatgtgagtgaacccaacaaacaccacasagaatggaaatgaacaatctcagctgaaccctgcccaaatcaccaggccacaccagtcagataagtccctctggtataaggctagacaagcaatgtagctttaatattgttttctacagaatatg

SEQ ID NO: 587485 - DNA, 417 bp, Homo sapiens
gcagaaataaattaaattgagactaaaaaaattaagaaaagcaatgaaacaaaaagttggttttttgaaaagacaaaatcaacaaacctttagctaaaattaaaaaaagaggaatcccaattaaataaaattagaaatgaaaaaagacataaccaagaccacagaaacacagagaattattagagactattatgaacaactataatccaacaaattggaaaacctagaagaaatggataaattcctgggcacttgmaacctaccaaggttgaaccaggaagaaatagagaaccccaacaatccaataatgagtaacaaggttgaagctgtaataaaaagtctcccatcaaagaaaagcccaggaccatctgatggcttcactgctgaattctaccaaacatttaaagaaaaattaat

SEQ ID NO: 587486 - DNA, 439 bp, Homo sapiens
gaattcggctgtgaatccatctggtcctggactttttctggttggtaggctattaattattgcctcattttcagagcctgttattggtctattcagagattcaacttcttcctggtttagtcttgggaggttgtatgtgtccaggaacktatccctttcttctagattttttagtttatttgcatagaggtgtttatagtgttctctgatgatagtttgtatttctgtgggatcagtggtgatataccctttatcattttttgttgcatctatttgattcttctctcttttcttctttattagtcttgctagcagtctgtttattttgttgatcttttcaaaaaaccagctcctggaatcattgattttttgaagggtttttttttgtgtgtctctatctctttcagttctgctctgatcttagttatctcttgccttc

SEQ ID NO: 587487 - DNA, 439 bp, Homo sapiens
gaattcggctgtgaatccatctggtcctggactttttctggttggtaggctattaattattgcctcattttcagagcctgttattggtctattcagagattcaacttcttcctggtttagtcttgggaggttgtatgtgtccaggaacgtatccctttcttctagattttttartttatttgcatagaggtgtttatagtgttctctgatgatagtttgtatttctgtgggatcagtggtgatataccctttatcattttttgttgcatctatttgattcttctctcttttcttctttattagtcttgctagcagtctgtttattttgttgatcttttcaaaaaaccagctcctggaatcattgattttttgaagggtttttttttgtgtgtctctatctctttcagttctgctctgatcttagttatctcttgccttc

SEQ ID NO: 587488 - DNA, 439 bp, Homo sapiens
gaattcggctgtgaatccatctggtcctggactttttctggttggtaggctattaattattgcctcattttcagagcctgttattggtctattcagagattcaacttcttcctggtttagtcttgggaggttgtatgtgtccaggaacgtatccctttcttctagattttttagtttatttgcatagaggtgtttatagtgttctctgatgatagtttgtatttctgtgggatcagtggtgatatmccctttatcattttttgttgcatctatttgattcttctctcttttcttctttattagtcttgctagcagtctgtttattttgttgatcttttcaaaaaaccagctcctggaatcattgattttttgaagggtttttttttgtgtgtctctatctctttcagttctgctctgatcttagttatctcttgccttc

SEQ ID NO: 587489 - DNA, 604 bp, Homo sapiens
taattgatgcagcttcttcatagcattgatggtctttacaatttggcccagaggggcacccacctatatgaagtgtctgtcggcccctactgggaagtttctcccagttatgctacacagggctcagggacccacttgaggaagttgtctgtctcttctcagagctcaaacactgtactgggagaaccactgctctcttcagagctgtcagacagggacgtttaagtctgcagaagttgtctgctgcctctttttcagctatgtcctrcccacagagatggagtccatatatgcagtaggccttgctgagctgcgatgggctccacccagttcgagcttcccagccactttgtttaccaactcaagcctcagcaatggcggatgcccctcccctagtcaggctgtcaccttgcaggttgatctcagactgctgtgctagcagtgagcaaggctctgtgggcatggaacctgccaaggcaggcacgggagagaatctccttgtctgccagttgctaagtccttgggaaaagcacagtatttgggtgggagtgtcccgtttttccaggtacagtctgtcacagcttcccttggctaggaaagggaa

SEQ ID NO: 587490 - DNA, 604 bp, Homo sapiens
taattgatgcagcttcttcatagcattgatggtctttacaatttggcccagaggggcacccacctatatgaagtgtctgtcggcccctactgggaagtttctcccagttatgctacacagggctcagggacccacttgaggaagttgtctgtctcttctcagagctcaaacactgtactgggagaaccactgctctcttcagagctgtcagacagggacgtttaagtctgcagaagttgtctgctgcctctttttcagctatgtcctacccacagagatggagtccatatatgcagtaggccttgctgagctgcgatgggctccacccagttcragcttcccagccactttgtttaccaactcaagcctcagcaatggcggatgcccctcccctagtcaggctgtcaccttgcaggttgatctcagactgctgtgctagcagtgagcaaggctctgtgggcatggaacctgccaaggcaggcacgggagagaatctccttgtctgccagttgctaagtccttgggaaaagcacagtatttgggtgggagtgtcccgtttttccaggtacagtctgtcacagcttcccttggctaggaaagggaa

SEQ ID NO: 587491 - DNA, 604 bp, Homo sapiens
taattgatgcagcttcttcatagcattgatggtctttacaatttggcccagaggggcacccacctatatgaagtgtctgtcggcccctactgggaagtttctcccagttatgctacacagggctcagggacccacttgaggaagttgtctgtctcttctcagagctcaaacactgtactgggagaaccactgctctcttcagagctgtcagacagggacgtttaagtctgcagaagttgtctgctgcctctttttcagctatgtcctacccacagagatggagtccatatatgcagtaggccttgctgagctgcgatgggctccacccagttcgagcttcccagccactttgtttaccaactcaagcctcagcaatggcggatgcccctcccctagtcaggctgtcaccttgcaggttgatctcagactgctgtgctagcagtgagcaaggctctgtggkcatggaacctgccaaggcaggcacgggagagaatctccttgtctgccagttgctaagtccttgggaaaagcacagtatttgggtgggagtgtcccgtttttccaggtacagtctgtcacagcttcccttggctaggaaagggaa

SEQ ID NO: 587492 - DNA, 600 bp, Homo sapiens
aaatatatagttgggtcttgttttttattatagatttcaataatatgtcttttttaaattttatttatttatttatttatttatttatttatttatttatttgagacagagtctcactctgttgcccaggcccgagttcaagcgattctcatgcctcagtttctggagtagctgggactacaggagtgcaccactgcgcccagctaattttttgtatttagggtagagacagggtttcrccatgttgcccaggctggtctcaaacttctgagctcaggcaatccacccgcctcgaccttacaaagtgctgggattacagacatgagccaccatgcccagctgacaatatgtcttttaattggtgttttcagatcattaacttttaaggaattttaaaaatacttggcttaatagtttctaaccttctattcattgcatttgttctttgatttcctccttttgcctaccttctctgattttaactgagcatttttatgatcgagcttatctcctctcaacataactttactttttttttttttacaatttttaatggtttttttcttgaatttgcagtatctattaacacaaatccatatt

SEQ ID NO: 587493 - DNA, 600 bp, Homo sapiens
aaatatatagttgggtcttgttttttattatagatttcaataatatgtcttttttaaattttatttatttatttatttatttatttatttatttatttatttgagacagagtctcactctgttgcccaggcccgagttcaagcgattctcatgcctcagtttctggagtagctgggactacaggagtgcaccactgcgcccagctaattttttgtatttagggtagagacagggtttcgccatgttgcccaggctggtctcaaacttctgagctcaggcaatccacccgcctygaccttacaaagtgctgggattacagacatgagccaccatgcccagctgacaatatgtcttttaattggtgttttcagatcattaacttttaaggaattttaaaaatacttggcttaatagtttctaaccttctattcattgcatttgttctttgatttcctccttttgcctaccttctctgattttaactgagcatttttatgatcgagcttatctcctctcaacataactttactttttttttttttacaatttttaatggtttttttcttgaatttgcagtatctattaacacaaatccatatt

SEQ ID NO: 587494 - DNA, 535 bp, Homo sapiens
ggacctcttcaaggagaactaaaaaccactgctcaatgaaataaaaggatacaaacaaatggaagaacattccatgttcatgggtaggaagaatcaatattgtgaaaatggccatactgcccaaggtaatttatagattcaatgccatcaccatcaagctaccaatgactttcttcactttataaaattctctgttaaaataactgctgtaataccagtctcctgactggatgctgactaatctataaatttttattgagagtggtccaggaaatggtttctcaaagattgggcttgggtattggcttcatgatgtctcagagcttaagcacaatcccagctccttgccaatgggaaatgkgatgccattagttatgatgatgcagaatgatgagtgatcacctgtagttaatttcaaggaagtgccttctcaagtagaggtcttgaggactatagggtttctgtgattagtcttattatagaaatgttgatgataaaaatagtgtcatgaaatcagttttaagctggtaaatat

SEQ ID NO: 587495 - DNA, 617 bp, Homo sapiens
gatatggaaacaacctaagtgtctgttgacagatggaaggattttaaaaatggaatattattcagccttaaagcagaagcaaatcctgccatttgcaacaacatggctgaaccctgaggatattaggctaaatgaaataagccagtcatagaaaaataaatattgcatgatctcatttatatgtggaatcaaaacaagtcagactcagaatagaatggtrgttgccaggggctgggtggggagtgagggtaatggggagatgttggtcaaagggcacaaactttcaattataagatgaataagttctggaaacctaatgtacagcataatgactgcagttaataataatgtgttgtattcttgaaatttgccaagagggtggatcttaactatactcaccatacaaaaaagtaggtgaggtgaatatgataattagcttgattgtggtaattacttcacaatgtgcacttatatcaaaacatcgcggtgtacaccttgaatgtaaacactttttgtcaattatacctcaataaagttgaagaaaaatagccaggagccacctgatggaagtctttctctccagctatttcccacccctcaccgagagaggcccagga

SEQ ID NO: 587496 - DNA, 617 bp, Homo sapiens
gatatggaaacaacctaagtgtctgttgacagatggaaggattttaaaaatggaatattattcagccttaaagcagaagcaaatcctgccatttgcaacaacatggctgaaccctgaggatattaggctaaatgaaataagccagtcatagaaaaataaatattgcatgatctcatttatatgtggaatcaaaacaagtcagactcagaatagaatggtggttkccaggggctgggtggggagtgagggtaatggggagatgttggtcaaagggcacaaactttcaattataagatgaataagttctggaaacctaatgtacagcataatgactgcagttaataataatgtgttgtattcttgaaatttgccaagagggtggatcttaactatactcaccatacaaaaaagtaggtgaggtgaatatgataattagcttgattgtggtaattacttcacaatgtgcacttatatcaaaacatcgcggtgtacaccttgaatgtaaacactttttgtcaattatacctcaataaagttgaagaaaaatagccaggagccacctgatggaagtctttctctccagctatttcccacccctcaccgagagaggcccagga

SEQ ID NO: 587497 - DNA, 617 bp, Homo sapiens
gatatggaaacaacctaagtgtctgttgacagatggaaggattttaaaaatggaatattattcagccttaaagcagaagcaaatcctgccatttgcaacaacatggctgaaccctgaggatattaggctaaatgaaataagccagtcatagaaaaataaatattgcatgatctcatttatatgtggaatcaaaacaagtcagactcagaatagaatggtggttgccaggggctgggtggggagtgagggtaatggggagatgttggtcaaagggcacaaactttcaattataagatgaataagttctggaaacctaatgtacagcataatgactgcagttaataataatgtrttgtattcttgaaatttgccaagagggtggatcttaactatactcaccatacaaaaaagtaggtgaggtgaatatgataattagcttgattgtggtaattacttcacaatgtgcacttatatcaaaacatcgcggtgtacaccttgaatgtaaacactttttgtcaattatacctcaataaagttgaagaaaaatagccaggagccacctgatggaagtctttctctccagctatttcccacccctcaccgagagaggcccagga

SEQ ID NO: 587498 - DNA, 617 bp, Homo sapiens
gatatggaaacaacctaagtgtctgttgacagatggaaggattttaaaaatggaatattattcagccttaaagcagaagcaaatcctgccatttgcaacaacatggctgaaccctgaggatattaggctaaatgaaataagccagtcatagaaaaataaatattgcatgatctcatttatatgtggaatcaaaacaagtcagactcagaatagaatggtggttgccaggggctgggtggggagtgagggtaatggggagatgttggtcaaagggcacaaactttcaattataagatgaataagttctggaaacctaatgtacagcataatgactgcagttaataataatgtgttgtattcttgaaatttgccaagagggtggatcttaactatactcaccatacaaaaaagtaggtgaggtgaatrtgataattagcttgattgtggtaattacttcacaatgtgcacttatatcaaaacatcgcggtgtacaccttgaatgtaaacactttttgtcaattatacctcaataaagttgaagaaaaatagccaggagccacctgatggaagtctttctctccagctatttcccacccctcaccgagagaggcccagga

SEQ ID NO: 587499 - DNA, 613 bp, Homo sapiens
gcaaaggaaagccatttttagtcattgctagtgagcaatttggcaatatctatgaaaatttacaatgcataaacaaactttggcccagcagcaattctactactggaaatttatcataacatatacatgcctctagaaaatattatttataataatttttttttgaagaactgtccctagcagagtaaaggtgagcaaaaacctaagtttacaatggaggaactggaaaatatgttatgcccatactaaataccatgcaagcatttaagaatctgaggcagctctatatgaactaatatgaaatgattcacaagatctggaaataaaaaggtaattggttgggtgagggttagagttggaagacccttctatatcttttgaattttgtatcatgcacaaatacaacatcttcaagctaattaattactttttaatttttttatttttttgagacagtgtctcgctctttcacccaggctggagtgcagtggcacaactgtgattcaatgcaaccttgaactcgcaggctcaactgatcctccagcctcagcctccaaayagctgggactacaagccacgccatcacacctggctaatttttttttttttatta

SEQ ID NO: 587500 - DNA, 580 bp, Homo sapiens
atttaatttggaaaggaaaaagacctagaatagccaaaatcattttgaaaaagaagaataaaatcagacagaatatttactttacctgatttcaagttttactataaagctacagttaacaagatagtgtggtattgacaaaaaatatagagatatagatcaatgcagcaaaagaaaattgaaccactcatatscttaattaatttggaggggtacatgtgataatgtaatatattcatatagtttgcaaaaatcaaaccaatgtcgttggaatatccatcacctcaaatatttatctttctttatgttagaaccatttgaattctcttcaagctactttgaaatgtatatagatcagttgagcatgcaacctagatcccacgcatacacagttctcctaagagaatctaatgccccccgctgatctgataggaggcagagctcaggcaatcatgtttgctcacccgccactcaccttctactgtgcagccctgttcctaacaggacatggactgataccggtccacggcacagaggctggggacccctgctatagattattgtaaactatagtcacctt

SEQ ID NO: 587501 - DNA, 580 bp, Homo sapiens
atttaatttggaaaggaaaaagacctagaatagccaaaatcattttgaaaaagaagaataaaatcagacagaatatttactttacctgatttcaagttttactataaagctacagttaacaagatagtgtggtattgacaaaaaatatagagatatagatcaatgcagcaaaagaaaattgaaccactcatatgyttaattaatttggaggggtacatgtgataatgtaatatattcatatagtttgcaaaaatcaaaccaatgtcgttggaatatccatcacctcaaatatttatctttctttatgttagaaccatttgaattctcttcaagctactttgaaatgtatatagatcagttgagcatgcaacctagatcccacgcatacacagttctcctaagagaatctaatgccccccgctgatctgataggaggcagagctcaggcaatcatgtttgctcacccgccactcaccttctactgtgcagccctgttcctaacaggacatggactgataccggtccacggcacagaggctggggacccctgctatagattattgtaaactatagtcacctt

SEQ ID NO: 587502 - DNA, 580 bp, Homo sapiens
atttaatttggaaaggaaaaagacctagaatagccaaaatcattttgaaaaagaagaataaaatcagacagaatatttactttacctgatttcaagttttactataaagctacagttaacaagatagtgtggtattgacaaaaaatatagagatatagatcaatgcagcaaaagaaaattgaaccactcatatgcttaattaatttggaggggtacatgtgataatgtaatatattcatatagtttgcaaaaatcaaaccaatgtcgttggaatatccatcacctcaaatatttatctttctttatgttagaaccatttgaattctcttcaagctactttgaaatgtatatagatcagttgagcatgcaacctagatcccwcgcatacacagttctcctaagagaatctaatgccccccgctgatctgataggaggcagagctcaggcaatcatgtttgctcacccgccactcaccttctactgtgcagccctgttcctaacaggacatggactgataccggtccacggcacagaggctggggacccctgctatagattattgtaaactatagtcacctt

SEQ ID NO: 587503 - DNA, 543 bp, Homo sapiens
acaggcaacgtggctggtggaaatttgcaaatgctttcctagcatcttcaaatgcttggcatttggtgggatctttcaaatcccacattgaacttcactgacaatagaagagacagaaagtttctgggcasgttcaagatcctaaaacgaaccccaccctcaccttactctcaaaagaagacgtctgcagagggtggtcaaaggcttaaagcacagactggttctgaatttccaactgtctctcatttctcaggtgaaccagtcaatctaaagcatttattttatgcacaatctgggcaaaatggaggtgtgtgagttagggggaagcttcctagctgaatggtttattgtgttctggtttactatgtattatgtttattgtgtagcttgcagtataatttgaagtcagatgatgtgacagtggggctgcaaatagcttagcaggcaagctctgcgtcaaactgctaccttgaatctgagggaccctggttactatccagagttactgtcctcctcatacctcagttgcctcatttgtaaaat

SEQ ID NO: 587504 - DNA, 543 bp, Homo sapiens
acaggcaacgtggctggtggaaatttgcaaatgctttcctagcatcttcaaatgcttggcatttggtgggatctttcaaatcccacattgaacttcactgacaatagaagagacagaaagtttctgggcaggttcaagatcctaaaacgaaccccaccctcaccttactctcaaaagaagacgtctgcagagggtggtcaaaggcttaaagcacagactggttctgaatttccaactgtctctcatttctcaggtgaaccagtcaatctaaagcatttattttatgcacaayctgggcaaaatggaggtgtgtgagttagggggaagcttcctagctgaatggtttattgtgttctggtttactatgtattatgtttattgtgtagcttgcagtataatttgaagtcagatgatgtgacagtggggctgcaaatagcttagcaggcaagctctgcgtcaaactgctaccttgaatctgagggaccctggttactatccagagttactgtcctcctcatacctcagttgcctcatttgtaaaat

SEQ ID NO: 587505 - DNA, 486 bp, Homo sapiens
aaaccaacactgcagatctcttagtcccagagagactgatayagtttggctgtgtccccacccaaatctcatcttgaattgtagctcccatcattcccacatgtggtgggagggaccccgtgggagataactgaatcacggaggcagcttcccacagactgttctcatggtagtgaataagtctcacaagatctgatggttttatagggggaaaccccttttgcttggctctcattctctcttgtctgccgccatgtaagatgtgcctttcaccttctgctgtgatcgtcaggcctccctagccacgtgaaactgtgagtccattaaacttctttttctttataaattacccagtttagggtatgtctttatcagcagcatgaaaatgtactaatacagagtccattccaagaggattacccccatttagcctgatattggaaacatacacttaagcagagaacccagataaaggtcaaaacctaa

SEQ ID NO: 587506 - DNA, 486 bp, Homo sapiens
aaaccaacactgcagatctcttagtcccagagagactgatatagtttggctgtgtccccacccaaatctcatcttgaattgtagctcccatcattcccacatgtggtgggagggaccccgtgggagataactgaatcacggaggcagcttcccacagactgttctcatggtagtgaataastctcacaagatctgatggttttatagggggaaaccccttttgcttggctctcattctctcttgtctgccgccatgtaagatgtgcctttcaccttctgctgtgatcgtcaggcctccctagccacgtgaaactgtgagtccattaaacttctttttctttataaattacccagtttagggtatgtctttatcagcagcatgaaaatgtactaatacagagtccattccaagaggattacccccatttagcctgatattggaaacatacacttaagcagagaacccagataaaggtcaaaacctaa

SEQ ID NO: 587507 - DNA, 614 bp, Homo sapiens
tgctctcttaatagtgttgatagtgtgaaaacattctgatgaaaacagataacctaagtcaatactgcaaatatttttgccattgctatttagcctacactgtggcactttgcacatgaacatgtgacactgggcagtcattctcatgttgcayttgtagtatattttatttatctcaatagattatgatctcattgaaagagataaatgttttcggtttccttttaatcccccctgttagtaccctatacaaggtccttcatctactctgtatgttgttaattaatggatgctcttcgttgggagggatgctctcaaaacaaaatgcaaggccaggtgcggtggctacgcctgtaatcccagcactttgtgaggccgaggcgggtggatcacctgaggtcaggagtttgagaccagcgtgggcaacatggcgaaaccccatctctactaaaaatacaaaaattagccgggcatggtggcacgtgcctgtaatcccagctactcaggaggctgaggcacaagaatcacttgaacctaggaggcggaggttgcagtgagccaagattacgccactgcactccaacctgcatgacagactgagactccatctcaaa

SEQ ID NO: 587508 - DNA, 577 bp, Homo sapiens
tgcagcaatcaccacaatcaactttagaatattctcctacccaccccccaaaaaccttataccccttagccatcacccatcaatctctccatttccccactcccaccccaccccctggaaaacatgaatctactttttgtctacagatttgtctcatctgggcatttcatttaaatggaattatataatatgyggtcctttgtgactggcttattcacttggcattgttttcaaggtccatccgtattgtagcatgtatcagtactttgcttctttttattgctaacttcaattccaccgtacaaatatagcaatttcatttatcagttaataggttggtggacatttggattgtctccactttttgactattataaataatgctgctatggacattaatgtagaagttttgtgtggatgtatgttttcatttctcttgggttgatgccaaggagtggaattgttgggtcatgtggtagctctatgtttaaccatttgaggaattggtagaatgttttccaaaccagctgtaccattttaaattccactggcagcatatgagggcttcatttctcta

SEQ ID NO: 587509 - DNA, 388 bp, Homo sapiens
caccctgtctacaaaaaaaaaaaaaaaaaaagaaagaaaaaaaagtagctgggtatggtggtagtcccagctatttgggagattgaggtgagagaatggcttgagctgaggagttgaagattacagcaagctatkgttatactgcactctagactgggtgacagagtgagaccctgtctctaaatatatatatatatacatataatatttatgtacatatttataaacatgtatttatgaaatacttgagaataaagttaaaatatgtgcaagacttgtatattgaaaaaataacaataacagcaaaattactgggagaaatttaaaaagagttaaataaatgagagacacacatgttcacagattggatgactcaatatcgttaaga

SEQ ID NO: 587510 - DNA, 438 bp, Homo sapiens
accaatgttctcccaggaatttccaagacagattaaactttgccaaggaccataggttttggacctctattcatttgttttatttgcttaattttattacatgaaacwttttgtacaacacatttgagaaccctgggtttagaacaacttagaccctaagttttcggtctcagtttccttttcctttgatagatctttattcactgtatgaacagagtcaccaaaaaaaaaaaaaaaaatcagtattttgttttggtttggtgggctttagctaaatagctcgaagtgtttcagtggtaattgtcctaagtcttttgaattattccttttgaaagagagcagatattaggggggaaaaatcagtgtctaccctgaaagcttgtggcaccaaatgacagtgtgatttactggaaggtagtctaaaggggtgggatggga

SEQ ID NO: 587511 - DNA, 214 bp, Homo sapiens
accaccacccgtccctgctgcccacagaagtcctttattggtagctgaatttatatacatggccctgccctctggctatattgkgttagaccaagctccgtaaatgaaatctctttgaaaatttgggaatggtactaagaatgacagacacttgcagtgtggctgtcaaaataacagatgaacttggtagccattggctgtcattttccactaa

SEQ ID NO: 587512 - DNA, 476 bp, Homo sapiens
gcattttacttaatttctctacacctcagttttcccatttataaaacagtgataacaagaacatctctctgatagggtaattctgagaaataaagaaactcaatccatgtaaattgcttaagacagttcctggctatagtaggcgctcaagaaatgttggttgttcatactattattaatatatcaagtccactttttgctttttaaggtggatcaaggaaagcygagggcaaagttgggccccagttcagcccctgcagcttttttctcttgctgttgatcagcagtaatatattactcttctctaaatcagcaccgcccctgatgcccagaccttccctccatgaaagtctacttcaactccaaatcacaaatgcgaagtactgggtagcagtacatcttttcactggttaattgtccactgaggctatactgctttttatttcttggtagagcttgaatgtgactaggaatgt

SEQ ID NO: 587513 - DNA, 476 bp, Homo sapiens
gcattttacttaatttctctacacctcagttttcccatttataaaacagtgataacaagaacatctctctgatagggtaattctgagaaataaagaaactcaatccatgtaaattgcttaagacagttcctggctatagtaggcgctcaagaaatgttggttgttcatactattattaatatatcaagtccactttttgctttttaaggtggatcaaggaaagccgagggcaaagttgggccccagttcagcccctgcagcttttttctcttgcygttgatcagcagtaatatattactcttctctaaatcagcaccgcccctgatgcccagaccttccctccatgaaagtctacttcaactccaaatcacaaatgcgaagtactgggtagcagtacatcttttcactggttaattgtccactgaggctatactgctttttatttcttggtagagcttgaatgtgactaggaatgt

SEQ ID NO: 587514 - DNA, 605 bp, Homo sapiens
aaaaaaagttgattaccatcagcaaaaaagtccatgaaaacattaaaatgataaaataaatatttttaaattagcaaacaggcaaaaagataaacaacctattaatatgaaaaaataatctttgaaaacataaaatatttagctttatgacaaattcaagtaaattaatatgagtggcagataagttgtaagcgtttagaaaattcaacaaattaaaagctcaagatatacacatagcaccaaattttagatctatgtacactttttygggataaattaccattttactaagaaaacacatacgtatgtcccaattgtgtaagtttaaaacacagcaccattgtaggtattgcacaagaaagaaaacgaaaaaaaaaaaatcaatgtcaaaatgcttacaataaataaaataaccttggaaaataaataaacttggaattgaaatatacagcataattcaatatgaaatacctaaaatgttataggtatgcacagccattgtagacagtacctgaccagcagttcattaatctataatgaaaaccggttcaaatcacggatgcattggaacaaaccctgccttaaattaggcacattcctcagac

SEQ ID NO: 587515 - DNA, 641 bp, Homo sapiens
tcccctttgtcatttctaattgtttttattgggatcttcgctcttttttcattactattctggatactagtctatttttcttattagttttttcaaagaacgaactcctggattcattgtttttttgtatggtttttcacatttccttcaattcagctctgattttggttatttcttgtcttttgctagctttggggttggtttgctcttatttctgtagttcctgtagttgtaatgttacgttgttaattttagatctttctaactttttgatgtgagtgtttagtgctataaacttccctcataacactgccttagctgtgtctgagagattctggtacgttgtatctctgttctcatttatttaaaaaatttattgatgtctgacctaattttactgtttatccaaaagtcattcaggagcagattgttcaatttccatgtaattgtatacttttgagtgattktcttagtatttatttctatttttattgcactatggtctgagtgtgtggttggtatgattttgggtttttattttaatttgctgaggatagttttatttccaatcgcgtagtctattttagagtatgtgtcatgttcaggtgagaatgtatagtctattgtttttgggtggagag

SEQ ID NO: 587516 - DNA, 573 bp, Homo sapiens
gagtcatttgtatttaaatgtttattatatatgtttaatttataaattcaatactatcccaattcaaaatcccaccattattcagtagaaattgaatgccaattctgttatttgtatggaattctaaacagagaattctccatcagtctgtgttttcagtgacagtcatgatttccttggaaaagacagaatgaaggtgtcacattcccagggaaacattgtaagtcacaacaaacaccaacctgaactgaaagactgactgcataaaactttgcttgtttaattttgatttctgttgtaggggttttttaaaaaataaatttggttgtgtatatttaaggtatgtaaaatgatgttatagaatacatatagatagtaaaatggttacaaattgytatattcatcatctcacatagttacctttgtgtgtgtgacaagagcagctataacccacttattataaaaaaaaattgatctttgggcctactcaacatctatgaccagggattgggccattaaacatgcccatccaatagagtataagatttataaagaatatgttggatttatata

SEQ ID NO: 587517 - DNA, 563 bp, Homo sapiens
aactattttatatatgtatatatatatatagtatacatatgtrtgtgtgtgtgtgtgtgtgtgtgtgtgtgtgttatgagatcaactttttgtagtcaaaattagtcgcagtactgttcaaatcttgagggtccagaaagatcaattggcttatgaaaaactaagcaactagttagtattagtgctgagattagttctgagatcttctgacacctaattccaggttgttgttgttttttttttctgtattactctttagaacatgctcattaatactgctaatttagaattgctgggtgaagatctatttgcatttttaaaaggctgcactatattgttgatgcaatttattatcatgaagaataactctaaccaggttaatgaagtctgcaatgtagatttaattgccaaaagtaaatattataagtgttaaattaatggcttacttgaaaatacatattcgaaaggtctttgatgtcaactaaataagtgttagttaatcttgtttttttgctcatttaaatagaaaaagtattaatacattgaataggttttcatggctt

SEQ ID NO: 587518 - DNA, 482 bp, Homo sapiens
agttaatctctgcaggtgctcacatttatgccacagggaggctcccgatgaccagctaatagaagaggaagaattcatagcttggtcataaatgtgttggtttagtgcrtggggtggctttgaaatactatggcaagaagaaattttcccaaaggggaaaaccttggatattgactagtcatgcactttgaatagaaagaaaacttgaatttagaatagtcattgaatcacaatgctattcctattaaactaccatagacattcttcacataactagaaaaaactgttttgaaatttgtttatttactttttttgagatggggtctcactctgccacccagtctggagtgcagtggtacaatctcggttcactgcaacctccgccccccaggttcaagcgattctcctgtctcagcctcccgagtaactggtattacaggccaaaagagagcccaaatacccaaggcaatcctaagcaaaaa

SEQ ID NO: 587519 - DNA, 508 bp, Homo sapiens
actggtaaatgatgtacttaaaaaaatcttcattttgaaatacttttctgcatttctctacatttttatattcagtgttaaatatatacatattkaaatatacaaattactatatgccacagtttttaaaagcatttcaacagttaatataagcaagaaaacaacgaagcttttgtttaaaatataaaagaatcaattcatattgatctgagtaatctcaagcttttaaagaataatttgtctactttccttgacaaagcaaagatttgttctcttcattcagttctccaaccttttcttcattaaaaagtttcaaaaaattaaaaaaaggaatgtctatatgtccattttatgatgaattgtcttaagccagtgtgtgacgatgttacaaccattattatttttaaaaggactctgtgtacacttgaatttcctgatttcaaatcattcctacattttagaataatgtgtaggtcatttaagatttcttattaaattattaaggcac

SEQ ID NO: 587520 - DNA, 475 bp, Homo sapiens
ggtttcataccaaggatgcagggatggtttcatatatgaaagtcaataaatgtgataaataccacataaacaattaaaaacaaaaatcgtatgattatctcaatagatccagaaaaagcatgcaacaaaatccagcatcgctttatgattaaaactctcagcaaaaccagcatacaarggacatacttcaatataataaaagccatctatgacaaacacacagccaacataataccaaataggtaaaagtttaaagcattccctctaagaaactgaaacaagacaaggatgcccactctcacactcctcttcaacacagtactggaagtcctagccagaacaatcagacaggagaaaaaaataaaggatctcaaaatcagtaaagaagaagtcaaactgtcactctttgatgatgatatgattttatacctagaaaaccctaaagattcatccagaaagctcctaaaactggtaa

SEQ ID NO: 587521 - DNA, 593 bp, Homo sapiens
aaaattacccctaaactggaaaataataaaaatagctaagagttcagagtcatcacgttctcttctaatcaaatacttcaattctggggagtaatactataattcagaggcagttaacgttgttcattttcttcttgtgtttctatttttttgtttgtttttttgagacagaatctcactctgtcacccaggcttcagtggaatggtgtgatcttggctcactgcaacctctgcctcctgggttcaagcgattcttctgcctcaacctcccgagtatctgggattacaggtatgcaccgccatgtccagtgaatttttgtatttttagtagagatgggttttcaccatattggccaggctggtctcaaactcctgaccttgtgatccacccaccttggcctcccaaagtgctaggattacaggcgtgagccaccatgcttggcctatattttttattttgaaaagattcataatatttatattatgtgccrtaattcctctggttttcctctgaatgtaaatggatagactgcttactaccaagtccttttccatggcttccccattcttgacctctttatttgagtcaactt

SEQ ID NO: 587522 - DNA, 530 bp, Homo sapiens
tttgatacttgttttcctcactggaaggaacaaaacagttcatgtctttgagtcatttatggactgaggatgatcacagggtagagagagaggatgataaatgagtacttggtgtaacttgttgacccagattctgtattactgtccatttcctgtctatttaaacacaaccagcagcagaaaaactgatttatttatttatttatttatttatttatttatttatttatttgagayggagtctcgctctgtcgcccaggctggagtgcagtggtgcgagctctgctcactgcaagctccacctcccaggttcatgccattctcctgcctcagcctcctgagtagctgggactacaggcacccgccaccacgcccggctaacttttttgtatttttagtagagacagggtttcaccacgttagccaggatggtctcgatctcctgacctcgtgattcgcccacctcagcctcccaaagtgctgggattaccggtgtgagccaccacgcccagccaagaactgattttaaa

SEQ ID NO: 587523 - DNA, 530 bp, Homo sapiens
tttgatacttgttttcctcactggaaggaacaaaacagttcatgtctttgagtcatttatggactgaggatgatcacagggtagagagagaggatgataaatgagtacttggtgtaacttgttgacccagattctgtattactgtccatttcctgtctatttaaacacaaccagcagcagaaaaactgatttatttatttatttatttatttatttatttatttatttatttgagacggagtctcgctctgtcgcccaggctggagtgcagtggtgcgagctctgctcactgcaagctccacctcccaggttcatgccattctcctgcctcagcctcctgagtagctgggactacaggcacccgccaccacgccyggctaacttttttgtatttttagtagagacagggtttcaccacgttagccaggatggtctcgatctcctgacctcgtgattcgcccacctcagcctcccaaagtgctgggattaccggtgtgagccaccacgcccagccaagaactgattttaaa

SEQ ID NO: 587524 - DNA, 530 bp, Homo sapiens
tttgatacttgttttcctcactggaaggaacaaaacagttcatgtctttgagtcatttatggactgaggatgatcacagggtagagagagaggatgataaatgagtacttggtgtaacttgttgacccagattctgtattactgtccatttcctgtctatttaaacacaaccagcagcagaaaaactgatttatttatttatttatttatttatttatttatttatttatttgagacggagtctcgctctgtcgcccaggctggagtgcagtggtgcgagctctgctcactgcaagctccacctcccaggttcatgccattctcctgcctcagcctcctgagtagctgggactacaggcacccgccaccacgcccggctaacttttttgtatttttagtagagacrgggtttcaccacgttagccaggatggtctcgatctcctgacctcgtgattcgcccacctcagcctcccaaagtgctgggattaccggtgtgagccaccacgcccagccaagaactgattttaaa

SEQ ID NO: 587525 - DNA, 530 bp, Homo sapiens
tttgatacttgttttcctcactggaaggaacaaaacagttcatgtctttgagtcatttatggactgaggatgatcacagggtagagagagaggatgataaatgagtacttggtgtaacttgttgacccagattctgtattactgtccatttcctgtctatttaaacacaaccagcagcagaaaaactgatttatttatttatttatttatttatttatttatttatttatttgagacggagtctcgctctgtcgcccaggctggagtgcagtggtgcgagctctgctcactgcaagctccacctcccaggttcatgccattctcctgcctcagcctcctgagtagctgggactacaggcacccgccaccacgcccggctaacttttttgtatttttagtagagacagggtttcaccacgttagccaggatggtctcgatctcctgacctcgtgattcgcccacctcagcctcccaaagtgctgggattaccggtgtgagccaccrcgcccagccaagaactgattttaaa

SEQ ID NO: 587526 - DNA, 663 bp, Homo sapiens
tgaatatatcatgtccacagtagattttcaagaatcatttatagtacttaactttaaagaaacaaggctgcttttaaaaaatgaactaataggcttaaatcaattgcatccatatttgctgtttataggattgctatcagtataccttttgcgtttatagtcaacatgtatcatcctgaaatattctttctggacttataactacttccccctttttcactttaaaacaaacctcaagaataaattactaaccagtcttaaccatcttttataaacatatgctcttataaatgttgtgactagatgcaattaaaaataatagggaatgtggtaggtttttaatttgtacatcctcttatttagtgttaccacataaatgatgagtttgtgtggttctrttttccatttttgttctaactgaaaactttttggctgggcacggtgcctcatgcctgtaatcccagcactttgggaggccaaggcgggcagatcacttgagatcaggagtttgagaccagcctggccaacatggtgaaaccctgtctctactaaaagtataaaaaattagccatgtgtggtggcacacgcctgtaatcccagctactcaggaggctgaggcaggagaatcacttgaacctgggaggcaggggttgcagtgagctg

SEQ ID NO: 587527 - DNA, 615 bp, Homo sapiens
aatgtacaaaaattagtagcatttctataaaccaacaatatccaagctgagagccaaataaaaaatccagtcatgttcacaatggccacagaaagaataaaatacctaggaatacagctaaccacagaggtgaaaagtctctacaatgagaattacaaaatawggtttaaagaaatcagagctaacaaactgttgaaagataaaatattttaaaactcctgacttatttacattgatacaatcctttttagagctcagttgcaacctgtttagcaatacttcacaaattatatctcatgctaatgataactcatttattttcacatcatgaaccttatgtggttttcttttttaaaaagtgttttatattttcttttaaaatctttgaagccaattatgaattgctatgaaatgttttctcatttataaattttggcccataggcattttaaaaaataactgagcatggatcagtagttcctcagaaaatgtactgctattattaaattatgaaatagtcaagcatatattttagtatgttatttttacacattctttcttaaaatttgaacatgtaatcaaaactatattatatacagtagacttcaaatgcag

SEQ ID NO: 587528 - DNA, 512 bp, Homo sapiens
ttgtaatcccccaagctggagatggggtttgatgacaggtgtttggtttatgcaggtgattcactcatgaatggcttgggttatccccttggtgataaatgagctctcactctgagttcacacaagattttgttatttaaaagtgtgcagcaccctccaattctytctgacttacccctgcttttgacatgtgacacgctaattcttgcttcaccttctaccatgattgaaagcttcctgaggcttcatcagaagctgagcagatgccagcaccatgcttcctgtaaagcctgcagaattataagccaattaaacctctttcctttacagattacccaatctcaggtatttctttgtagcaatacaagcctaatataaactggaagatattttgcatgatgaacatcatcaagagattatcatcagaccatttaaattcaacagacagaaaaaaagttgaaagtatcaagagagaagtgtcaaatcacccatgaaggagttccatcagactg

SEQ ID NO: 587529 - DNA, 618 bp, Homo sapiens
tcaacattatttatcaacttttattttattttattttattttattttatgtctgccttttctgacaggccatatgattattccttccttcactcatacaacaaatacatgcattgttctaggccatggagatacaaatatgaaagaacaggaaaaggacagggacattgaccttacctccctcagcatcatgtgtccttagcatctcagtacctaacccagtcatggtatattgtaggcactccatgaaagttgaagaatagacaaacggttgggttgatggaaggaagtagagatacwgcttccatttcttgacttgattcaaacctatatacatgcctgagtctaaagcctatattttaatgattttggcttcactgcaatatgcatctacgtcttcaagtctaatcatacttttggtaccacaaaacacctagcccagttctaggcatataagtactccctaaataaatgctgactaattgctagagtacagtaggtcaaggtaagacacacacatattttaagtagtttgtgttttgtttttctaaacaaggtaatattcccaaggacccattctctaacaaatacttcatgaattggtctgtcatgattgaaa

SEQ ID NO: 587530 - DNA, 549 bp, Homo sapiens
tgacttcattcttttttatgactgcataatattccatgatgtatatataccacatttcctttatccagtcttccaytgataggcacttaagttgattccatgactttgctattgagaccagtgctgaaataaacatgtgagtgcaggcatcttctttatataatgatttaaaaggctaatatttttaaaaggtgaatgtttatatcatgcatctgatataaatataaaatgaatacatgtaacaaattttggttaactcactaattgttgagggaacccataaaatgttactggttgaaagaattcaaagtactgcatacatacatataagcagataaagaatgcttaaatggataagtaaatgtgacttggcatagattttatttaaatcattaactattgagagaaccagtaaaaacttacaacaggttgaaagtagaatttaaagtaccatacacatatgtaagaagataaaaaatactaaagtgtgctgggtgcagtggctcgtaatcccagcactttgggaggcagaggtgggaggattgcttg

SEQ ID NO: 587531 - DNA, 549 bp, Homo sapiens
tgacttcattcttttttatgactgcataatattccatgatgtatatataccacatttcctttatccagtcttccattgataggcacttaagttgattccatgactttgctattgagaccagtgctgaaataaacatgtgagtgcaggcatcttctttatataatgatttaaaaggctaatatttttaaaaggtgaatgtttatatcatgcatctgatataaatataaaatgaatacatgtaacaaattttrgttaactcactaattgttgagggaacccataaaatgttactggttgaaagaattcaaagtactgcatacatacatataagcagataaagaatgcttaaatggataagtaaatgtgacttggcatagattttatttaaatcattaactattgagagaaccagtaaaaacttacaacaggttgaaagtagaatttaaagtaccatacacatatgtaagaagataaaaaatactaaagtgtgctgggtgcagtggctcgtaatcccagcactttgggaggcagaggtgggaggattgcttg

SEQ ID NO: 587532 - DNA, 549 bp, Homo sapiens
tgacttcattcttttttatgactgcataatattccatgatgtatatataccacatttcctttatccagtcttccattgataggcacttaagttgattccatgactttgctattgagaccagtgctgaaataaacatgtgagtgcaggcatcttctttatataatgatttaaaaggctaatatttttaaaaggtgaatgtttatatcatgcatctgatataaatataaaatgaatacatgtaacaaattttggttaactcactaattgttgagggaacccataaaatgttactggttgaaagaattcaaagtactgcatacatacatataagcagataaagaatgcttaaatggataagtaaatgtgacttggcatagattttatttaaatcattaactattgagagaaccagtaaaaacttacaacaggttgaaagkagaatttaaagtaccatacacatatgtaagaagataaaaaatactaaagtgtgctgggtgcagtggctcgtaatcccagcactttgggaggcagaggtgggaggattgcttg

SEQ ID NO: 587533 - DNA, 618 bp, Homo sapiens
aaattacaatttgtcatcttctggcttgacaaataactactcaagaagaaactaatgagacatactagatatgaaactggttactaaagaaaaatttatgcaaaataaatgcaacttggtttttcattataaatacaggttccatatattttgaacaccaaataggtcaaaggatattacaagaaaatgtatttttttgcagtcacacatatgtgtgtgtaatactctcctaatttgactctgtgctttacttcctattactccaccagaaattttccacttagcagtcagactgagtcctaaaaaaattatgtcatgttatttccttgcttaaaacactctgatagttttccatcgcagttaaataaaatayaaactccttacttggtatgacaaagtgctacttttcaatctgaataaagtggtccctgtctctctctctctgactttatctctctattctctcctaagttccaatgactttctccctgtgtagggaaccaggctcactgctgcctcagatccttcacactagctgtttcctctgcttataatgctcatcctcccaaactctgactagttacatctctttttcattcagatctcagataaaacccg

SEQ ID NO: 587534 - DNA, 557 bp, Homo sapiens
tcattccattttaaaaacatatctcatattatattctggcagctgaatatatccaccatcgcatgttctaagataggcactaggttaagtaacggaggaggactagttcaggaggtctgatggagtagggttacctgccttgaagatcatgccgagggaggttctatagaaaataaagccattgatttatcagccaggcatgtgaytgtagaaaacgagacacttaaaacaaaatacaaatttgcatagattcaatgtgcaccacaatttatcctccagcaatttatcgagttctacttaatagctctaaaagcaggaaaaacaaactttaaagataaaccatacaaacttattaaatatgcgttagcccaggagggtagaaagttgttagagaactggggaatgtaaatgtagacaactggaggtgaaaatggggaaggaaacagctaagaaaacaataatgttaacagaggaagtcaactgttgaggcaatagtcacattacaggtgaaatagcaatatctatgccacaaaactaaaaaaaatagcaggaaatca

SEQ ID NO: 587535 - DNA, 604 bp, Homo sapiens
cattttgtaatttcctcactgtgtctttcatttccagaacttctaattggtttttcttgatgatatctagctctctagaaaatttttcattcacatttcgaactgcttttaaaattttctttacgatggtttttgcctgtctctgatatctccttgagtaacttaataattgatcttctgaatttcttatctggtgtttcaaagatttcatcttggtttgggtccattgctggagagctagtgtgatcttttgggggtgttatagcaccctrttttctcatatattcaaaggtttttttgttccttctcatttggatagactatttcttctaattattcttgaatatatgttagatttgactatgcttctttttttttgtttgtttttaaatttattttttcccttaaagatgataccttaatacttatagttaattatagcctaatttggttcttgttcttggtgctttcaggggtgaagactctgtagagttccttggttatagaagagtctttgtacgatggctttcccatatgctggttgtagtagcaatcaatgcactcaatgtatgagcaagttcactatctcctatggtttggaatg

SEQ ID NO: 587536 - DNA, 604 bp, Homo sapiens
cattttgtaatttcctcactgtgtctttcatttccagaacttctaattggtttttcttgatgatatctagctctctagaaaatttttcattcacatttcgaactgcttttaaaattttctttacgatggtttttgcctgtctctgatatctccttgagtaacttaataattgatcttctgaatttcttatctggtgtttcaaagatttcatcttggtttgggtccattgctggagagctagtgtgatcttttgggggtgttatagcaccctgttttctcatatattcaaaggtttttttgttccttctcatttggatagactatttcttctaattattcttgaatatatgttagatttgactrtgcttctttttttttgtttgtttttaaatttattttttcccttaaagatgataccttaatacttatagttaattatagcctaatttggttcttgttcttggtgctttcaggggtgaagactctgtagagttccttggttatagaagagtctttgtacgatggctttcccatatgctggttgtagtagcaatcaatgcactcaatgtatgagcaagttcactatctcctatggtttggaatg

SEQ ID NO: 587537 - DNA, 512 bp, Homo sapiens
gccattctttcattgccataaagaaatacctgagactgggtaacttataaagaaagagatttaactggctcatggttctgcaggctatataggaagtatagtagcttctgcttctagggagacctcaggaaacttagaatcatggyggagggcaaaggggaagcaggcttgtcttacatggtcagagcaggagaaagagagagagtggggagataccacacatattttaactaccagatctcacaagaactcacaatacagtatcaaggaaggacgttgctaagccatttatgaaaactctgaccccatgatccagtcacctcccattaggccccacctccaacattggagattgcatctgaacgtgagatttggttggggacacagatccaccccatatcagtgagccagtgatcaacttatgtttggcaggcaggacgagcatgctctgtagtggattagttctcatgattcctaacacctgaagcagctcttaattccttcttatttga

SEQ ID NO: 587538 - DNA, 562 bp, Homo sapiens
ggatatgtggcatgcacctgtaatcccagctacttggaaggctgaagtgggaaaatggcctgagcccatgagttggaggttacagtgagctatgattgtaccactgcattccagcctgggcaacagagtgagaccctgtctctaaaaaagattaaaaaaaaaaacaaagacagaatattgttatcttagtagttgatacggtttgtctgcgtccccacccaaatcttgtcttgaattgtagctcccacgtgttatgggagggaccccagggggagataattgaatcatgggggtggttctcccatactgttctcattgtagtgaataagtctcatgagacctgatggttttatatggggagacccytttcgtttggctctcattctctctttgcctgtggccatgtaagaccttcctttgctctttctttgtcttccaccacgattgtgaggcctccccagctatgtggaactgagtccattaaacctctttttctttataaattacccagcctcaggtatgtctttaccagcagcgtgaaaatggagtaatatagtagtca

SEQ ID NO: 587539 - DNA, 400 bp, Homo sapiens
ttaaaataattttttcagggaraatgaaagtgatatacctcagaaacattgatctacatttaaaaagcaagaatgtcagagaaggaaaaaggaagtcgaaattattatccttattttttatttatctaaaagataactgaaatattaataatactgttactaatatgttggtgtttaagtggtaagcacccaatacattaagcaccaatacagtatgaacattattaacaggaatgtcataataggaggaagaagttgagaaaacttcttcagaaggtactgtactacatgtgaagcagcataatatataatttgaagctagacacattagttaaaactgtattttgaaagctccaacagaagcactaaacaaacaaaatttttttaaaaatatttaaat

SEQ ID NO: 587540 - DNA, 619 bp, Homo sapiens
tcttacttttaaatagcatttttaaatgctatttttaatgctattttaaatgctatttaaaaagtatttcaaatacattttcctttctaaaattgtattcattagaatttataatatattttgctgttttaaataaattatgtactattaacaattgtaataaaaacttacctagaagatacatagagatttatggtaacagggactcaaattttaaaataaatatttgtagagaagtatgataagatattcaatataaggccttcgagcataaaatcatattacattaggacaaattamtgttgctaaattggaatgggaatagaaattcatgaagacagaatgaatgatataaaatgtccaactcaaagtaacagttcattcatatgtttttaaataaatgatgttatcaattatcatggtatttatactcaagttctgtcaatatttaaacatatcatactttcaactatctatacttgcttaagaataaaaaatagaagatggccgaataggaacagctccaggctacagctcccagcatgagcgacgcagaagaccggtgatttctgcatttccaactgaggtaccgggttcatctcactggggagtgttggaa

SEQ ID NO: 587541 - DNA, 540 bp, Homo sapiens
ctgcaactttactgaatttgtttattctaacagtttttggtggaatttttagagttctgtctatataagatcatatatatttttcaaacaattagtgaacaatttaacttcattttcaatttggatgctttttatttctttctcttgactaactaccgtgactagcacttccagaactgtgtagattagaaatgatgagagtacacacccttgtcttgttcctaatcttaaaaaaaaagatttcagcttttcacttttgtgtatgacattagctataggattgtcatatatggcttttaatgtattaagttacattccttctatacctaattcgttgagagcttttttttaatcatgaaaggaggctgagttttttcaaatgccttttctgcatctattgagatgatcatatagtcttgcttcattcattcactctattyccactctcattgttgaaaagctatagagtctcacaccttttgttttgctttgttttcattttttgtttgtttgttttcttttaacttttaggttcaggag

SEQ ID NO: 587542 - DNA, 484 bp, Homo sapiens
aatcaatgtacaaaaatcagtagccttcctgtacaccaatagcatccaatagcaccaaagtagagagctaaatcaggaacccaatcccatacaaaaaaataaaatacctagaaatacagctaaccatggacatgaaagagctctataatgagaagtataaaaacactgctcaaataaatcagagatgactcaaaaaaaatggaaaaacatgccatattcatgagtaggaagaagtaatatagttaaaatggcgatactgctcaaagyaatttacagattcaatgctgctcctatcaaactatttataacattcttcacagaactaaactatttaaaaatgtatatagaaccaaaaaagaccccgaatagccaaggcaatcctaagcaaaaagaagaaagctggagacatcacgttacctgacttcaaactataccacagggctacagtagccaaaacagcatggtactggtacaaaaacagaca

SEQ ID NO: 587543 - DNA, 637 bp, Homo sapiens
cacatgcttaataattaatggaaatgggactccatcccaggccttctaactctaaagtttctaacttcaaaggtaacactgtaatagagatttaaaacaaaattctgtggaaataccaaagagataattctttctaacatttttttgagttgtaatttgacaagcaatgagctgcacatgtttaagtcatagcatttgataagcattgaaatgcagctgtgaagccatctgaccatctatgactacagattaatgtgcatttctagaattttaagtttgtctgaagtttgtcagattaattatattgagatccaaccataatgctgcatgtatcaaaagtttattttattttattgctgggtaatattccattgtttggatataccacgatatatttatccattcagctgttgaaagacatttggattgtttccagttttagtctattacaagtaaagctgctgtaacaacaaaagcacaggcaaaaaaagtaaaaatagacaaactgtactacatcaaaatttaaaactgctgtgcatcaaaggacacaatcaacaatgaaaagacaacctacagaatgggagaaaatatttgcaaagtatrtatctaataaggggttagtatccagaatatataa

SEQ ID NO: 587544 - DNA, 575 bp, Homo sapiens
caagaagttctttaaaactaatgaaaacaaagatacaacataccagaatctctgagacagagctaaggcagtgttaagaggaaaattcaggctgggcatgatggctcatgcctgttatcgcagcactttgggaggctgaggcgggcagatcacttgaggtcaggaggtaaaaatacaaacattagccaggcatggtgatgtgtgcctgtagttccagctacttgggaggctgaggcaggagaatcgcttgaacccaggagacgaggttgcagtgagccaagattgcgccattgcactccagcctgggtgacaagagcaaaactccctctcaaaaaaaaaaaaaaaaattatagcactaaatacccacatcaaaaacttagaaagacctcaagttaacaccctaacttcacagctgaaagaattaaataagcaagaacaaatcgaccccaaatctagcagaagatgagaaataacaaaaatcagagctgaactgaaggaaattcatacatgaaaaatcmttcaaaagatcaatgaatccaggagcttttttttcccacaaaaaattaataaaatag

SEQ ID NO: 587545 - DNA, 599 bp, Homo sapiens
ttttcctctctgtctttgcctccttttctctctgtctctttcctctctctgtctctctgctggtctttctttgcctctgccagccgctgatgctgctgttctctcaaccactgtgtgtgtggggggtctaaaactagctgtaaccaagtgtctatgtatgggaactggtctgggtaccctggcttatgggttaccttgtgccatacctttgaaacaagggacctgtccagccttccttctgatggccaacccacctctaatgccggccagtctatttcacacaaagttctaaattttcctggtgtcatagtaacatcataatctcccttaaatcctttcttgaaatttttcaacatagttcctagtggagtgggcttactttgtgcctgacccatgcttcttcgagacaaaacaccaggctcacaaccacaygcatgccacaaaacaaagaacgggtgagaagggcacacacacacttttacagtttacatcaaacaaaaaccaaaaccaaaatcagagtatccagaaatccaagccaggtcaaaaccaaaaccaaagtatcaagcaaaccaagtcaagtcaaaaacaaaaaccaaagt

SEQ ID NO: 587546 - DNA, 543 bp, Homo sapiens
aagttttattatttgtatttgctatttatatattattatatatgttaaggctaacagaccaggagatgactgctaytgagaaaagtttgttgttcacagatccaaataggaatgggcatgccatgttactggaggatagagtgtggtacatggaaagcaccaaggtcttcggatcttcgtatgaggcagggcaaacaagttttggattggttagtcagaataatttcaatgggctctagggtttaggggctgtacctagttgtctggtacctggtcctatggtgattatggcaggcagacagtggtctgaagtgtcagagcccaataaaggaagtggttcggatattggctgtcgattggttgatttgcatttggaaggtgcactcacaggcaaattgtttgctatctctaggaattgtctaaccctaggaggggtagtgcctcgaagattagcaaggtccgagatgtcaaaatattagaatacagaaaataaaagacatggttaatatagttaattgtatagttaataatagctaataatat

SEQ ID NO: 587547 - DNA, 543 bp, Homo sapiens
aagttttattatttgtatttgctatttatatattattatatatgttaaggctaacagaccaggagatgactgctattgagaaaagtttgttgttcacagatccaaataggaatggrcatgccatgttactggaggatagagtgtggtacatggaaagcaccaaggtcttcggatcttcgtatgaggcagggcaaacaagttttggattggttagtcagaataatttcaatgggctctagggtttaggggctgtacctagttgtctggtacctggtcctatggtgattatggcaggcagacagtggtctgaagtgtcagagcccaataaaggaagtggttcggatattggctgtcgattggttgatttgcatttggaaggtgcactcacaggcaaattgtttgctatctctaggaattgtctaaccctaggaggggtagtgcctcgaagattagcaaggtccgagatgtcaaaatattagaatacagaaaataaaagacatggttaatatagttaattgtatagttaataatagctaataatat

SEQ ID NO: 587548 - DNA, 614 bp, Homo sapiens
gtgattctcctgtctcagccacccaagtagctgggattccaggcatgcgccaccacacccggctaattttttttgtctttttagtagagatggggtttcatcatgttggccaggctggtctcgaactcctgacctcaagtgatccacctgcctctgcctcccaaagtgctgggatatgcaagcgtgagccaccatgcccagcytcaactgtctttcagctaattcacactgctgtattatttctcccgttttcttgtgctatattaataaaatcttagaatttaggtctctaagatggtttttcttgttagaaatttctgtatagatgtttagaatctgcagactgtgtgttgaaggggagggggtgtctgtgtatgcatatatgttcaatgctggaaaatggttttgcttttttgaaatacaatctcaaaaatttcagtgctgatgactaaattttaagtgatttttaagtagaacagaactaacaaaatatatctatggatcagtccatattctaccagtctgcagcttctgttagaagaaagaccttaactcagtagaggaggagatggcttctttctgagccttcatctcttgcttttagaaaaagagga

SEQ ID NO: 587549 - DNA, 496 bp, Homo sapiens
gggcccttggtggaaacatttatatatttaatgcagatgcatagtgtttttcaaatcttyaacatcattttttcaacttttaagatataatatcaactattctaaatacaggtaatggtatatttaaggctaccataacatcctatttagagggtggttttttttaatttatctaatggctacgatatagccagattcaaataacatatgtactcaataggtttcaatcatatatataatatattttttgtaactatgaacatacacagttttccagaaatagattttacactgtttagaattccaacacctacagtggaaagactgtttattgtagtaatgcatggctgaagcataaaagggagagagaatttctttatatacacaaacatacatgaatatgcatatctatatgcatagatgtacctatcctgcacccaaaaaggtgcctggtattggcactaaaatcatgtagttatactgggcagcaataata

SEQ ID NO: 587550 - DNA, 582 bp, Homo sapiens
caggtgaccgtttctaggaagaactcttgctctctctttgtcttcctctctctctgctctcctcctcgtgctaactcagggggcactctctttcccaagtcatagacacagagcttgcttcacacatgggtactcatcacttgtcataatcgcccaaggaccccgaaaagggtcacrcaatgtgtgctcatcccaaatctgctctctctctgtctctgtctacctctgcctgtctatgtctgtctgtctgtccatctctatctctcttcctctctctcttacatacatacacacacttacaggaaaaccacctagagcttctctcaaccgcttttgggtaggactagagggctgtcccgttggcagaagaaaaatggggagaagccattgctccactatgttagaacaatgttcctaagtctttaacatgcacacgaatctcggtggcggggagggtctcgttcaatgtcagattctggctcagcaggcccatggccgggtctgaaattctgcatttctaataagcttctagtggtgctgaagctgctggtctatgggccacatgttgagtagcaagagatt

SEQ ID NO: 587551 - DNA, 582 bp, Homo sapiens
caggtgaccgtttctaggaagaactcttgctctctctttgtcttcctctctctctgctctcctcctcgtgctaactcagggggcactctctttcccaagtcatagacacagagcttgcttcacacatgggtactcatcacttgtcataatcgcccaaggaccccgaaaagggtcacgcaatgtgtgctcatcccaaatctgctctctctctgtctctgtctacctctgcctgtctatgtctgtctgtctgtccatctctatctctcttcctctctctcttacatacatacacacacttacaggaaaaccacctagagcttctctcaaccgcttttgggtaggactagagggctgtcccgttggcagaagaaaaatggggagaagccattgctccactatgttagaacaatgttcctaagtctttaacatgcacacgaatctcggtggyggggagggtctcgttcaatgtcagattctggctcagcaggcccatggccgggtctgaaattctgcatttctaataagcttctagtggtgctgaagctgctggtctatgggccacatgttgagtagcaagagatt

SEQ ID NO: 587552 - DNA, 357 bp, Homo sapiens
gtgggtcacttaccttggaccrtgagggaaactgtcaccaataaaatatctgaacctctaggttgtatgacacaaaattatggacaggtattctcattgctaccagcacggtgtggatgtcccgagcctagaaactcacataaatactggtctagaaactgtttgccctttagaggcaacagatgcaatcacaatgtcattccagaggaacatctctgcaatccaggcatatgcaggacccctcaggagatagcttcacccacataaatacaaagcgcgcaaagaaatccaaagctctgagcagtaaacagcagattcaaccagaaaacatgtcagaaatgtaaaattgtatagaag

SEQ ID NO: 587553 - DNA, 622 bp, Homo sapiens
aatggctttccatgtaaaagaataaaatcaggttcctatctcatagcatgcacaaaaataaattccagtttggctaaagcctatatattaaaaatataacttttaagctactaaaaaaaaatctttatgacatcaggtaataaaaagctttcaagatataagagaacaaaccgtttaaaaattcatagatttgtctatatcaaaatcaaaatgctttatgacaaaaaatgatagattagaagttgtttacaatatgaaataccaaaaaggtagtcttcagaatatataaagaccttctacaactcaataagaaaaaggcgctcaacccaatagaaagagggtaagagatttaaaggggtaattcacagaagaggaaatccaagtggtcatgaatacatgaaaagacrctcaactcatggaagcactcacagaaaacaagttgaaatcttctcacatcatgtcaatctccatattttagaaaaaaattaaaagtctgaaaatactaatctttgtgaaaatatgaggaaaatgggaactttcagaaacactgctagtgggggataaattagcacagccatttggggaacagctttgcagttattagtaacattgaaaaatgcac

SEQ ID NO: 587554 - DNA, 622 bp, Homo sapiens
aatggctttccatgtaaaagaataaaatcaggttcctatctcatagcatgcacaaaaataaattccagtttggctaaagcctatatattaaaaatataacttttaagctactaaaaaaaaatctttatgacatcaggtaataaaaagctttcaagatataagagaacaaaccgtttaaaaattcatagatttgtctatatcaaaatcaaaatgctttatgacaaaaaatgatagattagaagttgtttacaatatgaaataccaaaaaggtagtcttcagaatatataaagaccttctacaactcaataagaaaaaggcgctcaacccaatagaaagagggtaagagatttaaaggggtaattcacagaagaggaaatccaagtggtcatgaatacatgaaaagacactcaactcatggaagcactcacagaaaacaagttgaaatcttctcayatcatgtcaatctccatattttagaaaaaaattaaaagtctgaaaatactaatctttgtgaaaatatgaggaaaatgggaactttcagaaacactgctagtgggggataaattagcacagccatttggggaacagctttgcagttattagtaacattgaaaaatgcac

SEQ ID NO: 587555 - DNA, 548 bp, Homo sapiens
ccagctacataatttgaccaatggttgtggtggtttgaaaaaccttcatttagcatctttgaaatttcatttgaatgctttttacaatctctcccagattattgattaaggcattctaagaggccagtcatctggtctcacaatcaccacttccttcagactcagtagagggttatttatcagcaatcttggcgatcattcaaccctttttcgagaagtttttaatccctagcaacttctaaacacaatgaaacctttaaaaacttcaaatagagaagcattttatctcccttcaaagcagactgttttaaattgccaaattttgwggtttaattgatctttttcatctttcctcaagatatctctataaaacaagaatgagtattctgttactatcacactatgcatctaatgacaacagaagagaattttaggctatagccctttagactgaacaggtttaaaatttaactggtatcccaaggtcaagttattcaaattgctcacaaatagtttttcttttcagactttatttatcctaagatagt

SEQ ID NO: 587556 - DNA, 567 bp, Homo sapiens
tattaagacttttaattgaagtataatgcacatggagaaaggtacatattatcctaagtatatcacttgatacgttttcacagaacaaacacactcatcaaaaaacggaatagaatcagaaccacagaagcctttcttgtgcccccttgtgtttttttctgcttttcctcctatgcaggtaacctctatcatgccctttaacagcacaatttagtcagttttgtayttttatataaacaaaatcatacagcatattcttttttgtatatagctttttaatttcaatattgtttttgagatatatcaaattgctgtatagaattctactgtgtgaatataccacactacgccttttacagttgatggccatgaaggcagttttagttttgggatattacaatcaatgctgttctgaacattctagtacatatttttgggtgaacatagataggtatttgtgttaggtgtctatctgacagtggagtttctggatacgcagtgtttcactttggtagattccacgagctaaaggggttatatcaatttacatatcagtgtatgagaaat

SEQ ID NO: 587557 - DNA, 567 bp, Homo sapiens
tattaagacttttaattgaagtataatgcacatggagaaaggtacatattatcctaagtatatcacttgatacgttttcacagaacaaacacactcatcaaaaaacggaatagaatcagaaccacagaagcctttcttgtgcccccttgtgtttttttctgcttttcctcctatgcaggtaacctctatcatgccctttaacagcacaatttagtcagttttgtatttttatataaacaaaatcatacagcatattcttttttgtatatrgctttttaatttcaatattgtttttgagatatatcaaattgctgtatagaattctactgtgtgaatataccacactacgccttttacagttgatggccatgaaggcagttttagttttgggatattacaatcaatgctgttctgaacattctagtacatatttttgggtgaacatagataggtatttgtgttaggtgtctatctgacagtggagtttctggatacgcagtgtttcactttggtagattccacgagctaaaggggttatatcaatttacatatcagtgtatgagaaat

SEQ ID NO: 587558 - DNA, 478 bp, Homo sapiens
tacatgtacatcaactacaaccttgtttatggtatcatttcttacctgggctgcctcaatggyccctgatgggtctgctgcagcctctaaagtcccttccaatccataatcttatatgttcgtcagaatgggcttttcaaactggaggggtatcagatcatgttaccttgatttccccatgtgtcctccccaactcttgccaagcttcctattgctctttagataaaattcttaacatggttcatgtttgcatgaacaatttttttttttttttgagatggagtcttgctctgtagcccaggctggagtgcagtggcatgatctcggctcactgcaagctctgcctcccgggttcacgccattctcctgcctcagcctcccaagtagctgggactataggcgcccgccaccgcaccctgctaatttttttttttttttttttttttgtatttttagtagagacggggtttcacggtgt

SEQ ID NO: 587559 - DNA, 478 bp, Homo sapiens
tacatgtacatcaactacaaccttgtttatggtatcatttcttacctgggctgcctcaatggcccctgatgggtctgctgcagcctctaaagtcccttccaatccataatcttatatgttcrtcagaatgggcttttcaaactggaggggtatcagatcatgttaccttgatttccccatgtgtcctccccaactcttgccaagcttcctattgctctttagataaaattcttaacatggttcatgtttgcatgaacaatttttttttttttttgagatggagtcttgctctgtagcccaggctggagtgcagtggcatgatctcggctcactgcaagctctgcctcccgggttcacgccattctcctgcctcagcctcccaagtagctgggactataggcgcccgccaccgcaccctgctaatttttttttttttttttttttttgtatttttagtagagacggggtttcacggtgt

SEQ ID NO: 587560 - DNA, 478 bp, Homo sapiens
tacatgtacatcaactacaaccttgtttatggtatcatttcttacctgggctgcctcaatggcccctgatgggtctgctgcagcctctaaagtcccttccaatccataatcttatatgttcgtcagaatgggcttttcaaactggaggggtatcagatcatgttaccttgatttccccatgtgtcctccccaactcttgccaagcttcctattgctctttagataaaattcttaacatggttcatgtttgcatgaacaatttttttttttttttgagatggagtcttgcyctgtagcccaggctggagtgcagtggcatgatctcggctcactgcaagctctgcctcccgggttcacgccattctcctgcctcagcctcccaagtagctgggactataggcgcccgccaccgcaccctgctaatttttttttttttttttttttttgtatttttagtagagacggggtttcacggtgt

SEQ ID NO: 587561 - DNA, 416 bp, Homo sapiens
tatgtctactttcattaccttagtctatttagaccattttaaaataattatgaaagtgactttgcaagaagagcataatgaatttcacatccgggagataatccactgtgatgaaaaattatcaaaatcagaaaacaatgtttattttctccctgtgacaatgtgagaattgttaagtgggaatatttcttctttcacttctttgtatttgtttctattctttggtaaacataataatgttgaggaaatattttgataatttattgggtacattatttatttcttattttggaagccttggagctgaattcaggcttctctaaatggcmtatatatttaactttataattgcaaaatgttcccccttttaaacagtatattgtaaatctgaaaatacagtttatacttctttcaat

SEQ ID NO: 587562 - DNA, 310 bp, Homo sapiens
ctgactttgtttctttcggtcttatcattcagtttagatagtacaaagacttcattccagtgttgaagtgtgaaggtgtgagayaaagatcaaattacctgtacaagaaagagaaatggatgacttatcatgttttcacattcttaagatttctaggtgaaacttcctacccataaatgtcagttaaataaatgtctgaaactgcttgactttcttttgctaaaaatgacattagaattgctatgacttattttgcctgtaggactaaattacagacaaagccccagaatttttctgctattacttttat

SEQ ID NO: 587563 - DNA, 310 bp, Homo sapiens
ctgactttgtttctttcggtcttatcattcagtttagatagtacaaagacttcattccagtgttgaagtgtgaaggtgtgagacaaagatcaaattacctgtacaagaaagagaaatggatgacttatcatgttttcacattcttaagatttctaggtgaaacttcctacccataaatgtcagttaaataaatgtctgaaactgcwtgactttcttttgctaaaaatgacattagaattgctatgacttattttgcctgtaggactaaattacagacaaagccccagaatttttctgctattacttttat

SEQ ID NO: 587564 - DNA, 586 bp, Homo sapiens
atcctctccccctctggatattagaaacaatatcacaagggcgtgtacatcccctgctataatgtggtaatatcatcctctcccttcctggatattagaaactatatcacagatgaggtgcacacctcctgcaatattgaaagtaacatcatcctcttaccccctgaatattaggaacaatatcacagggaaggtgtacaccttctgcgatattgggagtaatacccttttccccctacttagatgttagaaacaacatcacggggggtgtacacctcctgcgatattgggagtaatatcatcctctgtatattaaaaacagtgtcracaaaaaggtgtacacctcctgagatactgggactaatatccttttctccaaacctatatattaagaacaatatcacagagggtgtgcactccctgcgatattgggggtaatatcatccttctccctcttggatatcaggaatgatattacgggggggtgtacatcccctgtgatattgggattaatattgtcctctcccctcctggatattgggaaaaacatcacgtggggtggggggtgtatacaccctgcaatatt

SEQ ID NO: 587565 - DNA, 444 bp, Homo sapiens
aggtacacatgactgtgaccatcacatatgaaggtggtaagccacagggcacaccgtaaccctggtagctctagccatgttttatcttcttgcacaaaacttaagtggcatcaaaaaagttataaatgtttattgaaagcaatmaaaaataagctacagtttatgaatatagcaaattgccttgatatcacataatagtctttctcatatgatgcaatatgaaactccaaatagatgtcaataaaaggattcctattcttaatttttttaaacttgctcacctataatcaaagatacagcaaagacaccttagtttttcttaaaagaggcagactggatgctaacaattaatatcacttattaaaaaacattattgaaatccaaaaaatgagagaatgatatctaaatgaaaagccaccctaaaagagtgaaataggctaaaaa

SEQ ID NO: 587566 - DNA, 444 bp, Homo sapiens
aggtacacatgactgtgaccatcacatatgaaggtggtaagccacagggcacaccgtaaccctggtagctctagccatgttttatcttcttgcacaaaacttaagtggcatcaaaaaagttataaatgtttattgaaagcaataaaaaataagctacagtttatgaatatagcaaattgycttgatatcacataatagtctttctcatatgatgcaatatgaaactccaaatagatgtcaataaaaggattcctattcttaatttttttaaacttgctcacctataatcaaagatacagcaaagacaccttagtttttcttaaaagaggcagactggatgctaacaattaatatcacttattaaaaaacattattgaaatccaaaaaatgagagaatgatatctaaatgaaaagccaccctaaaagagtgaaataggctaaaaa

SEQ ID NO: 587567 - DNA, 426 bp, Homo sapiens
ggttgtgggaagaattattggtggctatctttggaaataatctaccacattggccttataaaatttgtaaaattgaggcacrtggaaatgtgaagaaagaatattctaggtggaagaaattaactaagcaaaggttggaaggaggaaagtatacgaaaaaaaaattgctgaatatttttggagcccagactctgaagggtgattgaaattagactctggagactggtctatagctgaggagtctctcaatgttcctcatgaaaattcatgcacagcctcctcatgcccatttctggtatccattggctttagatctgcctacatatgttcactacagaactggaagtgtgctaaagaagaaaataaacagatcagaggcagaagcatattctctcataagcaaaagaagcatgaagccagtatcat

SEQ ID NO: 587568 - DNA, 426 bp, Homo sapiens
ggttgtgggaagaattattggtggctatctttggaaataatctaccacattggccttataaaatttgtaaaattgaggcacatggaaatgtgaagaaagaatattctaggtggaagaaattaactaagcaaaggttggaaggaggaaagtataygaaaaaaaaattgctgaatatttttggagcccagactctgaagggtgattgaaattagactctggagactggtctatagctgaggagtctctcaatgttcctcatgaaaattcatgcacagcctcctcatgcccatttctggtatccattggctttagatctgcctacatatgttcactacagaactggaagtgtgctaaagaagaaaataaacagatcagaggcagaagcatattctctcataagcaaaagaagcatgaagccagtatcat

SEQ ID NO: 587569 - DNA, 426 bp, Homo sapiens
ggttgtgggaagaattattggtggctatctttggaaataatctaccacattggccttataaaatttgtaaaattgaggcacatggaaatgtgaagaaagaatattctaggtggaagaaattaactaagcaaaggttggaaggaggaaagtatacgaaaaaaaaattgctgaatatttttggagcccagactctgaagggtgattgaaattagactctggagactggtctatagctgaggagtctctcaatgttcctcatgaaaattcatgcacagcctcctcrtgcccatttctggtatccattggctttagatctgcctacatatgttcactacagaactggaagtgtgctaaagaagaaaataaacagatcagaggcagaagcatattctctcataagcaaaagaagcatgaagccagtatcat

SEQ ID NO: 587570 - DNA, 379 bp, Homo sapiens
gtgtgcaggcaggggagacacatatatggaaaatgtgttcctgccattccttgcttcttcattcccatagagtattcattatgcccatgtgagcacagaaatattgtggactcagagtgtggagcagttcagggagacacaaagcaartcaatgaatgcctgttacatcatgactgagtaagcaggagcacaggcaatcctgagaggctacatttccatttgaaccagaacttgattcaaatgcacaaagaaggcaatgacattctaagaaaataaaccaccatgaaactctgccatattctttcttactcattactttaaagtatttgccaaccagctacaataaaaatgatatagaagaaaacgatatagaagaaaa

SEQ ID NO: 587571 - DNA, 379 bp, Homo sapiens
gtgtgcaggcaggggagacacatatatggaaaatgtgttcctgccattccttgcttcttcattcccatagagtattcattatgcccatgtgagcacagaaatattgtggactcagagtgtggagcagttcagggagacacaaagcaagtcaatgaatgcctgttacatcatgactgagtaagcaggagcacaggcaatcctgagaggctacatttccatttgaaccagaacttgattcaaatgcacaaagaaggcaatgacattctaagaaaataaaccaccatgaaactctgccatattctttcttactcattactttaargtatttgccaaccagctacaataaaaatgatatagaagaaaacgatatagaagaaaa

SEQ ID NO: 587572 - DNA, 601 bp, Homo sapiens
attcggcaaaatataagccattttaatgtaaatgatctattgaggattatagatctttgtggtaaacaattcaatgaaattattgtttaattagtgcctataacgtatatggcctgctgtacagtgtagtaagaattacaataaagtgagagcaggagattcctctcttctgataaaggatgaaatatgaaaatatgttaagtgcatttcaaatgttggggatggggagacagggagagaaagaatatgcgtctgaggaaaaacaaagcttcctggtatctgagaaaggttattaaaaatgagtaatatcctgccaggtaggattgaaggggtatgaaatcccagttaaggaaacagcacgaaggatggagaagaaactgtgtgttttgtttgacttccactggtctyagtgtctcacccatgaagggaagtagttgcagagaaatggggcatttcagactgtgtttttgaaaaccacttagcccattaaatagttcttctgggttaacttgcttgagggaagttcttggaaaaaagacctattatctattagtacatatttgagctccttgcaaatgtgcacagtttagaaagacttgtt

SEQ ID NO: 587573 - DNA, 601 bp, Homo sapiens
attcggcaaaatataagccattttaatgtaaatgatctattgaggattatagatctttgtggtaaacaattcaatgaaattattgtttaattagtgcctataacgtatatggcctgctgtacagtgtagtaagaattacaataaagtgagagcaggagattcctctcttctgataaaggatgaaatatgaaaatatgttaagtgcatttcaaatgttggggatggggagacagggagagaaagaatatgcgtctgaggaaaaacaaagcttcctggtatctgagaaaggttattaaaaatgagtaatatcctgccaggtaggattgaaggggtatgaaatcccagttaaggaaacagcacgaaggatggagaagaaactgtgtgttttgtttgacttccactggtcttagtgtctcacccatgaagggaagtagttgcagagaaatggggcatttcagactgtgtttttgaaarccacttagcccattaaatagttcttctgggttaacttgcttgagggaagttcttggaaaaaagacctattatctattagtacatatttgagctccttgcaaatgtgcacagtttagaaagacttgtt

SEQ ID NO: 587574 - DNA, 637 bp, Homo sapiens
tattctaatttcatgtattagagagaagttttctacacatgaccatcttcctggtataaactatttcagtcattggtcaattttagaaaaaattaagggaaatattacattgattggtaaaaagttttacttttaaattattcattatttgtttaaactaatgtctcctgatagagggtaaaagacatgtattcacattgatgtcaccacatattaaaatctttagatctctgatgtttcacaattaaggcctgatactaagtatgacatcactctttgtaactggttatgtgtaccattaaaattatttataatgacataattttcaattattaaacataaactcacagctaaccatttacttgataagacatttatttgcattatttcatttaataatctttacaactatattatagaaaaatatcattattgtcttcatctcaaagataaagaaacttaagcgtggtaatttaaataacttacccaagatagcacagcaaataaatcttagtttcctagacgttttagactgtgctcctgcaacagatacgtrtatatatatatatatatatatatacacacacacacacatatatatacatatatacacatatatatacgtatatatacacac

SEQ ID NO: 587575 - DNA, 637 bp, Homo sapiens
tattctaatttcatgtattagagagaagttttctacacatgaccatcttcctggtataaactatttcagtcattggtcaattttagaaaaaattaagggaaatattacattgattggtaaaaagttttacttttaaattattcattatttgtttaaactaatgtctcctgatagagggtaaaagacatgtattcacattgatgtcaccacatattaaaatctttagatctctgatgtttcacaattaaggcctgatactaagtatgacatcactctttgtaactggttatgtgtaccattaaaattatttataatgacataattttcaattattaaacataaactcacagctaaccatttacttgataagacatttatttgcattatttcatttaataatctttacaactatattatagaaaaatatcattattgtcttcatctcaaagataaagaaacttaagcgtggtaatttaaataacttacccaagatagcacagcaaataaatcttagtttcctagacgttttagactgtgctcctgcaacagatacgtatatatatatatatatatatatatacacacacacacayatatatatacatatatacacatatatatacgtatatatacacac

SEQ ID NO: 587576 - DNA, 619 bp, Homo sapiens
ataaacttggtgctgttgagggggcatggtgggagtgagaccggcctttcayggtgtgagctctgtgggagctgggtgaggcctgtggctgccagcttttcccacttcactggcaacctgtgtgatgcagcagaggcagctataatccccctgggaacataactccattggcctgggaaccacacccacatcccccacagcagatgcagcaaggagagtctgagctcagacatgcctaacactgcccctacctgatggtctttctctagccaccctggtagctgaagagaaaggacataacctcttgggagctctatggccctgcctacaacctgagaaacctgaatacgtatccaaaggcaacactagggaaaatttgtatcctccctatactaccgcagctgatgagctcttgaaagagccacctcctggctggccaccaaccaacacaaaactggtgcactcaacaaaatacaacttagaaccctcacagagtccacttcactttcctgctacctccaccagagcaggtgctggtacccatggttaagagacctgaagatgtatcacatcacaggattttttgcagacactccccagtaccagcccagagcctggt

SEQ ID NO: 587577 - DNA, 470 bp, Homo sapiens
actgggtatatgtccaaaaaaaataaatcgttctactacagagatacatgcacacayatgttcattgttattcacaacagcaaatacatgaaattaacctagaggtccattaacagtagactagataaagaaaatatggtatatatgcaccatgggatactacgcagctattaaaaagaatggaaaaatgtctcttgcaacaacacggatggagctggaagccattatcctatgtgaattaatgcaggaacagaaaatcaagtaacacatattctcacttataagtgagagctaaacattaagtactcatggtcataaaaagggtaacaatagacacttggtatgtgtcatactgcagagtggaaggagagagtggaacaggaattgaagaactaactattgcatactatgctcagtagctaggtaacgggatcatttgtatttcaagtctcagcatcactcaatatacc

SEQ ID NO: 587578 - DNA, 624 bp, Homo sapiens
aaaaaaaatcacatggttatctcgatagatgtagaaaaagtatttaacaaaattcaacaatatttcatagtgaaaacacttaacattctaggaatagagagaaatagcctaacataatgactgccacatataaaaagcccacaaataatatcactctcaatgttaaaatactgaaggctttttctctaagatcaggaaaaagagaaagatgtatacttttgacacttctattttgcatagtactggaagtcatggcccaggcatttaggcaataaaaagaaataaaaggcatccacatcaaaaaagaagtaaaattatctctgttcatatataacattattttaaatataaaaagcataaacagtcacaaaatataacaaaacaaattattatagataataaataattttagccaaattgcaggatatgaagtcaacgttcaaaaatctgttgtgcctctaggtgttttataccagaatgaaaacacgttaaaatgtactttgattgttaaattgtgtggaatataaaacaacttaagatttattttaaagttaaaggcctatagtgaaaactgaaayctaaacattttatttctattttacgggttaactctaaagataacaa

SEQ ID NO: 587579 - DNA, 571 bp, Homo sapiens
aaaaactcagcaggataccttatttaatatacaacatccacaaaaatcaaaatatttttcagaaaatttattcggtggatcaagttgtatacatttggatcttaattataaaatatttctaaatattttatagtaaaaccaaaaattatctgtacgttacacttatctttgcaagattggaaaaaatgtaatgcaaagtccaacatttaaaattacatatatctgaccttgattgctgtccttgattagtcttgaaaataagttgtaaataaagcaatattttatatatcaarttatattcatatataacttctgaattaattccagatgtgaattcctccaaacaagttgaatcaaacatataataaaatgatgccttatatcagaataaaaaggactgattgtacatctaatagacatctcaaattgaacacggcaccatgcccagataatttttatattttttgtatagatagggttttgccatgttgaccaggctggtctcaaatgcctgggctcaagtgatccatccacctcatcctcccaaattgctgggattacaggtgtgagc

SEQ ID NO: 587580 - DNA, 587 bp, Homo sapiens
aaagtacctgattcatctcattgggacttgttggatagtgggtgcagcccatggagggtgagccaaagcagggcggggtgttgcctcacccagggagcacaaggggtcaggggatttccctttcctaaccaagggaagccatgagtgactgtacttggaggaatggtacactcatgcccaaatactgtgcttttcccacagtcttcacaactagcagaccaggagattccctcctatgcctggcttggtgggtcctacacccacagagccttgctcgctgctagcacagcagtctgagatggacctgggacactggagcatggcagggggaggggcgtctgccattgctgaagcttgcacagggtggttctaygcccacagtgtaaacaaagcagcagggaagcttgaactgggcagatcccactgcagctcaacaaggcctactgcctttctaaattccatctctggggcagggcatatctgaaaaaaaggcagcagacagcttatacagacttaaacatccctgcctgacagctctgaagatatcagtggttctcccagcacagtgttcgagatctgttaacaga

SEQ ID NO: 587581 - DNA, 635 bp, Homo sapiens
gaatactattcagtcataaaaaagaatgaaatctgttcatttgcagcaacatggttgatcctggaggaccttatgtgaaatgaaatgtcaggcctagaaagataaatactgttatccctcatatgtaasagctaaaaacaagttgcaatcatagccctcatatgtaagagctaaaaacaagttgcaatcatagaagtggagagaagaattgtggttaccagaggttgggaagggcagctgggggagaaatagagaaagattggttagaaaatacaaagctacaggtagataggaggaataagttctagcatttgatagcactgtagaatgactgtagtttgacataattaattttcttttatattttcaaaaagatagattttgaaagttccctaaaccaagaaatgataaacatttgaggtgacggatatgctaattaccctgatttgatcattataccttatatacatgtatcaaagtaccattcagtatcccataaatacctacaatcattacatgtcaagtaaaaaggaaaaaaaaaagagagattaccagatgtgaagaaaaaaagagggagaaagttattcatgctctgccagtgttcaaaggccacaggcaaagagtgttctttgggc

SEQ ID NO: 587582 - DNA, 575 bp, Homo sapiens
attcatcatgaacttttttactttctcaagttccttaaacttcgttactcattttcttcctgaaaacttactactcaactttctgaacacagtttaagctttgcctcctctgatacttctcagaatggtcagtcatttcttcatttgtgttctaggagtgctttatactcacttccactataatacctaacaaggtaaactttcatcgtatatttttgtatcagtcttctgctccgtgaactagctttttaagagtyggaacccagctgggcgtagtggttcacgcctgtaatcctagcactttgggaggctgaggcaggctgattgcctaagttcagatgttcgaaaccaccctgggcaacatggtgaaaccctgtctctactaaaatgcaaaataattagctgggtatggtggtgcacatctgtaatcccagctattcaggaggctgaggcgggagaatcacttgagcccaggtggcagaggttgcagtgaaccaagatcgtgccactgaactccagcttgggtgacagagtaagactctgtcttcaaaaaaaaaaaaaaaatgagtgggaag

SEQ ID NO: 587583 - DNA, 605 bp, Homo sapiens
ttagtttaatctggaaaaaaatccaggcttaaagtctctgaaaatggttaagaattgtaaaaccattttgtattttgctcatttaaatatgcttctatagtgtttccaaccagtgcagattttgtctctttataatatctcataatgcacagctataaaaatagatgtgatataagaccatttttccaccatttttacttataaaaatgtgttaccaaactagatgatacactgcctatacgayagtctatatgtcttatgctcccataaataaggcactcttaaaaaggaatttttctttttagatatatgctctttataaacctataaaacctcagaatgctttgtaaacaatcattatcatatttatatctggcttttgaaagaagtgccaagatgtcgcaatattgaagaaaaattggaaaattgagcctttaaatatatgaagtatcatgttgcaattgacggaaacatagaacatcatttgtaagacttttaaaatgagataattgtgctggtgtctatatcttactgagaaaactagaatttattattcaaaataccagaatcttcagttttaagccaatagtttgcatttgcttaac

SEQ ID NO: 587584 - DNA, 605 bp, Homo sapiens
ttagtttaatctggaaaaaaatccaggcttaaagtctctgaaaatggttaagaattgtaaaaccattttgtattttgctcatttaaatatgcttctatagtgtttccaaccagtgcagattttgtctctttataatatctcataatgcacagctataaaaatagatgtgatataagaccatttttccaccatttttacttataaaaatgtgttaccaaactagatgatacactgcctatacgacagtctatatgtcttatgctcccataaataaggcactcttaaaaaggaatttttctttttagatatatgctctttataaacctataaaacctcagaatgctttgtaaacaatcattatcatatttatatctggcttttgaaagaagtgccaagatgtcgcaatattgaagaaaaattggaaaattgagcctttaaatatatgaagyatcatgttgcaattgacggaaacatagaacatcatttgtaagacttttaaaatgagataattgtgctggtgtctatatcttactgagaaaactagaatttattattcaaaataccagaatcttcagttttaagccaatagtttgcatttgcttaac

SEQ ID NO: 587585 - DNA, 624 bp, Homo sapiens
ttaattgaaaataattttaagattttaagttatgcaaaaagtttacctacaagcatttatctcatttatgtgtactcaattctttcatttttaacagcctatctagattacttctgaaaattaagatatcagaaaaaaatctagtcattatttaaagttatttctgttagccatttttaaaacctgtgaacatcaagtttttaccaaagtaagaattctaaagttaaaggagataggtattttgctgataactcagaagattcagctgtttttattgagccaacaattttaaatcaatctcatttgtcaaaaaacaatcacagaaacaaagattattctgtttttggctgggtttccagtcctataactcacatgccaaacattgacaccctaaaatgtccagcagaggcaaatacaaaataaccattaaacccaggcaaaaacatatgctgacaattctaaatacagttctatttttactktaccaataatttaaaaagcattttatttattaaagattttcttaagtcttatgaacttgaaaagcatttgaacttattcatttgatttatgagcatttatttataatctaatttggtagcatgctagacacaacacacaaca

SEQ ID NO: 587586 - DNA, 559 bp, Homo sapiens
tgaaaacagctatgcatccacaggttaaatttttatttctgtggtttaaatctgatttcaccacattttcccccaatgaaatggatgcttggtaatgcagttaaatatctgacttttcaggagcataaaatagcagctcttcttcctggggatggggcagtggccaccccaaggtgtggagggctttcctgtggaagcatcacatggactcatcatctgtggctccagtggagaaacctggagtcaatggatgtacgctggagggagaccaacttcaacttcatacgaggaaacatttctaataattaggttagcggaggtacaaactgccttgaagggctgtgctttttctgcctctgaaatttcttcaggaaagcctgagctgtatgctgcaaatgagaagcttaacttgttaacctcaagcaaggattaaattaagttccagtgacatatcactgatcttcatatagaccaatggaacagaacagaggcctcagaaataacrccacacatctgcaactgtctgatctttgacaaacctgacaaaaacaagcaattg

SEQ ID NO: 587587 - DNA, 488 bp, Homo sapiens
aacccagctgaatccccagggtttcccttccgcccttctcaatggaaagatctgtcccaggaccatttattccaacattttcaattatgagaaatctgggaagataaagttattttcacatttctcaagaaatacatacttattcatactcattacaggaaagtcagaatctacagaaaaccaagaagatttttaaaaatccatgataccaccatcaaaagagccrcacttagtatgttggtccacaggtttcctagcacccttttctgttggtgtatgcacaaaatacacaatcacattctgtctacattttacaatttgccattttttgattaacactatatattgaccaatttttaagacctgcaacatatgtcgacaacattatttcaaaataatatatttataaataaacgcacacacaaactgtctgtcttatatacaacacgtcttactttctaattctccactctggaagatttaggttt

SEQ ID NO: 587588 - DNA, 488 bp, Homo sapiens
aacccagctgaatccccagggtttcccttccgcccttctcaatggaaagatctgtcccaggaccatttattccaacattttcaattatgagaaatctgggaagataaagttattttcacatttctcaagaaatacatacttattcatactcattacaggaaagtcagaatctacagaaaaccaagaagatttttaaaaatccatgataccaccatcaaaagagccacacttagtatgttggtccacaggtttcctagcacccttttctgttggtgtatgcacaaaatacacaatcacattctgtctacattttacaatttgccattttttgattaacactatatattgamcaatttttaagacctgcaacatatgtcgacaacattatttcaaaataatatatttataaataaacgcacacacaaactgtctgtcttatatacaacacgtcttactttctaattctccactctggaagatttaggttt

SEQ ID NO: 587589 - DNA, 488 bp, Homo sapiens
aacccagctgaatccccagggtttcccttccgcccttctcaatggaaagatctgtcccaggaccatttattccaacattttcaattatgagaaatctgggaagataaagttattttcacatttctcaagaaatacatacttattcatactcattacaggaaagtcagaatctacagaaaaccaagaagatttttaaaaatccatgataccaccatcaaaagagccacacttagtatgttggtccacaggtttcctagcacccttttctgttggtgtatgcacaaaatacacaatcacattctgtctacattttacaatttgccattttttgattaacactatatattgaccaatttttaagacctgcaacatatgtcgacaacattatttcaaaataatatatttataaataaacrcacacacaaactgtctgtcttatatacaacacgtcttactttctaattctccactctggaagatttaggttt

SEQ ID NO: 587590 - DNA, 371 bp, Homo sapiens
ctcggccggggctcctgtgtgcatctgtctctcccagtgcccagcacaggcgtggaacggaagaggtgaatggaccgatttgaacacatcatcctggattctccgttccctctcaagccctgcagctaacccatcggcaagccctggaggctctgcctccaaaatcctgcctatcccatgtgcaaacgcctctcaccacgtccactgctatttgcagttstgtgtgtgtggaaatacttccacaaatttggaatgaacaggtcacagctgtgcctggagggaatggccagggaaatgtgccctcgccttgctgctctatccaggcccacccagctgaggatgggggacctgccaccactctcctggcagtt

SEQ ID NO: 587591 - DNA, 371 bp, Homo sapiens
ctcggccggggctcctgtgtgcatctgtctctcccagtgcccagcacaggcgtggaacggaagaggtgaatggaccgatttgaacacatcatcctggattctccgttccctctcaagccctgcagctaacccatcggcaagccctggaggctctgcctccaaaatcctgcctatcccatgtgcaaacgcctctcaccacgtccactgctatttgcagttgtgtgtgtgtggaaatacttccacaaatttggaatgaacaggtcacagctgtgcctggagggaatggccagggaaatgtgccctcgccttgctgytctatccaggcccacccagctgaggatgggggacctgccaccactctcctggcagtt

SEQ ID NO: 587592 - DNA, 555 bp, Homo sapiens
tttcaagggtttcccctatgttttcttctaagagtttcatgattttagctcctatgtttttgatccattttgagttaaatttatatatggtgtatggtaagagtcctacttcattyttttacatatactcagttttctcagcactgtttattgaaaagattgtttttccccccattaaatggtcttggcacatctctctttcctttctttcttttcttttctctgtctatttcctccctccctcccttccttctttccttctctctttctctgtctttctatctctctctctctctctctcgtctcactttgtcacccgggctgaagtacagtggagtgatcttggctcactgcaacctcaactctctctctttctttctcaagagtctcactctgtcacccaggctggagtgcagtggaataatctcggctcactgcaacttgaaccttccagcttcaagtgattctcgtgcctcagcttctcgagtatctaggattacaggcatgcgccgccacgcctggctaatttttgtatttttggtaaagacaaggttt

SEQ ID NO: 587593 - DNA, 622 bp, Homo sapiens
cactcccgcttgaaaggaggaagaagaaaacacacaaccatttgtaggaggaatagtggagatagaccaacccagaaactgtatttcagaataaattcattcctttgtgcttcaaggcccctcatactgatatgatgtcaccaaagctgctccagggctgtgacctgctagtcatggccctggggcacatccctttgctctccttctcagcatactgcagcagcagaggtagggtgttagggggtgtgcagattcatccctttctctagaytatgagttcttgggatagggtagaccacatttccccaaggagtttgtgggtattcaagagaaagtggttgccgagcacagggagtgggcagtgggctagaagcagccaacttttcagggctttgcctggggacttggaactgcctggattagtcactagggagagttttcaaaatctttatggtgtcatgatttgttaaatcttgtccacatcagagcctgtggtttttctgaatgccttagaaagttagcctctctggccaagtgcagtggctcacacctgtaatccaagcactttgggaggccaaggtgggaggattgcttgaggctgagagttcgagaccagcctggg

SEQ ID NO: 587594 - DNA, 622 bp, Homo sapiens
cactcccgcttgaaaggaggaagaagaaaacacacaaccatttgtaggaggaatagtggagatagaccaacccagaaactgtatttcagaataaattcattcctttgtgcttcaaggcccctcatactgatatgatgtcaccaaagctgctccagggctgtgacctgctagtcatggccctggggcacatccctttgctctccttctcagcatactgcagcagcagaggtagggtgttagggggtgtgcagattcatccctttctctagattatgagttcttgggatagggtagaccacatttccccaaggagtttgtgggtattcaagagaaagtggttgccgagcacagggartgggcagtgggctagaagcagccaacttttcagggctttgcctggggacttggaactgcctggattagtcactagggagagttttcaaaatctttatggtgtcatgatttgttaaatcttgtccacatcagagcctgtggtttttctgaatgccttagaaagttagcctctctggccaagtgcagtggctcacacctgtaatccaagcactttgggaggccaaggtgggaggattgcttgaggctgagagttcgagaccagcctggg

SEQ ID NO: 587595 - DNA, 622 bp, Homo sapiens
cactcccgcttgaaaggaggaagaagaaaacacacaaccatttgtaggaggaatagtggagatagaccaacccagaaactgtatttcagaataaattcattcctttgtgcttcaaggcccctcatactgatatgatgtcaccaaagctgctccagggctgtgacctgctagtcatggccctggggcacatccctttgctctccttctcagcatactgcagcagcagaggtagggtgttagggggtgtgcagattcatccctttctctagattatgagttcttgggatagggtagaccacatttccccaaggagtttgtgggtattcaagagaaagtggttgccgagcacagggagtgggcagtgggctagaagcagccamcttttcagggctttgcctggggacttggaactgcctggattagtcactagggagagttttcaaaatctttatggtgtcatgatttgttaaatcttgtccacatcagagcctgtggtttttctgaatgccttagaaagttagcctctctggccaagtgcagtggctcacacctgtaatccaagcactttgggaggccaaggtgggaggattgcttgaggctgagagttcgagaccagcctggg

SEQ ID NO: 587596 - DNA, 603 bp, Homo sapiens
cagcaattcagtcacatcttcaggctccacccctgatgctaattctcttgctatttctacatctgcagttacttcctccactaaaatcttaaacccctcaaagttatctacaagagttrgagtcaacttctttaaaattcctgttaatgttgattttttttttacctcctcccatgaatcataagtgttcttaatggcacctatagtggtgaatcttttccagaagttttcaatttactttgcccagaaccattagaggaatcactatctatggcagctataaccttacaaaatatgtctcttaaataatacaacattaaaatcaaagttacttgtcaatcagtgggttacagaatggatggtgtgtttgcaggcataaaaagacattaatccccttatgcatcttcatcagagttcttgtgtgaccaggtccattgtcaatgagcagtaatattttgaaaggaatcttttttgtttttttgagcaatacttctcaatggtaaccttgaaatcttcagtaaaccatgctgtgaagagatgtaccatcatcccggctttgttgatccatttgtagagcatgggcagagtcgatttaacattaat

SEQ ID NO: 587597 - DNA, 364 bp, Homo sapiens
tccattattttcttgagtaatagtgrcaagctaataaaaaactgacaaggaaacagcaaaaaagtaggaaattatgaaaacaagtgagtgttttgctaaggaaatgtttattactgtggttctcatcattatgagttaattacaggctctcagcaaatatcccattgtgaactcagaggtgcaatatgttttatttgagaaagtgaaatagtgatttcctttccagtattcagttgcatttcccgctattttaagactactcagtggtaccaatgtactttgacaaccaattatcccagcatgtctttgcagtgtattttaactataatgctttttaaaagcttgaattgcaaaaacagagttt

SEQ ID NO: 587598 - DNA, 526 bp, Homo sapiens
agggaaaaaagcaaaatcaaataaatgagcttttacttattatgttcacaatatctagggaagtataattgaccaaagagaatcgcaggagctcagaaatgggtcagtgcaaatgaaccactgttaaaaataaatctaaaccatatgaacctaggcagcatacacataccaccctaaaaataaatgacatgaggccgggcaaggtagctttctcctctaatccactttgggaggacaaggcaggaggatggcttgagcccatgactttgagacaagcctgggcaacatactgagacacctatctctacaaaaaatgaaagaaaaaaacaattagccgggcatcgtggcacatgcctgtaatcccagctactggtgaggttgaggttggattgctcgaggtcaggaggtggaggatgcagtgagccgagatcgcactactgcactccaggctgggtgacacagcraggccctgtctcaaaaaaaagaaaacaaaaaaacactcaaatcccaaatttagcatagaatg

SEQ ID NO: 587599 - DNA, 611 bp, Homo sapiens
tcaagctctgccctctcaaagctggatattggagatggaactaacacttattgagtacctgttttgttcaggcaaagtgttgtgttttatctacatttaatctcatttaatcttcatgactattttctgaaattattataatccttatttcacagattaaaaaactgagcttcatagagagtaaggaccatatawttcatctgcctcctttgaggttctgtcaccccttactttaagactaattcccttactgtgtaatatggtttggttgtatgtccccacccaaatctcatgttgacttgtaatcaccagtgttggaggtggggcctagtgagaggtcattggattatggggctggtttctcatggttcatcactgtccccctagtgctgtctcctgactgagctctcacaagatctgggtgtttgaaagtgtgtaacaccacccccttcgctctctcctctctcctgcttcatcatttgaagatgcatctgcttcccctttgccttccaccatgattgtaagtttcctgaggcctcccgagaagcagaagcctgtatatcctgcagaactgtgagccaattataccccttttctttataaattaccca

SEQ ID NO: 587600 - DNA, 611 bp, Homo sapiens
tcaagctctgccctctcaaagctggatattggagatggaactaacacttattgagtacctgttttgttcaggcaaagtgttgtgttttatctacatttaatctcatttaatcttcatgactattttctgaaattattataatccttatttcacagattaaaaaactgagcttcatagagagtaaggaccatatatttcatctgcctcctttgaggttctgtcaccccttactttaagactaattcccttactgtgtaatatggtttggttgtatgtccccacccaaatctcatgttgacttgtaatcaccagtgttggaggtggggcctagtgagaggtcattggattatggggctggtttctcatggttcatcactgtccccctagtgctgtctcctgactgagctctcacaagatctgggtgtttgaaagtgtgtaacaccacccccttcgctctctcctctctcctgcttcatcatttgaagatgcatctgcttcccctttgccttccaccatgattgtaagtttcctgaggcctcccgagaagcagaagcctrtatatcctgcagaactgtgagccaattataccccttttctttataaattaccca

SEQ ID NO: 587601 - DNA, 573 bp, Homo sapiens
ctaaaataaaagttgaaattttaagaaataaaagttacctcttcataaaagctttttctgacacctctggtctctaggctagattatatactccacttctgtgttctctgagtttaattctcttataacactttcattacaatatttttccatatattagtacttctttagtctctgtcactagggtataaactccttgaagacagagagaactaggtcatttatcacaactccagtgcctaacatactgcatgatggtcaaaatagaatcccaaaatcaggacatcagcatggccgtgttctccctgagggttctagaggaggatattttcttgcatttcctagcttctggtggttgctaacaatcctgatgttcctttccttggagatgcatcactctaatctctgacactgttatcaggtggcattctccctgtgyatctatatctaaattcccatctccttataaatagtagccattaagttagggcccactctaatctagtatgacctcacttaactagattatatctgcaaagaccttacttccaaataaggtcacattcacagatt

SEQ ID NO: 587602 - DNA, 620 bp, Homo sapiens
ctcccccttcgccttctgccatgattggaagctccctgaggctttcccagaaccaggtgccagcatcatgcttcctgtacagcatgtggaaccatgagtccattaaacctattttctttataaattactcagtctcaggtatttctttayagaaatgcaagaacagactaatacatagtagaaagacctaagaatttgaagccagatagacctgggttggaattttagctctgccccttcaaagcatgtgacgttgaggaagtcatttatccacttgaagtctcaaactcctttttggcaaaaaattgagttattgatatttctttgatataatgaatatgaaagcaccaaatacatggtatataagtaataaaggtttgctttattttatcccaataaatgtgaacagatatttctacacttcagtaaaacaaaataaaatgggaaatctcctgaatttgtaatgaagtcgattctactctattccttcttactggttagaaagtgctaatcttctgggcgtggtggtaggcacctgtaatcccatctacttgggaggctgaggaaggggaattgcttgaacccgggaggcagagcttgcagtgagacgagatcatgcc

SEQ ID NO: 587603 - DNA, 620 bp, Homo sapiens
ctcccccttcgccttctgccatgattggaagctccctgaggctttcccagaaccaggtgccagcatcatgcttcctgtacagcatgtggaaccatgagtccattaaacctattttctttataaattactcagtctcaggtatttctttatagaaatgcaagaacagactaatacatagtagaaagacctaagaatttgaagccagatagacctgggttggaattttagctctgccccttcaaagcatgtgacgttgaggaagtcatttatccacttgaagtctcaaactcctttttggcaaaaaattgagttattgatatttctttgatataaygaatatgaaagcaccaaatacatggtatataagtaataaaggtttgctttattttatcccaataaatgtgaacagatatttctacacttcagtaaaacaaaataaaatgggaaatctcctgaatttgtaatgaagtcgattctactctattccttcttactggttagaaagtgctaatcttctgggcgtggtggtaggcacctgtaatcccatctacttgggaggctgaggaaggggaattgcttgaacccgggaggcagagcttgcagtgagacgagatcatgcc

SEQ ID NO: 587604 - DNA, 502 bp, Homo sapiens
aatccctgaaaaatagtctacaaattctcttatattacatatttattatcatatgctcataattacttcctatctctgaggatgtatttagtttctcttgttctgaatgaatttatatttgctctaatgcatagcatatacatgatttctacacattttctacacaaggatctgagasaagtgataccatctgcatagatgtggaagtaaaaattaaatggacaggttgacccaaaaattctactcccaggtatttatcctaaggaaaaatcacatacatagcaaaacaaaatttttatataaggcaagttatgatggtactactcataaagtgaaatactgaagcaggatatttccctgacccctttgtgggtggaaactggagtgaacaggtgctggaactggctggccactttagtgctgggaggggtgaactccactcactcgctgctccacccctcaccagagggagggtgaatagaagcaggtgcaggagccaggg

SEQ ID NO: 587605 - DNA, 528 bp, Homo sapiens
ttttctcttctgcttttcagttaagccaagtctgaaatgactttttaattaatatattgaattcttgtctagtatcaaaaacttggccaattgatggcagatagggaaaaaagaaacacttgaatcacttcaactaagagctgttttggtataatctaaacacaactatcctagaggaaaacgtatgacttcacatgattacatggagaattttatttaaataggaaaaaaaaactttcccaaaaagtacactgtaaaggaattataacatctattagaatgacccggttmtatggtcttagcaggtaccacagccatcctatcatgtcagtcccttataagttataaaaatagaactcctgccatcctaacaacctttgaaagccacttgttctgcaattctgctcctgtgtttcacctgcatccctgatcgtctccagcagccctgattcctacacaggaagaggctccacagaacttcaaggtgagtgttatatataaatacatgaacagcaagagagagagatc

SEQ ID NO: 587606 - DNA, 583 bp, Homo sapiens
atggcaaataagcatctgagaagatattcaacatcattgatcattagggaaatgtaaatgagaactacaatgagatgtcattacatactttttaaaatgtctgaagttaaaatgactgtaccaagttctggtgacaatgtagagtcattggaactctcatgcatgactgatgggaatgtaaaatggtacaactattttgtattaacggtgtttggtggttttaaaaataacacacatacattttttgtatgatgtacattacatttctaggtatttaaccaaaataaataaaagcatatattcatrgaaagactcaaacatgactactaattgcagctttatttatgatagtgagaaactgaaagcatgttaaatgtccatcaataggttagtggattaacaaattgtggtgtattcatacaatggaatacgactcagaaaaccattcctagacacaacatgggtgaatttcagaataattatgctgagatgaagccagacaacaaaagtacatataggacagttctacttctataaacttctaggaaatgcaaactatggtaattcttacgagtgaaaggag

SEQ ID NO: 587607 - DNA, 580 bp, Homo sapiens
aatagtctttcgaggcagttatagctttttcccattgctcaatcccaaagccagtattttaagttattgttacagcagcactctccttccagataccaaattttgtcctggttatcgattactgcaaagcaaaccactgcaaagtttgtggcaaacccctagccacacaggagagaatgtgtgttgtaaagaatttagtgaatcctggattccatactttgatggaagacatgaaaaattttaccttccaacatrtattttttgaatgattttttttttctacttctacctatttctattcagagtgcaatgaatcttttcatcaccctctacccttgggtgtcttgggcacttgaagtagatatatttactgatggtaaaataaaaaagataagggaaggggatatttaccggaggattatcactggtaaggtagcacttgtcttggtgtctgatttgtgtaactctgaatcccaaagctagaggcaggtggtagaaggaagttgaaattgactcctcactgtttcctggagggctgtactattctaggttagagagagaacttatgctaaatccagct

SEQ ID NO: 587608 - DNA, 634 bp, Homo sapiens
ggatcctatgagacttcccaaagtagcccccacactcctggagtctctcttcaaaacattagtctcaagtcattacagctagaacttgaggctaggattctctccaggattgttgagttgtttacccagcaaaatgagctggttgtaagaatgtcactcatatttaaacttaaagcttggtttcagcatggtcgaatagaaatccttaagcccttccacccttggcttgtgttgtctctgctggcatgcaatgtacaagactatcctgctttcaggaggggaggcactttgacagtggttctgttggttttagtaagggaatgcacagtcgaagctgtgcattgtgtactaagtggtgcacattctctcttctgaaccctgttgggatcgagggcacatgtaggagctacctggcagaggctgggcattctgtgtcattagaaaatccacattttttttttctgtagcatcccacgttattctgttgagttracttgatctacaaacccatgcaccttggggatttaagaaattaacaccttagaaaagttatacccagataatttaggaagattttgctgtttacatttaaatacaggaatatactaaacttttattatatgttgatatttat

SEQ ID NO: 587609 - DNA, 543 bp, Homo sapiens
tgactgttgtcagtagaacttgctcgatgagagaccatcccattttattggtttcttctgcagttgattcggagggcgggtgggcttgatgagtggctctgaacactgagaatttcgactttgagtattttatatgttcwctttcagccttacaagccaagtcaactcttccttaaacacttaatgataatacccaaccttaatgagcctttacgtaagtgagagacgttgcgtgaataacaaggttgggatggtcactatcccaataattaggtgatttttctgagggttttcagcttgtaagaaattggactggaatgtgaaatcaggttctttttcttttttctttctttctttttttttttttttgtggagaatgggctcattatattgcccaggcaggtctcgaactcctgggctcaaactatcctccctcctctgcctccctaagagctgggattacaggtatgagccactgtgcctggcccagaatgtgaaatcaggttatttggaccccagggctggttcttggtcaggtagcag

SEQ ID NO: 587610 - DNA, 581 bp, Homo sapiens
cacaccacatgttctcaggccctggaggagtgggatcsctggtgggtgggcgatgccctgcggcagccgtgcctccctggacgtctccaggggcggtcacgcggaatgctggtccccgcagtttcggccattggcccctccacttcggcgccccgccttccccctgggctcaggtgtaatcgtggatctagggtgtgggcacctgggatgaagtagtgaaggcggcgggcgctagggtgagttgtcctgtgctgaggagcagcagtttgccggagttaacgtgggcagcctctttgggaagggaaggaaggagcaccgtctgccaagcgcctgctcgccccccgcgtgtctgcctgtgtgtgccgtgcatgtgcatgcgtgtgtgtgtgtgtgtgtgcgcgcgagtgtgagtgcgcgcgcgccgaggcgttcctcaggttgcgctgcttggaaaccgagggagccattggagaggcggaggttggggggtgggggctccccgaccctcggaggagctggggcgcaggcggccaaggcgagcccagaagcccggctcctgaacgcgggcgccggcagagcga

SEQ ID NO: 587611 - DNA, 535 bp, Homo sapiens
ctttgcttgaacttgtgtatttctcttcccttagccaaggagagaatcttaaagcttgggtttccctaggcagcttggagtgaaatttagtccttaattgcagcagctgtttttagcttacttaggataatgttcttccctttcttgaacatgactttatatatctatatggatcgttccattgctcatrgtttcttccccactagactttgagctttttgaatgcagagactaaatgaactgaatgtgtacctaattttgtaagctgcctttttttttcagaagcaaattatgttggtatatcaagtgggattcagttgtgaccagttttctctgcaaagtactcaacatttattctgtggctgaactggggcgtgggttggagatgcttgcttgagtataacatccttattatgactgtaaaaatttgtgtagtgaatccaaagctgcagacaaccaggtaaaaggtgacaataggaagatatttataaaatgctgagaaactagagtgatgcatggtggaatggaaggaatg

SEQ ID NO: 587612 - DNA, 506 bp, Homo sapiens
agggaaaggggctgaattcatcttttttttttttttagacgctcttgttgcccaggctggagagcaatggcatggtttcagctcactgcaacctctgcctcctgggttcaagcaattcttctgcctcagtatcccgagtagctgagattacaggtgtgcactaccatgtccagctaattttttgtatttttagtagaaatggggtttcaccatgttggccaggctggtctcgaactcctgacctcaggtgatccacctgcctaggtctcccaaagtgctgggattacaggtgtgagccaccgcacccaactgaactcatccttttatcaggaactcactcttgtgataggtaacctatgcctgcaataacagcattaattctgtcctcatgacctaatcacctcttaaaggtcccacctctcaacactgttgcattggggattaagtttctgacacacaraattttggggagacattcacattatggcagtgggtatcagtccgta

SEQ ID NO: 587613 - DNA, 589 bp, Homo sapiens
gacaacatcgttcaaattcataattaaatggggaaaatgaagtaagatgtacagtgaaggaatgggaaaaacctgaattcctttggaaattgctcaggtcattgggaccctggaaatatcttgactttcccactagaaatattactgctwtttttaaaatgacactggccatctgaaaatcagatggtcctttaagaaaggaaaggaagaatgaatgatgatgtctttcttttcccctcccctgttctctcttgggcagggaaaagatgccgttccaccatgtgaccgccggcttgttgtacaaggggaattacctcaaccgatcgctctctgctggcagtgacagcgaacagctggctaatatctccgtggaggagctcgatggtaaggagcctaccctgtttggggggatggcccccctcccagggaggtgtttctggctattgtgaagctcaattgaaagccctggactttggccactccttggcagttgtggccaagtgtagccatggcataatgggaaagagttcagagacaaagttttgcccaagtgacgtgtgtgtgtgtgtgtgtgtgtgtgtgtgtgtgt

SEQ ID NO: 587614 - DNA, 318 bp, Homo sapiens
caatggaattgtcttgtttctgtgttgtcactgacartggagtccatctgcaggggaggtttaagccctgttaatggctgtctcttgacttctggccatggtgctttgaatcctgtccagatcagaatcatctggaagctttgtctaggtgacagtggatagcaattattttaattgcctctgtttctttgtaacacagtacagccctgggtgctcaaggcaggggttagggatggacataaacctgggaatgtgatgactaaattcatcctaggactgtgtctcattgtatcttggataaaccaatcctctaattaa

SEQ ID NO: 587615 - DNA, 318 bp, Homo sapiens
caatggaattgtcttgtttctgtgttgtcactgacagtggagtccatctgcaggggaggtttaagccctgttaatggctgtctcttgacttctggccatggtgctttgaatcctgtccagatcagaatcatctggaagctttgtctaggtgacagtggatagcaattattttaattgcctctgtttctttgtaacacagtacagccctgggtgctcaaggcaggggttagggatggacataaacctgggaaygtgatgactaaattcatcctaggactgtgtctcattgtatcttggataaaccaatcctctaattaa

SEQ ID NO: 587616 - DNA, 559 bp, Homo sapiens
acacagtacagccctgggtgctcaaggcaggggttagggatggacataaacctgggaatgtgatgactaaattcatcctaggactgtgtctcattgtatcttggataaaccaatcctctaattaaaaataggaaaaacaagtccccccccccccggaatagaggattaggttgatttggcctgatgtttttacctaggtactacatcggctgaggtcaaaccagaatcagttttccctcgtgtttttgaatactttgttgtttgtaataatatcattttaaggcacaaagtttaaatttactttctcaagtagagaagtcaaaattaccccagttggcccacatatttgcttttaagtgtaatggttcaaatcagtgtgctttgtatgtgcacattagggagcctcatttctcccagaaggaagatggaggacatttggctctgagacagtgaagccaaacttgcttcacaacaggsaggaagtgagggaggtgaagaggagaggccattgaatagcttctccttctctcatccattttgcttgtgtgcttatttaaat

SEQ ID NO: 587617 - DNA, 550 bp, Homo sapiens
taacaaaacaccatagactaggtggctcataaagaacagaaatttatttcgcacagttcaggaggcttggaagtctaagatcaaggtgccagcagatttgatgtctggggagggccactttctgattcatagatgtcacttttcttgctgtgtcctcatatggtggagagagtgaataagttcttttgtgccttgagtatgtaagggcactgtcttagtctgctttgtgttgctataacaacatagtaccttctgggtaattgatatagaaaaraactatatttggctgatggttctgaagactgggaagtccaagtgcatagcactggtatctggtgagggccttcatgctgtttcatcccatgacagaaggtggaaaggcgagagagggtaagagcaagagagggctaaactcacttttataatagtccacgctctggataatgaactccccccgagataatgacattaatccattcatgagggcagatctttcatagtcaaatcacgtcttaaccatcccacctcttagcactgtcataatgctaat

SEQ ID NO: 587618 - DNA, 508 bp, Homo sapiens
tcatgagggcagatctttcatagtcaaatcacgtcttaaccatcccacctcttagcactgtcataatgctaatcaaatgtcaatgtgaggtttggaagggacattcaaaccatagcaggcactaatcccattcatgagggctgctccctcstaatcacctcctgaaagacctcacttcttaatgacatcacgttggtggttaggtttccacataggcattttggggggacccaaacattcagctcatagcaggtgtgtttgggaggtgaagtgaggcccaggcttttcctacctatgggagtcttcactgtgaatagacattagggcaggtggtacattaatgtggggtggatgtttgcttgtgtttatttgagtagatcctccaggctcagtcatcagcaggagggactgggagtcccccatgcgtgcaggacccactgagtggccctggctgagaactgggcaacactatctatatgttttgggcaattatttaagaggttaaaaa

SEQ ID NO: 587619 - DNA, 571 bp, Homo sapiens
tttgcttgtgtttatttgagtagatcctccaggctcagtcatcagcaggagggactgggagtcccccatgcgtgcaggacccactgagtggccctggctgagaactgggcaacactatctatatgttttgggcaattatttaagaggttaaaaatcactaaccaaatggagtttggaatcatctgtggctttccatattctccccccttcctccttcccaactttgccatgaatgatcaagagatgatttctctgtgacttttcagtgcaatggcttttttcactgttaaattcaagctctgctaaggcaactgttcagggctacygtgggggtgcatggcttttcaagagggctgctggctggatttcaaccctcctctccctacttgggtgccctggtgaaatgccctccactttcctggacaaacagaaaagcatataaacttgctattttaatcaggcaaaggcagcttgagaagcactgaaatgcactttttcagtatgtagattagcgagagtaattctaagagccctccaagcccaggctggcagcctgagcattggcagcctt

SEQ ID NO: 587620 - DNA, 509 bp, Homo sapiens
tgtgttttcagtagagacagggtttcaccatgttggccaggctggtattgaactcctgaccttaagtgatctacccaccttggcctcccaaagtgctggaattacagtcgtgagaccctgtgcttggccttgtaatgctatcttaatcttaaactaaattcacctcyatctgaagtttacctcttttctttaatatataatgttccactgtatataaatatatcttaatttattttcctattttattctcagtggatatttgggttgttttcagtttggagctattaggaaatagctattagctattttccagtttgtgaaaatctcttctgtttctggtcataaattatttgtatatatattcataataaaagtctttttctctacgtcttccagatgatggtaactttcttttgcatgaaactttttttttgtataatttatattgcttttttctattatgctttgtaactcaacattatgaagtttttttgtaggctcagtatttg

SEQ ID NO: 587621 - DNA, 374 bp, Homo sapiens
ccagtttccagaagacattcatgtagcccatggctctgggcagaggtgggggtctcggtggttgttcctgctgtctttgcrccctatgccacagaattctccatctatgttgtttgttcttcctctctccttctctccttcccattcccaagctactcttgtacgtttggtcatcctaggaacattttggctttcacctgtgctgtatagataacccaggatgggacataccaacccatggctgcggttaagttgtgttccccaaatgagcttaaaaaagggtgctgctgaagtgggtttgggttgaggaatagattcccatggaaaacagtggctgtgaagtagggagtgactgcatgatttactgtcaatgt

SEQ ID NO: 587622 - DNA, 374 bp, Homo sapiens
ccagtttccagaagacattcatgtagcccatggctctgggcagaggtgggggtctcggtggttgttcctgctgtctttgcaccctatgccacagaattctccatctatgttgtttgttcttcctctctccttctctccttcccattcccaagctactcttgtacgtttggtyatcctaggaacattttggctttcacctgtgctgtatagataacccaggatgggacataccaacccatggctgcggttaagttgtgttccccaaatgagcttaaaaaagggtgctgctgaagtgggtttgggttgaggaatagattcccatggaaaacagtggctgtgaagtagggagtgactgcatgatttactgtcaatgt

SEQ ID NO: 587623 - DNA, 555 bp, Homo sapiens
cccttgggtcaagtttccacttcctagacaacagcattcactggagctgatcttattggtttcatctatgatccacccacatgtcagttcagttcgataccattggagggatgctactcaaatgcacacttagttaggttattccttggcttataacttctttttttgtttatttttaagacagtgtcttgctctgttgcccaggctggagtgcagtggcacaaacatggctcactgtagcattgacctcctgatctcaagcgatgctcctgcctcagcctcccaaggagctgggactacaggtgtgtgtcaccacacctgctaaattaaaaaaaaattttttttagagatgggktgtcactatgttgcccaggcttgtcttgaactccagggctcatgtaatcctcccacctcagtctcccaaagtactgggattacaggcatgagccaccacacccagccttggcttattaaaacttttatcttctttttttgtgtatatacaaataaaaatacattttaaaaaatatttctttagtcttaaaaaattcaaat

SEQ ID NO: 587624 - DNA, 555 bp, Homo sapiens
cccttgggtcaagtttccacttcctagacaacagcattcactggagctgatcttattggtttcatctatgatccacccacatgtcagttcagttcgataccattggagggatgctactcaaatgcacacttagttaggttattccttggcttataacttctttttttgtttatttttaagacagtgtcttgctctgttgcccaggctggagtgcagtggcacaaacatggctcactgtagcattgacctcctgatctcaagcgatgctcctgcctcagcctcccaaggagctgggactacaggtgtgtgtcaccacacctgctaaattaaaaaaaaattttttttagagatggggtgtcactatgttgcccaggcttgtcttgaactccaggrctcatgtaatcctcccacctcagtctcccaaagtactgggattacaggcatgagccaccacacccagccttggcttattaaaacttttatcttctttttttgtgtatatacaaataaaaatacattttaaaaaatatttctttagtcttaaaaaattcaaat

SEQ ID NO: 587625 - DNA, 569 bp, Homo sapiens
gtatgttacaattagttctgtgtgtgtgtgtgtgtgtgtgtgtgtggcagggtcttgctctgttgcccaggctggagtgcagtggtgtgatctcagcttactttatcctccaccttctgggctgaagtgattctcctgcctcggcctcccgagtagctaggactacaggtgcatgtcaccatgcctggataattttttgtagagacagggtttgccatgttgcccatgctggtcttgaacgcctgggctcaagggatctgcctgcctcatcctcccaaagtgttgggattataggcatgagccaccatgctcatcctgttacaattaatttwattttattttgtttccctgaattagttaaaattgtcaaccattatagcacttttaacattttgcttctgcttatcattcttaaatagctctctacagcctacagccatgttactggtatctagacttggtgacaaagtgtatgaagtcctgtgtggctgaatcccttctttttttttgtctgcttcaactccctgcttaccctccacacgatcccctgctgccttgagctccttcct

SEQ ID NO: 587626 - DNA, 558 bp, Homo sapiens
aacacacccggcccaggtactgttactaactacatttttgcaaacgtgraaaatccagaagttaaataaccttgtccaaggttacataaccagcatctgctggacctgggattcaagctgccacctggctgcacagcccatgccattcactttcatgtactgaatcctgctccctgtgagatgagatcctgtgtgcttcccttgtacccgtcatgtcaccatcacatatatctctgccaccactgtgacacatgggtgagcacttggctgattaatcaaatttcagtgggtggagagatatttttaaagctctgtgtgagcccagagtgctccttactgagaggagaggtgccctgcagcccaggaaaggctggccatgagcatgactttatgccaggaggggggctggtttctgtgcagtaagctctggagggccctctccacctgccacccatgtggtccatcctacgttttcttgtaatgaaggtcccccgtcccctactgttttatcccgtttttgccggttgatttcaggatcccagaggcaaactcaacttg

SEQ ID NO: 587627 - DNA, 559 bp, Homo sapiens
ttggtggctttcaaccttacctcactatcaaatttctgtggactttttcaaaacatacttcttctagtaatagtaagctatcatgatggtgattttcaatgaggaaagaggtgctcatactagactttctagatgcaaggagatgggggtacattgtagtttagtttttttttttcttcctgagataggatcttggtctgttgtccaggctggaatgcggtggtgccttcactgctcactgtagctttaacctctcaggttcaagcgaycctcccacctcagcctcccaatggcacaggtgcgtgccattacacctggctaattttgttttgttttttatttttggagagatagggcctcactgtgtttcccaggctggtctggaactcctaggctcaaatgatcctccctccttggcctcccaaaatgctgggattacaggtatgagccactgcgcccagcctttgtagtttagaaagccttcccaacaggtgatctaaatactggctttagaaaaatgtgtcctaggttcttatttctaagaaccctgcatgagata

SEQ ID NO: 587628 - DNA, 628 bp, Homo sapiens
tcggctcactgcaacccctgcctcccgggttcaagtgattctcctgcctcagcctcccgagtagctgggactacaggtgtgtgccaccacacccggctaatttttgtatttttagtagagacggagtttcaccatgttggccaggatggttttgatctcttgacctcatgatctgcctgcctcggcctcccaaagtgctgggattacaggcctgatccactgctatttctttccctgcacccttttgccttgcagaagatatgcacagttgaaattgtaagccttagacattgtgggtactcgctaggagctcagaaacagcmgagtttgattttctcgcaaagagcacatggaagtgaggaacacacaagatggcgtgacattttatgccctttcagtgtaaattctacaaaatcatcaaggtagcgccgagggcttcgctttaaaatagaatacacgtggaattatcagtcttcagagaccgagctgtgtgtgatctttccgtctagctgcttgtctttggcacagaaaactgaaaatgacctcttttccccattggccgctccttttgaagcttgaccaacacggcggaaagccctgctcacttctttgtaagtggccctttttg

SEQ ID NO: 587629 - DNA, 624 bp, Homo sapiens
ttgccttgcagaagatatgcacagttgaaattgtaagccttagacattgtgggtactcgctaggagctcagaaacagcagagtttgattttctcgcaaagagcacatggaagtgaggaacacacaagatggcgtgacattttatgccctttcagtgtaaattctacaaaatcatcaaggtagcgccragggcttcgctttaaaatagaatacacgtggaattatcagtcttcagagaccgagctgtgtgtgatctttccgtctagctgcttgtctttggcacagaaaactgaaaatgacctcttttccccattggccgctccttttgaagcttgaccaacacggcggaaagccctgctcacttctttgtaagtggccctttttggggtatcgttgcccctcccccgtgccagggaatggtaattggcacttaagtatcgagtcagttggaaaaagaaccgaagcagggtgcttacagaattggggacacacaggaggacaccctgctaaggtgtgtcctgctgtctcagacaggaacctggtgctcagtgaaggaagcttccctgaggaagagacgtgaaagccgagcccggcctcttttggtaaaatgacttccttcctgtgg

SEQ ID NO: 587630 - DNA, 448 bp, Homo sapiens
gtttgaccgttggctcagttgtggattttgttgttgttgttttgtttgttgggactctgtctcccaggctggagtawagtggtgcaatcacagctcactgcagctgtgatcttgacctcctgggctccagcgatcctcccaagtagctaggactacaggtttgcaccactacgcctggctaattttttaaatattttgtagagatagcttcttgctatgttgcccaggctcgaactcctgggctcaagtgattcttttgcttcagccttctgaatagctgggattacagacgggcaccactgtggctaactttttaattgtttgtagagatgtggtctcactatgttgcccaagctggtcttgaactccttgtctcgaactcctggtctcgagcaatgccccccggctcagcctgccaagcactgggattacagttgtgagccactgt

SEQ ID NO: 587631 - DNA, 526 bp, Homo sapiens
cgtgcccctttttaaaaaattgtattttattttttaatggatacaataactcatatttatgggttacagtgtaatgttacacrtttgtggattgtgtattgatcaaatcagggtaattagcatattcatcacttcaaacatttatcatttctttgttggaagaacattttaaaaagtcctttcttctactaggttggtgcaaaagcaattttgcgtttcaccattaaaagtcaatggcaaaacccacaattacttttgcaccaacctagtaactctttggaaatatacaacatgttattgttaattacagtcactttactgtgcaatagaacacaacttattcctctcatctcactgtgactataccaaccagcctctccctacccctatcccccaattctccccaacctctggtaaccactgttctactttcaacttctatgggatcaaccttttcagatcacctgtgggtgagatcatgtggtgtttgtccttctgtgcctggcaatggtgcatttacttgtcc

SEQ ID NO: 587632 - DNA, 526 bp, Homo sapiens
cgtgcccctttttaaaaaattgtattttattttttaatggatacaataactcatatttatgggttacagtgtaatgttacacgtttgtggattgtgtattgatcaaatcagggtaattagcatattcatcacttcaaacatttatcatttctttgttggaagaacattttaaaaagtcctttcttctactaggttggtgcaaaagcaattttgcgtttcaccattaaaagtcaatggcaaaacccacaattacttttgcaccaacctagtaactctttggaaatatacaacatgttattgttaattacagtcactttastgtgcaatagaacacaacttattcctctcatctcactgtgactataccaaccagcctctccctacccctatcccccaattctccccaacctctggtaaccactgttctactttcaacttctatgggatcaaccttttcagatcacctgtgggtgagatcatgtggtgtttgtccttctgtgcctggcaatggtgcatttacttgtcc

SEQ ID NO: 587633 - DNA, 510 bp, Homo sapiens
ggctctttctttgagaattgggacaatgttttccttcctgtgtgttgcagtgtcttctcataggccccatgtttactctttcattttcattgaagcttggcgtttgctgatttgtggggcttgactggtatccagctggcatggggctgtggaacctaagtggaatcttctctttgtctgactattgrattttctgactctgttggagaactcatcaaattaataaaaaacaatgtgcactatttctaactatctgcactgctcttcacatactatgtttcagtagcaaataccctatttataatacttctccatctattacatagaccgacaggcatacttggtttcttgcatggtaagagttgtagtgaattaaaacagagaagttgagtgaagttgagtgagtgggagaaggttgcatgtgatgccagcagtctccaaaaatattctcatgcacctgggaggtggccatgtcattttcaggtccctgcaggctttaagtcctaacat

SEQ ID NO: 587634 - DNA, 566 bp, Homo sapiens
tctctctgtcacccagactggagtgctgtggcacaatcttggctcactgcaacctctgcctcccccaggttcaagctattctccttcctcagcctcytgaatagctgagattacaggcgccctccaccacacccggttaacttttgtatttttagtagagacggggttttgccctgttggccaggctgggattgagctcctgacctcaggtgatctgtctgcctcggcctcccaaagtgctgggattataggcgtgagccactgcacccagcctgctaaacatttcaatagaagaatagtctattaaattcacctagatatttccttttattttgtttttcttcattccccaaggtttcaggtttcctttctgtatcattcaccttctgtctgaaaaacctcgtttagcaattgttttagagcaggtccactggcaagaaattctctttgtttccttgcatgtgagaatgtctttatttcaccttcattcctgaaggatatttccactggatatagagttcttggtttaatattctttcctttcagcactttcaaaatatttttcc

SEQ ID NO: 587635 - DNA, 566 bp, Homo sapiens
tctctctgtcacccagactggagtgctgtggcacaatcttggctcactgcaacctctgcctcccccaggttcaagctattctccttcctcagcctcctgaatagctgagattacaggcgccckccaccacacccggttaacttttgtatttttagtagagacggggttttgccctgttggccaggctgggattgagctcctgacctcaggtgatctgtctgcctcggcctcccaaagtgctgggattataggcgtgagccactgcacccagcctgctaaacatttcaatagaagaatagtctattaaattcacctagatatttccttttattttgtttttcttcattccccaaggtttcaggtttcctttctgtatcattcaccttctgtctgaaaaacctcgtttagcaattgttttagagcaggtccactggcaagaaattctctttgtttccttgcatgtgagaatgtctttatttcaccttcattcctgaaggatatttccactggatatagagttcttggtttaatattctttcctttcagcactttcaaaatatttttcc

SEQ ID NO: 587636 - DNA, 558 bp, Homo sapiens
attccccaaggtttcaggtttcctttctgtatcattcaccttctgtctgaaaaacctcgtttagcaattgttttagagcaggtccactggcaagaaattctctttgtttccttgcatgtgagaatgtctttatttcaccttcattcctgaaggatatttccactggwtatagagttcttggtttaatattctttcctttcagcactttcaaaatatttttccacttccatctggccttcatgattccacgtgagaaatccacagttctgtgaatcattgcttttctacaagcaatgcatcatttttctgtttactttcaagatgtttttctatcttaattctcatcagtttatgatgtgtcttcatgtgagtttcttgggacttactctgtttctgattctatgagcttactgaatccatagatttacatacagacgcttcttgacttatgatggagttacatcctgataaaccaaccttaagttgaaaggatctttaggttgaaaatgcatgtaatatacctaacctaccaaacatcataacttagcctagtttacc

SEQ ID NO: 587637 - DNA, 508 bp, Homo sapiens
tctgatgaggactctcttcctggcttacaaatggccaccttcttgctctgtcctcacatggtsggggagagacagaaagagggagagagggcaagctctctggtatctctacttataagggcactaaattccattatgagggacccaccctcaagacatcatctaaacttaattacctcctgaagactaaagttaccttgcccaaattcctatctaaggggtctagggagtcatgccctacaaaccataaacactcatcagatgggttttatctaaccttgtatatcatgacttactttccaaactgacactggtataacatgacaagacaaggaagaaaatcaaaaaattttaccccaaaacatgtttctttgccatattttgaaatggtcctgcaaagctgtcctttgtgggggaaaatgtacatctgtaaagaatctctattcacatagctagatctttttcttccaggccctcccaatcctgaagagattaagtaagagtctag

SEQ ID NO: 587638 - DNA, 508 bp, Homo sapiens
tctgatgaggactctcttcctggcttacaaatggccaccttcttgctctgtcctcacatggtcggggagagacagaaagagggagagagggcaagctctctggtatctctacttataagggcactaaattccattatgagggacccaccctcaagacatcatctaaasttaattacctcctgaagactaaagttaccttgcccaaattcctatctaaggggtctagggagtcatgccctacaaaccataaacactcatcagatgggttttatctaaccttgtatatcatgacttactttccaaactgacactggtataacatgacaagacaaggaagaaaatcaaaaaattttaccccaaaacatgtttctttgccatattttgaaatggtcctgcaaagctgtcctttgtgggggaaaatgtacatctgtaaagaatctctattcacatagctagatctttttcttccaggccctcccaatcctgaagagattaagtaagagtctag

SEQ ID NO: 587639 - DNA, 524 bp, Homo sapiens
ataatggttatatatgacaggtggaactctgggcgacttttatttttctcttattattctttattcttcatactttgcaatgcatatatattacttttatagtaaaaaagtgcattttaagacaaaaaatctatacaaatttatctatggtattggttttcaaagtttttaacagcaaaacttttttacaaaatctctgtgaaactccagtataacagacataaaggcagtattttcttatcaatgtattgttaaactcagaagatcatgacagttgcctcttatacaatcaaccaataaaacagagaggctttttaaatgaaaaattcacattttaaattgagaaatagggaggaaagtttttatttaataaaagcctcagatggcattcacttattttaatttagctatttaatattgaggaaaatcctgattcacatagatgggtagctgcaaatgtagttttaataagtcacctgsttttatgatattcttacattgaataggacttacaagagaaaagt

SEQ ID NO: 587640 - DNA, 524 bp, Homo sapiens
ataatggttatatatgacaggtggaactctgggcgacttttatttttctcttattattctttattcttcatactttgcaatgcatatatattacttttatagtaaaaaagtgcattttaagacaaaaaatctatacaaatttatctatggtattggttttcaaagtttttaacagcaaaacttttttacaaaatctctgtgaaactccagtataacagacataaaggcagtattttcttatcaatgtattgttaaactcagaagatcatgacagttgcctcttatacaatcaaccaataaaacagagaggctttttaaatgaaaaattcacattttaaattgagaaatagggaggaaagtttttatttaataaaagcctcagatggcattcacttattttaatttagctatttaatattgaggaaaatcctgattcacatagatgggtagctgcaaatgtagttttaataagtcacctgcttttatgatattcttacrttgaataggacttacaagagaaaagt

SEQ ID NO: 587641 - DNA, 612 bp, Homo sapiens
aaggccaagcctccagagccttggtccctggggctggatgctaagtattttgaataccacctactatgaaatccattaataagtaaaattgatgtgaaataaaaacgagttcagaccaggtgtgatgatgtgcacctgtagtcccagctactcaggaggctgaggcaggagcatcgcttgaacccaggagtttgaggctacagtgagctatgatggcaccactgcactccagcctgggtgacagagcaagaccctgtctctaaaaaacaaacaaacaaaacaaagaattcatctttaactccagagattaatttgtacatgtaaatgttttataaaagtttaccataatatcatacactggaccaaatgataccacgtttacattcacttgatcgcatcayttaccagaagtttaccaggttaccacactctggactcaggaaatgccaactgagtagtggggagaacaaggagaaagaagtaaaaagaacggaaaggaataatctatttcttgatctttcagagcaaaggttcaatagaaactgcttgatttcaaatagaaactgtttgatttcaaggtaagtttaagtgaaaaacatcagcttaagcacg

SEQ ID NO: 587642 - DNA, 525 bp, Homo sapiens
tgtgccactgcactccagcctgggcgacaagagcaaaactccgtctaaaaaaaaaaaaaagcttcaaagaaaaaagcactgcctagctcctatccattactgagtacayagcaggattccagcagtagaggcacattcatgtcccataaaacagacatgcaagtattcaacatgttattaaaagcctcttaacactaaacataaggagacctcatctctacagaaagaagtaaaaaattagccggacatggtggcacgtgcctgtagtcccaactactcagggggctgaggtgggaagattccttgagcccaggaggtcaagactgcagttagccgtgatcgtgccaccgcactccggcctgggtgacaaagtgagacactgcctcaaaaaacaaaaaaaattaagtaaaagcctcttaagtaaaagcctcttaactgggccacatgcagtgtttcacccctgtaatcccagcactttgagaggtcaagggagaggatcacttgagatcaggagttcaagtacac

SEQ ID NO: 587643 - DNA, 514 bp, Homo sapiens
ctaggcctcaaaaatattttaacattctcactgacgcctgtatcatggagatgactcttctaagaacataaatgccaataattcaaagaagtagagtgttgtataacaatttgacttccactgaaattcttgctttctcacatttttatttctcttggacctaactaactttattaaggataaagcctgttataattagtttgtttgtttatagcaaaaaaaaaaaaaaatccaaaatctacaattattaatcttgttccctggattgagattagattttatcttaattctgtaaaatgatatgaaatcagagagttgatttttgttacattttgatactttggtaaaaatagctcagtaagtatgaaacagaatgaaaactcatatacttatcttttaaaaattgctctcagctgggcacagtagckcaagcctataatcccagcactttgagaggccgaggcaggcagatcacttgaggtcaggagtttgggaccagcccggccaacatggt

SEQ ID NO: 587644 - DNA, 631 bp, Homo sapiens
taaaatattgctttccaaaacaatttaaacaaaaactatcagacttcttcataatcagtgtttatggttcgctttaagtagtatgtttaatattaaaggcaatagtgctcccttgaatatttgttaatcaaattttagaattatttttagaaagctatacatgtcatgatgttttagtgatgcatgttcaaacttactctgagaagagaattattcttataaaagcagccattgccaaaaagatttcagacacagcagttttgtccctctcattcagattagaaaarccttcttgtaggagctctgaaaactttgtttactttgagtatcttgctttagacagtttttaaaacacaaatgtcatcttagacctgctgaatcagaatctgtgtcgctagagactcaagtattttcaaaaacatgcacagatgaagcaaggcataccttgttatgaactatagaacagactttacaaattctattcttcccttcctctgaagagtgattatttttaaaatgaaaaccatctggcctgctaaagtcacttgagagggtaattaactatctttaaataaataaatccctttagctacttcttttgaagaataccgcatggagaaaaaggcaagcc

SEQ ID NO: 587645 - DNA, 625 bp, Homo sapiens
gacagggagaatcaatattattaaaatgcccatactgcccaaagcaacggacagattcaatgctattcctgtcaaactactaatcatcattttttcacagaattagagaaaactattctaaatttcatatagacctaaaaaaaggccaaatagctgaagcaatcctaagcagaaagaacaaaaccagaagcatcatactacctaactttaaactatactatgaggcaaaagtaacaaaaacagaattactggtacatagacagacccatatacattggttagaagcaggttagagaacccggaaataaagctgcacacctataactttaacaaagtctacaaaaataagcaatggggaaaggactccccattcaataaatggtgctaggataaatgggtagctacatgcaaaaagattaagactagactcctgcctttcgccatatccaaaaatcaactcagaatagattaaagacataaatataaaacctaaagctttagaaatcttagaagaaaacctaagaaataccattttggacayaggccctggcaaagatttcacgacaaagacaacaaaagcaatcgcaacaaaaacaaaaactgaaaaatgggacttaattaaaga

SEQ ID NO: 587646 - DNA, 625 bp, Homo sapiens
gacagggagaatcaatattattaaaatgcccatactgcccaaagcaacggacagattcaatgctattcctgtcaaactactaatcatcattttttcacagaattagagaaaactattctaaatttcatatagacctaaaaaaaggccaaatagctgaagcaatcctaagcagaaagaacaaaaccagaagcatcatactacctaactttaaactatactatgaggcaaaagtaacaaaaacagaattactggtacatagacagacccatatacattggttagaagcaggttagagaacccggaaataaagctgcacacctataactttaacaaagtctacaaaaataagcaatggggaaaggactccccattcaataaatggtgctaggataaatgggtagctacatgcaaaaagattaagactagactcctgcctttcgccatatccaaaaatcaactcagaatagattaaagacataaatataaaacctaaagctttagaaatcttagaagaaaacctaagaaataccattttggacataggccctggcaaagatttcacgacaaagacaacaaaagcaatygcaacaaaaacaaaaactgaaaaatgggacttaattaaaga

SEQ ID NO: 587647 - DNA, 658 bp, Homo sapiens
gtaaaacataaaattataaaactgttagaaaaaaattatagagaagatcttttagatctaatgctaggcaatcagtccttagacttgaaaycaaaattgtgagtctcaaaagaaaaaaattgataaattggacctcatcaaaattaaaagcttttgctttgagaaaacctcagtgaaaagaatgaaaagacaaggcagactcagaaaaaatatttgaaaaccacgtatctgacaaaggactgatatttagaacacaaaaagaactctcggaattcaacgggaaaaaaaatctaattagtaaaagacaaagacatgaagagacatttcaccaaagagaatatgcagatggcaaaaaagcacaggaaagaattttattattagccattagaaaaatgcaaattaaaatcacaaggagctattactacacacctagaatggctgaatgctaataacaccaaatgctggacaggatgcagagaaactgaatctctcatacactgctagtaggaatgtaaaatggcatattttttgaaacttttgaaaaacttaaaagtagtatgttagtatcttataaagttaaatagacttacaatatgacctagcaatcccactgctatatggttcattcagaaataaaaacatagtccatacgaagatt

SEQ ID NO: 587648 - DNA, 538 bp, Homo sapiens
cactgtctccacttgctttgattttgttgtttcattttataaaaggtaraaaaaattttggaaatgtcattgtcagttatttggcctgcagcactgtcttggggtgaatggatgtagccttcatgtaaaaacactgtgtggagcagctttatctgcattcaaacctcaaggtagggatgagggactccccagacatttctctggtgcttttctgtccagggtaagccacgaggcattgtcatctcagggtagtgcaccgcacatgctcacacctaggcttacccaggcagaagcggcacagattccagtctggctattgcttatcacatccctggagtgtgaaacatttcccaaggggctgggctggggacatgagcctcccatgagctgtacttttgcaaatgtattttacaagtgtatgcacttacccaaaataaaaatataacgtgataattcaattacagacaaaagataaagtgtgtaagtatgcactagtgctttcatcactcagatgttgacattgctcttttctttttcc

SEQ ID NO: 587649 - DNA, 537 bp, Homo sapiens
actgtctccacttgctttgattttgttgtttcattttataaaaggtagaaaaaattttggaaatgtcattgtcagttatttggcctgcagcactgtcttggggtgaatggatgtagccttcatgtaaaaacactgtgtggagcagctttatctgcattcaaacctcaaggtagggatgagggactccccagacatttctctggtgcttttctgtccagggtaagccacraggcattgtcatctcagggtagtgcaccgcacatgctcacacctaggcttacccaggcagaagcggcacagattccagtctggctattgcttatcacatccctggagtgtgaaacatttcccaaggggctgggctggggacatgagcctcccatgagctgtacttttgcaaatgtattttacaagtgtatgcacttacccaaaataaaaatataacgtgataattcaattacagacaaaagataaagtgtgtaagtatgcactagtgctttcatcactcagatgttgacattgctcttttctttttcc

SEQ ID NO: 587650 - DNA, 575 bp, Homo sapiens
aagtgccccccagccaaacctccgttctctgtccccaccaccccttcatygaccaccatcatgaggctatatataaaccctagctatcattcatctcattagcacagaaaaatatactcattgattaagaaagtccagagattttagaaattgtgtatcaggaaccagggtcagagaaaaaatataaattaattatatgacaatattatagttgaacttttcaaagaaacaacttttattttacttattttcttctattttttaactcttttctatttcattgatttttttactctaatctttattatttcctttcttctgtgtgcctagggataatttgctcttacttctcaagtttcttgaggcaaaagtttatattattgatttggaatctttattatgggccgggctcagtggtggctcaagcctttaatcccagcactttgggaggctgaggtaggtgatcacctggggtgaggagtttgagaccagcctggccaacatggtgaaaccctgtctctaccaaaaatacaaaaattagcctggcgtggtggcatgcatctgcagtcccagct

SEQ ID NO: 587651 - DNA, 623 bp, Homo sapiens
taatttttctctatttttaagggtcctaagatacatatattgcctgtttgcaaagrcaaaaaatttttttcctagcatttttttttttatcactagtgcttcccatgattttgcttgctgctgctactgtttatgctcaagggtcccaatttcataatacataatttatatttagaataataattttatatatgttgggcaatttatgactgataatatcttgcaaggagggctgatcttgctaactgaaatatccttttgtgtggtgaatacattagtgtgtttgctagacaaatttgttatgagataaaaatacttaaaatgttgaacataataaatggagaaaacatttgaagttcccagggcaaaccaagaaaaagaaaaggaaagagggggatatgattttgacccaccaagatatgcaagaccagcagtagctgcaatatgaggggcataggcagtgggaaatcctgggtggcaaatgaataaaagtactttgggaacaggaatacaatgttatttgtctacttgtctatttgtcacattagcattgtgatgactccttcttgtcccaaatattaaatatgctttattacagcactcatcattaagttattcattgt

SEQ ID NO: 587652 - DNA, 623 bp, Homo sapiens
taatttttctctatttttaagggtcctaagatacatatattgcctgtttgcaaagacaaaaaawttttttcctagcatttttttttttatcactagtgcttcccatgattttgcttgctgctgctactgtttatgctcaagggtcccaatttcataatacataatttatatttagaataataattttatatatgttgggcaatttatgactgataatatcttgcaaggagggctgatcttgctaactgaaatatccttttgtgtggtgaatacattagtgtgtttgctagacaaatttgttatgagataaaaatacttaaaatgttgaacataataaatggagaaaacatttgaagttcccagggcaaaccaagaaaaagaaaaggaaagagggggatatgattttgacccaccaagatatgcaagaccagcagtagctgcaatatgaggggcataggcagtgggaaatcctgggtggcaaatgaataaaagtactttgggaacaggaatacaatgttatttgtctacttgtctatttgtcacattagcattgtgatgactccttcttgtcccaaatattaaatatgctttattacagcactcatcattaagttattcattgt

SEQ ID NO: 587653 - DNA, 623 bp, Homo sapiens
taatttttctctatttttaagggtcctaagatacatatattgcctgtttgcaaagacaaaaaatttttttcctagcatttttttttttatcactagtgcttcccatgattttgcttgctgctgctactgtttatgctcaagggtcccaatttcataatacataatttatatttagaataataattttatatatgttgggcaatttatgactgataatatcttgcaaggagggctgatcttgctaactgaaatatccttttgtgtggtgaatacattagtgtgtttgctagacaaatttgttaygagataaaaatacttaaaatgttgaacataataaatggagaaaacatttgaagttcccagggcaaaccaagaaaaagaaaaggaaagagggggatatgattttgacccaccaagatatgcaagaccagcagtagctgcaatatgaggggcataggcagtgggaaatcctgggtggcaaatgaataaaagtactttgggaacaggaatacaatgttatttgtctacttgtctatttgtcacattagcattgtgatgactccttcttgtcccaaatattaaatatgctttattacagcactcatcattaagttattcattgt

SEQ ID NO: 587654 - DNA, 557 bp, Homo sapiens
aatttataaagaaaagaggtttaatggccaggtgcagtggctcatgcctgtaatcccagcattttgggaggttgaggtgggcagatcacctgaggtcaggagttggagactagcctggccaacatggtggaaacccatctctactaaaaatacaaacaaacaaacaaacaaattagctgggcatagtggcaggcttctgtaatcccagctacccaggaggctgaggcaggagaatagcttgaacctgggaggcggaggttgcagtgagccgagattgcgccattgcactgcagcctgggcaacaagagtgaaacttcatctataaaaaagaggtttaattgacwcagttctgcatagctggggagacctcaggaaacttacagtcataacagaaggcacctcttcacaggacagcaagagagagcatgagtgctagcagtggaaatgccagaagcttataaaaccattagatcttgtgagactcactcatgaccatgagaacagcatgggggaaaccaccaccacgattcaattacccttacctgtcccacccttga

SEQ ID NO: 587655 - DNA, 634 bp, Homo sapiens
cccaatgtatatattataaatgaaattaaatacactgggccatcaagcaaaagagctatttggcttgtccctggttaataatttataacttatattcactggtaagtttcattagtgttacattttcctgtgttacatgttttgaaattatagtggtggaatactgcattaaaatttgacaagacttaattccttcatctcttaaatagtgatagaactctaggtctcaaagatgtaactaagaataaataagcacaaacattaaagtatcttttaaatgataaaaattatctacaaaaattaagtattcttattccaacttagtaagactcttatctttgattcagctatagtatgtgtgataaaaataaatcacaaatcttgggttatgtccttagaaaatttttatatagctggatatttaaaatatatattaaattatacatgaatatataaagcatgataagaaatcttaataaaatgtaaagaytgcattgaaaaccagaacacaattaactataactactgaaataaaatgatggatacacaagaaaactaaacctgccatgacaacactcatgtgtgatgacaaattgcagacatatatgcatatgtcaaaatttagaaagcataa

SEQ ID NO: 587656 - DNA, 538 bp, Homo sapiens
tgaagttgaagtgaaaggaactaatgattaaaaggaagatattgaccatgaagaaaaaggcagcaaaaaggatatgactaaagtaattgacagaaccactctgagagcttccagaatagaaagacagaaaacaagtagaaaatgaggatgcaggagttgtgaaaacatctcttaatctaaaaatgaatcaaaaacaggcaaaactgcaactacataagtcaaggctccaaaatcaaaggcaaacctgaaatagtgaatggtctgtccttcagagagcagcatggcaagtgaggaagataaaaataagaaaaaaaaggtcaagagaaaagcascttaagggataaagagggcagaaggaagaagaaaagccaagaaaaagctcaaataaaggaagaaagaagttgaataataagtgacaaaattacctcagcaagaattatctcaacatctgattctgaaggagaaagagacgatcaagaaggtgaaaaaattagaaaaagagaaaagatgaaaaaatattcgggctattcacagatgt

SEQ ID NO: 587657 - DNA, 595 bp, Homo sapiens
cccttaatattttgaagtgtgttcctttgatgcctagtttattgtcataaagacatgttgaattttatmaaaagctttttctgtatctatagagataatcatgtggtttttgtttttaattctgtttatgtcatgaatcacatttattgatttgcatatgttgaaccaaccttgcagccaagggatatagcctacttgattgtggtggattagcttcttgatgtgccactggaatttttttgctaatattttgttaagaatttttttgtatcaatattcatcaaggatggcctgaagttctctttttcggtcgtgtctctgctagattttggtatcaaaatggtgctggcctcatagaatgcattggggaggagtacctcctcctcaattttttgtaatagtttcagtaggaatggtatcagctcttctttatacatctggtagaattcaactgtgaattcgcctggtccagggctcttttttggtttgtagactttttattactgattccattttggaactcattgttggtctattcagggattctattctgattcagtcttgggaggttgtatatttccagaaatttatccat

SEQ ID NO: 587658 - DNA, 595 bp, Homo sapiens
cccttaatattttgaagtgtgttcctttgatgcctagtttattgtcataaagacatgttgaattttataaaaagctttttctgtatctatagagataatcatgtggtttttgtttttaattctgtttatgtcatgaatcacatttattgatttgcatatgttgaaccaaccttgcagccaagggatatagcctacttgattgtggtggattagcttcttgatgtgccactggaatttttttgctartattttgttaagaatttttttgtatcaatattcatcaaggatggcctgaagttctctttttcggtcgtgtctctgctagattttggtatcaaaatggtgctggcctcatagaatgcattggggaggagtacctcctcctcaattttttgtaatagtttcagtaggaatggtatcagctcttctttatacatctggtagaattcaactgtgaattcgcctggtccagggctcttttttggtttgtagactttttattactgattccattttggaactcattgttggtctattcagggattctattctgattcagtcttgggaggttgtatatttccagaaatttatccat

SEQ ID NO: 587659 - DNA, 595 bp, Homo sapiens
cccttaatattttgaagtgtgttcctttgatgcctagtttattgtcataaagacatgttgaattttataaaaagctttttctgtatctatagagataatcatgtggtttttgtttttaattctgtttatgtcatgaatcacatttattgatttgcatatgttgaaccaaccttgcagccaagggatatagcctacttgattgtggtggattagcttcttgatgtgccactggaatttttttgctaatattttgttaagaatttttttgtatcaatattcatcaaggatggcctgaagttctctttttcggtcgtgtctctgctagattttggtatcaaaatggtgctggcctcatagaatgcattggggaggagtacctcctcctcaattttttgtaatagtttcagtaggaatggtatcarctcttctttatacatctggtagaattcaactgtgaattcgcctggtccagggctcttttttggtttgtagactttttattactgattccattttggaactcattgttggtctattcagggattctattctgattcagtcttgggaggttgtatatttccagaaatttatccat

SEQ ID NO: 587660 - DNA, 627 bp, Homo sapiens
ttcattccccaggtttcaaaaagagaggacaagaaataccaatatgagtgatacaagatctcttgaacttcctcccctattcaagattctaaatttctaatattaatagtaaaattgatgctatcccctctgaatggaaagtggtggtggggggatcaaaaacagaaatgaagtaggagtcccataccacaatgttcaatcctccaccacccaacatcacaaacacacactttgagcaatgtttagggatagttgaagtgggaacctgttgacgtcacgatgtccctattctaattttaatacaacataaaaacacacttcttatttacgaattgatatgtacatcttttccttgtacccctttcccttaggcctcagccctagtgtagtagataaaattatagaatatagagagaacaggtgacattgagaaccttggagtgttaaatttcaggacatggaagtctgtgagtcaaacacattgaaactgtcaattctgtaggaggaacttaaagaacccactyttccttgttttctgtagccctatggctcttctctgcaaccatgattataaaagcaataaaagaaaggttttcttttttctcaattcagaaagccagttagagg

SEQ ID NO: 587661 - DNA, 570 bp, Homo sapiens
tttacccaaactaactcctaaacagtgcagcagtaatcccagagatgtacttttagatagccaatatattaaacattgattatttggagattttatctaaaactcgcttaatcacagcttgtcatactatctttattgatttgttactggtcattgttcattaagatgccagagagcaaagaattcatttttagtgctctcttccagataccagatgtttatctcctaacagtataattcaaggtcaagggtgtttattgtgtttagacagaaaagcaatcaaagtagtttgggatttaaaacacacagagagagggaagtttgcagtttctgcttacyctaaggattgctgctttgatcacaatatgcaatctgaagagtctctgaatatttgctgaggcttcaaggtttagagtgggaggtggttttttttctttttatatttcactagttgcagaaagagtgatagtaattattgccttttattcccaagcaattttgctttctgagtgactgcattttaaattctgtgatctatctccaaggtaatcttaaagtcaacagactgct

SEQ ID NO: 587662 - DNA, 465 bp, Homo sapiens
catatgagcatgcaatgtcaacttttttcatgtttttttaagtccacttaaattctattttaagccaccatctgcctgtgctgttagggcagttagccttcaatcattttaagatgctcccctctaagtaccatgatagtgatagagatatcaccagtcaggtgtcctaggaagccgaytccgagttggagatttgcatgcaaggaggttgaaatgatattcccaacacctgtggaagagtgaaagcaataggattgggcggagcaggaagtcggctggaatgcaatcactatcatggccgcagtcaactctacagggatcttggtgagtttacctaatgacctcgaattggagcaaaaaaaccaggccattatatttctgtaccaagcagttctcggatgtgggatgccttgagaagggacatgaacttggatgaaggaactttactgtgctgtgagtgttgtt

SEQ ID NO: 587663 - DNA, 465 bp, Homo sapiens
catatgagcatgcaatgtcaacttttttcatgtttttttaagtccacttaaattctattttaagccaccatctgcctgtgctgttagggcagttagccttcaatcattttaagatgctcccctctaagtaccatgatagtgatagagatatcaccagtcaggtgtcctaggaagccgactccgagttggagatttgcatgcaaggaggttgaaatgatattcccaacacctgtggaagagtgaaagcaataggattgggcggagcaggaagtcggctggaatgcaatcactatcatggccgcagtcmactctacagggatcttggtgagtttacctaatgacctcgaattggagcaaaaaaaccaggccattatatttctgtaccaagcagttctcggatgtgggatgccttgagaagggacatgaacttggatgaaggaactttactgtgctgtgagtgttgtt

SEQ ID NO: 587664 - DNA, 465 bp, Homo sapiens
catatgagcatgcaatgtcaacttttttcatgtttttttaagtccacttaaattctattttaagccaccatctgcctgtgctgttagggcagttagccttcaatcattttaagatgctcccctctaagtaccatgatagtgatagagatatcaccagtcaggtgtcctaggaagccgactccgagttggagatttgcatgcaaggaggttgaaatgatattcccaacacctgtggaagagtgaaagcaataggattgggcggagcaggaagtcggctggaatgcaatcactatcatggccgcagtcaactctacagggatcttggtgagtttacctaatgacctcgaattggagcaaraaaaccaggccattatatttctgtaccaagcagttctcggatgtgggatgccttgagaagggacatgaacttggatgaaggaactttactgtgctgtgagtgttgtt

SEQ ID NO: 587665 - DNA, 494 bp, Homo sapiens
tctttgggttttagctttcaaacatcaagatagtaggtcaatgtctaaatgagtgtatcaaagttctcacaatggcacatgkaaatccacctcttgtctacccaaaactctaaccaagcaaaggcaagttggaagaatcagacaaatgtaagtgcctaggatacataaatgccacgggattttatgtttttaactttcaacctcctaagtttcactcagagtcatgttatttggagaggttgctcaagtgtatttgtatgatgtctctgtttacggttggtctggacctctttctgtccagtgcttgccctcaactgatgagagtcacctctctaaagatcatgcttacgtccctggagcagtccacagcactatcaatgtctgacgtccacctttttccaattaatatttctgtacttactgaattggaaaacatacaggtgttttttgcctggtcacttgtggttttacaacactccccccgcttccccacc

SEQ ID NO: 587666 - DNA, 494 bp, Homo sapiens
tctttgggttttagctttcaaacatcaagatagtaggtcaatgtctaaatgagtgtatcaaagttctcacaatggcacatgtaaatccacctcttgtctacccaaaactctaaccaagcaaaggcaasttggaagaatcagacaaatgtaagtgcctaggatacataaatgccacgggattttatgtttttaactttcaacctcctaagtttcactcagagtcatgttatttggagaggttgctcaagtgtatttgtatgatgtctctgtttacggttggtctggacctctttctgtccagtgcttgccctcaactgatgagagtcacctctctaaagatcatgcttacgtccctggagcagtccacagcactatcaatgtctgacgtccacctttttccaattaatatttctgtacttactgaattggaaaacatacaggtgttttttgcctggtcacttgtggttttacaacactccccccgcttccccacc

SEQ ID NO: 587667 - DNA, 534 bp, Homo sapiens
aatttctttgggttttagctttcaaacatcaagatagtaggtcaatgtctaaatgagtgtatcaaagttctcacaatggcacatgtaaatccacctcttgtctacccaaaactctaaccaagcaaaggcaagttggaagaatcagacaaatgtaagtgcctaggatacataaatgccacgggattttatgtttttaactttcaaccwcctaagtttcactcagagtcatgttatttggagaggttgctcaagtgtatttgtatgatgtctctgtttacggttggtctggacctctttctgtccagtgcttgccctcaactgatgagagtcacctctctaaagatcatgcttacgtccctggagcagtccacagcactatcaatgtctgacgtccacctttttccaattaatatttctgtacttactgaattggaaaacatacaggtgttttttgcctggtcacttgtggttttacaacactccccccgcttccccaccactgccccaggtgattttgatgccagccaaagtgtg

SEQ ID NO: 587668 - DNA, 494 bp, Homo sapiens
tctttgggttttagctttcaaacatcaagatagtaggtcaatgtctaaatgagtgtatcaaagttctcacaatggcacatgtaaatccacctcttgtctacccaaaactctaaccaagcaaaggcaagttggaagaatcagacaaatgtaagtgcctaggatacataaatgccacgggattttatgtttttaactttcaacctcctaagtttcactcagagtcatgttatttggagaggttgctcaagtgtatttgwatgatgtctctgtttacggttggtctggacctctttctgtccagtgcttgccctcaactgatgagagtcacctctctaaagatcatgcttacgtccctggagcagtccacagcactatcaatgtctgacgtccacctttttccaattaatatttctgtacttactgaattggaaaacatacaggtgttttttgcctggtcacttgtggttttacaacactccccccgcttccccacc

SEQ ID NO: 587669 - DNA, 494 bp, Homo sapiens
tctttgggttttagctttcaaacatcaagatagtaggtcaatgtctaaatgagtgtatcaaagttctcacaatggcacatgtaaatccacctcttgtctacccaaaactctaaccaagcaaaggcaagttggaagaatcagacaaatgtaagtgcctaggatacataaatgccacgggattttatgtttttaactttcaacctcctaagtttcactcagagtcatgttatttggagaggttgctcaagtgtatttgtatgatgtctctgtttacggttggtctggacctcttkctgtccagtgcttgccctcaactgatgagagtcacctctctaaagatcatgcttacgtccctggagcagtccacagcactatcaatgtctgacgtccacctttttccaattaatatttctgtacttactgaattggaaaacatacaggtgttttttgcctggtcacttgtggttttacaacactccccccgcttccccacc

SEQ ID NO: 587670 - DNA, 534 bp, Homo sapiens
aatttctttgggttttagctttcaaacatcaagatagtaggtcaatgtctaaatgagtgtatcaaagttctcacaatggcacatgtaaatccacctcttgtctacccaaaactctaaccaagcaaaggcaagttggaagaatcagacaaatgtaagtgcctaggatacataaatgccacgggattttatgtttttaactttcaacctcctaagtttcactcagagtcatgttatttggagaggttgctcaagtgtatttgtatgatgtctctgtttacggttggtctggacctctttctgtccagtgsttgccctcaactgatgagagtcacctctctaaagatcatgcttacgtccctggagcagtccacagcactatcaatgtctgacgtccacctttttccaattaatatttctgtacttactgaattggaaaacatacaggtgttttttgcctggtcacttgtggttttacaacactccccccgcttccccaccactgccccaggtgattttgatgccagccaaagtgtg

SEQ ID NO: 587671 - DNA, 534 bp, Homo sapiens
aatttctttgggttttagctttcaaacatcaagatagtaggtcaatgtctaaatgagtgtatcaaagttctcacaatggcacatgtaaatccacctcttgtctacccaaaactctaaccaagcaaaggcaagttggaagaatcagacaaatgtaagtgcctaggatacataaatgccacgggattttatgtttttaactttcaacctcctaagtttcactcagagtcatgttatttggagaggttgctcaagtgtatttgtatgatgtctctgtttacggttggtctggacctctttctgtccagtgcttgccctcaactgatgagagtyacctctctaaagatcatgcttacgtccctggagcagtccacagcactatcaatgtctgacgtccacctttttccaattaatatttctgtacttactgaattggaaaacatacaggtgttttttgcctggtcacttgtggttttacaacactccccccgcttccccaccactgccccaggtgattttgatgccagccaaagtgtg

SEQ ID NO: 587672 - DNA, 534 bp, Homo sapiens
aatttctttgggttttagctttcaaacatcaagatagtaggtcaatgtctaaatgagtgtatcaaagttctcacaatggcacatgtaaatccacctcttgtctacccaaaactctaaccaagcaaaggcaagttggaagaatcagacaaatgtaagtgcctaggatacataaatgccacgggattttatgtttttaactttcaacctcctaagtttcactcagagtcatgttatttggagaggttgctcaagtgtatttgtatgatgtctctgtttacggttggtctggacctctttctgtccagtgcttgccctcaactgatgagagtcacctctctaaagatcatgcttacgtcyctggagcagtccacagcactatcaatgtctgacgtccacctttttccaattaatatttctgtacttactgaattggaaaacatacaggtgttttttgcctggtcacttgtggttttacaacactccccccgcttccccaccactgccccaggtgattttgatgccagccaaagtgtg

SEQ ID NO: 587673 - DNA, 462 bp, Homo sapiens
aacctaaatcttctggtgggcaagcttcttcctcaatcaaatttgtgtttatgattgtgttggggattggcatagtaatccaggtactgctactgccttgaaagcggagactgcatccttctgtctggatatcttgagtttctggattgtaaaccttattaggktccatttttcctagaattggagcctctactttgttcttgttactttagttcacccagaaagcacgatctctgtctgaatttcaaagtgttggctagtttaaatatccttttgtgagacttttgtcttcctacggggtgattttttcatcttacatatcattgctaatctttttaccttgaatgtaattgaaatagttttaatctgtgttaccagcaacaagaacctcttttatgagatgaagaggccaggtcagtctcataacgtgtgtccccctccgtgtgttgaatttatgtcaga

SEQ ID NO: 587674 - DNA, 462 bp, Homo sapiens
aacctaaatcttctggtgggcaagcttcttcctcaatcaaatttgtgtttatgattgtgttggggattggcatagtaatccaggtactgctactgccttgaaagcggagactgcatccttctgtctggatatcttgagtttctggattgtaaaccttattaggtyccatttttcctagaattggagcctctactttgttcttgttactttagttcacccagaaagcacgatctctgtctgaatttcaaagtgttggctagtttaaatatccttttgtgagacttttgtcttcctacggggtgattttttcatcttacatatcattgctaatctttttaccttgaatgtaattgaaatagttttaatctgtgttaccagcaacaagaacctcttttatgagatgaagaggccaggtcagtctcataacgtgtgtccccctccgtgtgttgaatttatgtcaga

SEQ ID NO: 587675 - DNA, 409 bp, Homo sapiens
gctgaggcaggtggatcacatgaggtaaggagttcagggccagcctgaccaacaaggaaaaaccccgtctctactaaaaacacaaaattagctgggcatggtggcacatgcctctaatcccagctactcaggaggctggggcaggagaatygcttgaacccgggaggcagggggttgcagtgaaccaagatcacaccattgcactccagcctgggcaacaagagggaaaatccatctcaaaaaaaaaaaaaaaaagaaagaataataggtttgtctataaggttttatgaaaaagtgggtgacatttggctttctctctttaaagaagatgttcaggtaatattaaaaaataatgaaaaatttgtttgccttttaaataaactaccaaaaaaaaaaaaaaggaaaaaca

SEQ ID NO: 587676 - DNA, 409 bp, Homo sapiens
gctgaggcaggtggatcacatgaggtaaggagttcagggccagcctgaccaacaaggaaaaaccccgtctctactaaaaacacaaaattagctgggcatggtggcacatgcctctaatcccagctactcaggaggctggggcaggagaatcgcttgaacccgggaggcagggggttgcagtgaamcaagatcacaccattgcactccagcctgggcaacaagagggaaaatccatctcaaaaaaaaaaaaaaaaagaaagaataataggtttgtctataaggttttatgaaaaagtgggtgacatttggctttctctctttaaagaagatgttcaggtaatattaaaaaataatgaaaaatttgtttgccttttaaataaactaccaaaaaaaaaaaaaaggaaaaaca

SEQ ID NO: 587677 - DNA, 409 bp, Homo sapiens
gctgaggcaggtggatcacatgaggtaaggagttcagggccagcctgaccaacaaggaaaaaccccgtctctactaaaaacacaaaattagctgggcatggtggcacatgcctctaatcccagctactcaggaggctggggcaggagaatcgcttgaacccgggaggcagggggttgcagtgaaccragatcacaccattgcactccagcctgggcaacaagagggaaaatccatctcaaaaaaaaaaaaaaaaagaaagaataataggtttgtctataaggttttatgaaaaagtgggtgacatttggctttctctctttaaagaagatgttcaggtaatattaaaaaataatgaaaaatttgtttgccttttaaataaactaccaaaaaaaaaaaaaaggaaaaaca

SEQ ID NO: 587678 - DNA, 409 bp, Homo sapiens
gctgaggcaggtggatcacatgaggtaaggagttcagggccagcctgaccaacaaggaaaaaccccgtctctactaaaaacacaaaattagctgggcatggtggcacatgcctctaatcccagctactcaggaggctggggcaggagaatcgcttgaacccgggaggcagggggttgcagtgaaccaagatcacaycattgcactccagcctgggcaacaagagggaaaatccatctcaaaaaaaaaaaaaaaaagaaagaataataggtttgtctataaggttttatgaaaaagtgggtgacatttggctttctctctttaaagaagatgttcaggtaatattaaaaaataatgaaaaatttgtttgccttttaaataaactaccaaaaaaaaaaaaaaggaaaaaca

SEQ ID NO: 587679 - DNA, 421 bp, Homo sapiens
caaaattgtcttttctgacctctaactttgggatactacagaggcccttgaagcacccaaaagagaggtaaacaggactatttaacatgttaagtcacatgggtagcactgtcaaaataaaacataatgttgaaccttcttsaggttatatttagtttatgtcatcaacccgttctaaaattgtataggatttctaaaattcttttttttttcccccgagatggagtcttgctctgtcaccaaggctggagtacagtggcacaatctcggctcactgcaacctccgcctcctgggttcatgccattctcctgcttcagcctcccgagtagctgggactacaggcatccaccaccatgccaagctaatttttgtatttttagtagagacggggtttcaccgtgttagccaggatgttctcat

SEQ ID NO: 587680 - DNA, 421 bp, Homo sapiens
caaaattgtcttttctgacctctaactttgggatactacagaggcccttgaagcacccaaaagagaggtaaacaggactatttaacatgttaagtcacatgggtagcactgtcaaaataaaacataatgttgaaccttcttcaggttatatttagtttatgtcatcaaccckttctaaaattgtataggatttctaaaattcttttttttttcccccgagatggagtcttgctctgtcaccaaggctggagtacagtggcacaatctcggctcactgcaacctccgcctcctgggttcatgccattctcctgcttcagcctcccgagtagctgggactacaggcatccaccaccatgccaagctaatttttgtatttttagtagagacggggtttcaccgtgttagccaggatgttctcat

SEQ ID NO: 587681 - DNA, 421 bp, Homo sapiens
caaaattgtcttttctgacctctaactttgggatactacagaggcccttgaagcacccaaaagagaggtaaacaggactatttaacatgttaagtcacatgggtagcactgtcaaaataaaacataatgttgaaccttcttcaggttatatttagtttatgtcatcaacccgttctaaaattgtataggatttctaaaattcttttttttttcccccgagayggagtcttgctctgtcaccaaggctggagtacagtggcacaatctcggctcactgcaacctccgcctcctgggttcatgccattctcctgcttcagcctcccgagtagctgggactacaggcatccaccaccatgccaagctaatttttgtatttttagtagagacggggtttcaccgtgttagccaggatgttctcat

SEQ ID NO: 587682 - DNA, 421 bp, Homo sapiens
caaaattgtcttttctgacctctaactttgggatactacagaggcccttgaagcacccaaaagagaggtaaacaggactatttaacatgttaagtcacatgggtagcactgtcaaaataaaacataatgttgaaccttcttcaggttatatttagtttatgtcatcaacccgttctaaaattgtataggatttctaaaattcttttttttttcccccgagatggagtcttgctctgtcaccaaggctggagtacagtggcacaatctcggctcactgcaacctccgcctcctgggttcatgccattctcctgcttcagcctcccgagtagctgggactacaggcatccaccaccatgccaagctaatttttgtatttttagtagagayggggtttcaccgtgttagccaggatgttctcat

SEQ ID NO: 587683 - DNA, 613 bp, Homo sapiens
tggtaatcctggctgctgcaggggggcccatggtgctcccctcccagggctcagaatgaggtccgactgggacaggatgctttaggtatgggacttgtgccccaggaggacctctgtcacacaggttgggtgagaagatrtatggcatgctgctggctgccagggctgttgggatacacgttcacccttcccttcaggacctcaaagtgaccagcttcccctttatgaatgacttcccaagtcccaggagccatttggggctgcagactgcggcctgcatgctgccctggcttcttccatgttgtgctggtcactacctaccaaggggggtcagatgcaggcacaatgtaggacgattgtctctggacctctgtcttggttatcttggagctagactgggcctggtgacaggctcgattggggtggtcctgtgtggtcaccagggatcagaaaagaggcaaatggaatgctgcgaggatgaatgagatgactgtcagcacataacaggcagctggtgagtgttcacggattaccctcagtagtctcccagaggccaaaaccacccacctgatagtgacttttcccaagccaggaggaagagaaaagagcaggt

SEQ ID NO: 587684 - DNA, 613 bp, Homo sapiens
tggtaatcctggctgctgcaggggggcccatggtgctcccctcccagggctcagaatgaggtccgactgggacaggatgctttaggtatgggacttgtgccccaggaggacctctgtcacacaggttgggtgagaagatgtatggcatgctgctggctgccagggctgttgggatrcacgttcacccttcccttcaggacctcaaagtgaccagcttcccctttatgaatgacttcccaagtcccaggagccatttggggctgcagactgcggcctgcatgctgccctggcttcttccatgttgtgctggtcactacctaccaaggggggtcagatgcaggcacaatgtaggacgattgtctctggacctctgtcttggttatcttggagctagactgggcctggtgacaggctcgattggggtggtcctgtgtggtcaccagggatcagaaaagaggcaaatggaatgctgcgaggatgaatgagatgactgtcagcacataacaggcagctggtgagtgttcacggattaccctcagtagtctcccagaggccaaaaccacccacctgatagtgacttttcccaagccaggaggaagagaaaagagcaggt

SEQ ID NO: 587685 - DNA, 613 bp, Homo sapiens
tggtaatcctggctgctgcaggggggcccatggtgctcccctcccagggctcagaatgaggtccgactgggacaggatgctttaggtatgggacttgtgccccaggaggacctctgtcacacaggttgggtgagaagatgtatggcatgctgctggctgccagggctgttgggatacacgttcacccttcccttcaggacctcaaagtgaccagcttyccctttatgaatgacttcccaagtcccaggagccatttggggctgcagactgcggcctgcatgctgccctggcttcttccatgttgtgctggtcactacctaccaaggggggtcagatgcaggcacaatgtaggacgattgtctctggacctctgtcttggttatcttggagctagactgggcctggtgacaggctcgattggggtggtcctgtgtggtcaccagggatcagaaaagaggcaaatggaatgctgcgaggatgaatgagatgactgtcagcacataacaggcagctggtgagtgttcacggattaccctcagtagtctcccagaggccaaaaccacccacctgatagtgacttttcccaagccaggaggaagagaaaagagcaggt

SEQ ID NO: 587686 - DNA, 580 bp, Homo sapiens
cctgcatgctgccctggcttcttccatgttgtgctggtcactacctaccaaggggggtcagatgcaggcacaatgtaggacgattgtctctggacctctgtcttggttatcttggagctagactgggcctggtgacaggctcgattggggtggtcctgtgtggtcaccagggatcagaaaagaggcaaatggaatgctgcgaggatgaatgagatgactgtcagcacataacaggcagctggtgagtgttcacggattaccctcagtagtctcccagaggccaaaaccacccacctgatagtgacttttcccaagccaggaggaagagaaaagagcaggtcccactcacctgaatctgatcagtgagctgtgttgagatgtgcctctcatctagaaaatggtccttcatgcagagctactcacagacactgctgtgtgtctctaactgctccacaacacagaggcgatgggractcagcaacagtgacattgtggggtgacacaacccaccaccatgggagtctgcttgggtcaacagggcccagagtcagtgtcctctatcccctgaactgacatgtgt

SEQ ID NO: 587687 - DNA, 553 bp, Homo sapiens
ccccctgcctgaggtcacatagtggccaacaggccaggtactgaccaactgcccctgaccaggttcccagtgatgagtgatgaggcccctaatgaacactcctccattgaccaggtcccactgatcaagtccccactgaccatgtcttcctaaccaggcccacacttaataggcctcatggccagcccccactgaccagttttccactgacctggtccccattgacaagaccrggttcccactgacaagaccacaatttaccaggttgctgctcacccgaccccccactgaacaattctccatgaaggagtacccagctgaccgagccccctctgaccaggcaatcactgaccaggctccaagccagtaaggccccacactgaccaggcccgtgatatattgtgtatgccccaccaacctgtttttcattgtttatgttccaacagatcaggccccactaataaagccaccactgactaggtccccccactgaccaggcttccaatgactaggtcaccaggtccccactgatgaggcctttactgaggaggcc

SEQ ID NO: 587688 - DNA, 556 bp, Homo sapiens
ccatcatagtaataattgttcaaacacaagtcatccatgaaatgctaaatctagtgggttctgaggagtaaccagatatttacagagcctcaaagtatctccatacaaaatacrgttgaactacataaagaaaattgtaacattagcatggacaaacctggcaggtactccttaactctcctaagtaataaaaactgtaaaatgcaaataaaccttcgatgacctttactaacctttactaaagtatcaatgatgacttgattgtttaaacagctgacatttgggcaatttgagtatgtcaaactcaataatactggttttcatttgcaagatccacttaaaacttaaggaggccaaaaaacatcatttaaaataccctataaattataatcatacatgtgatacaaaaatatcctacttcagtaaatattggaatgttatatattttatgagaaacaattaaaatgtgtaaatagcccagtaataaagttttataatcttttaaatcatcatagaatttttccttaagactttatggttaaatattctcttcatt

SEQ ID NO: 587689 - DNA, 556 bp, Homo sapiens
ccatcatagtaataattgttcaaacacaagtcatccatgaaatgctaaatctagtgggttctgaggagtaaccagatatttacagagcctcaaagtatctccatacaaaatacggttgaactacawaaagaaaattgtaacattagcatggacaaacctggcaggtactccttaactctcctaagtaataaaaactgtaaaatgcaaataaaccttcgatgacctttactaacctttactaaagtatcaatgatgacttgattgtttaaacagctgacatttgggcaatttgagtatgtcaaactcaataatactggttttcatttgcaagatccacttaaaacttaaggaggccaaaaaacatcatttaaaataccctataaattataatcatacatgtgatacaaaaatatcctacttcagtaaatattggaatgttatatattttatgagaaacaattaaaatgtgtaaatagcccagtaataaagttttataatcttttaaatcatcatagaatttttccttaagactttatggttaaatattctcttcatt

SEQ ID NO: 587690 - DNA, 556 bp, Homo sapiens
ccatcatagtaataattgttcaaacacaagtcatccatgaaatgctaaatctagtgggttctgaggagtaaccagatatttacagagcctcaaagtatctccatacaaaatacggttgaactacataaagaaaattgtaacattagcatggacaaacctggcaggtactccttaactctcctaagtaataaaaactgtaaaatgcaaataaaccttcgatgacctttactaacctttactaaagtatcaatgatgacttgrttgtttaaacagctgacatttgggcaatttgagtatgtcaaactcaataatactggttttcatttgcaagatccacttaaaacttaaggaggccaaaaaacatcatttaaaataccctataaattataatcatacatgtgatacaaaaatatcctacttcagtaaatattggaatgttatatattttatgagaaacaattaaaatgtgtaaatagcccagtaataaagttttataatcttttaaatcatcatagaatttttccttaagactttatggttaaatattctcttcatt

SEQ ID NO: 587691 - DNA, 394 bp, Homo sapiens
tggaacttttcctgagaacaagtgtaagccaatgacacagtaaatgacaggagatttaaaatgtcacctgtcaagtgactgcttatgaagggttattgctcagctaagtatttctgaatgagtcttaggtctgttggccttcaatctctactgaaaccctgagaacttgatgaygcatttgttttctgagaatcgtttcagtgtgctggctgacagttccatgaggatggcaaaacttaagaaagtgtagagccagtgaaaaagagatgcacagacttcttgggaactgtttaagctttggaacatgatgaatttatggtgcataagtacagtcttctctgtgaaagtttttgttttcacatctttcattagatgtgtgtaagaaaaaaaatat

SEQ ID NO: 587692 - DNA, 607 bp, Homo sapiens
acaaatatgatatccagaagagtattttctaggttttcttcaaggatttttatagtcagaagatgtactcttatgtaagaaaagcacaaaccttttttttgttttgttttgagacagagtctccatcaccaaggctatagtgcagtggtatgatcttggcttactgcaacctctgtctcctgggttcaagtgattctcctgcctcagcctcctgagtatctgagattacacatgcctgccaacaagctttgctaatttttgtatttttactagagacaggtttcatcatkttggccaggctggcctcaaactcctgatgtcaggtgattcacctgcctcggcctccccaaattttgggattacaagtgtgagccaccatgcctggccaagcacaaagcttttaacataaaaatggaaatgaacattttagtgttttgtttaattcataaaatgcaattattttggattctactaaataataaacatccatatgtggcaaagtgtttggatgccaatcattcagttgtgattatgggtgggaagaattgagatggtgcaaataaacttttttaatttttttttattttcaagatggagtcttgccctg

SEQ ID NO: 587693 - DNA, 607 bp, Homo sapiens
acaaatatgatatccagaagagtattttctaggttttcttcaaggatttttatagtcagaagatgtactcttatgtaagaaaagcacaaaccttttttttgttttgttttgagacagagtctccatcaccaaggctatagtgcagtggtatgatcttggcttactgcaacctctgtctcctgggttcaagtgattctcctgcctcagcctcctgagtatctgagattacacatgcctgccaacaagctttgctaatttttgtatttttactagagacaggtttcatcatgttggccaggctggcctcaaactcctgatgtcaggtgattcacctgcctcggcctccccaaattttgggattacaagtgtgarccaccatgcctggccaagcacaaagcttttaacataaaaatggaaatgaacattttagtgttttgtttaattcataaaatgcaattattttggattctactaaataataaacatccatatgtggcaaagtgtttggatgccaatcattcagttgtgattatgggtgggaagaattgagatggtgcaaataaacttttttaatttttttttattttcaagatggagtcttgccctg

SEQ ID NO: 587694 - DNA, 607 bp, Homo sapiens
acaaatatgatatccagaagagtattttctaggttttcttcaaggatttttatagtcagaagatgtactcttatgtaagaaaagcacaaaccttttttttgttttgttttgagacagagtctccatcaccaaggctatagtgcagtggtatgatcttggcttactgcaacctctgtctcctgggttcaagtgattctcctgcctcagcctcctgagtatctgagattacacatgcctgccaacaagctttgctaatttttgtatttttactagagacaggtttcatcatgttggccaggctggcctcaaactcctgatgtcaggtgattcacctgcctcggcctccccaaattttgggattacaagtgtgagccaccatgcctggccaagcacaaagcttttaacataaaaakggaaatgaacattttagtgttttgtttaattcataaaatgcaattattttggattctactaaataataaacatccatatgtggcaaagtgtttggatgccaatcattcagttgtgattatgggtgggaagaattgagatggtgcaaataaacttttttaatttttttttattttcaagatggagtcttgccctg

SEQ ID NO: 587695 - DNA, 607 bp, Homo sapiens
acaaatatgatatccagaagagtattttctaggttttcttcaaggatttttatagtcagaagatgtactcttatgtaagaaaagcacaaaccttttttttgttttgttttgagacagagtctccatcaccaaggctatagtgcagtggtatgatcttggcttactgcaacctctgtctcctgggttcaagtgattctcctgcctcagcctcctgagtatctgagattacacatgcctgccaacaagctttgctaatttttgtatttttactagagacaggtttcatcatgttggccaggctggcctcaaactcctgatgtcaggtgattcacctgcctcggcctccccaaattttgggattacaagtgtgagccaccatgcctggccaagcacaaagcttttaacataaaaatggaaatgaacattttagtgttttgtttaattcataaaatgcaattattttggattctactaaataataaacatccatatgtggcaaagtgtttggatgcyaatcattcagttgtgattatgggtgggaagaattgagatggtgcaaataaacttttttaatttttttttattttcaagatggagtcttgccctg

SEQ ID NO: 587696 - DNA, 520 bp, Homo sapiens
attcctcagtaacatttacaacaaattcaagtccactttcaaataacactatcccactatcccacaaataagactacctgcttaacaaagaacacacctaattcctcaatatacatttacaaccaattcaagtcyactttcagataacactatcccacttcatgggtgactacctgcttaacaaagaaaacacctgattcctccctcccatccttccattccattccttgtattattgttctttatttcacttgtgtataagcacacataatctatctgtgtgtatttattattatctacaaacttattggtcagatcaattatgaataaatacatgtttttattgtaccacaattcctccctcccatccttccattccattccttgtattagtgttactcatttcaattgtgtataagcatacataatctatctgtgtgtatttgttattgtctatgaacttcttggtcagatcaattaagaataaatacatagatttttattgtaccaaaattcttta

SEQ ID NO: 587697 - DNA, 520 bp, Homo sapiens
attcctcagtaacatttacaacaaattcaagtccactttcaaataacactatcccactatcccacaaataagactacctgcttaacaaagaacacacctaattcctcaatatacatttacaaccaattcaagtctactttcagataacactatcccacttcatgggtgactacctgcttaacaaagaaaacacctgattcctccctcccatccttccattccattccttgtattattgttcyttatttcacttgtgtataagcacacataatctatctgtgtgtatttattattatctacaaacttattggtcagatcaattatgaataaatacatgtttttattgtaccacaattcctccctcccatccttccattccattccttgtattagtgttactcatttcaattgtgtataagcatacataatctatctgtgtgtatttgttattgtctatgaacttcttggtcagatcaattaagaataaatacatagatttttattgtaccaaaattcttta

SEQ ID NO: 587698 - DNA, 520 bp, Homo sapiens
attcctcagtaacatttacaacaaattcaagtccactttcaaataacactatcccactatcccacaaataagactacctgcttaacaaagaacacacctaattcctcaatatacatttacaaccaattcaagtctactttcagataacactatcccacttcatgggtgactacctgcttaacaaagaaaacacctgattcctccctcccatccttccattccattccttgtattattgttctttatttcacttgtgtataagcacacataatctatctgtgtgtatttattattatctacaaacttattggtcagatcaattatgaataaatacatgtttttattgtaccacaattcctccctcccatccttccattccattccttgtattagtgttactcatttcaattgtgtataagcatacataatctatctgtgtgtatttgttattgtctatgaacttcttggtcagatcaattaagaataaatacatagmtttttattgtaccaaaattcttta

SEQ ID NO: 587699 - DNA, 548 bp, Homo sapiens
ctctttttaaaaaaatgttgatccaggtttcagttatatatcttttgtttccctctaaagaatttcatttaacatttcttgcaagacaggtctcctggcaacaagtttcttgaatttttatttttctgaggaaggccttaattctccttcacttttgaagggtggtttcagtgggtacagaaacttaggttggtgggtttttttctgtcaacattttgaatttttcatttcactgtcttcttgctttcacagtttctgcaatgttgaatgcagttcttatctgtgtgtctctgtaggtaaggtgttttctgccgccacctctggtttctttcagagttttcctttatcttttatttcatatagtttgaaaattatatgtccaagtgtaggttgttggcatttattctgcytggtgttctctgagcttcctggatctttggttttgtgtctgacattaatactggaagttctcagacatggttgttgcagaactttcttctatttcttcacctcctggtattctcattactctgtttcaccttttgtag

SEQ ID NO: 587700 - DNA, 548 bp, Homo sapiens
ctctttttaaaaaaatgttgatccaggtttcagttatatatcttttgtttccctctaaagaatttcatttaacatttcttgcaagacaggtctcctggcaacaagtttcttgaatttttatttttctgaggaaggccttaattctccttcacttttgaagggtggtttcagtgggtacagaaacttaggttggtgggtttttttctgtcaacattttgaatttttcatttcactgtcttcttgctttcacagtttctgcaatgttgaatgcagttcttatctgtgtgtctctgtaggtaaggtgttttctgccgccacctctggtttctttcagagttttcctttatcttttatttcatatagtttgaaaattatatgtccaagtgtaggttgttggcatttattctgcctggtgttctctgagcttcctggatctttggtttkgtgtctgacattaatactggaagttctcagacatggttgttgcagaactttcttctatttcttcacctcctggtattctcattactctgtttcaccttttgtag

SEQ ID NO: 587701 - DNA, 548 bp, Homo sapiens
ctctttttaaaaaaatgttgatccaggtttcagttatatatcttttgtttccctctaaagaatttcatttaacatttcttgcaagacaggtctcctggcaacaagtttcttgaatttttatttttctgaggaaggccttaattctccttcacttttgaagggtggtttcagtgggtacagaaacttaggttggtgggtttttttctgtcaacattttgaatttttcatttcactgtcttcttgctttcacagtttctgcaatgttgaatgcagttcttatctgtgtgtctctgtaggtaaggtgttttctgccgccacctctggtttctttcagagttttcctttatcttttatttcatatagtttgaaaattatatgtccaagtgtaggttgttggcatttattctgcctggtgttctctgagcttcctggatctttggttttgtgtctgacattaatactggaagttctcagacatggttgttgcaraactttcttctatttcttcacctcctggtattctcattactctgtttcaccttttgtag

SEQ ID NO: 587702 - DNA, 548 bp, Homo sapiens
ctctttttaaaaaaatgttgatccaggtttcagttatatatcttttgtttccctctaaagaatttcatttaacatttcttgcaagacaggtctcctggcaacaagtttcttgaatttttatttttctgaggaaggccttaattctccttcacttttgaagggtggtttcagtgggtacagaaacttaggttggtgggtttttttctgtcaacattttgaatttttcatttcactgtcttcttgctttcacagtttctgcaatgttgaatgcagttcttatctgtgtgtctctgtaggtaaggtgttttctgccgccacctctggtttctttcagagttttcctttatcttttatttcatatagtttgaaaattatatgtccaagtgtaggttgttggcatttattctgcctggtgttctctgagcttcctggatctttggttttgtgtctgacattaatactggaagttctcagacatggttgttgcagaactttcttctatttcttcwcctcctggtattctcattactctgtttcaccttttgtag

SEQ ID NO: 587703 - DNA, 535 bp, Homo sapiens
aatttttcatttcactgtcttcttgctttcacagtttctgcaatgttgaatgcagttcttatctgtgtgtctctgtaggtaaggtgttttctgccgccacctctggtttctttcagagttttcctttatcttttatttcatatagtttgaaaattatatgtccaagtgtaggttgttggcatttattctgcctggtgttctctgagcttcctggatctttggttttgtgtctgacattaatactggaagttctcagacatggttgttgcagaactttcttctatttcttcacctcctggtattctcattactctgtttcaccttttgtagttgtcccacagtcttggatatcatcttctgttattttcagtgtttctttcctttagttttcgaagtttctgatkataaatcctcaagctcagagattctttactcatctgagtccagtctactaataagccatcagaggtattcttcagttatttaccacattttttaccactacattatgttgaagtttcttacgatgtctgtc

SEQ ID NO: 587704 - DNA, 536 bp, Homo sapiens
gtcctttgcagggacatggaagaagctggaaaccatcattctcagcaaactaacacaagaacagaaaaccaaacaccacatgttctcactcataagtgggagktgaacaatgagaacacatggacacagggaggggaacatcacacactggggcctgttggggggtgggggcagggagagggatagcattaggagaaatgcctaatataggtgatgggttgatgggtgcagcaaaccaccgcagaatatatatacctatgtaacaaacctgcacgttctgcacatgtaccccagaacttaaagtataattttaaaaagtaggttaaaaaattattacagacacagtctgatgcaaatctttgacttggctagcttcaaggctcttaaaagtctaagattccttattaaaaatttccaacaaagccaattttaagaagcctatatggccaataaatattcttgctgccctttatggaaataatcaggcccggtatgataagactaaaacttattttgcatacaaaattggtcctact

SEQ ID NO: 587705 - DNA, 636 bp, Homo sapiens
attccttattaaaaatttccaacaaagccaattttaagaagcctatatggccaataaatattcttgctgccctttatggaaataatcaggcccggtatgataagactaaaacttattttgcatacaaaattggtcctactatgatttgtctttgataaaatgatggactagagagaaaatttatgttccaaaagaaaactatgacatatgctattagattccaaccctgatcattgttttagagtttttattatttgcctataatttgggctgaatcctgaattatttcctggctccaagtgttccctagtgaatctgaatataatatattttttaaaacttgttttatcctgtcaggaatgagatgtatttttgaaggactacttaaactagcaattacaattcgattattatgattatagaatctcgggatttctcttccttcttgtcaaggtctttacctgatgtttgtctcattaaaaaaaaaawgagactgattacactctactcaagactgaagacatgtactttaacctgtctctgttaccagtaaaccaaagccttaactttcagagtctgtcagggaccctgtgtggtccctggatcaaccacccatgggcttatgaatgtgttgac

SEQ ID NO: 587706 - DNA, 552 bp, Homo sapiens
ctgtcagggaccctgtgtggtccctggatcaaccacccatgggcttatgaatgtgttgaccrctggcatatgagaagtaattgtctattagtttatgtgacacttcctctttctatttataactccaatgtttctgaacactgaagtagttcatcgaaattactttccaggattagacaaaccatacctgcaaaccaaggaggtgaattttggccaatgtttggcagaagtcacttgcaatggtggggagtaacctctcatgaacgtataattagaaatctgtcaaccactctaggtaaattagcgaatgaactagctgaagccatagctaccaaacaaagatctttagacgctttagccaggatagtcatggatgacggaataactttaggctgcatagtggtgaaacacggagaaattcatatggcagctagctaacacattatgttgtgtttagatccatgcatcttctgaagttgaaacaaatgtaaaaaaataagacaatatgagaattaattatgacaaatcctagggaagaggctgaaagagctg

SEQ ID NO: 587707 - DNA, 505 bp, Homo sapiens
atatattttttaaaacttgttttatcctgtcaggaatgagatgtatttttgaaggactacttaaactagcaattacaattcgattattatgattatagaatctcgggatttctcttccttcttgtcaaggtctttacctgatgtttgtctcattaaaaaaaaaaagagactgattacactctactcaagactgaagacatgtactttaacctgtctctgttaccagtaaaccaaagccttaactttcagagtctgtcagggaccctgtgtggtccctggatcaaccacccatgggcttatgaatgtgttgaccgctggcatatgagaagtaattgtctattagtttatgtgacayttcctctttctatttataactccaatgtttctgaacactgaagtagttcatcgaaattactttccaggattagacaaaccatacctgcaaaccaaggaggtgaattttggccaatgtttggcagaagtcacttgcaatggtggggagtaa

SEQ ID NO: 587708 - DNA, 505 bp, Homo sapiens
atatattttttaaaacttgttttatcctgtcaggaatgagatgtatttttgaaggactacttaaactagcaattacaattcgattattatgattatagaatctcgggatttctcttccttcttgtcaaggtctttacctgatgtttgtctcattaaaaaaaaaaagagactgattacactctactcaagactgaagacatgtactttaacctgtctctgttaccagtaaaccaaagccttaactttcagagtctgtcagggaccctgtgtggtccctggatcaaccacccatgggcttatgaatgtgttgaccgctggcatatgagaagtaattgtctattagtttatgtgacacttcctctttctatttataactccaatgtttctgaacactgaagtagttcatcgaaattactttmcaggattagacaaaccatacctgcaaaccaaggaggtgaattttggccaatgtttggcagaagtcacttgcaatggtggggagtaa

SEQ ID NO: 587709 - DNA, 430 bp, Homo sapiens
gggctgtgattccctctttggggccctgtggttcctggtatctccaagcttccgggtgccactgtgttcccagtgtcgtcccagcggaagctgcttgcggtgcccgtggtccagccacagacttgtggagagctggcacccrtgttggcacctggagctacctgccccactgcagcagccaggaagtctgactgcacagtggccagaccccatgcttgctcacacaccccttgccactccacgcagtctcccttggcaaacatgggatccaacctggtagcatgagctgagcacagcctgccaggctgagtggcggggcccaagcaaaactcaggtaaaggtgccaccagccatagaggtttctgtccagaaaagtgacactccaaagatcccgtaacaccgctactcttcccagcctctggaaactctc

SEQ ID NO: 587710 - DNA, 617 bp, Homo sapiens
ttggggccctgtggttcctggtatctccaagcttccgggtgccactgtgttcccagtgtcgtcccagcggaagctgcttgcggtgcccgtggtccagccacagacttgtggagagctggcacccgtgttggcacctggagctacctgccccactgcagcagccaggaagtctgactgcacagtggccagaccccatgcttgctcacacaccccttgccactccacgcagtctcccttggcaaacatgggatccaacctggtagcatgagctgagcacagcctgccaggctgagtggcggggcccaagcaaaactcaggtaaaggtgccaccagccatagaggtttctgtccagaaaagtgacactccaaagatcccgtaacaccgctactcttcccagcctctggaaactctcagtctactctccatcttgatgagttcaattgttttaatttttagctcccacaaatgtgtgagaacatgcaaagtctttctgtgcctgkctcattgtacttaacataatgttccctagttccatctacgttgttgcaagtgacagaatcttattctttttcatggctgaagagtactccattgtgtacatgtactacattttctt

SEQ ID NO: 587711 - DNA, 617 bp, Homo sapiens
ttggggccctgtggttcctggtatctccaagcttccgggtgccactgtgttcccagtgtcgtcccagcggaagctgcttgcggtgcccgtggtccagccacagacttgtggagagctggcacccgtgttggcacctggagctacctgccccactgcagcagccaggaagtctgactgcacagtggccagaccccatgcttgctcacacaccccttgccactccacgcagtctcccttggcaaacatgggatccaacctggtagcatgagctgagcacagcctgccaggctgagtggcggggcccaagcaaaactcaggtaaaggtgccaccagccatagaggtttctgtccagaaaagtgacactccaaagatcccgtaacaccgctactcttcccagcctctggaaactctcagtctactctccatcttgatgagttcaattgttttaatttttagctcccacaaatgtgtgagaacatgcaaagtctttctgtgcctgtctcattgtacttaacataatgttccctagttccatctacgttgttgcaagtgacagaatcttattstttttcatggctgaagagtactccattgtgtacatgtactacattttctt

SEQ ID NO: 587712 - DNA, 435 bp, Homo sapiens
ccgtaacaccgctactcttcccagcctctggaaactctcagtctactctccatcttgatgagttcaattgttttaatttttagctcccacaaatgtgtgagaacatgcaaagtctttctgtgcctgtctcattgtacttaacataatgttccctagttccatctacgttgttgcaagtgacagaatcttattctttttcatggctgaagagtactccattgtgtacatgtactacattttctttatcccttcatctgttgatgcacacttagtttgcttccaaatcttggctattatgaatagtgctgaaataaatatgggaatgcagatatctctttcatatactaattttccctcycttgggtatatacccagcagtgggattgctgtatcatatgatagttctatttttaattttttgagggacctccatat

SEQ ID NO: 587713 - DNA, 631 bp, Homo sapiens
tggttattaatcccttgccagatatatagtttgcaaatattttcttccattctgtggattgtcttttcactttgtccattgttttctttactatgcagaaacttttgaacttcatgtgataccatttgttcatttttgctttggttgcctgagcttttggagtattactcaagaaatctgtgcccagaccaatttcctggagagtttccctaatgttttctttcagtagtttcttgtccttgatttaagtctttaacccatttggatttgatttttgtatatagcacaagagagggttctagtttaattattctgccaatgactttgggaggmtgaggtgggcagatcatgagggcaggatatcaagaacatcctggctaacacggtgaaactccgtctctactaaaaatacaaaaaaaaaaaatagctgggcgtggtgggggcacttgtactcccagctacttgggaggctgaggaggagaatggtgtgaaccgggaggtggagcttgcagtgagcccagaccacgccactgcactgcagcctgagcaacagagctagactccatctcaaaaaaaaaaaaattctgccaatgaatatctagttttcccagcacaatttggtgaagagact

SEQ ID NO: 587714 - DNA, 556 bp, Homo sapiens
tgagggcaggatatcaagaacatcctggctaacacggtgaaactccgtctctactaaaaatacaaaaaaaaaaaatagctgggcrtggtgggggcacttgtactcccagctacttgggaggctgaggaggagaatggtgtgaaccgggaggtggagcttgcagtgagcccagaccacgccactgcactgcagcctgagcaacagagctagactccatctcaaaaaaaaaaaaattctgccaatgaatatctagttttcccagcacaatttggtgaagagactgtcctctcccccatgtatattcttggcaccttcattgaaaatgagttagttgtaaatgtaaggatttatttctgggttctctattctgttccattggtctatgtgtctgttttatgccagtaccatgctgtttagcttacaattgctctgtagtataatttaacgtcaggtgatgtgattcttccagttttgttctttttgctatggatggctttgggtattctgggtcttttatgatttcatataaattttaggatttttttctgtttctgtg

SEQ ID NO: 587715 - DNA, 631 bp, Homo sapiens
tggttattaatcccttgccagatatatagtttgcaaatattttcttccattctgtggattgtcttttcactttgtccattgttttctttactatgcagaaacttttgaacttcatgtgataccatttgttcatttttgctttggttgcctgagcttttggagtattactcaagaaatctgtgcccagaccaatttcctggagagtttccctaatgttttctttcagtagtttcttgtccttgatttaagtctttaacccatttggatttgatttttgtatatagcacaagagagggttctagtttaattattctgccaatgactttgggaggctgaggtgggcagatcatgagggcaggatatcaagaacatcctggctaacacggtgaaactccgtctctactaaaaatacaaaaaaaaaaaatagctgggcgtggtgggggcayttgtactcccagctacttgggaggctgaggaggagaatggtgtgaaccgggaggtggagcttgcagtgagcccagaccacgccactgcactgcagcctgagcaacagagctagactccatctcaaaaaaaaaaaaattctgccaatgaatatctagttttcccagcacaatttggtgaagagact

SEQ ID NO: 587716 - DNA, 556 bp, Homo sapiens
tgagggcaggatatcaagaacatcctggctaacacggtgaaactccgtctctactaaaaatacaaaaaaaaaaaatagctgggcgtggtgggggcacttgtactcccagctacttgggaggctgaggaggagaatggtgtgaaccgggaggtggagcttgcagtgagcccagaccacgccactgcactgcagcctgagcaacagagytagactccatctcaaaaaaaaaaaaattctgccaatgaatatctagttttcccagcacaatttggtgaagagactgtcctctcccccatgtatattcttggcaccttcattgaaaatgagttagttgtaaatgtaaggatttatttctgggttctctattctgttccattggtctatgtgtctgttttatgccagtaccatgctgtttagcttacaattgctctgtagtataatttaacgtcaggtgatgtgattcttccagttttgttctttttgctatggatggctttgggtattctgggtcttttatgatttcatataaattttaggatttttttctgtttctgtg

SEQ ID NO: 587717 - DNA, 556 bp, Homo sapiens
tgagggcaggatatcaagaacatcctggctaacacggtgaaactccgtctctactaaaaatacaaaaaaaaaaaatagctgggcgtggtgggggcacttgtactcccagctacttgggaggctgaggaggagaatggtgtgaaccgggaggtggagcttgcagtgagcccagaccacgccactgcactgcagcctgagcaacagagctagactccatctcaaaaaaaaaaaaattctgccaatgaatatctagttttcccagcacaatttggtgaagagactgtcctctcccccatgtatattcttggcaccttcattgaaaatgagttagttgtaaatgtaaggatttatttctgggttctctattctgttccattggtctatgtgtctgttttatgccagtaycatgctgtttagcttacaattgctctgtagtataatttaacgtcaggtgatgtgattcttccagttttgttctttttgctatggatggctttgggtattctgggtcttttatgatttcatataaattttaggatttttttctgtttctgtg

SEQ ID NO: 587718 - DNA, 367 bp, Homo sapiens
agatctttcacttcttttgttacatttattcctagatattttattttatttgtagctattgtaaatgggattacgttcttgattttcttctttagattgttcagttttggcatttagaaatgttactgatttttgcattttgattttgtatcgtgtgactctgaatttkttgatcagttctgatagttttttggtggagttcttaggtttttccaaatataagatcaaatcacctgcaaacaagaaaacaataataattttacttctttcaatttggatgccctttactgtttttcaattttcttgattgctctagctaggacttccagtactatgttgagtaacattgttggaagtggacattctt

SEQ ID NO: 587719 - DNA, 508 bp, Homo sapiens
tgatttttgcattttgattttgtatcgtgtgactctgaattttttgatcagttctgatagttttttggtggagttcttaggtttttccaaatataagatcaaatcacctgcaaacaagaaaacaataataattttacttctttcaatttggatgccctttactgtttttcaattttsttgattgctctagctaggacttccagtactatgttgagtaacattgttggaagtggacattcttgccttgttccagatcttagaagaaaggctttcaggttatttctgttcaggatgatactggctgagggtttgttgcatatggtttttaatgtgttgtggtatgttccttctaaatctagtttttttgggggtttctttttatcacagggaagttggattttattaaatgcttttcagcatcaattgaaattaccatatgttttttgtccttcattctgttgatatgatgtgtcacattgattgatttgcatatgttgaaccatgttgg

SEQ ID NO: 587720 - DNA, 508 bp, Homo sapiens
tgatttttgcattttgattttgtatcgtgtgactctgaattttttgatcagttctgatagttttttggtggagttcttaggtttttccaaatataagatcaaatcacctgcaaacaagaaaacaataataattttacttctttcaatttggatgccctttactgtttttcaattttcttgattgctctagctaggacttccagtactatgttgagtaacattgttggaagtggacattcttgccttgttccagatcttagaagaaaggctttcaggttatttctgttcaggatgatactggctgagggtttgttgcatatggtttttawtgtgttgtggtatgttccttctaaatctagtttttttgggggtttctttttatcacagggaagttggattttattaaatgcttttcagcatcaattgaaattaccatatgttttttgtccttcattctgttgatatgatgtgtcacattgattgatttgcatatgttgaaccatgttgg

SEQ ID NO: 587721 - DNA, 408 bp, Homo sapiens
tggttgtgtttttttttttttttttttttttgtttttgtttttttttttttgagatggagtcttgctctgtcacccaggatggagcttggtacaatctcagctcactgcaacttctgcctcccaggttcaagcgattctcctgcctcagcctctggagtagctgggagtacaggtgcacgccaccatggctggctaatttttgtatttttagtagagatggggtttcaccatgttggccagactggtcttgaactcctgatctcaggtgaycacctgccttggcttcccaaagtgttgggattacaggcatgagccacggtgcctggccattacttgcaggtttttcaatttattggaatatagttggtcataatagtttctaatgattacttgaatttctgcagtat

SEQ ID NO: 587722 - DNA, 427 bp, Homo sapiens
  misc_feature 302: n = A,T,C or G
ctagagattccaatattggagacaacagggctctgggaagattaaggttgagttttctggatctgcagaatagagtcactgaggagcaattgcaagttcagaggagatgaaagaacaagtcagggcatgcttaggaaaagagaaaaccaggkatagattttaggcaagagtcacactgaggaagggaaggttcttggcgtcgctcaggaaggaatccaaaagcaagcctgtggtggaataaagcagctctatggaggcattggcgcgtgttacagccctgcgtccgctcctgcagggcaggnagccctcgtgtgggttgtgctcccagagtagcagcctaggggtggcttgtagtcatttttataattcacttttgatgacatgctaattaaggagcgggttactcagaaatagctagaaatgggca

SEQ ID NO: 587723 - DNA, 427 bp, Homo sapiens
  misc_feature 302: n = A,T,C or G
ctagagattccaatattggagacaacagggctctgggaagattaaggttgagttttctggatctgcagaatagagtcactgaggagcaattgcaagttcagaggagatgaaagaacaagtcagggcatgcttaggaaaagagaaaaccaggtatagattttaggcaagagtcacactgaggaagggaaggttcttggcgtcgctcaggaaggaatccaaaagcaagcctgtggtggaataaagcagctctatggaggcattggcgcgtgttacagccctgcgtccgctcctgcagggcaggnagccctcgtgtgggttgtgctcccagagtagcagcctaggggtggcttgtagtcatttttataattcacttttgatgacatgctaattaaggrgcgggttactcagaaatagctagaaatgggca

SEQ ID NO: 587724 - DNA, 517 bp, Homo sapiens
ggggaatatattttctgttgagtcctatactagtaagattttcaacacaaggtgactctcgacctcgccttgtaggaagagtgctgagaaaatatttcacctgctctttctccataaagagctgatactgatcattgctattttcttattcgatctgtaaagatarcaaagacaaatgcttaatatttcatttttccttaaatgattcttaatgacttgcagtttttaaaaacttaccctgagagtaaaccaaattacccactaaatagtgttttcacaccgaagatgtgtaagagcatacctgttgtaaggaattataattttaaaatcgttctaaagaagcaccattgtttctaaggtgatttctactgaacaagcagttcaaacaaagtagacagggaagagaaatggctatcagtgacgtatggctcaacaggtaaaacttcctgccttctaaaatggctctacttgtaagattctgaagattccattagaaatacttgtatttaaagggtaa

SEQ ID NO: 587725 - DNA, 517 bp, Homo sapiens
ggggaatatattttctgttgagtcctatactagtaagattttcaacacaaggtgactctcgacctcgccttgtaggaagagtgctgagaaaatatttcacctgctctttctccataaagagctgatactgatcattgctattttcttattcgatctgtaaagatagcaaagacaaatgcttaatatttcatttttccttaaatgattcttaatgacttgcagtttttaaaaacttaccctgagagtaaaccaaattacccactaaatagtgttttcacaccgaagatgtgtaagagcatacctgttgtaaggaattataattttaaaatcgttctaaagaagcaccattgtttctaaggtgatttctactgaacaagcagttcaaacaaagtagacagggaagagaaatggctatcagtgacgtatggctcaacaggyaaaacttcctgccttctaaaatggctctacttgtaagattctgaagattccattagaaatacttgtatttaaagggtaa

SEQ ID NO: 587726 - DNA, 456 bp, Homo sapiens
tatattcttgtagtttactaagttctaccatactgttttccatatgtgtcttaagatttaatatttcttcttccaacatatttttatcctcctcaagtttttcacattcctgttgtacttttttcatagataataactcctgttgaaaaacttgattctctttaggcaaattgacacattttgaagatactgcttccttctccgccataagatcatcaaattgcatgaataaaatagtatagcttgataatgaagtaggctgagaataatctaatacaaaaccaatagcaaattttgaaatgcgtttacttgcaataaaatgttatctstaatgcagcagattcttcaaatgtgaacccttaaattactcagaattttaagaacaaagttaaagctaccatgagtcataaaaatatattctttactatcatcatctttgccacagaatttttgtac

SEQ ID NO: 587727 - DNA, 487 bp, Homo sapiens
atcattccccacagtatgtcaaaaaaagtttcagagatatcatattgagttatttaggccaaagtcaataaatgggyctaggaataagactttgaaagtgatattacactctatattaggcatggtggctcattcctgtaatcctagcactttaaaaagctgtggcagaaagatcacttgaggccaggaatttgagatcagccagagcaacatagtgagacccccatctctacaaaaaaaaaatgttttttaattacccgggcatggtggctcatgcctgtagacccagctagttgggatactgaggcaaaaggatggcttgtacccagagttcagggctgcagtgaattattatcactgcacttctgcctggatgacagacaaagaccctatctcaaaaaaaaacacaaaataatgaaatctatgattaaggattctgatgctataagcctttccttaaactgcaaatgtttcatgctaatttgaa

SEQ ID NO: 587728 - DNA, 487 bp, Homo sapiens
atcattccccacagtatgtcaaaaaaagtttcagagatatcatattgagttatttaggccaaagtcaataaatgggtctaggaataagactttgaaagtgatattacactctatattaggcatggtggytcattcctgtaatcctagcactttaaaaagctgtggcagaaagatcacttgaggccaggaatttgagatcagccagagcaacatagtgagacccccatctctacaaaaaaaaaatgttttttaattacccgggcatggtggctcatgcctgtagacccagctagttgggatactgaggcaaaaggatggcttgtacccagagttcagggctgcagtgaattattatcactgcacttctgcctggatgacagacaaagaccctatctcaaaaaaaaacacaaaataatgaaatctatgattaaggattctgatgctataagcctttccttaaactgcaaatgtttcatgctaatttgaa

SEQ ID NO: 587729 - DNA, 487 bp, Homo sapiens
atcattccccacagtatgtcaaaaaaagtttcagagatatcatattgagttatttaggccaaagtcaataaatgggtctaggaataagactttgaaagtgatattacactctatattaggcatggtggctcatkcctgtaatcctagcactttaaaaagctgtggcagaaagatcacttgaggccaggaatttgagatcagccagagcaacatagtgagacccccatctctacaaaaaaaaaatgttttttaattacccgggcatggtggctcatgcctgtagacccagctagttgggatactgaggcaaaaggatggcttgtacccagagttcagggctgcagtgaattattatcactgcacttctgcctggatgacagacaaagaccctatctcaaaaaaaaacacaaaataatgaaatctatgattaaggattctgatgctataagcctttccttaaactgcaaatgtttcatgctaatttgaa

SEQ ID NO: 587730 - DNA, 487 bp, Homo sapiens
atcattccccacagtatgtcaaaaaaagtttcagagatatcatattgagttatttaggccaaagtcaataaatgggtctaggaataagactttgaaagtgatattacactctatattaggcatggtggctcattcctgtaatcctagcactttaaaaagctgtggcagaaagatcacttgaggccaggaatttgagatcagccagagcaacatagtgagacccccatctctacaaaaaaaaaatgttttttaattacccgggcatggtggctcatgcctgtagamccagctagttgggatactgaggcaaaaggatggcttgtacccagagttcagggctgcagtgaattattatcactgcacttctgcctggatgacagacaaagaccctatctcaaaaaaaaacacaaaataatgaaatctatgattaaggattctgatgctataagcctttccttaaactgcaaatgtttcatgctaatttgaa

SEQ ID NO: 587731 - DNA, 414 bp, Homo sapiens
ttcatgctaatttgaattgcattttaagaagtaatgattcttggggtaaagaccatagaatacggcacccagaaataaatccacatatttccagccaactgattttggacgaacatgccaagaacatacgctggggaaaggacagcctcttcaaatgaatgacactgggaaaactaaatatccatatggagaagaaygatattagcttcctatgtaacaccatataacaacataaactcagaatcgattgaagactgaaatgtaaggcccaaaattatcaaactactctaagtaaatatagggaaaatgcttgaggacattagtctgcacaaagatttttatgggtaagacatcagaagcataggcaaacaacaaatcatagacaaaagacactacattaagctaaagagcttc

SEQ ID NO: 587732 - DNA, 599 bp, Homo sapiens
aatccacatatttccagccaactgattttggacgaacatgccaagaacatacgctggggaaaggacagcctcttcaaatgaatgacactgggaaaactaaatatccatatggagaagaacgatattagcttcctatgtaacaccatataacaacataaactcagaatcgattgaagactgaaatgtaaggcccaaaattatcaaactactctaagtaaatatagggaaaatgcttgaggacattagtctgcacaaagatttttatgggtaagacatcagaagcataggcaaacaacaaatcatagacaaaagacactacattaagctaaagagcttctgtccagcamacaactgagtgaagagaaaacctgtagaataggagaaaatattgtcaagctattcatctaataagggactaatatacaaaatatacaaaaaaactcaaacaacttcacagtaaaaaaaaatctgagtttaaaattgggcaaaatatctaactatacttttttttagaaaaagaaatacaaatagccaataaataaattttaaaatgctcagtatcactaatcctcagggaaatacaaatcaaatctacaatg

SEQ ID NO: 587733 - DNA, 599 bp, Homo sapiens
aatccacatatttccagccaactgattttggacgaacatgccaagaacatacgctggggaaaggacagcctcttcaaatgaatgacactgggaaaactaaatatccatatggagaagaacgatattagcttcctatgtaacaccatataacaacataaactcagaatcgattgaagactgaaatgtaaggcccaaaattatcaaactactctaagtaaatatagggaaaatgcttgaggacattagtctgcacaaagatttttatgggtaagacatcagaagcataggcaaacaacaaatcatagacaaaagacactacattaagctaaagagcttctgtccagcaaacaactgagtgaagagaaaacctgtagaataggagaaaatattgtcaagctattcayctaataagggactaatatacaaaatatacaaaaaaactcaaacaacttcacagtaaaaaaaaatctgagtttaaaattgggcaaaatatctaactatacttttttttagaaaaagaaatacaaatagccaataaataaattttaaaatgctcagtatcactaatcctcagggaaatacaaatcaaatctacaatg

SEQ ID NO: 587734 - DNA, 597 bp, Homo sapiens
tacaatgtgatataatcttgcttcaatttgaataaattgctgtcattgaaaagacaaaaaaaaaaacaaatgctggtgaggctccagagaacagtaaactcttacatgctgttggtgggaaggtaaattagtgcagccacaatagagaacaacaggaggttttctcaaaaaaactaataatgggactgccgagggatccagcaacctcactaccgggcattcaggcaatagaaaagaaaacaatagatcaaaargatatctgtcctcatatgtttactgtagcactatccacaacagcttgtgtatggaatcaacctacatgtccatcaccaaatgaatggacgaaaaactgtggcacacaaacacagtggaatactattcaccgtataaaggaattaaatcctgttattcgtggccacgtggatcagtctgacggatgttatgttaagtgcagacacagaaagataaatactgcacattcttactcatgtaagggagctaaaggaaaattgaaggctgggcaatattgctgatgcctgtaatttcctagctctttgtaagaccaaggcaagagaatcatttgagaccaaaagttcc

SEQ ID NO: 587735 - DNA, 597 bp, Homo sapiens
tacaatgtgatataatcttgcttcaatttgaataaattgctgtcattgaaaagacaaaaaaaaaaacaaatgctggtgaggctccagagaacagtaaactcttacatgctgttggtgggaaggtaaattagtgcagccacaatagagaacaacaggaggttttctcaaaaaaactaataatgggactgccgagggatccagcaacctcactaccgggcattcaggcaatagaaaagaaaacaatagatcaaaaggatatctgtcctcatatgtttactgtagcactatccacaacagcttgtgtatggaatcaacctacatgtccatcaccaaatgaatggacgaaaaactgtggcacacaaacacagtggaatactattcaccgtataaaggaattaaatcctgttattcgtggccacgtggatcagtctgacggatgttatgttaagtgcagacacagaaagataaatactgcacattcttactcatgtragggagctaaaggaaaattgaaggctgggcaatattgctgatgcctgtaatttcctagctctttgtaagaccaaggcaagagaatcatttgagaccaaaagttcc

SEQ ID NO: 587736 - DNA, 627 bp, Homo sapiens
ctgttattcgtggccacgtggatcagtctgacggatgttatgttaagtgcagacacagaaagataaatactgcacattcttactcatgtaagggagctaaaggaaaattgaaggctgggcaatattgctgatgcctgtaatttcctagctctttgtaagaccaaggcaagagaatcatttgagaccaaaagttccagagctccctgggcaacatggggagatatctccacaaagtcaaaaatcagacatgtgcaatggtgcatgcccataatgmcagctgctcaggaggctgaggtgtgaggatcagatgggcccaagagtttgaagctgcagtgaactatgatcaaaccactgtctccagtctgggtgactacagttgcccagagcccagactacactagcaagaccttgtctcttaacaaaaaaaagctcacagaagtaggggaggggaggctggttaatggatacagaattacagttagataagtggagtgagttctggtgttctgtggcattgtagggtgaatatggttaactatgacttattgtatatttttaaaaagccagaaaattttcaatgttcacaattcaaagaaatgaaaaatggttgaagtagtaaatgtgcta

SEQ ID NO: 587737 - DNA, 575 bp, Homo sapiens
attacacactatatacgtgtataaaaatatcactctatagcccataattatgtatatatgtgtcaattaaaacaaaagagaagctacattcatcccatttaaaaaaaacagaatataggccagccttactgacttccttctaatgagtagaatgtagtgaaagggataccatgtggcttccctatctcagactgttttcccttggaacccagccccaattgtgagagccatcaggccacaaagatagcctgaaagtgcctgtgtcagtgttcacgctgcctgtcccaaccaagtttacagccgatkgccagcatcaaccatcaaacaagtgggtgaccaaagcttcagaggattccatttccccaactgatcagctgttcctagggaagctgaagggagcaaagacaagctgtcctggccaagtttttcccaaaccacaggttcatgaacaaaataaatgtttttctttcaagccacaagactctgggtaattgttaggaaaataagttttaaaaagagacaacaggaaacataacttatgcagcagaaaagagtctcctttaaagcaggatcta

SEQ ID NO: 587738 - DNA, 592 bp, Homo sapiens
catttccccaactgatcagctgttcctagggaagctgaagggagcaaagacaagctgtcctggccaagtttttcccaaaccacaggttcatgaacaaaataaatgtttttctttcaagccacaagactctgggtaattgttaggaaaataagttttaaaaagagacaacaggaaacataacttatgcagcagaaaagagtctcctttaaagcaggatctaataaakgttgatatttatttattgatgtcaaacattattgagaagcagtagataaccaggagagagacataagctgctgaggaggaattttcctaaaactccttcaattatgaactctgaaaacaaggcaagggtgtcttcttacaatttcccctcaagttaggaagtaagactgggaagcaagaagatgtatgatttgaaaaacaactagaaatactgggtgacataggcaaaatcagacatttacctgatttcaattaactaaaattctaaaagaagaagttttgagtatttattaatcaacctagtattcaattttcattttcttttctaaatgaggaaataaggagaatattatggaatgatttttat

SEQ ID NO: 587739 - DNA, 570 bp, Homo sapiens
aacttatgcagcagaaaagagtctcctttaaagcaggatctaataaatgttgatatttatttawtgatgtcaaacattattgagaagcagtagataaccaggagagagacataagctgctgaggaggaattttcctaaaactccttcaattatgaactctgaaaacaaggcaagggtgtcttcttacaatttcccctcaagttaggaagtaagactgggaagcaagaagatgtatgatttgaaaaacaactagaaatactgggtgacataggcaaaatcagacatttacctgatttcaattaactaaaattctaaaagaagaagttttgagtatttattaatcaacctagtattcaattttcattttcttttctaaatgaggaaataaggagaatattatggaatgatttttattcttcacagaagtaaaataagcatagtgtgttttgagtgttaagacacaaatgcaatttctcctttaccttactccaagcttgtttgtatggagaagttaagaccatcccatctctatgttatgccacaatgcttctctatagcacacaacttggc

SEQ ID NO: 587740 - DNA, 592 bp, Homo sapiens
catttccccaactgatcagctgttcctagggaagctgaagggagcaaagacaagctgtcctggccaagtttttcccaaaccacaggttcatgaacaaaataaatgtttttctttcaagccacaagactctgggtaattgttaggaaaataagttttaaaaagagacaacaggaaacataacttatgcagcagaaaagagtctcctttaaagcaggatctaataaatgttgatatttatttattgatgtcaaacattattgagaagcagtagataaccaggagagagacataagctgctgaggaggaattttcctaaaacwccttcaattatgaactctgaaaacaaggcaagggtgtcttcttacaatttcccctcaagttaggaagtaagactgggaagcaagaagatgtatgatttgaaaaacaactagaaatactgggtgacataggcaaaatcagacatttacctgatttcaattaactaaaattctaaaagaagaagttttgagtatttattaatcaacctagtattcaattttcattttcttttctaaatgaggaaataaggagaatattatggaatgatttttat

SEQ ID NO: 587741 - DNA, 592 bp, Homo sapiens
catttccccaactgatcagctgttcctagggaagctgaagggagcaaagacaagctgtcctggccaagtttttcccaaaccacaggttcatgaacaaaataaatgtttttctttcaagccacaagactctgggtaattgttaggaaaataagttttaaaaagagacaacaggaaacataacttatgcagcagaaaagagtctcctttaaagcaggatctaataaatgttgatatttatttattgatgtcaaacattattgagaagcagtagataaccaggagagagacataagctgctgaggaggaattttcctaaaactmcttcaattatgaactctgaaaacaaggcaagggtgtcttcttacaatttcccctcaagttaggaagtaagactgggaagcaagaagatgtatgatttgaaaaacaactagaaatactgggtgacataggcaaaatcagacatttacctgatttcaattaactaaaattctaaaagaagaagttttgagtatttattaatcaacctagtattcaattttcattttcttttctaaatgaggaaataaggagaatattatggaatgatttttat

SEQ ID NO: 587742 - DNA, 592 bp, Homo sapiens
catttccccaactgatcagctgttcctagggaagctgaagggagcaaagacaagctgtcctggccaagtttttcccaaaccacaggttcatgaacaaaataaatgtttttctttcaagccacaagactctgggtaattgttaggaaaataagttttaaaaagagacaacaggaaacataacttatgcagcagaaaagagtctcctttaaagcaggatctaataaatgttgatatttatttattgatgtcaaacattattgagaagcagtagataaccaggagagagacataagctgctgaggaggaattttcctaaaactccttcaattatgaactctgawaacaaggcaagggtgtcttcttacaatttcccctcaagttaggaagtaagactgggaagcaagaagatgtatgatttgaaaaacaactagaaatactgggtgacataggcaaaatcagacatttacctgatttcaattaactaaaattctaaaagaagaagttttgagtatttattaatcaacctagtattcaattttcattttcttttctaaatgaggaaataaggagaatattatggaatgatttttat

SEQ ID NO: 587743 - DNA, 570 bp, Homo sapiens
aacttatgcagcagaaaagagtctcctttaaagcaggatctaataaatgttgatatttatttattgatgtcaaacattattgagaagcagtagataaccaggagagagacataagctgctgaggaggaattttcctaaaactccttcaattatgaactctgaaaacaaggcaagggtgtcttcttacaatttcccctcaagttargaagtaagactgggaagcaagaagatgtatgatttgaaaaacaactagaaatactgggtgacataggcaaaatcagacatttacctgatttcaattaactaaaattctaaaagaagaagttttgagtatttattaatcaacctagtattcaattttcattttcttttctaaatgaggaaataaggagaatattatggaatgatttttattcttcacagaagtaaaataagcatagtgtgttttgagtgttaagacacaaatgcaatttctcctttaccttactccaagcttgtttgtatggagaagttaagaccatcccatctctatgttatgccacaatgcttctctatagcacacaacttggc

SEQ ID NO: 587744 - DNA, 570 bp, Homo sapiens
aacttatgcagcagaaaagagtctcctttaaagcaggatctaataaatgttgatatttatttattgatgtcaaacattattgagaagcagtagataaccaggagagagacataagctgctgaggaggaattttcctaaaactccttcaattatgaactctgaaaacaaggcaagggtgtcttcttacaatttcccctcaagttaggaagtaagactgggaagcaagaagatgtatgatttgaaaaacaactagaaatactgggtgacataggcaaaatcagacatttacctgatttcaattaactaaaattctaaaagaagaagttttgagtatttattaatcaacctagtattcaattttcattttcttttctaaatgaggaaataaggagaatattatggaatgatttttattcttcacagaagtaaaataagcatagtgtgttttgagtgttaagacacaaatgcaatttctcctttaccttactccaagcttgtttgtatggagaagttaagaycatcccatctctatgttatgccacaatgcttctctatagcacacaacttggc

SEQ ID NO: 587745 - DNA, 551 bp, Homo sapiens
taagaccatcccatctctatgttatgccacaatgcttctctatagcacacaacttggctctgaaattttgaaagtcaaaatactaatctactatgtgtctctgataaattgcctgaacgttacctgattttgaagtgctgcactcctaagactttcttggaatgagttaaacsttttattccaagaatcctctactgagatagaaagcagagctgtgcatctctgtttcagtaaaaggaggtcaatacagggaactgtggtttctgagaatgcaagatctgcactaagaaaaggattagccacagtgctacccaagagaaccagctaccaggaggaaagagggtctgtaaactgcaagatgatgacttcacttgatttccactgaggaaagctggtggctcagacttaaacttctccttcctagatggtaaacatctatggaaggttctatgaattataatgagttagtaaaacatactgcactgaatattagactatgtcagcagatcctgtaaccaaaacttactgaaaatgtaactatagtgggaggc

SEQ ID NO: 587746 - DNA, 483 bp, Homo sapiens
tactgggtgacataggcaaaatcagacatttacctgatttcaattaactaaaattctaaaagaagaagttttgagtatttattaatcaacctagtattcaattttcattttcttttctaaatgaggaaataaggagaatattatggaatgatttttattcttcacagaagtaaaataagcatagtgtgttttgagtgttaagacacaaatgcaatttctcctttaccttactccaagcttgtttgtatggagaagttaagaccatcccatctctatgttatgccacaatgcttctctatagcacacaacttggctctgaaattttgaaagtcaaaatactaatctactatgtgtctctgataaattgcctgaacgttacctgattttgaagtgctgcactcctaagactttcttggaatgagttaaaccttttattccaagaatcctctactgagmtagaaagcagagctgtgcatctctgtt

SEQ ID NO: 587747 - DNA, 532 bp, Homo sapiens
gtatatactccagaaaaataaaaacataggcaagcacaaaaactcatacataaatgtttacaacagcattattaatagtagtyaaaaggtggaaagaaccagaacgtctgtcacctttgggtgggagagaaccccaaatgtccatcacctggcgaatggataaataaaatgtttgatgtatccatacaatggaatattactcagcaataagaagaaattaagtacagataccgtattaggaggagacagcaaaatgcctaggcagatacggaagggtccccggagaatctccaaccagccccacaagtgtttacaccagatgttatgtgcagataagggaacctggacttgtcttgcctggacatgcccgcagcagaccggaggcccacatgcagtggggggatggggtggagtcaccaggaattcacgccttatgcagaggaggagcctggccacttcagctcatgtgatcctggtattcaattgtgaggtggaaacctctttgcaggatccctctctttgctgagagctg

SEQ ID NO: 587748 - DNA, 468 bp, Homo sapiens
aggagcctggccacttcagctcatgtgmtcctggtattcaattgtgaggtggaaacctctttgcaggatccctctctttgctgagagctgtcctttcacaaataaattctgccctcctcaatgtgtctgcatgcttgatttttcctggtcatgagagaagaacccagatgtagctgaactaaggagcaaaaacccggcatcaatacctgctacagcacagatgcagcatgaaaaattatgctaagtgaaataagccagtcccagcagaccacttgctttttatttcagaggcttataggcaaatctatacaaagaaggtgggtggttccctacggctgagggaggaagggaaaactagtgaagatggctaaatgttgtggggtttgtttttagggtgatgaaaatgttttacaattaattgtaatgatgacggcataactctctgaaaatactaaagttaatgaattg

SEQ ID NO: 587749 - DNA, 443 bp, Homo sapiens
attcacgccttatgcagaggaggagcctggccacttcagctcatgtgatcctggtattcaattgtgaggtggaaacctctttgcaggayccctctctttgctgagagctgtcctttcacaaataaattctgccctcctcaatgtgtctgcatgcttgatttttcctggtcatgagagaagaacccagatgtagctgaactaaggagcaaaaacccggcatcaatacctgctacagcacagatgcagcatgaaaaattatgctaagtgaaataagccagtcccagcagaccacttgctttttatttcagaggcttataggcaaatctatacaaagaaggtgggtggttccctacggctgagggaggaagggaaaactagtgaagatggctaaatgttgtggggtttgtttttagggtgatgaaaatgttttacaattaattgta

SEQ ID NO: 587750 - DNA, 468 bp, Homo sapiens
aggagcctggccacttcagctcatgtgatcctggtattcaattgtgaggtggaaacctctttgcaggatccctctctttgctgagagctgtcctttcacaaataaattctgccctcctcaatgtgtctgcatgcttratttttcctggtcatgagagaagaacccagatgtagctgaactaaggagcaaaaacccggcatcaatacctgctacagcacagatgcagcatgaaaaattatgctaagtgaaataagccagtcccagcagaccacttgctttttatttcagaggcttataggcaaatctatacaaagaaggtgggtggttccctacggctgagggaggaagggaaaactagtgaagatggctaaatgttgtggggtttgtttttagggtgatgaaaatgttttacaattaattgtaatgatgacggcataactctctgaaaatactaaagttaatgaattg

SEQ ID NO: 587751 - DNA, 468 bp, Homo sapiens
aggagcctggccacttcagctcatgtgatcctggtattcaattgtgaggtggaaacctctttgcaggatccctctctttgctgagagctgtcctttcacaaataaattctgccctcctcaatgtgtctgcatgcttgatttttcctggtcatgagagaagaacccagatgtagctgaactaaggagcaaaaacccggcatcaatacctgctacagcacagatgcagcatgaaaaattatgctaagtgaaataagccagtcccagcagaccacttgctttttatttcagaggcttataggcaaatctatacaaagaaggtgggtggttccctasggctgagggaggaagggaaaactagtgaagatggctaaatgttgtggggtttgtttttagggtgatgaaaatgttttacaattaattgtaatgatgacggcataactctctgaaaatactaaagttaatgaattg

SEQ ID NO: 587752 - DNA, 443 bp, Homo sapiens
attcacgccttatgcagaggaggagcctggccacttcagctcatgtgatcctggtattcaattgtgaggtggaaacctctttgcaggatccctctctttgctgagagctgtcctttcacaaataaattctgccctcctcaatgtgtctgcatgcttgatttttcctggtcatgagagaagaacccagatgtagctgaactaaggagcaaaaacccggcatcaatacctgctacagcacagatgcagcatgaaaaattatgctaagtgaaataagccagtcccagcagaccacttgctttttatttcagaggcttataggcaaatctatacaaagaaggtgggtggttccctacggctgagggaggaagggaaaactagtgaagatggctaaatgwtgtggggtttgtttttagggtgatgaaaatgttttacaattaattgta

SEQ ID NO: 587753 - DNA, 523 bp, Homo sapiens
ataactaatgcccacagggcttaatatctaggtgatggattgataggtgcagcaaaccatcatggaacacgtttacytatataagaaacttgttggccagactggtcttgaactcctgacctcatgatcttcctgccttggcctcccaaagtgctgggattacaggtgtggccaccatgcctggtggctatttctctttttaaattctctcaggactcctaaaatctcaaaactttgacctagattccctaatctacatttccagctctgaccattttcttgaggtctcttccttctagtacatatattatagaaaatattctcgaccacatgctcatacattgctaattggtgcagattacttttgtagatagtgaatgttgtctattttatgttggttctcattaatgttactttgagtatactgttattttctaatctcaaagggggactatctcactgttatgatactaaccagtatactttgtcctttttttcttgctttcttcttttttggaccagt

SEQ ID NO: 587754 - DNA, 523 bp, Homo sapiens
ataactaatgcccacagggcttaatatctaggtgatggattgataggtgcagcaaaccatcatggaacacgtttacttatataagaaacttgttggccagactggtcttgaactcctgacctcatgatcttcctgccttggcctcccaaagtgctgggattacaggtgtggccaccatgcctggtggctatttctctttttaaattctctcaggactcctaaaatctcaaaactttgacctagattccctaatctacatttccagctctgaccattttcttgaggtctcttccttctagtacayatattatagaaaatattctcgaccacatgctcatacattgctaattggtgcagattacttttgtagatagtgaatgttgtctattttatgttggttctcattaatgttactttgagtatactgttattttctaatctcaaagggggactatctcactgttatgatactaaccagtatactttgtcctttttttcttgctttcttcttttttggaccagt

SEQ ID NO: 587755 - DNA, 523 bp, Homo sapiens
ataactaatgcccacagggcttaatatctaggtgatggattgataggtgcagcaaaccatcatggaacacgtttacttatataagaaacttgttggccagactggtcttgaactcctgacctcatgatcttcctgccttggcctcccaaagtgctgggattacaggtgtggccaccatgcctggtggctatttctctttttaaattctctcaggactcctaaaatctcaaaactttgacctagattccctaatctacatttccagctctgaccattttcttgaggtctcttccttctagtacatatattatagaaaatattctcraccacatgctcatacattgctaattggtgcagattacttttgtagatagtgaatgttgtctattttatgttggttctcattaatgttactttgagtatactgttattttctaatctcaaagggggactatctcactgttatgatactaaccagtatactttgtcctttttttcttgctttcttcttttttggaccagt

SEQ ID NO: 587756 - DNA, 236 bp, Homo sapiens
gtttgaatttatagttccatcatggttatttccaatattttgaaaacaaatatatacatccacatattttaaaaaatcaccactccaatatttctgttgaatcagaccttacattatgttgtttaataaagtatggtaagttttggcatgtatgatttttatcatgtaagaaagaagcataatttcttagctaaaaatttarcctttgactctttagtagaaagttgagttctgta

SEQ ID NO: 587757 - DNA, 246 bp, Homo sapiens
ctgatattgaaaaagtaattactaccattgaaaatgtgaggaaaaaggcattctcatacactgttggtatatgaaattggtaaattakttctgaagggtaacttagtgctgtgtatcaaaatttcaaataacctgacatccctttaactcaacaactccacttctgggactagatttcacaggaaaacataacttgtgtaaacatacacacacttattaagggcattaattatatattacacataa

SEQ ID NO: 587758 - DNA, 246 bp, Homo sapiens
ctgatattgaaaaagtaattactaccattgaaaatgtgaggaaaaaggcattctcatacactgttggtatatgaaattggtaaattatttctgaagggtaacttagtgctgtgtatcaaaatttcaaataacctgacatccctttaactcaacaactccacttctgggactagatttcmcaggaaaacataacttgtgtaaacatacacacacttattaagggcattaattatatattacacataa

SEQ ID NO: 587759 - DNA, 578 bp, Homo sapiens
ccagagcaatatagtgagaccctgtctcaaaaaaaaaaaaattaaacacttatctgaggcatggtggtgcacgcctgtagtcccagctacattgggaggctgtggtaggagggtcgtttgagcttggaatattgaggctgtagtgaacagtgatcaagccactgcactccaggctgggtaacagagggagactctgtctcataaataaaacgttttgtatagattcccatagaartgagttagacatcagtcatagaattattagccactttgatgtctaccttgggagtaaacatataataaggggcagcgttaaaccatctcaatcaatagcctccaacttctcgagaaggttcttatttcatgaatttctaaacaaaccactacctggattaagacatttggtggacaccattttgagatgaagaatcttgagtgagaagaagggagatttctacttactgaagcttcccaatgacatagttaagtgtcccccaaaagaaactttagaacaagactttcatcatgccatatctctatggaaaaggaatttctttaaaagaaaacaaagtcaaacc

SEQ ID NO: 587760 - DNA, 578 bp, Homo sapiens
ccagagcaatatagtgagaccctgtctcaaaaaaaaaaaaattaaacacttatctgaggcatggtggtgcacgcctgtagtcccagctacattgggaggctgtggtaggagggtcgtttgagcttggaatattgaggctgtagtgaacagtgatcaagccactgcactccaggctgggtaacagagggagactctgtctcataaataaaacgttttgtatagattcccatagaaatgagttaracatcagtcatagaattattagccactttgatgtctaccttgggagtaaacatataataaggggcagcgttaaaccatctcaatcaatagcctccaacttctcgagaaggttcttatttcatgaatttctaaacaaaccactacctggattaagacatttggtggacaccattttgagatgaagaatcttgagtgagaagaagggagatttctacttactgaagcttcccaatgacatagttaagtgtcccccaaaagaaactttagaacaagactttcatcatgccatatctctatggaaaaggaatttctttaaaagaaaacaaagtcaaacc

SEQ ID NO: 587761 - DNA, 578 bp, Homo sapiens
ccagagcaatatagtgagaccctgtctcaaaaaaaaaaaaattaaacacttatctgaggcatggtggtgcacgcctgtagtcccagctacattgggaggctgtggtaggagggtcgtttgagcttggaatattgaggctgtagtgaacagtgatcaagccactgcactccaggctgggtaacagagggagactctgtctcataaataaaacgttttgtatagattcccatagaaatgagttagacatcagtcatagaattattagccactttgatgtctaccttgggagtaaacatataataaggggcagcgttaaaccatctcaatcaatagcctccaacttctcgagaaggttcttatttcatgaatttctaaacaaaccactacctggattaagacatttggtggacaccattttgagatgaagaatcttgagtgagaagaagggagatytctacttactgaagcttcccaatgacatagttaagtgtcccccaaaagaaactttagaacaagactttcatcatgccatatctctatggaaaaggaatttctttaaaagaaaacaaagtcaaacc

SEQ ID NO: 587762 - DNA, 497 bp, Homo sapiens
ctgggcacagtggttcatgcctgtatcccagcactttgagaggctgaggcaagaggatcacttgagctcaggagtttgagaccagcctgggcaacatagtgagacccaatctctactaagaataagataaaaaattgccaggcatggtggtgcatgcctattrtcccagctactagagaggatgaggcaggaggattgcttgagcctgggaggttgagataacagtgagctatgatcccactactgcactccagtctggggaacagagtgagaccttagagtgagaccttgtctcaaaaagagaaaaaaataaagaattgtttcattcttttgtttttcttcagccaagtgaccttgaattagtaacaccacagacagtaagtcttatctcaacaccagtagacaaatcagcagattcaaagtaggcagggaagaaaaaaatagataggcaaaagaactgagacattttcactttagggtttttaaaaatagtaact

SEQ ID NO: 587763 - DNA, 477 bp, Homo sapiens
attgtacaagatgcttttcaaacgtgcaaactgacctttaaaacaattttacataaaataatatttttaggtaagagaaaagacagacatggggttagggcaaaatatttctgttcaaattacaaaatcctgaatgacaaatcacaggatagaaaaaaattatattgtacctggaatttgaagtcttcaaatttatttakatatatgtatctatatgtattaatggagacatattagtttagaacagttatattttgaagatgtcattctttaaaaaattattaatatctacatgattgctgcagatattttaattttaaacaaacatttttcactaatgtgaccagtatttgtgtcctattttattaaacagacatttcaagattcttttagagttaattattaaaaattaagtatcataaatatttctgaagtactaccttaaaaaaaaccctttcctggcttttcatatagtta

SEQ ID NO: 587764 - DNA, 477 bp, Homo sapiens
attgtacaagatgcttttcaaacgtgcaaactgacctttaaaacaattttacataaaataatatttttaggtaagagaaaagacagacatggggttagggcaaaatatttctgttcaaattacaaaatcctgaatgacaaatcacaggatagaaaaaaattatattgtacctggaatttgaagtcttcaaatttatttagwtatatgtatctatatgtattaatggagacatattagtttagaacagttatattttgaagatgtcattctttaaaaaattattaatatctacatgattgctgcagatattttaattttaaacaaacatttttcactaatgtgaccagtatttgtgtcctattttattaaacagacatttcaagattcttttagagttaattattaaaaattaagtatcataaatatttctgaagtactaccttaaaaaaaaccctttcctggcttttcatatagtta

SEQ ID NO: 587765 - DNA, 477 bp, Homo sapiens
attgtacaagatgcttttcaaacgtgcaaactgacctttaaaacaattttacataaaataatatttttaggtaagagaaaagacagacatggggttagggcaaaatatttctgttcaaattacaaaatcctgaatgacaaatcacaggatagaaaaaaattatattgtacctggaatttgaagtcttcaaatttatttagatatatgtatctatatgtattaatggagacatattagtttagaacagttatattttgaagatgtcattctttaaaaaattattaatatctacatgattgctgcagatattttaattttaaacaaayatttttcactaatgtgaccagtatttgtgtcctattttattaaacagacatttcaagattcttttagagttaattattaaaaattaagtatcataaatatttctgaagtactaccttaaaaaaaaccctttcctggcttttcatatagtta

SEQ ID NO: 587766 - DNA, 477 bp, Homo sapiens
attgtacaagatgcttttcaaacgtgcaaactgacctttaaaacaattttacataaaataatatttttaggtaagagaaaagacagacatggggttagggcaaaatatttctgttcaaattacaaaatcctgaatgacaaatcacaggatagaaaaaaattatattgtacctggaatttgaagtcttcaaatttatttagatatatgtatctatatgtattaatggagacatattagtttagaacagttatattttgaagatgtcattctttaaaaaattattaatatctacatgattgctgcagatattttaattttaaacaaacatttttcactaatgtgaccagtatttgtgtcctattttattaaacagacatttcaagattcttttagagttaattwttaaaaattaagtatcataaatatttctgaagtactaccttaaaaaaaaccctttcctggcttttcatatagtta

SEQ ID NO: 587767 - DNA, 407 bp, Homo sapiens
tgttaatgaggctgtgcagcctggacatttgatgtctcatgtgtgggaatgtgaactaacccaaccattctgaataattattggctctgtgtgttaacagtctagagtcctgaaacaaggatcttaattctaaaataaaatcctattctaagaatataccaatggttgataatcaaggaagtttcaaagttatacagaagaaccttcatcctagcattatatatgtaatcatccatataaaccagataatgttgaatgaaactgcagaaaaacaaagagcctacagaatatgtttctctttgtgtacaactgtaaatgtacacatctatccatgtaaaattttacatctcaggaggataggtaccaacttgttaacatgctrtatctataagataagaaattttact

SEQ ID NO: 587768 - DNA, 364 bp, Homo sapiens
aggtatgccaggctaagctgtgatrttcagtaagttaggtattaaatacatttttaacttactgtattttcaatttataatcagcttatcaagacttaaccccattgtacattgaaaagcatttgtattgcattaaacatgttatataatatttttaattgaaattactggcaacttttgaaaaaatgtaatgaaataatgtgctttgctattggttaaaatgtttttgggcagggtcagtggcttacacctgtaatcccagcactttggtaggctgaggtgggcagatcacttgaggtcaggagtttgagaccagcctggcaaacaggtgaaaccccatctctactaaaaatacaaaaattat

SEQ ID NO: 587769 - DNA, 364 bp, Homo sapiens
aggtatgccaggctaagctgtgatattcagtaagttaggtattaaatacatttttaacttactgtattttcaatttatratcagcttatcaagacttaaccccattgtacattgaaaagcatttgtattgcattaaacatgttatataatatttttaattgaaattactggcaacttttgaaaaaatgtaatgaaataatgtgctttgctattggttaaaatgtttttgggcagggtcagtggcttacacctgtaatcccagcactttggtaggctgaggtgggcagatcacttgaggtcaggagtttgagaccagcctggcaaacaggtgaaaccccatctctactaaaaatacaaaaattat

SEQ ID NO: 587770 - DNA, 364 bp, Homo sapiens
aggtatgccaggctaagctgtgatattcagtaagttaggtattaaatacatttttaacttactgtattttcaatttataatcagcttatcaagacttaaccccattgtacattgaaaagcatttgtattgcattaarcatgttatataatatttttaattgaaattactggcaacttttgaaaaaatgtaatgaaataatgtgctttgctattggttaaaatgtttttgggcagggtcagtggcttacacctgtaatcccagcactttggtaggctgaggtgggcagatcacttgaggtcaggagtttgagaccagcctggcaaacaggtgaaaccccatctctactaaaaatacaaaaattat

SEQ ID NO: 587771 - DNA, 364 bp, Homo sapiens
aggtatgccaggctaagctgtgatattcagtaagttaggtattaaatacatttttaacttactgtattttcaatttataatcagcttatcaagacttaaccccattgtacattgaaaagcatttgtattgcattaaacatgttatataatatttttaattgaaattactggcaacttttgaaaaaatgtaatgaaataatgtgctttgctattggttaaaatgtttttgggcagggtcagtggctyacacctgtaatcccagcactttggtaggctgaggtgggcagatcacttgaggtcaggagtttgagaccagcctggcaaacaggtgaaaccccatctctactaaaaatacaaaaattat

SEQ ID NO: 587772 - DNA, 613 bp, Homo sapiens
caatatggaccattccacttggacaaaagccagtaaataggggagtataacaggggacaagggccaaacagaaagtatctattacatttaccaatgcagatcaatcatgtcaacaatagaaatggcwgttttggcattcggttattcaatgaaactatatttgtagctttttacttacaatgtttcaaggtatgggcgaagatatgaaaatttcattatgttctattgtatttgatatgtaaatgttctggcacaattatatacattttggattatatattgacagtaaattatttctcctttgttagcttcagcacaaaattaatattttcaacaacttgaatgcatacattgtgttctcactaatagtttagaatagcgaaggggtctttgaagaatttcttatgaagtagaggcattgggtcagacagagccaaaacccattggcttagattaatcactatttatcctagggctgaagagggccaattgaagacacacatgtccaatccctctataaccttggagatctatgaaccagagaaatagagactggttcttaaggaggtaataagtgtgccttctatggtttataataatatgcattgtctta

SEQ ID NO: 587773 - DNA, 613 bp, Homo sapiens
caatatggaccattccacttggacaaaagccagtaaataggggagtataacaggggacaagggccaaacagaaagtatctattacatttaccaatgcagatcaatcatgtcaacaatagaaatggcagttttggcattyggttattcaatgaaactatatttgtagctttttacttacaatgtttcaaggtatgggcgaagatatgaaaatttcattatgttctattgtatttgatatgtaaatgttctggcacaattatatacattttggattatatattgacagtaaattatttctcctttgttagcttcagcacaaaattaatattttcaacaacttgaatgcatacattgtgttctcactaatagtttagaatagcgaaggggtctttgaagaatttcttatgaagtagaggcattgggtcagacagagccaaaacccattggcttagattaatcactatttatcctagggctgaagagggccaattgaagacacacatgtccaatccctctataaccttggagatctatgaaccagagaaatagagactggttcttaaggaggtaataagtgtgccttctatggtttataataatatgcattgtctta

SEQ ID NO: 587774 - DNA, 613 bp, Homo sapiens
caatatggaccattccacttggacaaaagccagtaaataggggagtataacaggggacaagggccaaacagaaagtatctattacatttaccaatgcagatcaatcatgtcaacaatagaaatggcagttttggcattcggttattcaatgaaactatatttgtagctttttayttacaatgtttcaaggtatgggcgaagatatgaaaatttcattatgttctattgtatttgatatgtaaatgttctggcacaattatatacattttggattatatattgacagtaaattatttctcctttgttagcttcagcacaaaattaatattttcaacaacttgaatgcatacattgtgttctcactaatagtttagaatagcgaaggggtctttgaagaatttcttatgaagtagaggcattgggtcagacagagccaaaacccattggcttagattaatcactatttatcctagggctgaagagggccaattgaagacacacatgtccaatccctctataaccttggagatctatgaaccagagaaatagagactggttcttaaggaggtaataagtgtgccttctatggtttataataatatgcattgtctta

SEQ ID NO: 587775 - DNA, 564 bp, Homo sapiens
acagtccttccccctgcaatgcaatttcttcactctttaaagctctgagtctggctactggtctctgttatgtactcatccctagagccaagtcttcaaatatttctcagaacttcttcacatctaaaaatctaggattaatttattgctctctgattatattcttctggtatttcaagtatcctgtataacttcttcatctgcccttgcttttcttctacatcaagatgtcaagttcatggacttcccaattaatcattttaaaaatgtatttcaagcctttatgagtcactaaaatatasatatgttctcaggaattatggccctacaatttgtatgtgagaatagttcctgtgtcaggcattatggacataagaggaaataaattctagcccctgcctacaaggagctaattcccagcctaagacagattgcaagccaataatatgcagacttgtaagtctaaggaaactgattgggatatacctaattcgagctgggaatatcagaagaaaaactttttgaaagtcatgagacatgagctgtgcctaaaagagtaaaaaa

SEQ ID NO: 587776 - DNA, 564 bp, Homo sapiens
acagtccttccccctgcaatgcaatttcttcactctttaaagctctgagtctggctactggtctctgttatgtactcatccctagagccaagtcttcaaatatttctcagaacttcttcacatctaaaaatctaggattaatttattgctctctgattatattcttctggtatttcaagtatcctgtataacttcttcatctgcccttgcttttcttctacatcaagatgtcaagttcatggacttcccaattaatcattttaaaaatgtatttcaagcctttatgagtcactaaaatatacatatgytctcaggaattatggccctacaatttgtatgtgagaatagttcctgtgtcaggcattatggacataagaggaaataaattctagcccctgcctacaaggagctaattcccagcctaagacagattgcaagccaataatatgcagacttgtaagtctaaggaaactgattgggatatacctaattcgagctgggaatatcagaagaaaaactttttgaaagtcatgagacatgagctgtgcctaaaagagtaaaaaa

SEQ ID NO: 587777 - DNA, 564 bp, Homo sapiens
acagtccttccccctgcaatgcaatttcttcactctttaaagctctgagtctggctactggtctctgttatgtactcatccctagagccaagtcttcaaatatttctcagaacttcttcacatctaaaaatctaggattaatttattgctctctgattatattcttctggtatttcaagtatcctgtataacttcttcatctgcccttgcttttcttctacatcaagatgtcaagttcatggacttcccaattaatcattttaaaaatgtatttcaagcctttatgagtcactaaaatatacatatgttctcaggaattatggccctacaatttgtatgtgagaatagttcctgtgtcaggcattatggacataagaggaaataaattctagcccctgcctacaaggagctaattcccagcctaagacagattgcaagmcaataatatgcagacttgtaagtctaaggaaactgattgggatatacctaattcgagctgggaatatcagaagaaaaactttttgaaagtcatgagacatgagctgtgcctaaaagagtaaaaaa

SEQ ID NO: 587778 - DNA, 550 bp, Homo sapiens
atggtgtgcacctgggaggcggagcttgccataagccraaattgtgccactgcactccagcctgagtgacagtgtgagactctgtctcaaaaaaaaaaaaaaaacatacatggagtaaatgatgatttagcataaaacacaactttagcctaaaacacagatcatagggctcaaactttgttattttatgggattatactaatcagttaataatcaaaatttaccatttcaaaagaagaaatattggtctgggaaaattgccattgcttatacagaagaatggaggaatctttttgagaacaacaattctagtgatcttcctcatcactggttccaaaaccaagcccatgaaaggcctgcatagggataatgtggagaacatgccagagaaatacacatcaccagctcctcaactcagagctccaagggaatggccaaggaggctgtattgtcctaagaaatttgagactgttttgacttacaataaatcctgctcaatcatatgtatgtatacacacacacacacccacacacacagacggtgttgtca

SEQ ID NO: 587779 - DNA, 549 bp, Homo sapiens
gtggtggtgggcacctgtagtcccagctactcaggaggctgaagcaggaggatggtgtgcacctgggaggcggagcttgccataagccgaaawtgtgccactgcactccagcctgagtgacagtgtgagactctgtctcaaaaaaaaaaaaaaaacatacatggagtaaatgatgatttagcataaaacacaactttagcctaaaacacagatcatagggctcaaactttgttattttatgggattatactaatcagttaataatcaaaatttaccatttcaaaagaagaaatattggtctgggaaaattgccattgcttatacagaagaatggaggaatctttttgagaacaacaattctagtgatcttcctcatcactggttccaaaaccaagcccatgaaaggcctgcatagggataatgtggagaacatgccagagaaatacacatcaccagctcctcaactcagagctccaagggaatggccaaggaggctgtattgtcctaagaaatttgagactgttttgacttacaataaatcctgctcaa

SEQ ID NO: 587780 - DNA, 549 bp, Homo sapiens
gtggtggtgggcacctgtagtcccagctactcaggaggctgaagcaggaggatggtgtgcacctgggaggcggagcttgccataagccgaaattgtgccactgcactccagcctgagtgacagtgtgagactctgtctcaaaaaaaaaaaaaaaacatacatggagtaaatgatgatttagcataaaacacaactttagcctaaaacacagatcatagggctcaaactttgttattttatgggattatactaatcagttaataatcaaaatttaccatttcaaaagaagaaatattggtctgggaaaattgccrttgcttatacagaagaatggaggaatctttttgagaacaacaattctagtgatcttcctcatcactggttccaaaaccaagcccatgaaaggcctgcatagggataatgtggagaacatgccagagaaatacacatcaccagctcctcaactcagagctccaagggaatggccaaggaggctgtattgtcctaagaaatttgagactgttttgacttacaataaatcctgctcaa

SEQ ID NO: 587781 - DNA, 550 bp, Homo sapiens
atggtgtgcacctgggaggcggagcttgccataagccgaaattgtgccactgcactccagcctgagtgacagtgtgagactctgtctcaaaaaaaaaaaaaaaacatacatggagtaaatgatgatttagcataaaacacaactttagcctaaaacacagatcatagggctcaaactttgttattttatgggattatactaatcagttaataatcaaaatttaccatttcaaaagaagaaatattggtctgggaaaattgccattgcttatacagaagaatggaggaatctttttgagaacaacaattctagtgatcttcctcatcactggttccaaaaccaagcccatgaaaggcctgcatagggataatgtggagaacatgccagagaaatacacatcaccagctcctcaactcagagctccaagggaatggccaaggargctgtattgtcctaagaaatttgagactgttttgacttacaataaatcctgctcaatcatatgtatgtatacacacacacacacccacacacacagacggtgttgtca

SEQ ID NO: 587782 - DNA, 430 bp, Homo sapiens
agtacgcttatgcatggcacacttctcgccagcaattttaggaagttctacccacaacccatatgtcttttgatatgtgggttaccttggagagagaaaaagaaactctgaacacaagcatgaaatactttagaattttatctagagttggacttgtccraaagcttttgtataaacttgcttgatgagcaactgttgtccactggtaccttcactgtacaatccacacacaacaaaacttcacaactggacacctaaatttgcactttgtttggtaaagttgaatgaaaaatgttgtcttttaagcttatgctctcttatgaaagctgttattagattaattttacgccaagatatgccagttaggaaataacttccaatttaatttcaccagctccctgtgggtggactaattactcacacatcacac

SEQ ID NO: 587783 - DNA, 323 bp, Homo sapiens
gataaattcctggaaaaatacaactctcctagcttaaatcaggaagaattagatacccyaagcagaccaataaagcaagcagcaagattgaaatggtaattttaaaattaccagcaaaaaaagctgagggccagacagattcacagcagaaatctaccagacattcaaagaatgtcttctttcattcaaggaagaaatgataccaatcttttcatactattccacaagacagagaaagaagaaaccctcccttattcattctatgaagccagcatcaccctaataccaaaaccatggaaggacataaccaaaaaagaaaacta

SEQ ID NO: 587784 - DNA, 323 bp, Homo sapiens
gataaattcctggaaaaatacaactctcctagcttaaatcaggaagaattagataccctaagcagaccaataaagcaagcagcaagattgaaatggtaattttaaaattaccagcaaaaaaagctgagggccagacagattcacagcagaawtctaccagacattcaaagaatgtcttctttcattcaaggaagaaatgataccaatcttttcatactattccacaagacagagaaagaagaaaccctcccttattcattctatgaagccagcatcaccctaataccaaaaccatggaaggacataaccaaaaaagaaaacta

SEQ ID NO: 587785 - DNA, 193 bp, Homo sapiens
tctgacaggacaaaggtaaaggaagaccagagtggctgcagagatggtcacagtctatgggctgcacaggatgaaggaggccagggaayaggcagggtgggcagttggggttcagggagaggcaggtgcatgctgggaggtcagaccctgtgagggctttgggggcgtcaggttgggtaggctccaggcactc

SEQ ID NO: 587786 - DNA, 621 bp, Homo sapiens
ttaacaaaaaaacccacttagttaagcaagtaaactctttatctaattcattctttaatctatttgattttaggtggtttgatttatggggaccckgagtaaggagcatataccaaattcttggtgttatcccaatagtcataagagtctccctggtgcactgtacttactcaaatgttttaagagtttgcatgcagccatctctaaaatgtcaaatggtatctcttcaactggaatgacaacagattaaaaaaaatgtgcaaccataaggacaccttaacctatgagtgacatgctaaaccaggaacccaaaacaatgggagtgacatgctaaaccagaaagccaaaacaatgggactgatgtactaaaaccggaacccaaaacaatgcggcgtgatgtactaaaaccagaacccaaaacaatgggagtgacgtgctaaaccagaaacccaaaacaatgggagtaacatgctaaaaccagaacccaaaacaatgggagtgacgtgctaaaaccattacccaaaacaatgggagtgatgtgctaaaccggaaacccaaaacaatggtaactaagagtgagtaaggccctacattttggtcacactctcaactaagtgagaa

SEQ ID NO: 587787 - DNA, 240 bp, Homo sapiens
tcactcacatagaattccagaacactgctgtgaggatctgaatgtttgaccctcacatgggattccagaacactgctgcgagggtctaaatgtctgtccctcacataggtttcccgaacaatgttacgaggttctgaatgtttgtccctaacrtaggatttcagggcagtcctgctgtgctctgaatgcttctccctcacataggattccagaacactgctacgagggtctgaatgctta

SEQ ID NO: 587788 - DNA, 509 bp, Homo sapiens
atctgaatgtttgaccctcacatgggattccagaacactgctgcgagggtctaaatgtctgtccctcacataggtttcccgaacaatgttacgaggttctgaatgtttgtccctaacgtaggatttcagggcastcctgctgtgctctgaatgcttctccctcacataggattccagaacactgctacgagggtctgaatgcttatccctcatataggattccagaacactcctgctgtggtctgaatgttttttcctcacataggattccagaatactcctgctgtggtctgaatgtttgtccctcacataggattccagaatactcctgccgtggtctgaatgtttgtccctcacataggattccagaacattcatgctggggtctcaatgtttcccttaacataggatttcagaacactgctctcagggtctgaatgtttgtcactcacataggattacagaacactgctgctggagtctgaatgtttgtcagtcacatagaattc

SEQ ID NO: 587789 - DNA, 365 bp, Homo sapiens
tctgaatgtttgtccttcacataccattccagaacactgctgccgtggtctgaatgtatgtccctcacataggattccagarcactgctactaggttctgaatgtttttcccacacctaggattccagaacacttctgctggtgtctgaatggttgttcctcacatatgattccaggacactgctatgagagtcttaatgtttgtccttcacataggattctagaacactgctcccgtggtctgaatgtttgtccttcacatagcattcaagaacacggctgctggggtctgaatgtctgcctctcaaatcagattccagaacactgctgctggggtttgaatgtctttccctcacatagaattc

SEQ ID NO: 587790 - DNA, 491 bp, Homo sapiens
actgctgctgtagtctgaatgtttgtccctcacatagaattccggaacactgctacaagggtctgaatgtttgtccttcacataccattccagaacactgctgccgtggtctgaatgtatgtccctcacataggattccagagcactgctactaggttctgaatgtttttcccacacctaggattccagaacacttctgctggtgtctgaatggttgttcctcacatatgattccaggacactgctatgagagtcttaatgtttgtccttcacrtaggattctagaacactgctcccgtggtctgaatgtttgtccttcacatagcattcaagaacacggctgctggggtctgaatgtctgcctctcaaatcagattccagaacactgctgctggggtttgaatgtctttccctcacatagaattccagaacatggctgggagggtctgaatgtttgtccctcacatgggataccagaacactgctgcgag

SEQ ID NO: 587791 - DNA, 515 bp, Homo sapiens
gtctaaatgtctctccctcacataagatttcaggacactgctgygaggttctgaatgtttgtccctcacgataggattccagagcactcctgctgtggtctgaatatttgtccctcacataggattccagaacactgccacgtgggtctgaatgtttgccctcacataggattccagaacactcctgctgtggtctgaatgtttgaccctcacataggattccagaacactcctgctgtggtctgaaagtttgctcaccacgataggactccagaacactgctaagagggtctgaatgtccctcacattgtattccagaacactccttctgtggtctgaatgtttgttcctcatataggattcgagaacactcctgctgtggtctgaatgtttgtcccttacctaggattcgagaacattcacacctgggatgtaaatgcttgcccttaacataggatttcagaacactgctcctggggtctgaaagtttgtccctcacataggattccagaact

SEQ ID NO: 587792 - DNA, 463 bp, Homo sapiens
ctgctgcgagggtctaaatgtctctccctcacataagatttcaggacactgctgtgaggttctgaatgtttgtccctcacgataggattccasagcactcctgctgtggtctgaatatttgtccctcacataggattccagaacactgccacgtgggtctgaatgtttgccctcacataggattccagaacactcctgctgtggtctgaatgtttgaccctcacataggattccagaacactcctgctgtggtctgaaagtttgctcaccacgataggactccagaacactgctaagagggtctgaatgtccctcacattgtattccagaacactccttctgtggtctgaatgtttgttcctcatataggattcgagaacactcctgctgtggtctgaatgtttgtcccttacctaggattcgagaacattcacacctgggatgtaaatgcttgcccttaaca

SEQ ID NO: 587793 - DNA, 590 bp, Homo sapiens
tctgaatgtttgtccctcacatgggataccagaacactgctgcgagggtctaaatgtctctccctcacataagatttcaggacactgctgtgaggttctgaatgtttgtccctcacgataggattccagagcactcctgctgtggtctgaatatttgtccctcacataggattccagaacactgccacgtgggtctgaatgtttgccctcacatwggattccagaacactcctgctgtggtctgaatgtttgaccctcacataggattccagaacactcctgctgtggtctgaaagtttgctcaccacgataggactccagaacactgctaagagggtctgaatgtccctcacattgtattccagaacactccttctgtggtctgaatgtttgttcctcatataggattcgagaacactcctgctgtggtctgaatgtttgtcccttacctaggattcgagaacattcacacctgggatgtaaatgcttgcccttaacataggatttcagaacactgctcctggggtctgaaagtttgtccctcacataggattccagaactctcctgctgtggtctgaaagtttgtacc

SEQ ID NO: 587794 - DNA, 289 bp, Homo sapiens
gtctgaatgtttgccctcacataggattccagaacactcctgctgkggtctgaatgtttgaccctcacataggattccagaacactcctgctgtggtctgaaagtttgctcaccacgataggactccagaacactgctaagagggtctgaatgtccctcacattgtattccagaacactccttctgtggtctgaatgtttgttcctcatataggattcgagaacactcctgctgtggtctgaatgtttgtcccttacctaggattcgagaacattcacacctgggatgt

SEQ ID NO: 587795 - DNA, 433 bp, Homo sapiens
tttgccctcacataggattccagaacactcctgctgtggtckgaatgtttgaccctcacataggattccagaacactcctgctgtggtctgaaagtttgctcaccacgataggactccagaacactgctaagagggtctgaatgtccctcacattgtattccagaacactccttctgtggtctgaatgtttgttcctcatataggattcgagaacactcctgctgtggtctgaatgtttgtcccttacctaggattcgagaacattcacacctgggatgtaaatgcttgcccttaacataggatttcagaacactgctcctggggtctgaaagtttgtccctcacataggattccagaactctcctgctgtggtctgaaagtttgtaccgcacataggattccagaacactgctgctgtggtcggaatgtttt

SEQ ID NO: 587796 - DNA, 433 bp, Homo sapiens
tttgccctcacataggattccagaacactcctgctgtggtctgaatgtttgaccctcacataggattccagaacaytcctgctgtggtctgaaagtttgctcaccacgataggactccagaacactgctaagagggtctgaatgtccctcacattgtattccagaacactccttctgtggtctgaatgtttgttcctcatataggattcgagaacactcctgctgtggtctgaatgtttgtcccttacctaggattcgagaacattcacacctgggatgtaaatgcttgcccttaacataggatttcagaacactgctcctggggtctgaaagtttgtccctcacataggattccagaactctcctgctgtggtctgaaagtttgtaccgcacataggattccagaacactgctgctgtggtcggaatgtttt

SEQ ID NO: 587797 - DNA, 517 bp, Homo sapiens
ctcctgctgtggtctgaatatttgtccctcacataggattccagaacactgccacgtgggtctgaatgtttgccctcacataggattccagaacactcctgctgtggtctgaatgtttgaccctcacataggattccagaacactcctgctgtggtctgaaagttwgctcaccacgataggactccagaacactgctaagagggtctgaatgtccctcacattgtattccagaacactccttctgtggtctgaatgtttgttcctcatataggattcgagaacactcctgctgtggtctgaatgtttgtcccttacctaggattcgagaacattcacacctgggatgtaaatgcttgcccttaacataggatttcagaacactgctcctggggtctgaaagtttgtccctcacataggattccagaactctcctgctgtggtctgaaagtttgtaccgcacataggattccagaacactgctgctgtggtcggaatgtttttctgtcacataggatt

SEQ ID NO: 587798 - DNA, 463 bp, Homo sapiens
ctgctgcgagggtctaaatgtctctccctcacataagatttcaggacactgctgtgaggttctgaatgtttgtccctcacgataggattccagagcactcctgctgtggtctgaatatttgtccctcacataggattccagaacactgccacgtgggtctgaatgtttgccctcacataggattccagaacactcctgctgtggtctgaatgtttgaccctcacataggattccagaacactcctgctgtggtctgaaagtttgctcaccacgataggactccagaacactgctaagagggtmtgaatgtccctcacattgtattccagaacactccttctgtggtctgaatgtttgttcctcatataggattcgagaacactcctgctgtggtctgaatgtttgtcccttacctaggattcgagaacattcacacctgggatgtaaatgcttgcccttaaca

SEQ ID NO: 587799 - DNA, 289 bp, Homo sapiens
gtctgaatgtttgccctcacataggattccagaacactcctgctgtggtctgaatgtttgaccctcacataggattccagaacactcctgctgtggtctgaaagtttgctcaccacgataggactccagaacactgctaagagggtctgaatgtccctcacatwgtattccagaacactccttctgtggtctgaatgtttgttcctcatataggattcgagaacactcctgctgtggtctgaatgtttgtcccttacctaggattcgagaacattcacacctgggatgt

SEQ ID NO: 587800 - DNA, 463 bp, Homo sapiens
ctgctgcgagggtctaaatgtctctccctcacataagatttcaggacactgctgtgaggttctgaatgtttgtccctcacgataggattccagagcactcctgctgtggtctgaatatttgtccctcacataggattccagaacactgccacgtgggtctgaatgtttgccctcacataggattccagaacactcctgctgtggtctgaatgtttgaccctcacataggattccagaacactcctgctgtggtctgaaagtttgctcaccacgataggactccagaacactgctaagagggtctgaatgtccctcacattgtattccagarcactccttctgtggtctgaatgtttgttcctcatataggattcgagaacactcctgctgtggtctgaatgtttgtcccttacctaggattcgagaacattcacacctgggatgtaaatgcttgcccttaaca

SEQ ID NO: 587801 - DNA, 433 bp, Homo sapiens
tttgccctcacataggattccagaacactcctgctgtggtctgaatgtttgaccctcacataggattccagaacactcctgctgtggtctgaaagtttgctcaccacgataggactccagaacactgctaagagggtctgaatgtccctcacattgtattccagaacactccttctgtggtctgaatgtttgttcctcayataggattcgagaacactcctgctgtggtctgaatgtttgtcccttacctaggattcgagaacattcacacctgggatgtaaatgcttgcccttaacataggatttcagaacactgctcctggggtctgaaagtttgtccctcacataggattccagaactctcctgctgtggtctgaaagtttgtaccgcacataggattccagaacactgctgctgtggtcggaatgtttt

SEQ ID NO: 587802 - DNA, 517 bp, Homo sapiens
ctcctgctgtggtctgaatatttgtccctcacataggattccagaacactgccacgtgggtctgaatgtttgccctcacataggattccagaacactcctgctgtggtctgaatgtttgaccctcacataggattccagaacactcctgctgtggtctgaaagtttgctcaccacgataggactccagaacactgctaagagggtctgaatgtccctcacattgtattccagaacactccttctgtggtctgaatgtttgttcctcatataggattcgagaacactcctgcwgtggtctgaatgtttgtcccttacctaggattcgagaacattcacacctgggatgtaaatgcttgcccttaacataggatttcagaacactgctcctggggtctgaaagtttgtccctcacataggattccagaactctcctgctgtggtctgaaagtttgtaccgcacataggattccagaacactgctgctgtggtcggaatgtttttctgtcacataggatt

SEQ ID NO: 587803 - DNA, 517 bp, Homo sapiens
ctcctgctgtggtctgaatatttgtccctcacataggattccagaacactgccacgtgggtctgaatgtttgccctcacataggattccagaacactcctgctgtggtctgaatgtttgaccctcacataggattccagaacactcctgctgtggtctgaaagtttgctcaccacgataggactccagaacactgctaagagggtctgaatgtccctcacattgtattccagaacactccttctgtggtctgaatgtttgttcctcatataggattcgagaacactcctgctgtggtctgaatgtttgtcccttacctaggattcgagaacattcacacctgggatgtaaatgcttgcccttaacataggatttcagaacactgctcctggggtctgaaagtttgtccctcacataggattccagaactctcctgctgtggtctgaaagtttgtacygcacataggattccagaacactgctgctgtggtcggaatgtttttctgtcacataggatt

SEQ ID NO: 587804 - DNA, 621 bp, Homo sapiens
ttaacaaaaaaacccacttagttaagcaagtaaactctttatctaattcattctttaatctatttgattttaggtggtttgatttatggggacccggagtaaggagcatataccaaattcttggtgttatcccaatagtcataagagtctccctggtgcactgtacttactcaaatgttttaagagtttgcatgcagccatctctaaaatgtcaaatggtatctcttcaactggaatgacaacagattaaaaaaaatgtgcaaycataaggacaccttaacctatgagtgacatgctaaaccaggaacccaaaacaatgggagtgacatgctaaaccagaaagccaaaacaatgggactgatgtactaaaaccggaacccaaaacaatgcggcgtgatgtactaaaaccagaacccaaaacaatgggagtgacgtgctaaaccagaaacccaaaacaatgggagtaacatgctaaaaccagaacccaaaacaatgggagtgacgtgctaaaaccattacccaaaacaatgggagtgatgtgctaaaccggaaacccaaaacaatggtaactaagagtgagtaaggccctacattttggtcacactctcaactaagtgagaa

SEQ ID NO: 587805 - DNA, 621 bp, Homo sapiens
ttaacaaaaaaacccacttagttaagcaagtaaactctttatctaattcattctttaatctatttgattttaggtggtttgatttatggggacccggagtaaggagcatataccaaattcttggtgttatcccaatagtcataagagtctccctggtgcactgtacttactcaaatgttttaagagtttgcatgcagccatctctaaaatgtcaaatggtatctcttcaactggaatgacaacagattaaaaaaaatgtgcaaccataaggacaccktaacctatgagtgacatgctaaaccaggaacccaaaacaatgggagtgacatgctaaaccagaaagccaaaacaatgggactgatgtactaaaaccggaacccaaaacaatgcggcgtgatgtactaaaaccagaacccaaaacaatgggagtgacgtgctaaaccagaaacccaaaacaatgggagtaacatgctaaaaccagaacccaaaacaatgggagtgacgtgctaaaaccattacccaaaacaatgggagtgatgtgctaaaccggaaacccaaaacaatggtaactaagagtgagtaaggccctacattttggtcacactctcaactaagtgagaa

SEQ ID NO: 587806 - DNA, 621 bp, Homo sapiens
ttaacaaaaaaacccacttagttaagcaagtaaactctttatctaattcattctttaatctatttgattttaggtggtttgatttatggggacccggagtaaggagcatataccaaattcttggtgttatcccaatagtcataagagtctccctggtgcactgtacttactcaaatgttttaagagtttgcatgcagccatctctaaaatgtcaaatggtatctcttcaactggaatgacaacagattaaaaaaaatgtgcaaccataaggacaccttaacctatgagtgacatgctaaaccagraacccaaaacaatgggagtgacatgctaaaccagaaagccaaaacaatgggactgatgtactaaaaccggaacccaaaacaatgcggcgtgatgtactaaaaccagaacccaaaacaatgggagtgacgtgctaaaccagaaacccaaaacaatgggagtaacatgctaaaaccagaacccaaaacaatgggagtgacgtgctaaaaccattacccaaaacaatgggagtgatgtgctaaaccggaaacccaaaacaatggtaactaagagtgagtaaggccctacattttggtcacactctcaactaagtgagaa

SEQ ID NO: 587807 - DNA, 615 bp, Homo sapiens
gccagctatcggtggtagtacaagcatgactttgtgctcaactgaaacccagctgaatatagaattgtgtaggaaagtgttaatatggtgatagaatagaaacagtagcaaatgaactaaatcatactatgaatgcctacactaccattataactttttgaagaatgataataccacttactttattgccttttgaagtaggaatattttagtggatatcctatagatctgaaaccctataaagaatcccaaagaagctgkctggataaagcctgctatggatgtctttatactcaaagactgatgaggcaattcgaatatgtgtccccaccaaatctcttgttgaattatgcttcctaatgttggaggtggatcctggtataaggtgattgaatcatgaaggcaaatttctcatgagtggttcagcaccatccccttggtactgtcctcacaatcatgagtgacttctcgtgagatctggccactgaaaactgtatatcactccctactctccgtgatttcctcttgccatgtgagacaattcactctttcattagcttgcacaatgattggaagatttctgaggccccccagaaacagaagcactaagcttcc

SEQ ID NO: 587808 - DNA, 615 bp, Homo sapiens
gccagctatcggtggtagtacaagcatgactttgtgctcaactgaaacccagctgaatatagaattgtgtaggaaagtgttaatatggtgatagaatagaaacagtagcaaatgaactaaatcatactatgaatgcctacactaccattataactttttgaagaatgataataccacttactttattgccttttgaagtaggaatattttagtggatatcctatagatctgaaaccctataaagaatcccaaagaagctgtctggataaagcctgctatggatgtctttatactcaaagactgatgaggcaattcgaatatgtgtccccaccaaatctcttgttgaattatgcttcctaatgttggaggtggatcctggtataaggtgattgaatcatgaaggcaaatttctcatgagtggttcagcaccatccccttggtactgtcctcacaatcatgagtgacttctcgtgagatctggccactgaaaactstatatcactccctactctccgtgatttcctcttgccatgtgagacaattcactctttcattagcttgcacaatgattggaagatttctgaggccccccagaaacagaagcactaagcttcc

SEQ ID NO: 587809 - DNA, 615 bp, Homo sapiens
gccagctatcggtggtagtacaagcatgactttgtgctcaactgaaacccagctgaatatagaattgtgtaggaaagtgttaatatggtgatagaatagaaacagtagcaaatgaactaaatcatactatgaatgcctacactaccattataactttttgaagaatgataataccacttactttattgccttttgaagtaggaatattttagtggatatcctatagatctgaaaccctataaagaatcccaaagaagctgtctggataaagcctgctatggatgtctttatactcaaagactgatgaggcaattcgaatatgtgtccccaccaaatctcttgttgaattatgcttcctaatgttggaggtggatcctggtataaggtgattgaatcatgaaggcaaatttctcatgagtggttcagcaccatccccttggtactgtcctcacaatcatgagtgacttctcgtgagatctggccactgaaaactgtatatcactccctactctccgtgatttcctcttgccatgtgagacaattcactctttcattascttgcacaatgattggaagatttctgaggccccccagaaacagaagcactaagcttcc

SEQ ID NO: 587810 - DNA, 434 bp, Homo sapiens
gaacttgctttttatttcagagactcgtaggcaaaagagaatgtagccttgacccagatgagactttgcactttgtaactttgagttaatgctgaaatgagttaagactttgggagactgctggcaaggcatgactgtatcttgcaatgtgagaaggrcatgagatttgtggggtcagggacagaataatacggtttttctctatgccccttccaaaactcatgtgaaagtacactccctaatgttagagtcggggcctaggtggaaaaagctttaatcataaaggggtgggagtggatccttcacaaatggcaaaacaccaagcccttaatgccatcctcctgatagtgagtgagttctcatgacatctagtagtttaaaaggctgtggaacctctttcctctctctgtcttgttccaacttttgccatatga

SEQ ID NO: 587811 - DNA, 434 bp, Homo sapiens
gaacttgctttttatttcagagactcgtaggcaaaagagaatgtagccttgacccagatgagactttgcactttgtaactttgagttaatgctgaaatgagttaagactttgggagactgctggcaaggcatgactgtatcttgcaatgtgagaagggcatgagatttgtggggtcagggacagaataatacggtttttctctatgccccttccaaaactcatgtgaaagtacactccctaatgttagagtcggggcctaggtggaaaaagctttaatcataaaggggtgggagtggatccttcacaaatggcaaarcaccaagcccttaatgccatcctcctgatagtgagtgagttctcatgacatctagtagtttaaaaggctgtggaacctctttcctctctctgtcttgttccaacttttgccatatga

SEQ ID NO: 587812 - DNA, 637 bp, Homo sapiens
aggacgttaaaactctagctgctaaatgagacaaatagggttccacatcaagtgcctgggctcctgttataaactgaactctgcttccattggcttctcttgtttctgttttgataaacccatcatttggcttagtccctacccttgccatactcacccaccagtagtggacctccttgaccataactatagacagagatctttgattgtttcttttcaaatgtttgcttactttagaggtgcagtcaaatgttgtttggaccataagactccgaggctgtgagtggttgaaactgtcttgagactcaaagagctattgaggaagagatttgatagctgaactcttttgaagattttctctgtctctcacacatctggggctgaatwgcttaacgtttaatttctacatcgacgatagtttaatagccattcatgcaaatcagttctgctgtgagttattatcctactccaataccaactaacgcattccttaaatttagtgtacgtataaattctacatggtaagtgaagctgtctttatgaattgctgctatagaatatactagattgtgtaggttttagtacaatccaggtaattatcgagcctttgtaatattttcaggaaagtgatcctttc

SEQ ID NO: 587813 - DNA, 469 bp, Homo sapiens
ttttctatttataaatttatctgggtgctttctcaaaggtttctcagwttaaaaacctatggctttgtaaaattaaaacagaagtaataggaattgtgttaaaaaacagaatcaggccaagcctggtggcttatgcctctaatgccaacacttagggaggccaaggcgggaggataatttgaggtcaggagttcaagaccagcctggacaacatggcaaaaccccacatgtattaaaaaaatacacaaattacctgggcgtggtggtgaatgcctttagtcctagctactcaggaggctaaggcaggagaatagcttgaacccgggaggatgaggttgcagtgagccaagatagagccactgcattccagcctgggtgacagagtgagatcctgtcttaaaaaaaaggaaaaaagaaaaagaaaaaaacagaatcatacattgagagagattgtatagcccttttaatt

SEQ ID NO: 587814 - DNA, 469 bp, Homo sapiens
ttttctatttataaatttatctgggtgctttctcaaaggtttctcagattaaaaacctatggctttgtaaaattaaaacagaagtaataggaattgtgttaaaaaacagaatcaggccaagcctggtggcttatgcctctaatgccaacacttagggaggccaaggcgggaggataatttgaggtcaggagttcaagaccagcctggacaacatggcaaaaccccacatgtattaaaaaaatacacaaattacctgggcgtggtggtgaatgcctttagtcctagctactcaggaggctaaggcaggagaatagcttgaaccygggaggatgaggttgcagtgagccaagatagagccactgcattccagcctgggtgacagagtgagatcctgtcttaaaaaaaaggaaaaaagaaaaagaaaaaaacagaatcatacattgagagagattgtatagcccttttaatt

SEQ ID NO: 587815 - DNA, 469 bp, Homo sapiens
ttttctatttataaatttatctgggtgctttctcaaaggtttctcagattaaaaacctatggctttgtaaaattaaaacagaagtaataggaattgtgttaaaaaacagaatcaggccaagcctggtggcttatgcctctaatgccaacacttagggaggccaaggcgggaggataatttgaggtcaggagttcaagaccagcctggacaacatggcaaaaccccacatgtattaaaaaaatacacaaattacctgggcgtggtggtgaatgcctttagtcctagctactcaggaggctaaggcaggagaatagcttgaacccgggaggmtgaggttgcagtgagccaagatagagccactgcattccagcctgggtgacagagtgagatcctgtcttaaaaaaaaggaaaaaagaaaaagaaaaaaacagaatcatacattgagagagattgtatagcccttttaatt

SEQ ID NO: 587816 - DNA, 583 bp, Homo sapiens
tttaattgtccataatggatacatttctttttctgtgtaatagttwatcagcatgaaaattttctttttctgtgtaatagtttatcagcatgaaaaaaaaaagagtcactgaacactgataattttctttctctctctctctttttttcctttttttggagatgaagtctcactctgttgcccaggctggagtgcaatggcaacatctctgttcactgcaaacttcacatcctaggttcaggagattttcctgcctcagcctcccaagtagctgggattccaggtacaccccgtcatgcctggataaatttttgtattttcagtagagacggggtttcatcatgttggccaggctggtctcaaactcctgacctcaaatgatctgcccgccttagcctcccaaattactggtgatgattttcatttaatggtgttctacaaagtgagtttaggcagtgaaagggcacaagtcacctatagtttaccagaaagtagtaccagttaccagcgttgaaacatactcctaaccctggaaaatttcttcagcagccagaattaatctcagattttcagactggagcaa

SEQ ID NO: 587817 - DNA, 583 bp, Homo sapiens
tttaattgtccataatggatacatttctttttctgtgtaatagtttatcagcatgaaaattttctttttctgtgtaatagtttatcagcatgaaaaaaaaaagagtcactgaacactgataattttctttctctctctctctttttttcctttttttggagatgaagtctcactctgttgcccaggctggagtgcaatggcaacatctctgttcactgcaaacttcacatcctaggttcaggagattttcctgcctcagcctcccaagtagctgggattccaggtrcaccccgtcatgcctggataaatttttgtattttcagtagagacggggtttcatcatgttggccaggctggtctcaaactcctgacctcaaatgatctgcccgccttagcctcccaaattactggtgatgattttcatttaatggtgttctacaaagtgagtttaggcagtgaaagggcacaagtcacctatagtttaccagaaagtagtaccagttaccagcgttgaaacatactcctaaccctggaaaatttcttcagcagccagaattaatctcagattttcagactggagcaa

SEQ ID NO: 587818 - DNA, 346 bp, Homo sapiens
gaattagaatttaaaattttgattctctttcttattggtgttcagtttagctcttaataatttagtgtttgcctagtgctctagttaatcttcagaaataaacatgcactgtaggggcttactctttctggtatgctgaggtaaagtctttgtaagagagggagcttttataatactacctatcatctttgaattcatttctggtagattttacacaaatgcattaagtttagtccaaacagacastgagagttcagcttgctggttcatgtttctgtcctatgttaagccaaggcaaattatttttcactttttagtcacaatcccataatttaagagtagcaac

SEQ ID NO: 587819 - DNA, 346 bp, Homo sapiens
gaattagaatttaaaattttgattctctttcttattggtgttcagtttagctcttaataatttagtgtttgcctagtgctctagttaatcttcagaaataaacatgcactgtaggggcttactctttctggtatgctgaggtaaagtctttgtaagagagggagcttttataatactacctatcatctttgaattcatttctggtagattttacacaaatgcattaagtttagtccaaacagacactgagagttcagcttgctggttcatgtttctgtcctatgttaagccaargcaaattatttttcactttttagtcacaatcccataatttaagagtagcaac

SEQ ID NO: 587820 - DNA, 532 bp, Homo sapiens
attaagtttagtccaaacagacactgagagttcagcttgctggttcatgtttctgtcctatgttaagccaaggcaaattatttttcactttttagtcacaatcccataatttaagagtagcaacacatagattaagtttcacagttaaattttaactattttctaatattactttgtttatacttgattaaagctaattttaaaacatgcactctgacagaaaagacatctgagaaacaaaacaagcaaatttgttttccattttgcacctgcccccccccccccaaaaaaaaagtctcaagaaccagaactgggtaagaacagtgataaagggaatcaatctatatattcatgactttctttaatattcattacaaacaagttcaagctgaatattggtaaaagttctgaaaactccaaaatyactgcttgccctgaggaagagctcctacatggtaactctaaagagggatgaacaaaaaaggagtgccctctagtctgatgaatcatgtccctgattgtgagggggaaa

SEQ ID NO: 587821 - DNA, 562 bp, Homo sapiens
gggaaccagcttttctctctgcgcatgcgccgccccgcccacttcgccattttcctccggaagtgcggatcccagcggyggtcgtgtagctgagcaggcctggggcttggttctatgtccctgtgggtaggtgcgagggcgaagaggaacctgtgggcctcgggggatcccgggggccagaccagtgttccccatatgtgggggcagacgcgtgggccatcgcgggcaggaggagcctgacgtgcatttgcgggccgtggaaactggcgggggctgggaggacagacgtggggtcccagcagtgaagtgggttccagaggcgcaggagtgggtaggcgaggctggtgccctaggcccggagtctgcaggccgcgctcctgtcctgccgctgagggacccggttaccaaccatcatgtagctcagtttgcccatctgtccccgtgctaacacacagttctcgggagacgttccccattcccagaggagtagtgcgaaatgcgtgtgcctctagtcttaagctgggcatttgtattagttgggtttcctggtgtctatttagca

SEQ ID NO: 587822 - DNA, 562 bp, Homo sapiens
gggaaccagcttttctctctgcgcatgcgccgccccgcccacttcgccattttcctccggaagtgcggatcccagcggcggtcgtgtagctgagcaggcctggggcttggttctatgtccctgtgggtaggtgcgagggcgargaggaacctgtgggcctcgggggatcccgggggccagaccagtgttccccatatgtgggggcagacgcgtgggccatcgcgggcaggaggagcctgacgtgcatttgcgggccgtggaaactggcgggggctgggaggacagacgtggggtcccagcagtgaagtgggttccagaggcgcaggagtgggtaggcgaggctggtgccctaggcccggagtctgcaggccgcgctcctgtcctgccgctgagggacccggttaccaaccatcatgtagctcagtttgcccatctgtccccgtgctaacacacagttctcgggagacgttccccattcccagaggagtagtgcgaaatgcgtgtgcctctagtcttaagctgggcatttgtattagttgggtttcctggtgtctatttagca

SEQ ID NO: 587823 - DNA, 602 bp, Homo sapiens
ttttcctccggaagtgcggatcccagcggcggtcgtgtagctgagcaggcctggggcttggttctatgtccctgtgggtaggtgcgagggcgaagaggaacctgtgggcctcgggggatcccgggggccagaccagtgttccccatatgtgggggcagacgcgtgggccatcgcgggcaggaggagcctgacgtgcatttgcgggccgtggaaactggcgggggctgggaggacagacgtggggtcccagcagtgaagygggttccagaggcgcaggagtgggtaggcgaggctggtgccctaggcccggagtctgcaggccgcgctcctgtcctgccgctgagggacccggttaccaaccatcatgtagctcagtttgcccatctgtccccgtgctaacacacagttctcgggagacgttccccattcccagaggagtagtgcgaaatgcgtgtgcctctagtcttaagctgggcatttgtattagttgggtttcctggtgtctatttagcaagtgaagtttctggttccctccttcactgtgtgacctgcctagtcctcctggattgcatttatggaagtttatacgagacctagtttcc

SEQ ID NO: 587824 - DNA, 602 bp, Homo sapiens
ttttcctccggaagtgcggatcccagcggcggtcgtgtagctgagcaggcctggggcttggttctatgtccctgtgggtaggtgcgagggcgaagaggaacctgtgggcctcgggggatcccgggggccagaccagtgttccccatatgtgggggcagacgcgtgggccatcgcgggcaggaggagcctgacgtgcatttgcgggccgtggaaactggcgggggctgggaggacagacgtggggtcccagcagtgaagtgggttccagaggcgcaggagtgggtaggcgaggctggtgccctaggcccggagtctgcaggccgcgctcctgtcctgccgctgagggacccggttaccaaccatcatgtagctcagtttgcccatctgtccccgtgctaacacacagttctsgggagacgttccccattcccagaggagtagtgcgaaatgcgtgtgcctctagtcttaagctgggcatttgtattagttgggtttcctggtgtctatttagcaagtgaagtttctggttccctccttcactgtgtgacctgcctagtcctcctggattgcatttatggaagtttatacgagacctagtttcc

SEQ ID NO: 587825 - DNA, 595 bp, Homo sapiens
cgtggaaactggcgggggctgggaggacagacgtggggtcccagcagtgaagtgggttccagaggcgcaggagtgggtaggcgaggctggtgccctaggcccggagtctgcaggccgcgctcctgtcctgccgctgagggacccggttaccaaccatcatgtagctcagtttgcccatctgtccccgtgctaacacacagttctcgggagacgttccccattcccagaggagtagtgcgaaatgcgtgtgcctctagtcttaagctgggcrtttgtattagttgggtttcctggtgtctatttagcaagtgaagtttctggttccctccttcactgtgtgacctgcctagtcctcctggattgcatttatggaagtttatacgagacctagtttccatggaggaactcactgattccgcgagggagatggggtactggatgatggtcttcagccttaagggtacttcagtcttcactgtgtgttacaaagtttgaaagggagggttccctatgaataagaggcgcacttgaaagaacagccctctggtctaacttttcactggtgcttcagaggaggataaaaggtcgcaggtga

SEQ ID NO: 587826 - DNA, 594 bp, Homo sapiens
gagggttccctatgaataagaggcgcacttgaaagaacagccctctggtctaacttytcactggtgcttcagaggaggataaaaggtcgcaggtgaagatcccagttttcctcgctcaggaaatattaattctactccctagaatgcacaagatttgcaaagactaggtgatattggaaggtttggaagaactttcagaaggttgaggtgaattcagctgagaagaacaggcaaggacctaggaaatattccttatttgaaggggcctgaaagtgtggtctggggtgcaggagtgacctgtcatacttgaaaagattgaaatactctccaaatacagtcccattccttcaaacttagcttgttgtttccagtgtctgagatatattaaacctagtccatcaccaaatttagcatagattgtgaagttctattgattgcatttgatttgtaatttaagactttctccccctacataatttcgttaaaaacatattgaattctattcacttaggtgtaacagttaatatttgctgtttaaggaactaattaaaccttactagcttataaaaaacaaccaccattttatttgtttga

SEQ ID NO: 587827 - DNA, 594 bp, Homo sapiens
gagggttccctatgaataagaggcgcacttgaaagaacagccctctggtctaacttttcactggtgcttcagaggaggataaaaggtcgcaggtgaagatcccagttttcctcgctcaggaaatattaattctactccctagaatgcacaagatttgcaaagactaggtgataktggaaggtttggaagaactttcagaaggttgaggtgaattcagctgagaagaacaggcaaggacctaggaaatattccttatttgaaggggcctgaaagtgtggtctggggtgcaggagtgacctgtcatacttgaaaagattgaaatactctccaaatacagtcccattccttcaaacttagcttgttgtttccagtgtctgagatatattaaacctagtccatcaccaaatttagcatagattgtgaagttctattgattgcatttgatttgtaatttaagactttctccccctacataatttcgttaaaaacatattgaattctattcacttaggtgtaacagttaatatttgctgtttaaggaactaattaaaccttactagcttataaaaaacaaccaccattttatttgtttga

SEQ ID NO: 587828 - DNA, 594 bp, Homo sapiens
gagggttccctatgaataagaggcgcacttgaaagaacagccctctggtctaacttttcactggtgcttcagaggaggataaaaggtcgcaggtgaagatcccagttttcctcgctcaggaaatattaattctactccctagaatgcacaagatttgcaaagactaggtgatattggaaggtttggaagaactttcagaaggttgaggtgaattcagctgagaagaacaggcaaggacctaggaaatattccttatttgaaggggcctgaaagtgtggtctggggtgcaggagtgacctgtcatacttgaaaagattgaaatactctccaaatacagtcccattccttcaaacttagcttgttgtttccagtgtctgagatatattaaacctagtccatcaccaaatttagcatagattgtgaagttctattgattgcatttsatttgtaatttaagactttctccccctacataatttcgttaaaaacatattgaattctattcacttaggtgtaacagttaatatttgctgtttaaggaactaattaaaccttactagcttataaaaaacaaccaccattttatttgtttga

SEQ ID NO: 587829 - DNA, 353 bp, Homo sapiens
aagacacagggggcaagctggataaagaaccaagacccatttgagtatgccgtctccaagaaacccatctcacatgcagtgccatacmtaggctcaaaatgaaggaatggtgaaaaatctttcaagccaatggaaaacagaagaaatcaggtgttacactcccagtttcgacaaaacgtatataccaataaagataaaaaaagacagagaaggacattacaaaggtggtcctgacctttgataaatctcattattgattgataccaacctgggctatctttattgcccaaaccaacaggataatttgctgaggttgtggagcttctcccctgcaaagagtccctgatctccca

SEQ ID NO: 587830 - DNA, 353 bp, Homo sapiens
aagacacagggggcaagctggataaagaaccaagacccatttgagtatgccgtctccaagaaacccatctcacatgcagtgccatacctaggctcaaaatgaaggaatggtgaaaaatctttcaagcmaatggaaaacagaagaaatcaggtgttacactcccagtttcgacaaaacgtatataccaataaagataaaaaaagacagagaaggacattacaaaggtggtcctgacctttgataaatctcattattgattgataccaacctgggctatctttattgcccaaaccaacaggataatttgctgaggttgtggagcttctcccctgcaaagagtccctgatctccca

SEQ ID NO: 587831 - DNA, 353 bp, Homo sapiens
aagacacagggggcaagctggataaagaaccaagacccatttgagtatgccgtctccaagaaacccatctcacatgcagtgccatacctaggctcaaaatgaaggaatggtgaaaaatctttcaagccaatggaaaacagaagaaatcaggtgttacactcccagtttcgacaaaacgtatataccaataaagataaaaaaagacagagaaggwcattacaaaggtggtcctgacctttgataaatctcattattgattgataccaacctgggctatctttattgcccaaaccaacaggataatttgctgaggttgtggagcttctcccctgcaaagagtccctgatctccca

SEQ ID NO: 587832 - DNA, 543 bp, Homo sapiens
ttctactttgtgtttctaaaamtttggcttatatacctagggttatataatatttgttgttttgtaagtaggttccatgttatgtcagatgtgtcacgatcttcttcctttctatggatgaataatatttcttcatatatatattatatatatgttacatatataatatatatataatatatatcatgtatatatatgcttttgtttatccacctatttctggacggacgttttggtttcttccaccttgtggctgtgtaatgctgctgtgaacttaggtgtgcacatatctgtttgaggtcctgctactagttattctgtctctgtagtagttggatggctggatcatatggtcattttattttattttttttgaggagccagttcatatttccaccaacagtgttcaagggtttcagtttcacctgcgcttgttactttctgttgggtttgaactgatgtcccattgtggtttctttttgcatttctctaatgactagtgatgttacacatcttctcatatatctcatgtatctgttggat

SEQ ID NO: 587833 - DNA, 543 bp, Homo sapiens
ttctactttgtgtttctaaaaatttggcttatatacctagggttatataatatttgttgttttgtaagtaggttccatgttatgtcagatgtgtcasgatcttcttcctttctatggatgaataatatttcttcatatatatattatatatatgttacatatataatatatatataatatatatcatgtatatatatgcttttgtttatccacctatttctggacggacgttttggtttcttccaccttgtggctgtgtaatgctgctgtgaacttaggtgtgcacatatctgtttgaggtcctgctactagttattctgtctctgtagtagttggatggctggatcatatggtcattttattttattttttttgaggagccagttcatatttccaccaacagtgttcaagggtttcagtttcacctgcgcttgttactttctgttgggtttgaactgatgtcccattgtggtttctttttgcatttctctaatgactagtgatgttacacatcttctcatatatctcatgtatctgttggat

SEQ ID NO: 587834 - DNA, 543 bp, Homo sapiens
ttctactttgtgtttctaaaaatttggcttatatacctagggttatataatatttgttgttttgtaagtaggttccatgttatgtcagatgtgtcacgatyttcttcctttctatggatgaataatatttcttcatatatatattatatatatgttacatatataatatatatataatatatatcatgtatatatatgcttttgtttatccacctatttctggacggacgttttggtttcttccaccttgtggctgtgtaatgctgctgtgaacttaggtgtgcacatatctgtttgaggtcctgctactagttattctgtctctgtagtagttggatggctggatcatatggtcattttattttattttttttgaggagccagttcatatttccaccaacagtgttcaagggtttcagtttcacctgcgcttgttactttctgttgggtttgaactgatgtcccattgtggtttctttttgcatttctctaatgactagtgatgttacacatcttctcatatatctcatgtatctgttggat

SEQ ID NO: 587835 - DNA, 543 bp, Homo sapiens
ttctactttgtgtttctaaaaatttggcttatatacctagggttatataatatttgttgttttgtaagtaggttccatgttatgtcagatgtgtcacgatcttcttcctttctatggmtgaataatatttcttcatatatatattatatatatgttacatatataatatatatataatatatatcatgtatatatatgcttttgtttatccacctatttctggacggacgttttggtttcttccaccttgtggctgtgtaatgctgctgtgaacttaggtgtgcacatatctgtttgaggtcctgctactagttattctgtctctgtagtagttggatggctggatcatatggtcattttattttattttttttgaggagccagttcatatttccaccaacagtgttcaagggtttcagtttcacctgcgcttgttactttctgttgggtttgaactgatgtcccattgtggtttctttttgcatttctctaatgactagtgatgttacacatcttctcatatatctcatgtatctgttggat

SEQ ID NO: 587836 - DNA, 536 bp, Homo sapiens
tggggcctggggattgctgggaaaaaggcaggaaacaaatacagacctgaccatggagggtttgtgtttcatggctcccatctgggtacccaaggaacctacatgtagctcgtgtgtggaragcctacattgcccactcaaagcaattgaggatggaacagtcttggggctggagctcattatttggaatgataaccacatctgcacagagaggacctgataagatgttgtccttccatgtatatctgggaatcctgtgtagggtctctctgtaaggacaggagcagtgttgctccttggcctctagttagcctcacgagtagtctagtaaagctttgccaacttgtcaccatctgtggatattctggccagctcttgttttcaccctactgacttcttcagacactaggcttttgcttcagaccattcatggtttttcttcctcttcaaatcagtaatcaataaatcctcttcaaatcaataaatttccactcctttaggaaactctgatcttctggtcatgccaaggtttaatt

SEQ ID NO: 587837 - DNA, 363 bp, Homo sapiens
ggaggatcaccgtgagcctgggaggttgaggctgcagtgagccatgatttcaccactgcactccagcctgggcaacagggtgagaccctgtctcaaaaaaataataaaataaaaaacaataaactgtcattctgttttggtcaaatgttttcaattttttgacatctttgctaaatcttakttgataacattgtatgggaagcattgccaaaagataagtaacactaaatcttcttttttttttctctgagacagaatcttgctttgtcacccaggctggagtgcagtggtgtgatctaggtccattgcaacctctgccccaaggttcaagcgattctcctgcctcaacctcccaagtagctg

SEQ ID NO: 587838 - DNA, 606 bp, Homo sapiens
gctatgtgtcgtaacaagtgctcatagtcctggctacttgggatactaaggtggaggatcaccgtgagcctgggaggttgaggctgcagtgagccatgatttcaccactgcactccagcctgggcaacagggtgagaccctgtctcaaaaaaataataaaataaaaaacaataaactgtcattctgttttggtcaaatgttttcaattttttgacatctttgctaaatcttagttgataacattgtatgggaagcattgccaaaagataagtaacactaaatcttcttttttttttctctgagacagaatcttgctttgtcacccaggctggagtgcagtggygtgatctaggtccattgcaacctctgccccaaggttcaagcgattctcctgcctcaacctcccaagtagctgagactacagacacatgccaccacgcccggctaattttgtatttttagtagaaacaagatttctccatgttggccaggctggtgtcaaactcctgacctctgatgatctgtccaacttggcctcccaaagtgttgggattacaggcatgagccactgtgcctggcctaaatcttcttttggttacatttata

SEQ ID NO: 587839 - DNA, 329 bp, Homo sapiens
tatttttaacttaccctacgttagaaaaactacattktgaacaaaaatttgaaccatttatctgtctctctaactgatttctccagaattcagaagccattggtgagcattcctaaattatggcaatataattatttgcataatttcaataagaatctgtttttggtaacaggattcaattggagacactgtttgttttatcaaggctttaactcgaacggcagatacaaccagaccactttaaggaattgagcttgactttatagcaccaatgcaaagccccttagaatgactggcttggtgtcttgtctacaagggtcctttacaaa

SEQ ID NO: 587840 - DNA, 568 bp, Homo sapiens
gacgggcccaggaacctcaagttatttggggaccttgagaagataggactacacccattcataaaagtattacagaagagctgrcaagatgtctgaataggaacagctccggtctgcagcacccagtgggatcaacacagaaggcaggtggttcatgcatttccaactgagcctccactggtgatacccaggcaaacagggtctggagtggacctccagcaaactcgagcaaacctgcagcagagggacctgactggtagaaggaaaactaacaaacataaaggaatagtatcaacatcaccaacatcaaagaccaaaggtagataaatccacaaagatggggagaaaccagtgcaaaaaggctgaaaactccaaaaaccagaaagcctcttctcctccagaagatcacaactccccaccagcaagggaacaaaactggacagacaatgagtttgatggattgacagaagtaggcttcagaaggcgggtaataacaaactcctccaagctaaaggagcatgttctaacccaaatgcaaggaagctaagagcctgaaaaaaaaaaaggt

SEQ ID NO: 587841 - DNA, 568 bp, Homo sapiens
gacgggcccaggaacctcaagttatttggggaccttgagaagataggactacacccattcataaaagtattacagaagagctgacaagatgtctgaataggaacagctccggtctgcagcacccagtgggatcaacacagaaggcaggtggttcatgcatttccaactgagcctccactggtgatacccaggcaaacagggtctggagtggacctccagcaaactcgagcaaacctgcagcagagggacctgactggtagaaggaaaactaacaaacataaaggaatagtatcaacatcaccaacatcaaagaccaaaggtagataaatccacaaagatggggagaaaccagtgcaaaaaggctgaaaactccaaaarccagaaagcctcttctcctccagaagatcacaactccccaccagcaagggaacaaaactggacagacaatgagtttgatggattgacagaagtaggcttcagaaggcgggtaataacaaactcctccaagctaaaggagcatgttctaacccaaatgcaaggaagctaagagcctgaaaaaaaaaaaggt

SEQ ID NO: 587842 - DNA, 568 bp, Homo sapiens
gacgggcccaggaacctcaagttatttggggaccttgagaagataggactacacccattcataaaagtattacagaagagctgacaagatgtctgaataggaacagctccggtctgcagcacccagtgggatcaacacagaaggcaggtggttcatgcatttccaactgagcctccactggtgatacccaggcaaacagggtctggagtggacctccagcaaactcgagcaaacctgcagcagagggacctgactggtagaaggaaaactaacaaacataaaggaatagtatcaacatcaccaacatcaaagaccaaaggtagataaatccacaaagatggggagaaaccagtgcaaaaaggctgaaaactccaaaaaccagaawgcctcttctcctccagaagatcacaactccccaccagcaagggaacaaaactggacagacaatgagtttgatggattgacagaagtaggcttcagaaggcgggtaataacaaactcctccaagctaaaggagcatgttctaacccaaatgcaaggaagctaagagcctgaaaaaaaaaaaggt

SEQ ID NO: 587843 - DNA, 436 bp, Homo sapiens
gacaatgagtttgatggattgacagaagtaggcttcagaaggcgggtaataacaaactcctccaagctaaaggagcrtgttctaacccaaatgcaaggaagctaagagcctgaaaaaaaaaaaggtaggacgaattgttaactagaataaccagtttagagaagaatataaatgacctgatggagctgaaaaacccagcacaagaacttcatgaagcatacacaagtatcaatagctgaatcaatcaagcaggagaaagaatatcagagattgaagatcaactcaatgaaataaagcaagaagaaaagattggagaaaaaagagtgaaagaaatgaacaaagcctcccagaaatagaggaatatgttaaaacactgaatctatgtttgattcgtgtacctgaaagtgacagagagaatggaaccaagttggaaaac

SEQ ID NO: 587844 - DNA, 436 bp, Homo sapiens
gacaatgagtttgatggattgacagaagtaggcttcagaaggcgggtaataacaaactcctccaagctaaaggagcatgttctaacccaaatgcaaggaagctaagagcctgaaaaaaaaaaaggtaggacgaattgttaactagaataaccagtttagagaagaatataaatgacctgatggagctgaaaaacccagcacaagaacttcatgaagcatacacaagtatcaatagctgaatcaatcaagcaggagaaagaatatcagagattgaagatcaactcaatgaaataaagcaagaagaaaagattggagaaaaaagagtgaaagaaatgaacaaagcctcccagaaatagaggaatatgttaaaacactgaatctatgtttgattcgtgtacmtgaaagtgacagagagaatggaaccaagttggaaaac

SEQ ID NO: 587845 - DNA, 602 bp, Homo sapiens
ttttttaattgggatcttagaaattctgttgttgagttgtgggatattaagcttttatcagatacacattttgattttatcagatacatattttctcacatattatgggttgtcttttcactcccttgatagtgtcctttgatgcataaagggttttttattttgattaaatctaattttcgtgtattttcttttgttatctgtgmttttctgtcatatttcaaaatacacttaaaactcaaaggtcataaaggtttaccgtgtgttttcttctaagagttacatatttttagtccttacatttaagtcttttattaatttagaattaatttttgtatatactgcaaggtaggggtctaacttctctcttgtgcactgacatccaactgttgaagagactgttctttcctcccttgactagacttggccaccttgttgaacagtcattgaccatatatgtgaggactaacttgtaggatctcaaatctgttctattgtatttgtctgaaagtctattggtcttattccagtaccacactctcttgattactgtagatttgtagtaggctgtgaaactgaaaaatgtaagttttccaatgttc

SEQ ID NO: 587846 - DNA, 571 bp, Homo sapiens
tctatttttttaattgggatcttagaaattctgttgttgagttgtgggatattaagcttttatcagatacacattttgattttatcagatacatattttctcacatattatgggttgtcttttcactcccttgatagtgtcctttgatgcataaagggttttttattttgattaaatctaattttcgtgtattttcttttgttatctgtgattttctgtcatatttcaaaatacacttaaaactcaaaggtcataaaggtttaccgtgtgttttcttctaagagttacatatttttagtccttacatttaagtcttttattaatttagaattaatttttgtatatactgcaaggtaggggtctaacttctctcttgtgcactgacatccarctgttgaagagactgttctttcctcccttgactagacttggccaccttgttgaacagtcattgaccatatatgtgaggactaacttgtaggatctcaaatctgttctattgtatttgtctgaaagtctattggtcttattccagtaccacactctcttgattactgtagatttgtagtag

SEQ ID NO: 587847 - DNA, 582 bp, Homo sapiens
gtctaacttctctcttgtgcactgacatccaactgttgaagagactgttctttcctcccttgactagacttggccaccttgttgaacagtcattgaccatatatgtgaggactaacttgtaggatctcaaatctgttctattgtatttgtctgaaagtctattggtcttattccagtaccacactctcttgattactgtagatttgtagtaggctgtgaaactgaaaaatgtragttttccaatgttctttttcaagactcttttgtctgtcagatcctttgaatttttgtatgattttagaatgagtttctttgtttctgcaaaaatgcctttgggattttgatggtattgcattgaatctgtagattactttagatggtattgtcatcttaacaatattgtcttacaacccgtgaacacagaatgtctttccacttatttccactctctttagttttttgcagcaatgttttgtgtataccaccatggttagatttatgcctgaataacgtattctttgatgtcattataaatagaatttttaaaatgttttcatagttctttacaactatatagaaata

SEQ ID NO: 587848 - DNA, 582 bp, Homo sapiens
gtctaacttctctcttgtgcactgacatccaactgttgaagagactgttctttcctcccttgactagacttggccaccttgttgaacagtcattgaccatatatgtgaggactaacttgtaggatctcaaatctgttctattgtatttgtctgaaagtctattggtcttattccagtaccacactctcttgattactgtagatttgtagtaggctgtgaaactgaaaaatgtaagttttccaatgttctttttcaagactsttttgtctgtcagatcctttgaatttttgtatgattttagaatgagtttctttgtttctgcaaaaatgcctttgggattttgatggtattgcattgaatctgtagattactttagatggtattgtcatcttaacaatattgtcttacaacccgtgaacacagaatgtctttccacttatttccactctctttagttttttgcagcaatgttttgtgtataccaccatggttagatttatgcctgaataacgtattctttgatgtcattataaatagaatttttaaaatgttttcatagttctttacaactatatagaaata

SEQ ID NO: 587849 - DNA, 628 bp, Homo sapiens
tgtcttacaacccgtgaacacagaatgtctttccacttatttccactctctttagttttttgcagcaatgttttgtgtataccaccatggttagatttatgcctgaataacgtattctttgatgtcattataaatrgaatttttaaaatgttttcatagttctttacaactatatagaaatatagctcatttgcctatgtttgtttgcatcctgcctcttttattagttataatcggttttgtgttttgtttggagctttatacctataagatcatgtgtagatataattttacacctattttttatttctaatttagatgccttttatttctttgtcttgcctaattgctctggctagaactgccagtgctacgttgaatacaagtggcaaatgcaccatccttttcttctacatgttaggaaaacagctttcagtgtttcatcattcatcatgatattaactgttgggtttttgtacatcccattgtcatgttgcagaagatcccttctatgcctagtttattgagtatttttattatagaagggtgttgtatttcatcaatgttttctctgcatcaattgaaataatcacgtgcttattcattttactgttacagcatattacac

SEQ ID NO: 587850 - DNA, 628 bp, Homo sapiens
tgtcttacaacccgtgaacacagaatgtctttccacttatttccactctctttagttttttgcagcaatgttttgtgtataccaccatggttagatttatgcctgaataacgtattctttgatgtcattataaatagaatttttaaaatgttttcatagttctttacaactatatagaaatatagctcatttgcctatgtttgtttgcatcctgcctcttttattagttataatcggttttgtgttttgtttggagctttatacctataagatcatgtgtagatataattttacacctattttttatttctaatttagatgccttttatttctttgtcttgcctaattgctctggctagaactgccagtgctacgttgaatacaagtggcaaatgcaccatccttttcttctasatgttaggaaaacagctttcagtgtttcatcattcatcatgatattaactgttgggtttttgtacatcccattgtcatgttgcagaagatcccttctatgcctagtttattgagtatttttattatagaagggtgttgtatttcatcaatgttttctctgcatcaattgaaataatcacgtgcttattcattttactgttacagcatattacac

SEQ ID NO: 587851 - DNA, 486 bp, Homo sapiens
tttaaaatgttttcatagttctttacaactatatagaaatatagctcatttgcctatgtttgtttgcatcctgcctcttttattagttataatcggttttgtgttttgtttggagctttatacctataagatcatgtgtagatataattttacacctattttttatttctaatttagatgccttttatttctttgtcttgcctaattgctctggctagaactgccagtgctacgttgaatacaagtggcaaatgcaccatccttttcttctacatgttaggaaaacagctttcagtgtttcatcattsatcatgatattaactgttgggtttttgtacatcccattgtcatgttgcagaagatcccttctatgcctagtttattgagtatttttattatagaagggtgttgtatttcatcaatgttttctctgcatcaattgaaataatcacgtgcttattcattttactgttacagcatattaca

SEQ ID NO: 587852 - DNA, 583 bp, Homo sapiens
caaccttctatttgattgatttatgctctaaytatgctctttattatttctttccttctgctagctttggatttagtcttccacctggattgattttgggagtgatattgatgtaacttcatggaaataatactagatagaaagttagcggatagattctctatctgatgagagtttggggcaagtcgagtaccaggttaccaagttttatttttttctctgacccaaaaaacaatttggcagccggtgagaaaccctcacagctctggatgtgagtttaggacactgcatttctaccattcaatttcttactacttttttgcacagggatcatggcacaagttgcagtttccaccctgcccatggaagatgaggagtctgttgaagatgattccgtggagagcaggatggtggtgacatttctcatatcagctctcgagtccacggtgagaccttctgttctaacatgatataattgggtagaactgggtggtagataaggttgatttgtttttgtagaacttataattttatgatttgtagttctaatgagtagatctttttctggaatagtagttatggt

SEQ ID NO: 587853 - DNA, 413 bp, Homo sapiens
gtttgggctaccttttggccactgtgaataatgctgctgttaatcgggtgtacaaatacctgtttgagtccctgctctcagttcttttgggtatataytcttaaagggtgttgatggatcatataattctatgcttcatatttttaaggagctgctaaaccattttccacagtgggctgtaccattttacattccaaaaagcaatgcatacagcttccaatttctctatagccttgctgacagttaatattttctgtttatgtattgtatttttatagtgtttgaaattaatctgaggctttttgctgataccaaaatattaggaaaggttttccaaaaataatactgcttattataaaggattttacgtgttacttgatgccctgtgatctgttttctaagtaagaagagga

SEQ ID NO: 587854 - DNA, 656 bp, Homo sapiens
tgatataattgggtagaactgggtggtagataaggttgatttgtttttgtagaacttataattttatgatttgtagttctaatgagtagatctttttctggaatagtagttatggtcaaacacttctaaccaaaagtgccatgttgtccagtctggtctcaaaatatggggctcaagagacctgcccaccttggcctcccaaaatactgggattacaggtgtaagcccctgaatctggccagatatttttctttttatggctgaataatactctgtgtatgtatatattacattttctttatctattcacctactgatgggcattaggtttgggctaccttttggccactgtgaataatgctgctgttaatcgggtgtacaaatacctgtttgagtccctgctctcagttcttttgggtatatackcttaaagggtgttgatggatcatataattctatgcttcatatttttaaggagctgctaaaccattttccacagtgggctgtaccattttacattccaaaaagcaatgcatacagcttccaatttctctatagccttgctgacagttaatattttctgtttatgtattgtatttttatagtgtttgaaattaatctgaggctttttgctgataccaaaatattaggaaagg

SEQ ID NO: 587855 - DNA, 413 bp, Homo sapiens
gtttgggctaccttttggccactgtgaataatgctgctgttaatcgggtgtacaaatacctgtttgagtccctgctctcagttcttttgggtatatactcttaaagggtgtkgatggatcatataattctatgcttcatatttttaaggagctgctaaaccattttccacagtgggctgtaccattttacattccaaaaagcaatgcatacagcttccaatttctctatagccttgctgacagttaatattttctgtttatgtattgtatttttatagtgtttgaaattaatctgaggctttttgctgataccaaaatattaggaaaggttttccaaaaataatactgcttattataaaggattttacgtgttacttgatgccctgtgatctgttttctaagtaagaagagga

SEQ ID NO: 587856 - DNA, 413 bp, Homo sapiens
gtttgggctaccttttggccactgtgaataatgctgctgttaatcgggtgtacaaatacctgtttgagtccctgctctcagttcttttgggtatatactcttaaagggtgttgatggatcatataattctatgcttcatatttttaaggagctgctaaaccattttccacagtgggctgtaccattttacattccaaaaagcaatgcatacagcttccaatttctctatagcmttgctgacagttaatattttctgtttatgtattgtatttttatagtgtttgaaattaatctgaggctttttgctgataccaaaatattaggaaaggttttccaaaaataatactgcttattataaaggattttacgtgttacttgatgccctgtgatctgttttctaagtaagaagagga

SEQ ID NO: 587857 - DNA, 416 bp, Homo sapiens
tttgagacagagtctcactctgtcatccaggctgaggtgcagtggtgtgatctctgctcactgcaacctcagcctcctgggttcaagtgattctcctgcctcagcctcccaagaasctgggactacaggcacatgccaccacacctggctaaatttttttatttttagtagagacagggtatcaccatgttggccaggctgctcttgaactcctgacttcaggtgatccacccaccttggcctcccaaagtgctggggttaaaggcatgagacactgcgcccgtccacctcctcttttacttgggagaaatgcacagattctgggtgccatgtgcatttttttggggagtgataattgatctaacttatggaaataatactagatagttagcggatggattctgtatctgatgaga

SEQ ID NO: 587858 - DNA, 416 bp, Homo sapiens
tttgagacagagtctcactctgtcatccaggctgaggtgcagtggtgtgatctctgctcactgcaacctcagcctcctgggttcaagtgattctcctgcctcagcctcccaagaagctgggactacaggcacatgccaccacacctggctaaatttttttwtttttagtagagacagggtatcaccatgttggccaggctgctcttgaactcctgacttcaggtgatccacccaccttggcctcccaaagtgctggggttaaaggcatgagacactgcgcccgtccacctcctcttttacttgggagaaatgcacagattctgggtgccatgtgcatttttttggggagtgataattgatctaacttatggaaataatactagatagttagcggatggattctgtatctgatgaga

SEQ ID NO: 587859 - DNA, 416 bp, Homo sapiens
tttgagacagagtctcactctgtcatccaggctgaggtgcagtggtgtgatctctgctcactgcaacctcagcctcctgggttcaagtgattctcctgcctcagcctcccaagaagctgggactacaggcacatgccaccacacctggctaaatttttttatttttagtagagacagggtatcaccatgttggccaggctgctcttgaactcctgacttcaggtgatccacccaccttggcctcccaaagtgctggggttaaaggcatgagacactgcgcccgtccacctcctcttttacttgggagaaatgcacagattctgggtgccatgtgcatttktttggggagtgataattgatctaacttatggaaataatactagatagttagcggatggattctgtatctgatgaga

SEQ ID NO: 587860 - DNA, 416 bp, Homo sapiens
tttgagacagagtctcactctgtcatccaggctgaggtgcagtggtgtgatctctgctcactgcaacctcagcctcctgggttcaagtgattctcctgcctcagcctcccaagaagctgggactacaggcacatgccaccacacctggctaaatttttttatttttagtagagacagggtatcaccatgttggccaggctgctcttgaactcctgacttcaggtgatccacccaccttggcctcccaaagtgctggggttaaaggcatgagacactgcgcccgtccacctcctcttttacttgggagaaatgcacagattctgggtgccatgtgcatttttttkgggagtgataattgatctaacttatggaaataatactagatagttagcggatggattctgtatctgatgaga

SEQ ID NO: 587861 - DNA, 607 bp, Homo sapiens
tcccagtctgtgcaaaattagatgtctaagagtaaagccgtgagttttactagcttgaggaataagagtacagagttccaggctgacagaaaagaagaactgggaaatttgaatgacatgggagaaatctcacacaactgaaagtcacagaggagaatgtcacagagtaaaaatctaaaatcagcacttaaacttcattcagatatatgatggctgctacatttcacattcataaaagagactccatagaatccagcagaaaacaacagctaaattgctagtacagagcagagatttcaaccattgcatatagctcaggagtgaaagtttggtgtttgactacagaaagaagactaatgttagaaaagagtcactcttcaaaggaaaataaaagagcctatctctacaaaatatcatacacataatctaacatataatttaacctgcctagacatagaaccaggaaaatatgacacataacaaaaaagtaaacaatggattaagacattgaaatggcccacatgctggaattagaagatragaaatttaaaataagctattataagcatattcaaggatttaaggaatagatggtcgtaagagggaa

SEQ ID NO: 587862 - DNA, 422 bp, Homo sapiens
acataccagtaaatgaaagatggcagaaaaaactatcagtgcacttaaaaacagatcaagaacaatttcccaatacagytaatacaagggagaaaaataatcaaaatatgaccagtctagcactcatattattggactcctagaaagagtagagaagaaaatgagacaaaaaaaggtatttgaaaaagtaaagaccaaaagttttcctaattgtcagcatataacaacttacaggtttaagaaactcaaagaacagaataaaaatatagagaaccaaatgtagacataccatagtcaaatcactgggcaaaaaaagagtaaatcttgaaagtagctaaagggagggagaaaataatttacatacgtggaaacaaatagacagatgacctgtcatcagaaatgacactttaaaaagcaatgaa

SEQ ID NO: 587863 - DNA, 422 bp, Homo sapiens
acataccagtaaatgaaagatggcagaaaaaactatcagtgcacttaaaaacagatcaagaacaatttcccaatacagttaatacaagggagaaaaataatcaaaatatgaccagtctagcactcatattattggactcctagaaagagtagagaagaaaatgagacaraaaaaggtatttgaaaaagtaaagaccaaaagttttcctaattgtcagcatataacaacttacaggtttaagaaactcaaagaacagaataaaaatatagagaaccaaatgtagacataccatagtcaaatcactgggcaaaaaaagagtaaatcttgaaagtagctaaagggagggagaaaataatttacatacgtggaaacaaatagacagatgacctgtcatcagaaatgacactttaaaaagcaatgaa

SEQ ID NO: 587864 - DNA, 538 bp, Homo sapiens
ggtaaaggaagggccagagtggttggagagatagtcacagtctatggtctgcacaggatggaggaggccagggaacaggcagggtgggcagcttggtttcagggagagacaggtgcatgctgggaggtcagaccctatgagggttgtgggggcgtcaggtggtgtgggctccaggtgcaccctcagcgcactgggcaggtcttggcccaggctccttggactttggccgggtgatgtggtcacttgctgggagactgttgtcaggtgctggccacccaccctgggtagcactgtcccatctcaggactggacttcctcagatactgtagacggcacagcctcccagcccatggaggggcagccccttggtgcagcctgagctccccatgggcctggagcatcccctgccagccctgcactccctcttctcccwggtcccgcttttccagggtcagccagtggggaggccccgtcctcacttccctatgtgtctcctgggctgaaacttgcagtgcactgggacagggatgaggcttcc

SEQ ID NO: 587865 - DNA, 579 bp, Homo sapiens
acacaggagaaaattaacatggccaaaagttagttctgtgagaaagaaagaaaacgcaaattataaatatcagggattaatgagattgtacagttgtagacacaagagacattmacaagataatggaatattgtgaaacattttatactaattttcattacttggatgaaagggtgaattccttgaaaaaaacttataaaaaaattcacaagattaaatggaatatatgaagtaattgacatttattaaagtaattaaattgtcaaatacctgcacataaagacataaaactaaagaaataaaaaaataagcaaactccacatccaaagagttttgctggtgaattcttttaaacgttttaaaaaaataaaatttttaaattatttcagaagaaggggaaaattccaaacttgttttatgagtcagaatcctgatagcaaaactacaaaacccaggaatgcaaaattgatttcaacttaaggggccatcaccattctaatctgtgattctaatgaatttggctatcttagatactttatacaagtggaatcatacagtttgtccttctgtgactgattt

SEQ ID NO: 587866 - DNA, 579 bp, Homo sapiens
acacaggagaaaattaacatggccaaaagttagttctgtgagaaagaaagaaaacgcaaattataaatatcagggattaatgagattgtacagttgtagacacaagagacattaacaagataatggaatattgtgaaacattttatactaattttcattacttggatgaaagggtgaattccttgaaaaaaacttataaaaaaattcacaagattaaatggaatatatgaagtaattgacatttattaaagtaattaaattgtcaaatacctgcacataaagacataaaactaaagaaataaaaaaataagcaaactccacatccaaagagttttgctggtgaattctttyaaacgttttaaaaaaataaaatttttaaattatttcagaagaaggggaaaattccaaacttgttttatgagtcagaatcctgatagcaaaactacaaaacccaggaatgcaaaattgatttcaacttaaggggccatcaccattctaatctgtgattctaatgaatttggctatcttagatactttatacaagtggaatcatacagtttgtccttctgtgactgattt

SEQ ID NO: 587867 - DNA, 579 bp, Homo sapiens
acacaggagaaaattaacatggccaaaagttagttctgtgagaaagaaagaaaacgcaaattataaatatcagggattaatgagattgtacagttgtagacacaagagacattaacaagataatggaatattgtgaaacattttatactaattttcattacttggatgaaagggtgaattccttgaaaaaaacttataaaaaaattcacaagattaaatggaatatatgaagtaattgacatttattaaagtaattaaattgtcaaatacctgcacataaagacataaaactaaagaaataaaaaaataagcaaactccacatccaaagagttttgctggtgaattcttttaaacgttttaaaaaaataaaatttttaaattatttcagaagaaggggaaaattccaaacttgttttatgagtcagaatcctgatagcaaaactacaaaacccaggaatgsaaaattgatttcaacttaaggggccatcaccattctaatctgtgattctaatgaatttggctatcttagatactttatacaagtggaatcatacagtttgtccttctgtgactgattt

SEQ ID NO: 587868 - DNA, 391 bp, Homo sapiens
aatacctgcacataaagacataaaactaaagaaataaaaaaataagcaaactccacatccaaagagttttgctggtgaattcttttaaacgttttaaaaaaataaaatttttaaattatttcagaagaaggggaaaattccaaacttgttttatgagtcagaatcctgatagcaaaactacaaaacccaggaatgcaaaattgatttcaacttaaggggccatcaccattctaatctgtgattctaatgaatttggctatcttagatactttatacaagtggaatcatacagtttgtccttctgtgactgatttactttacttagcattaatgtcctctaggttcatccatgttgcatattgccggrttttcttgttttaaagctgagtaa

SEQ ID NO: 587869 - DNA, 356 bp, Homo sapiens
actctgtcagtgagctcttttccagtcagtccaggaaggacctggacccagccatggacctgttagtgctgtctcagggacaccagaccaacatcctggacatcatccacatacacaaggaagctcttaccaaagtcatggagagcaggcaacatgtggcmgaagggaagacagaggtgcagaggctgatgacgtcagaatcacaggaacaggatttctttggccactttggctgaaattcaccacttccatccaattccagtgagagacatggactcacagatgcaggatttcttgcaacaagagatactactttttcaaaaagtcacccaggaattgatagtgttgaacgactc

SEQ ID NO: 587870 - DNA, 588 bp, Homo sapiens
gaacagtcccaggttgtccattgggcccttcacaatgcaaagtatagctactctgatacacttctggagctttagcagtttccrctgtgttaaattgagtgggctgaattggccacatggacggccagtgctgtagagaaataattgaaatgtccactcctaccaaaaaaaaatagtatctaccaaacctttaaagttctttccctggatagttatttcacaggtaggatgtttatcagtaatttgatttacccaataagctgccttgccttttttatttgtgcttccaaatcctccagttcatttaatttcactttttcccattcccacatacggctctctcaggagctgtgctatgcgcactcctggctgtgctttccagggaacagaactaaatatcacaatttgaatttcctcattgcaatctgaatcaatgactccagtgtgtatttgtaccccttttaaacttaaactagaccttcctaaaagtaatcccattgtccctgctcgcaacggtccacagactcctgttgggaccttttgcggggttccccaggcagaaggctcacagcttttgtgcagcataga

SEQ ID NO: 587871 - DNA, 588 bp, Homo sapiens
gaacagtcccaggttgtccattgggcccttcacaatgcaaagtatagctactctgatacacttctggagctttagcagtttccgctgtgttaaattgagtgggctgaattggccacatggacggccagtgctgtagagaaataattgaaatgtccactcctaccaaaaaaaaatagtatctaccaaacctttaaagttctttccctggatagttatttcacaggtaggatgtttatcagtaatttgatttacccaataagctgccttgccttttttatttgtgcttccaaatcctccagttcatttaatttcactttttcccattcccacatacggctcwctcaggagctgtgctatgcgcactcctggctgtgctttccagggaacagaactaaatatcacaatttgaatttcctcattgcaatctgaatcaatgactccagtgtgtatttgtaccccttttaaacttaaactagaccttcctaaaagtaatcccattgtccctgctcgcaacggtccacagactcctgttgggaccttttgcggggttccccaggcagaaggctcacagcttttgtgcagcataga

SEQ ID NO: 587872 - DNA, 588 bp, Homo sapiens
gaacagtcccaggttgtccattgggcccttcacaatgcaaagtatagctactctgatacacttctggagctttagcagtttccgctgtgttaaattgagtgggctgaattggccacatggacggccagtgctgtagagaaataattgaaatgtccactcctaccaaaaaaaaatagtatctaccaaacctttaaagttctttccctggatagttatttcacaggtaggatgtttatcagtaatttgatttacccaataagctgccttgccttttttatttgtgcttccaaatcctccagttcatttaatttcactttttcccattcccacatacggctctctcaggagctgtgctatgcgcactcctggctgtgctttccagggaacagaactaaatatcacaatttgaatttcctcattgyaatctgaatcaatgactccagtgtgtatttgtaccccttttaaacttaaactagaccttcctaaaagtaatcccattgtccctgctcgcaacggtccacagactcctgttgggaccttttgcggggttccccaggcagaaggctcacagcttttgtgcagcataga

SEQ ID NO: 587873 - DNA, 594 bp, Homo sapiens
ccaacccccaaaagttggtctgcagttatattaatttgaggttgggcccaggcattgtgagcagcctgaatggaagcttcatctgcctactaagttttaaattgtaagaactgagcaggagttagacaagctagagtaaaagtgtcccagtcagtaggaatcatccgactggaaacagcaacattctttaacagtcccatttcaaaaggagaacctggtccatactgatttatagcttgtttaatttttttgagtgatttaaaaggaaaaggcccaaatgtagctataatatttccctgttgatctggggggtgtattcaaacagggaactgccaagcctctaaatcccacttttgtctagcttgctgtattcctgyctgaatagaactaagagcagtcgctcaaggcgctgctcgaacagtcaccagggcaactacttttcacccagtgtcctccagaaaagaaagatctggagggtcgttttcttcaaaatagtaatgagggtgtgcagaaggataaggatgaacctctccctccttttctgctttagctttaggtgacaaataaacctggtctgtaacctctactgttact

SEQ ID NO: 587874 - DNA, 587 bp, Homo sapiens
tggggggtgtattcaaacagggaactgccaagcctctaaatcccacttttgtctagcttgctgtattcctgtctgaatagaactaagagcagtcgctcaaggcgctgctcgaacagtcaccagggcaactacttttcacccagtgtcctccagaaaagaaagatctggagggtcgttttcttcaaaatagtaatgagggtgtgcagaaggatarggatgaacctctccctccttttctgctttagctttaggtgacaaataaacctggtctgtaacctctactgttactttgttatactctccttcctcctcatcatcagtgtgaaaaagttccaaggtagaacgaaccacagcccacacttgtcctattgctaccctgatgcttccgagctccccttcttactcaccacggggattgctttaagagtactcgggtgtcctccagctagttccacattctccaatcgttgctccagcgatcctttgacctgtatttgagcccccatgaatgggcaccacttgctgagaccaggtcggttggagagaccctaacccagcagcactagaggaattaaagactcacacac

SEQ ID NO: 587875 - DNA, 473 bp, Homo sapiens
tatgcaagaagctgtattacaacatcctgagctgttttgatcatttacggctttatacacagcctcttggagctgagcaataaaattaatatatggttctttaggtccttgtcagacagaactgaaataaggayacttttcccctgtaacatttatccttttctagcatgtaagcacatgaagcacagctgaacaatggcaacatcttccattagtgcttgattctctaatcaaccccagttagggccaactcatattaactgatcaaagaaaacaggcacaggtggatgcacttgtgtgtgttcttttgcctgagtttgatcttcatcagcctaccaagttttaaactgcaagtactgagatggagtgagaacaggttttgtcaaagtatccttattatatggtagtaatctattatcaagagccatatttttaaataaagtttgcacaaaaagagagttcaatccatattg

SEQ ID NO: 587876 - DNA, 473 bp, Homo sapiens
tatgcaagaagctgtattacaacatcctgagctgttttgatcatttacggctttatacacagcctcttggagctgagcaataaaattaatatatggttctttaggtccttgtcagacagaactgaaataaggacacttttcccctgtaacatttatccttttctagcatgtaagcacatgaagcacagctgaacaatggcaacatcttccattagtgcttgattctctaatcaaccccagttagggccaactcatattaactgatcaaagaaaacaggcacaggtggatgcacttgtgtgtkttcttttgcctgagtttgatcttcatcagcctaccaagttttaaactgcaagtactgagatggagtgagaacaggttttgtcaaagtatccttattatatggtagtaatctattatcaagagccatatttttaaataaagtttgcacaaaaagagagttcaatccatattg

SEQ ID NO: 587877 - DNA, 337 bp, Homo sapiens
caatggcaacatcttccattagtgcttgattctctaatcaaccccagttagggccaactcatattaactgatcaaagaaaacaggcacaggtggatgcacttgtgtgtgttcttttgcctgagtttgatcttcatcagcctaccaagttttaaactgcaagtactgagatggagtgagaacaggttttgtcaaagtatcctwattatatggtagtaatctattatcaagagccatatttttaaataaagtttgcacaaaaagagagttcaatccatattgactaatggcttgcttaaattctttagtaacttaaaagagaaaacagcctaattagct

SEQ ID NO: 587878 - DNA, 337 bp, Homo sapiens
caatggcaacatcttccattagtgcttgattctctaatcaaccccagttagggccaactcatattaactgatcaaagaaaacaggcacaggtggatgcacttgtgtgtgttcttttgcctgagtttgatcttcatcagcctaccaagttttaaactgcaagtactgagatggagtgagaacaggttttgtcaaagtatccttattatatggtaktaatctattatcaagagccatatttttaaataaagtttgcacaaaaagagagttcaatccatattgactaatggcttgcttaaattctttagtaacttaaaagagaaaacagcctaattagct

SEQ ID NO: 587879 - DNA, 337 bp, Homo sapiens
caatggcaacatcttccattagtgcttgattctctaatcaaccccagttagggccaactcatattaactgatcaaagaaaacaggcacaggtggatgcacttgtgtgtgttcttttgcctgagtttgatcttcatcagcctaccaagttttaaactgcaagtactgagatggagtgagaacaggttttgtcaaagtatccttattatatggtagtaatctattatcaagagccatatttttaaataaagwttgcacaaaaagagagttcaatccatattgactaatggcttgcttaaattctttagtaacttaaaagagaaaacagcctaattagct

SEQ ID NO: 587880 - DNA, 473 bp, Homo sapiens
tatgcaagaagctgtattacaacatcctgagctgttttgatcatttacggctttatacacagcctcttggagctgagcaataaaattaatatatggttctttaggtccttgtcagacagaactgaaataaggacacttttcccctgtaacatttatccttttctagcatgtaagcacatgaagcacagctgaacaatggcaacatcttccattagtgcttgattctctaatcaaccccagttagggccaactcatattaactgatcaaagaaaacaggcacaggtggatgcacttgtgtgtgttcttttgcctgagtttgatcttcatcagcctaccaagttttaaactgcaagtactgagatggagtgagaacaggttttgtcaaagtatccttattatatggtagtaatctattatcaagagccatatttttaaataaagtttgcamaaaaagagagttcaatccatattg

SEQ ID NO: 587881 - DNA, 337 bp, Homo sapiens
caatggcaacatcttccattagtgcttgattctctaatcaaccccagttagggccaactcatattaactgatcaaagaaaacaggcacaggtggatgcacttgtgtgtgttcttttgcctgagtttgatcttcatcagcctaccaagttttaaactgcaagtactgagatggagtgagaacaggttttgtcaaagtatccttattatatggtagtaatctattatcaagagccatatttttaaataaagtttgcacaaaaagagagttcartccatattgactaatggcttgcttaaattctttagtaacttaaaagagaaaacagcctaattagct

SEQ ID NO: 587882 - DNA, 527 bp, Homo sapiens
ttggggtgatcagacccaacactaggtcatgggggtgatgaagtccggcagagtcaaaggaatgagaaaaagacagtttgagagagaaagtgggaccaggagaccatcacgagtgtggagtctgcaaagtccccaagctctgggagcccacgctatttgttggtgctcaaacaaacaggtggtgaggatttaggggttgaaaggaaacggtgtatcaagtgaatgagaaacatatggccctgcctcascttctcttccaacactcagcttttctcccaacacattccccttatgaacaggaataaaatagggatggctgttctcaccactcctgtttaacaagtcctagccagagcaatcaggcaagagaaagcgataaaaggcatccaaataagaaatgaagtcaaattatctctcttcactgatgatatgattctacacctagaaatccctaaagactgtaccaaaaggctcctagaactgataaaaaaaaaacttcagcaaactttcaggattaaaaaaaatca

SEQ ID NO: 587883 - DNA, 527 bp, Homo sapiens
ttggggtgatcagacccaacactaggtcatgggggtgatgaagtccggcagagtcaaaggaatgagaaaaagacagtttgagagagaaagtgggaccaggagaccatcacgagtgtggagtctgcaaagtccccaagctctgggagcccacgctatttgttggtgctcaaacaaacaggtggtgaggatttaggggttgaaaggaaacggtgtatcaagtgaatgagaaacatatggccctgcctcaccttctcttccaacactcagcttttctcccaacacattccccttatgaacaggaataaaatagggatggctgttctcaccactcctgtttaacaagtcctagccagagcaatcaggcaagagaaagcgataaaaggcatccaaataagaaatgaagtcaaattatctctcttcactgatgatatgattctacacctagaaatccctaaagactgtrccaaaaggctcctagaactgataaaaaaaaaacttcagcaaactttcaggattaaaaaaaatca

SEQ ID NO: 587884 - DNA, 278 bp, Homo sapiens
acctacagccatcagctttcccaggataacacaaagagagccaagtggcacctgcacattacactgtggaagaaaaacccaagctcaagaaaccccaacttgtattatgggaagttcacttggctgtacccttcccaagagggagaaattatctgcattatactagacagtaaataaacttttcctttgttccagaaggaggtactggttttctattccaargctgttttctatacaaacatgcttgaaaacaatcatttggaacaagaaagtcagcg

SEQ ID NO: 587885 - DNA, 278 bp, Homo sapiens
acctacagccatcagctttcccaggataacacaaagagagccaagtggcacctgcacattacactgtggaagaaaaacccaagctcaagaaaccccaacttgtattatgggaagttcacttggctgtacccttcccaagagggagaaattatctgcattatactagacagtaaataaacttttcctttgttccagaaggaggtactggttttctattccaaagctgttttctatacaaacatkcttgaaaacaatcatttggaacaagaaagtcagcg

SEQ ID NO: 587886 - DNA, 410 bp, Homo sapiens
gggtacgctggtatttggttccatgaataacttctttactggttatttgtgagatttgggtgcacctatcacccgaacagtgtacactgcaccttatttgttatcttttatccctcaccccccaccctattaaataatagacaaaaaaataatgggtttagaataaatgagttcaaatgaattgtcaaacktatgtgggaaaagtggaatcagtttgtgagaaaaagcaaaaaactcaacagaaatgctgataaagcatcatcccttcatggctagagctgccaggacactagaacaccaaaatcagctagggaaattttgtagaagtcccagatgtactaaatgttctgtgaatacacagagatataattataactgttacctgcatgtagagtaaagatgagaaggca

SEQ ID NO: 587887 - DNA, 513 bp, Homo sapiens
acaccaaaatcagctagggaaattttgtagaagtcccagatgtactaaatgttctgtgaatacacagagatataattataactgttacctgcatgtagagtaaagatgagaaggcattggtcatggtggcagctacctcaggagttacaaagcagacgtggttccaggacagtatatgtcagggcaaagctgtcctcggaggctattaggagytggttacggcacagacattgtaagtcagatggtctcattactttcaatgacaaaaccaaaattacttttgcatcagcctaatacaacggcctggcaagagcacagaaaaagtccctgtggctgttaggtggggacctctgatgcagcacaattccttcattcccttctccaaaacctccctcttccaattccactgaagagagaatctgatggaagtcctgtgtaagcaggctcagatatatctaccactatagacagtagaggtgattcataaatccaagcctatcaaatacatcataa

SEQ ID NO: 587888 - DNA, 513 bp, Homo sapiens
acaccaaaatcagctagggaaattttgtagaagtcccagatgtactaaatgttctgtgaatacacagagatataattataactgttacctgcatgtagagtaaagatgagaaggcattggtcatggtggcagctacctcaggagttacaaagcagacgtggttccaggacagtatatgtcagggcaaagctgtcctcggaggctattaggagttggttacggcacagacattgtaagtcagatggtctcattactttcaatgacaaaaccaaaattacttttgcatcagcctaatacaacggcctggcaagagcacagaaaaagkccctgtggctgttaggtggggacctctgatgcagcacaattccttcattcccttctccaaaacctccctcttccaattccactgaagagagaatctgatggaagtcctgtgtaagcaggctcagatatatctaccactatagacagtagaggtgattcataaatccaagcctatcaaatacatcataa

SEQ ID NO: 587889 - DNA, 546 bp, Homo sapiens
gttgaactctgcattgagtctgagcagttcttccagaaaagttaaggcatcatggctttggaaatttggctagctttttctcattcagagagttatttagtcttgtataagttgggatttctttctactaaatataacagaataccagattttggtatagatttggctgttcagcaatttcacggacaagacctctgttaaaaatctcctggcttgcgctgggtgtggtggctcaggcctaatcccagcactttgggcccaggaggacaagaccagtcaatagtgmgaaccccatctcttaaaaaaattttttttgttttgttttaggctggccgtggtggctcacacctgtaatcccacactttgggaggccaaggcaggtggatcccctgaggtcaggagttcgagaccagcctggccaacatgttgaaaccctgtctctactaaaaatacaaaaattagccaggcatggtggtgggtgcctgtaatcccagctacttgggaggctgctgtgggagaatcatttgaacccgggaggtggaggtt

SEQ ID NO: 587890 - DNA, 546 bp, Homo sapiens
gttgaactctgcattgagtctgagcagttcttccagaaaagttaaggcatcatggctttggaaatttggctagctttttctcattcagagagttatttagtcttgtataagttgggatttctttctactaaatataacagaataccagattttggtatagatttggctgttcagcaatttcacggacaagacctctgttaaaaatctcctggcttgcgctgggtgtggtggctcaggcctaatcccagcactttgggcccaggaggacaagaccagtcaatagtgagaaccccatctcttaaaaaaawtttttttgttttgttttaggctggccgtggtggctcacacctgtaatcccacactttgggaggccaaggcaggtggatcccctgaggtcaggagttcgagaccagcctggccaacatgttgaaaccctgtctctactaaaaatacaaaaattagccaggcatggtggtgggtgcctgtaatcccagctacttgggaggctgctgtgggagaatcatttgaacccgggaggtggaggtt

SEQ ID NO: 587891 - DNA, 666 bp, Homo sapiens
tccgagtagctaggactacaggcatgtgccaccatgcccagctaatttttgtattttaggtagagaaggggtttctccatgttggtcaggctagtctccaaattcwgacttcaagtcatccacccacctcagcctttcaaagtgctgggattacaggtgtgagccactgtgcccggccaaaatttgtattacattttttagaaaagtgtggaagatacgacaaatgttttgttgtatccagatcatgacttctttagtactcgcatcaatccaaaaaatggtgtaggttggtatgtgagaataaataaatagaggcacattatgtgctagtatgactatttttttgttgttataatcttccataaaaattatcaaaacatgagaacatattcagttctgtgatttccaagtgcatgtgtaagtctgttttttgtttgttttttgtttttgtgggttttttttcttttggcatgctgcttaatacattctgatgcttggctgatccatttaggccaaatataaacagaaaaatagcaaattggtcactgaattgttgctgtatcttggaatgttatagaattggcatttcttaactctgctgttatacagctaaattatgttctaacaatatagcatgatttattcatacaacttattttgatggac

SEQ ID NO: 587892 - DNA, 534 bp, Homo sapiens
tagctgggactacaggtacatgccaccatgccctgctaatgttttgtatttttagcggagatggggtttcattgtgttagccatgatggtcttgatctcctgacctcatgatctgcctccatctcygaaagtgctgggattacaggcattagccaccgtgccaggccaaaagttagcctcttagatcctgatggaaacgatccagtagagggaaaagttatgatccaggaaagtaaaatgataatgacagaggaactgaccttgaataaataagtaagcacttagtacacaaggagagagcttggcctttaacaacagcaaagacagttcatctttgctaacagaagtgaatatagaaggatacaaccattggtaagtgtgctgatatggtgagtggagcttgagattttctcctgattgctatttcttttttagatgaagttgatataatataaaagaaatcatcttaaacaattcagtggcatttagtaaatttaatttggtgcaataatcacctctacttggaaccctaac

SEQ ID NO: 587893 - DNA, 534 bp, Homo sapiens
ttttttaattgagcaatctatgttcaggtattttatgataaaaagaattatatcaatctaagggacaaacacataaaaaattttaatcagatgttctggaggtaatacaatgaacttattactatgtaagtgataagatttacaatcccacttttatgatgtctgtgtctgatttacataatagactattaaagaggtttgggccacactgaacaatacgaaagccattagtccacaagtggctattgagcatttgaaattgcatggtctgatttataatgtgcagtaagtgtatgcacactggattttgtaacctagtgcaaaaaatagaatgtaaatatgctcctaataattgcatattgattacttattaaaatgataagacttggctaaatgattaaaataaacatactaaaagtaattaggctgaggtgggtggatyacgaggccaggagatagagaccatcctgagtaacacggtgaaacccggtctctactaaaaatacaaaaaattagccgggcgtggtggcgggc

SEQ ID NO: 587894 - DNA, 596 bp, Homo sapiens
cattgagccactgcacacagccaaattctaataagtctttaaattaataattttgttagcagcctgatttagagccttgtaagatgtgaaaacattatttaatttctaatttttctaaaagcttttaaaattaggaatttcaacgcctttaggaaactcttgaattttctgattgtttttattatttacygatgattcaacttttcctcctcattctctaattcttcagcactaattgagtattcgctgtgctgtagatgcttcttagagaatacaaaactaagtagaagataccctgggccatcacaaagcttttaatataattgagaacctgtttaaacaattaagtataattaaataagtgtaaaatagatgtacggggaaaatgctgtggggatcaaaggaagaagcaattaattagaaatgaggatattagggaaagttccacatcgctgttgtcatttgggttggaatttgaagcatgagaatctattttctatagtactaatagggagttgtgatgggcttgcagcaatattctgggccaaaggaacagtgagaaaaaaccaaaagtgtggggaaaaaagtgagaatac

SEQ ID NO: 587895 - DNA, 434 bp, Homo sapiens
cctccctgtctctctcttgctcctgctttcaccatgtgatgtgcctgctccccttttgccttcygccatgattggaggcttcctgagtcctccccagaagcagatgctgactgctatgctgcctgtacagcctgcagaaatgtgagacaattaaacctcttttcttacaaattacctagcctacggtatttctttacagcaatacaagaacggcctcacataagacccctgtaaactgtctacaaaacagtttccctggatgtcccacctatatccccagttccacaagccctcagcttagctcaccttttcccacagacttggttttatttgaaatgccataccatgcaagcattctcatcagaaaactggggactttcccaagactgcttcttcatctctcacatttaattggtgaccaaatccagttgatt

SEQ ID NO: 587896 - DNA, 563 bp, Homo sapiens
atgcctctggctttgttctttttgcttakggttgctttggctatttgtgctcttttttggttccatatgaattttatagttttttatagttatgtgaaaagtgacattggcagtttgatagaaatagaattgaatctgtaaatggctttgggaagtatggccattttaacactattgattcttctgattcacgagcatgaaatatttgtccatttatttgtgtcatctctgatttttttcagcagtgttttgtagttcttgtagagatctttcacctccttggttagctgtattcctaggtatttaattttcttcatggctattataaatggaattgtggtcttaatttggctcttgggtagaacattattggtgtatagaaatgctgctgacttttgtatattgattttgtatcctaagactttactgaagtcatttgtcagttctaagagcttttgggtgaagtttttagggttttctaagtatggaaccatatcgttaacaaagagacatagtttgacttctttccctatttggatgccttttatttctttctcttgccc

SEQ ID NO: 587897 - DNA, 372 bp, Homo sapiens
gaattctaatttctgattggcttcacataacattttaaaatttttatggaaatttgtatggtttcatttctggctctatgctgaaatttcacaatgctgagccctggtgtgagtcttctttcatccattgtgctgaatacccacttgatggaccccttaatcgtggtaaatgatcttgcatttgatctttgatgtctttttctcttgcctctattctttcgttttgaatatckatataaatattgaatctcctggactgattccccaaattacctatgctctatttcattgttttgttcttcccccttttctatcttttttatgatttgttttactttctggcatatttccaattctttgtcattcaaccat

SEQ ID NO: 587898 - DNA, 511 bp, Homo sapiens
ctctgacttcctgtaaaattgttagaataaagaaaatgaaaaaataaatgtatacacattttctaatatctgaaatgattatgactatgtactcataatgtmtatatgtttatattgagtgtatatgagtacatttacagatatatattatgaggatatatgtatatatacatatatgtatatatcctcatagatacatatatatcatatgagtacatatacagatatatattatgaggatatatgtgtatacatgatagacatatttatacatatataaatgaggatatatacatatatgtatatacacatatattctcataatatatatgtatatatgtactcatatatgctcatatatatacacaatatatgtcactgttatcaacatgaaaaaattgggtgtctgtcttttttatctgaaactgtacataatttttacccatgtcttttcaaccttaatttaaaaatgtgtgttggtaatacaagagtgtatttaaaaatatgagtg

SEQ ID NO: 587899 - DNA, 545 bp, Homo sapiens
gtaaagctcataccaagaaatactaacaggtttaagggagatattacattacattaaaggatatgatgcactaagaggataaaacaacacttaatgtgtttgtacctaagagtagagctttgaaacacataaagcaaaaaaaaaaaaaaaaatgacagaatgaaaaaaatacagaaaatcacaactataattgaacacttcaatagttctctctaataatcaataaagacaggaataaaacatcagtaaggacagaggagacctgaaagactctaaaacgtacttaacctagctgacatttatacagcactccccccartaatagcagaatacatgttctctttaggtgcacatggaaccctgaccaaaacagaacattttctccggtataaaacaaatcttaacaaatgtaaaagactggaattgtcaaatttgtgttttatggtcacaaaagaatcaagctataaataacagaaagatatctgaaaaaatcaaaatatgtggaaattaaaaatatatttctacataatcaagggataaaatag

SEQ ID NO: 587900 - DNA, 519 bp, Homo sapiens
aactgcaaaggttattaggtatctgatagaattatctgaaatcatgttgcataacttgcccaatgagaaaactgtcactgttgctactatccctgtgtaaccctagatgcatgcaattgttgctagtcattgttccctaccaataccatttctgattcagaaacggaaccttaaaatcaataagaaatggctgttcctgmcactagtgccaaaaaaaaaaaaaaaaaaaaaaggaagcttcaggcagaactggttttctcacattgctcttttctggttttctcacattgctcttttctggttggccaaaaatacggtatgtcccttctggttctttggctaccccatatcaataaacactcatattccatactcaaacctttaaaatatgtaaaatgctatttgttgatgcaatacaactatcatttaaaatgaaaatgaatacatgatcacaatatcctcaaaagagacaacccaaagtctcctaaattaattcatttgactgtaagtctggcctct

SEQ ID NO: 587901 - DNA, 454 bp, Homo sapiens
aaaaaaaaaaaaagagttaacatcagcattcagcattttctgtttcttagtttgtctagtccaactatatgctaaggacctgggaaaaggaccgtaggatgcgtccattatcatactgagctgtctgcaagactgatttgtatctgaactccatttatctgtgactagtttacaatagtaactttctggattcctagggtttaacatttacttaatgtgcaacagttgcctaaagatctaggcatttccctacccctaatggcctcaggtgcccttgggaaaattaggaagaggagttatggaatgtactacaggtagctaacctccctttcatttaagaagctctgggtctgtgaactaactcagacctaagyattatgtgaaaggctgtgtctctattttggtgactcacgtcaggcctgtttaacagatccagaggtttttgagttataca

SEQ ID NO: 587902 - DNA, 526 bp, Homo sapiens
ttcatatttaaagtatactttggctagatataaaaaaatagattgacagattttttttccagtatctaaacattgtgctccactctctattcactgcaatgtttccgacaagaaatctgctgtcaccatgattgttgctcccctctgcttagcatgctcccctctgctctccctcccacttccctccctccagctgttttgatgatttcctttttatcactgcttttgggccatttgataatagtgtatcatggtgtagttttcttcatatttcgtatgtktttgtggttagttggaattatcggatctgtgagtttatagttttcactaaatttagaaactttccattatttcttcacgtacattttttctgttcctatcacccactcactgactttgaggttaaggtaagcaatgatttaggtggaaatctaccattactttgtctggcccgttagttctgacctagaaccccacccatacttttgtaaattaaaatgtttctttttttccactgagaaatcat

SEQ ID NO: 587903 - DNA, 526 bp, Homo sapiens
ttcatatttaaagtatactttggctagatataaaaaaatagattgacagattttttttccagtatctaaacattgtgctccactctctattcactgcaatgtttccgacaagaaatctgctgtcaccatgattgttgctcccctctgcttagcatgctcccctctgctctccctcccacttccctccctccagctgttttgatgatttcctttttatcactgcttttgggccatttgataatagtgtatcatggtgtagttttcttcatatttcgtatgtttttgtggttagttggaattatyggatctgtgagtttatagttttcactaaatttagaaactttccattatttcttcacgtacattttttctgttcctatcacccactcactgactttgaggttaaggtaagcaatgatttaggtggaaatctaccattactttgtctggcccgttagttctgacctagaaccccacccatacttttgtaaattaaaatgtttctttttttccactgagaaatcat

SEQ ID NO: 587904 - DNA, 526 bp, Homo sapiens
ttcatatttaaagtatactttggctagatataaaaaaatagattgacagattttttttccagtatctaaacattgtgctccactctctattcactgcaatgtttccgacaagaaatctgctgtcaccatgattgttgctcccctctgcttagcatgctcccctctgctctccctcccacttccctccctccagctgttttgatgatttcctttttatcactgcttttgggccatttgataatagtgtatcatggtgtagttttcttcatatttcgtatgtttttgtggttagttggaattatcggatctgtgagtttatagttttcactaaatttagaaactttccattatttcttcacrtacattttttctgttcctatcacccactcactgactttgaggttaaggtaagcaatgatttaggtggaaatctaccattactttgtctggcccgttagttctgacctagaaccccacccatacttttgtaaattaaaatgtttctttttttccactgagaaatcat

SEQ ID NO: 587905 - DNA, 526 bp, Homo sapiens
ttcatatttaaagtatactttggctagatataaaaaaatagattgacagattttttttccagtatctaaacattgtgctccactctctattcactgcaatgtttccgacaagaaatctgctgtcaccatgattgttgctcccctctgcttagcatgctcccctctgctctccctcccacttccctccctccagctgttttgatgatttcctttttatcactgcttttgggccatttgataatagtgtatcatggtgtagttttcttcatatttcgtatgtttttgtggttagttggaattatcggatctgtgagtttatagttttcactaaatttagaaactttccattatttcttcacgtacattttttctgttcctatcacccactcactgactttgaggttaaggtaagcaatgatttrggtggaaatctaccattactttgtctggcccgttagttctgacctagaaccccacccatacttttgtaaattaaaatgtttctttttttccactgagaaatcat

SEQ ID NO: 587906 - DNA, 493 bp, Homo sapiens
gtatctcattatggttttgatttgcatttctctaatgatcaatgatgttaagcayttttctcacgtgcttgttggccacattgttgtcttttttttttttttttgacggtgtctcgctctgtcgcccaggctggagtgcagtggtgtgatctcagctcactgcaagctctgccttccagtttcatgccattctcctgcctcagctgggactgcaggtgcccgccaccacgcctggctaattttttgtatttttagtaggggcggggtttcaccgtgttagccaggatggtttcgatctgacctcgtgatccgcctgccttggcctcccaaagtgctgggattacaggcgtgagtcaccgcgcctggtgggccacatgtatgtcttcttttgacaagcatctgttcatgtcctttgcctacttttaatggggttgctttttttttttaaatttgtttaagtcccttgtagatgctaaatattagacctttgttg

SEQ ID NO: 587907 - DNA, 616 bp, Homo sapiens
ttttttaatacctaaaataacaacatcaatttgctcccaaaagcctgagagaagtgattcctacaaccttgatataacttgcaaagttaagcattggacacaacttcataacataaacatattttataagcttaatttctgagtcaacacctatataaaaaccatgtgtatttttctgaaatggcattaaatatataaccttaaaaatagcaagaaatcactaaatctctaaaaaactaacaaataaataggtatgttacattaccagcccctaatgaggactgatagataaataaaacagtagactaacaaaaataatagaaaaaaacacgcactgattttttgcttttggttygatatggctgcttaaaagtaatttgcattgtaaatatcttgtttctgcattaagtgtatgctttttgccactgtggcatctctttgctcacctccgcatactggggctaaggtgagttcttccacctctttgtttacttgccttgctctgttgaataattcactgcttgatgcaggagtttccaggggctgcagagcagaactcaaagctggtggaggttgtgaagcccaggagtggcaactttttgcctttaattaaagt

SEQ ID NO: 587908 - DNA, 616 bp, Homo sapiens
ttttttaatacctaaaataacaacatcaatttgctcccaaaagcctgagagaagtgattcctacaaccttgatataacttgcaaagttaagcattggacacaacttcataacataaacatattttataagcttaatttctgagtcaacacctatataaaaaccatgtgtatttttctgaaatggcattaaatatataaccttaaaaatagcaagaaatcactaaatctctaaaaaactaacaaataaataggtatgttacattaccagcccctaatgaggactgatagataaataaaacagtagactaacaaaaataatagaaaaaaacacgcactgattttttgcttttggttcgatatggctgcttaaaartaatttgcattgtaaatatcttgtttctgcattaagtgtatgctttttgccactgtggcatctctttgctcacctccgcatactggggctaaggtgagttcttccacctctttgtttacttgccttgctctgttgaataattcactgcttgatgcaggagtttccaggggctgcagagcagaactcaaagctggtggaggttgtgaagcccaggagtggcaactttttgcctttaattaaagt

SEQ ID NO: 587909 - DNA, 591 bp, Homo sapiens
aagacttgtcgatatttgtccggtgaaattcaagtggaggcttcaggccactgtgttgcatgcatctcctctgcaggagagcacaaaatgcccagtccgtcagagcatgctcatttcccagccctcagcagcagtcctgagagctcccgtacagtaatatatttatacgaattaacatagctgctatatgtgtgccctggtaacacgtaggatctgtgatagccacatcacgctatctatttttatcctccctgcacctctatgctgtagcgtgcacctctatccacttggctaaccagaaaactgaggcttaagaaggggaagtgacttgccagggggacatggctagtgagtctggaagtgagacagacagctctaataccagaacttgggctcttgctgttataccaggaggctttaggmagagaaggaaactcctaccccaaatgaaggtgaaggaagattccctggtcacatcaccctctaaccttgcttgagcataggctgggcctaggcctgcagagagaagcagagggaaaacccccttcctcaaggagctccaaattagaggaaggcctggaggcagagtga

SEQ ID NO: 587910 - DNA, 592 bp, Homo sapiens
ggtggccctggttccagtccccatccagctgcagatatttcatccttaaaaaagaggagaagtttactgtctcaggacatgggtttttgggcttgggacacatggagtacaccacgaggggctgagtggaggagcagcctacaggtttgtagaaacaatgccactggctccctgctctccccagctactgcacagccactgcatggccctccaagtctgcactctggttccccatcctgctggtgagaagcaactctcagggcctccctgggattggtgaggcacacaatgagtgcctggtccagtgaggagaccaggtctccagcctcccagctagcctgtctgcttcacccaagagctgctcctgaggcctgcccgaggcggctgtcgccacccaaggcaccgcgatgattggttaaatgaagcccggtgatttggcatgtcttcccctcctgtgtgcacattcagaaagggcaataaccagaaaattgaggcgaccgatggtgcctgcyggacagcagagatgaaacagatctgactacacagataaggaggagaaaatgagctatcagggcctccttgcccctgcttt

SEQ ID NO: 587911 - DNA, 538 bp, Homo sapiens
atgtaaacttcctctttagatgcatcccttctgttctgaatatatggttataagagagaaagcactgaagagggaaagtagcctcaaatgcaaggaggacgtttctgtggactcagaaaagaaataaaaatgcagaaaggcaccagcttgctgactgaggaagtaaaagtatttgcctggcaagggagacccagagttagaaaaccagactcatagcaaatgggccccgcaagcaccaagtatgttaagcaaaattaagtccatacttcagatgtgtgccaaaaatatatggaggactgagtaatgaaagctagactacatctaatccgattttcagaaggggaagaaatggtgggmggtaataggtgactgagaacttcccaggattaattaaaggcaccaatcttcagaatacagaaatcccaaagacccaaataggataaatacaaagaatccacacctagccatatcatagtgaaagtgctaaatagtgatgagaataagaatgtattagcagtaatgtgagagaaaatacagg

SEQ ID NO: 587912 - DNA, 659 bp, Homo sapiens
gaggtcgaggctgcagtgagccaagattgccccccctgcattccagcctgtgcaacagagcaagactgtttccaaaaacaaaaaaaacaaaaaaccctgaatttgggttaatatataaaaaatacttattttgtacaattctcaaagtttggaaatccaagggcaaatggggtacatctggtgaaagcttcttgctctttactgtctgaggcagtggagatcactaggcasgggggctgattgtgctaactctggtctctttctcttcttacaaggccacaagtcttatttgtaggataacccattcattcattacctcttcaattcgtcagtggattaatccattcatgaggcagagccctcatgcctcttaaagggccctgctttcagtactgacacattggggatcaaatttcgttatgagttttggaaggggaaattattcacacttagcaagggctgattaggtacactgcttctgctgaaaataccacactctcagagggaaaatgggaattaggcaaataccatattgtttgcataagtagttaaggcacacacaaccccatttattagttatgttggtgcagatcttcccaaatctagcccctagataccatcaaagttcaactttctaaataaacgtgtaagaatatgca

SEQ ID NO: 587913 - DNA, 523 bp, Homo sapiens
caggcacgcacactttgcatcctcatggatcctgccacactgtcttttcggggacttacaaacccccgcccgtgccttacagtgtgtcccctccctcaggttctcactttataggtcatgcctcggtttaagagcaggtccaggcctccctactgccccgcccaagtgttacttgttagaaaatcatgccggatcacaggcgggcacttccttcctaacctacttaagggctggctgctgattataaccatgaaccgaggacgctgctctctggagccggccccattctcaccacggccatcactgcctgggcttggcaagggagctctgcaggtccagacagggcggccctctgttcaatcccccattaagcaaagatgcactgggcactctctccttgccaagagctaggccagcaccgggccgatgttgggcagccaccgccccgtccccaaacagtcaccagacagttctgggcacaagagcacacaggaarctcatggtgccagtgctgtgggacccc

SEQ ID NO: 587914 - DNA, 524 bp, Homo sapiens
caggcgtgagccactgtgcccagccctgagattgctcccttactcagcaattctggggcctcttttccagcataattcagatgtagattatgtcagttcattcacaagtctgagaaaaggaaaagaatgtgcaggttttgacccaaaagcttgaggagagagataggagttacatagtggtctgagattgagggactggggacaaatctagggaagtcttgaggaggtgggagttcagtctgttcagaatgagaagagatgatatctagggagagaagaaattgtgagaaatttgtacagataaggaaggaaccaatgttcatttataacttgttgaatccatgatctcatggattctttcttctttgcagttctgcttttccagaatcctgccctttccaaaaggaagacrgtatgattaagttccaggtaagttaagggtttctttctctttaaatatactgttcattctgaggaaccagcacttctgttttctgaaaggtcagcattttttgagtgactac

SEQ ID NO: 587915 - DNA, 591 bp, Homo sapiens
ctaggtttatgagatagagatatggtttggctatatccctacccaagtctcatcttgaattgtagtttccataattcccacatgttgtaggtggggcccggtaggaggtaactgaatcatggggcaggggtctttctcatgctgttcttatgagagtgacaagtctcatgagatttgatggttttataaattggtgttctcctgcacaggctttctctttgactgacaccatgtaggatgtacctttgctcttccttcaccttctgccatgattttgaggcctccacagccatatggaaatatgagtcaattaaacctctttcctttataaattacccagtcttgggtatgtctttattagaaacatgagaatggactaatacagatagttaytgttattatcccccttttatggacgtattactctgttttcacactgctgataaagacatacctgagactgggcaatttacaaaagatagagatgtattggacttacagttccacatccctggggaggcctcatagtcatggtggaaggtgaaaggcacgtcttacatggtggcagacaagagaagagagcttgtgcag

SEQ ID NO: 587916 - DNA, 470 bp, Homo sapiens
tcataaaatgattggtatcaatatgtgaaaaaaatcttcaatgttgaaagtacaagattacaagccatctgaaagtatctaaacatcaatcagagaaaaatgctcatcattttttgatgaaaccaaaagtaagagaatttggtattaatctactacatcattggtaaattacatattaattattgtgagaaagaaataattgatggaatttaaagaaaatcggttttcctttatttttattattctacctaaaagtattatatctaattaaaataatgattttaaaattatcccaagtatgtcatcacactaatatccattgyatttaatttctcaactgagaaattgtattcaattgtattcagtttctctactgaaaaattaatatgaaagcaatcacatagcattcagaaattaataaatatttaaagaaattaaacagcattagattttcttgttgtaaaattttt

SEQ ID NO: 587917 - DNA, 470 bp, Homo sapiens
tcataaaatgattggtatcaatatgtgaaaaaaatcttcaatgttgaaagtacaagattacaagccatctgaaagtatctaaacatcaatcagagaaaaatgctcatcattttttgatgaaaccaaaagtaagagaatttggtattaatctactacatcattggtaaattacatattaattattgtgagaaagaaataattgatggaatttaaagaaaatcggttttcctttatttttattattctacctaaaagtattatatctaattaaaataatgattttaaaattatcccaagtatgtcatcacactaatatccattgtatttaatttctcaactgagaaattgtattcaattgtattyagtttctctactgaaaaattaatatgaaagcaatcacatagcattcagaaattaataaatatttaaagaaattaaacagcattagattttcttgttgtaaaattttt

SEQ ID NO: 587918 - DNA, 470 bp, Homo sapiens
tcataaaatgattggtatcaatatgtgaaaaaaatcttcaatgttgaaagtacaagattacaagccatctgaaagtatctaaacatcaatcagagaaaaatgctcatcattttttgatgaaaccaaaagtaagagaatttggtattaatctactacatcattggtaaattacatattaattattgtgagaaagaaataattgatggaatttaaagaaaatcggttttcctttatttttattattctacctaaaagtattatatctaattaaaataatgattttaaaattatcccaagtatgtcatcacactaatatccattgtatttaatttctcaactgagaaattgtattcaattgtattcartttctctactgaaaaattaatatgaaagcaatcacatagcattcagaaattaataaatatttaaagaaattaaacagcattagattttcttgttgtaaaattttt

SEQ ID NO: 587919 - DNA, 470 bp, Homo sapiens
tcataaaatgattggtatcaatatgtgaaaaaaatcttcaatgttgaaagtacaagattacaagccatctgaaagtatctaaacatcaatcagagaaaaatgctcatcattttttgatgaaaccaaaagtaagagaatttggtattaatctactacatcattggtaaattacatattaattattgtgagaaagaaataattgatggaatttaaagaaaatcggttttcctttatttttattattctacctaaaagtattatatctaattaaaataatgattttaaaattatcccaagtatgtcatcacactaatatccattgtatttaatttctcaactgagaaattgtattcaattgtattcagtttctctactgaaaaattaatatgaaagcaatcacatagcattcagaaattaataaatatttaaagaaattaaacarcattagattttcttgttgtaaaattttt

SEQ ID NO: 587920 - DNA, 404 bp, Homo sapiens
acacttctgtatattccataaaatgtgcatttcttcatggatactctttgaatcatctaaatggagactctttatagaartattgaatcattaattcttccaactactgtactcctttccaacatactgtcttactgatttttcactttttcctatttatatccattttgttctactaacccatctgtcattggccttcttctatagcctacctcaaatttcagttcacactagctgtgaacagcactcaaattgctgctgtattcttaaaatataaatttacttcataaagcaaaagtgaatcatatgcatgttacaaaaaatattcctagcagagataagatgggatggtatttgctgggatgtgcagcattgttttttccaaattaatttctctcagaatt

SEQ ID NO: 587921 - DNA, 403 bp, Homo sapiens
acacttctgtatattccataaaatgtgcatttcttcatggatactctttgaatcatctaaatggagactctttatagaaatattgaatcattaattcttccaactactgtactcctttccaacatactgtcttactgatttttcactttttcctatttatatccattttgttctactaacccrtctgtcattggccttcttctatagcctacctcaaatttcagttcacactagctgtgaacagcactcaaattgctgctgtattcttaaaatataaatttacttcataaagcaaaagtgaatcatatgcatgttacaaaaaatattcctagcagagataagatgggatggtatttgctgggatgtgcagcattgttttttccaaattaatttctctcagaat

SEQ ID NO: 587922 - DNA, 403 bp, Homo sapiens
acacttctgtatattccataaaatgtgcatttcttcatggatactctttgaatcatctaaatggagactctttatagaaatattgaatcattaattcttccaactactgtactcctttccaacatactgtcttactgatttttcactttttcctatttatatccattttgttctactaacccatctgtcattggccttcttctatagccwacctcaaatttcagttcacactagctgtgaacagcactcaaattgctgctgtattcttaaaatataaatttacttcataaagcaaaagtgaatcatatgcatgttacaaaaaatattcctagcagagataagatgggatggtatttgctgggatgtgcagcattgttttttccaaattaatttctctcagaat

SEQ ID NO: 587923 - DNA, 404 bp, Homo sapiens
acacttctgtatattccataaaatgtgcatttcttcatggatactctttgaatcatctaaatggagactctttatagaaatattgaatcattaattcttccaactactgtactcctttccaacatactgtcttactgatttttcactttttcctatttatatccattttgttctactaacccatctgtcattggccttcttctatagcctacctcaaatttcagttcacactagctgtgaacagcactcaaattgctgctgtattcttaaaatataaatttacttcataaagcaaaagtgaatyatatgcatgttacaaaaaatattcctagcagagataagatgggatggtatttgctgggatgtgcagcattgttttttccaaattaatttctctcagaatt

SEQ ID NO: 587924 - DNA, 404 bp, Homo sapiens
acacttctgtatattccataaaatgtgcatttcttcatggatactctttgaatcatctaaatggagactctttatagaaatattgaatcattaattcttccaactactgtactcctttccaacatactgtcttactgatttttcactttttcctatttatatccattttgttctactaacccatctgtcattggccttcttctatagcctacctcaaatttcagttcacactagctgtgaacagcactcaaattgctgctgtattcttaaaatataaatttacttcataaagcaaaagtgaatcatatgcatgttacaaaaaatattcctagcagagataagatgggatggtatttgctgggatgtgcagcatygttttttccaaattaatttctctcagaatt

SEQ ID NO: 587925 - DNA, 298 bp, Homo sapiens
tgttacagtatattacactgattgattttttatatgttgagccacccttgcattttggggataaatctcaaagggtgatagtttacaatcctttgattatgcagtattgctgctagtattttgctagtattgctagtattktgctgagatttttgcttatatattcataagggatattgttctgtagttctctcttttgtgctctctttgtctttggtataaggataatgctgttatcaaaaaatgaattagcaagtattccttcttcatatattttgtcagaagagtttgagaagaa

SEQ ID NO: 587926 - DNA, 298 bp, Homo sapiens
tgttacagtatattacactgattgattttttatatgttgagccacccttgcattttggggataaatctcaaagggtgatagtttacaatcctttgattatgcagtattgctgctagtattttgctagtattgctagtattgtgctgagatttttgcttatatattcataagggatattgtkctgtagttctctcttttgtgctctctttgtctttggtataaggataatgctgttatcaaaaaatgaattagcaagtattccttcttcatatattttgtcagaagagtttgagaagaa

SEQ ID NO: 587927 - DNA, 480 bp, Homo sapiens
tttcaatggaattttaaaaacttggattgtaccgtgtaatgaagagaaatacacttaattttgtattctgcaattttgctaaatrcaactattagttctaacaggtattgttttcagcgtataggatttttttgtatataacatcatatcataagtaacaggtacttttacttcttcctttagaatgtggatcttttctttttttcattgcctagttgttttgccaggactttcactgctatttttgaatagatgtggcaacagtgaatatcttgccttattattaatcttagaggataaactttccacagttcagaattcagtataatattagtgatgattgttttcgtttttttgtttttgttgttgttttcgcttttctgagataggatcttgctctgtcaaccaggctggagtgcagtggcatgatctgggctcactgcaacctccacctcccgagttcaagctattctcctgcct

SEQ ID NO: 587928 - DNA, 480 bp, Homo sapiens
tttcaatggaattttaaaaacttggattgtaccgtgtaatgaagagaaatacacttaattttgtattctgcaattttgctaaatgcaactattagttctaacaggtattgttttcagcgtataggatttttttgtatataacatcatatcataagtaacaggtacttttacttcttcctttagaatgtggatcttttctttttttcattgcctagttgttttgccaggactttcactgctatttttgaatagatgtggcaacagtgaatatcttgccttattattaatcttagaggataaactttccacasttcagaattcagtataatattagtgatgattgttttcgtttttttgtttttgttgttgttttcgcttttctgagataggatcttgctctgtcaaccaggctggagtgcagtggcatgatctgggctcactgcaacctccacctcccgagttcaagctattctcctgcct

SEQ ID NO: 587929 - DNA, 480 bp, Homo sapiens
tttcaatggaattttaaaaacttggattgtaccgtgtaatgaagagaaatacacttaattttgtattctgcaattttgctaaatgcaactattagttctaacaggtattgttttcagcgtataggatttttttgtatataacatcatatcataagtaacaggtacttttacttcttcctttagaatgtggatcttttctttttttcattgcctagttgttttgccaggactttcactgctatttttgaatagatgtggcaacagtgaatatcttgccttattattaatcttagaggataaactttccacagttcagaattcagtataatattagtgatgattgttttcgtttttttgtttttgttgttgttttygcttttctgagataggatcttgctctgtcaaccaggctggagtgcagtggcatgatctgggctcactgcaacctccacctcccgagttcaagctattctcctgcct

SEQ ID NO: 587930 - DNA, 480 bp, Homo sapiens
tttcaatggaattttaaaaacttggattgtaccgtgtaatgaagagaaatacacttaattttgtattctgcaattttgctaaatgcaactattagttctaacaggtattgttttcagcgtataggatttttttgtatataacatcatatcataagtaacaggtacttttacttcttcctttagaatgtggatcttttctttttttcattgcctagttgttttgccaggactttcactgctatttttgaatagatgtggcaacagtgaatatcttgccttattattaatcttagaggataaactttccacagttcagaattcagtataatattagtgatgattgttttcgtttttttgtttttgttgttgttttcgyttttctgagataggatcttgctctgtcaaccaggctggagtgcagtggcatgatctgggctcactgcaacctccacctcccgagttcaagctattctcctgcct

SEQ ID NO: 587931 - DNA, 548 bp, Homo sapiens
cagaggatgtgtcttacatgtcataagtgtgtcatcaatatttgcaaaagcaagggataaaatgggtgctggagagacagtttaggaagccaagagtcaaggtgtagatgtttaaaaatttgtattattgattaacataataataaaaattgggatttaatttgtatatcttggctaatcgcaagttctttagaccacaggcctggccatacaagatcaagtcttkcatgtgaaagtggaaatagcagaaggtccctgtcatcctgagattgctctctcttttttttcctttttttttttttttgagacagtctgtctctgttgcccaggctggagtgcagtggtgcaagcacagctcactgcagcctctgcctcccaggttcaagtgattgtcctgcctcagcctcctgagtagctgggattacaggtgcccgccaccaagcccagctaattttgtatttttagtagagacagggtttcaccatgttggccaggctggtctcgaactcctggcctcaagtgatccacctgtctcgggttcccaaagt

SEQ ID NO: 587932 - DNA, 548 bp, Homo sapiens
cagaggatgtgtcttacatgtcataagtgtgtcatcaatatttgcaaaagcaagggataaaatgggtgctggagagacagtttaggaagccaagagtcaaggtgtagatgtttaaaaatttgtattattgattaacataataataaaaattgggatttaatttgtatatcttggctaatcgcaagttctttagaccacaggcctggccatacaagatcaagtcttgcatgtgaaagtggaaatagcagaaggtccctgtcatcctgagattgctctctyttttttttcctttttttttttttttgagacagtctgtctctgttgcccaggctggagtgcagtggtgcaagcacagctcactgcagcctctgcctcccaggttcaagtgattgtcctgcctcagcctcctgagtagctgggattacaggtgcccgccaccaagcccagctaattttgtatttttagtagagacagggtttcaccatgttggccaggctggtctcgaactcctggcctcaagtgatccacctgtctcgggttcccaaagt

SEQ ID NO: 587933 - DNA, 548 bp, Homo sapiens
cagaggatgtgtcttacatgtcataagtgtgtcatcaatatttgcaaaagcaagggataaaatgggtgctggagagacagtttaggaagccaagagtcaaggtgtagatgtttaaaaatttgtattattgattaacataataataaaaattgggatttaatttgtatatcttggctaatcgcaagttctttagaccacaggcctggccatacaagatcaagtcttgcatgtgaaagtggaaatagcagaaggtccctgtcatcctgagattgctctctcttttttttcctttttttttttttttgagacagtctgtctctgttgcccaggctggagtgcagtggtgcaagcacagctcactgcagcctctgcctcccaggttcaagtgattgtcctgcctcagcctcctgagtagctgggattacaggtgcccrccaccaagcccagctaattttgtatttttagtagagacagggtttcaccatgttggccaggctggtctcgaactcctggcctcaagtgatccacctgtctcgggttcccaaagt

SEQ ID NO: 587934 - DNA, 572 bp, Homo sapiens
ttaataattttaaaaatacataaacattgttttcttaatatttgatgtggttttccttcttcaaggagagctaagatcctgctagccttgaacttttcagccttgactatttgttaagttcggagagtggaaagaaaaatcattgcaggctttttttatagaatggaaattttttttaaattcatcttgatgtagccgagaaaggagctgaatgaagtcccataaatttttttttaaaagaaattcaccttagagttcagaggaagtgtggatatctttagtttgagaaggacttatttttaaggagactatgggaaaacttggaaaataggcttggggtgaataatctcttttacttgatgttattcccaaaaggatttcttcctcccactcttccctgaccccatcacctttctctctctttctctctctgtcatctgtaactctgtatctcttcatttttccctttctctctctttctrcatcgctccccctcccattaccacataggcacacacacacttgtctacaaacctatagagccatagttcagtgaaacctcacttaaatag

SEQ ID NO: 587935 - DNA, 582 bp, Homo sapiens
ggaactaatctatggtcacacatctagtgcatttccaagctgggattgaaacctaggaatagcatctcctcccctccacctccccacttcwgaagttactttttattaactcatccactcttcctcttatgatgaacttggactaaaaaaggaatacagacctatgaagaaaagctctgaatattatgtggaagtattttggtgcaaatacataatgcccttggaataatctataaattttctctcactatgacattttttgagagcaaaatgagggtacaaattaatcatcttttactttgattcaatagactctatgatactatgtttatccaaatccattcaccatcatttattgaccacttcttaggtaagggctctagtgccttattactcctagtctctcttcttaggaaagacacagacataatatttactgattttctactttgtgtcaggtgccattcccttctcagtcttagttcctttatctgcgaaatggacataataacaatagttattatgttagttaccaataatatcgttggtagctgcaaatctattgttggtagctgcaaatca

SEQ ID NO: 587936 - DNA, 582 bp, Homo sapiens
ggaactaatctatggtcacacatctagtgcatttccaagctgggattgaaacctaggaatagcatctcctcccctccacctccccacttcagaagttactttttattaactcatccactcttcctcttatgatgaacttggactaaaaaaggaatacagacctatgaagaaaagctctgaatattatgtggaagtattttggtgcaaatacataatgcccttggaataatctataaattttctctcactatgacattttttgagagcaaaatgagggtacaaattaatcatcttttactttgattcaatagactctatgatactatgtttatccaaatccrttcaccatcatttattgaccacttcttaggtaagggctctagtgccttattactcctagtctctcttcttaggaaagacacagacataatatttactgattttctactttgtgtcaggtgccattcccttctcagtcttagttcctttatctgcgaaatggacataataacaatagttattatgttagttaccaataatatcgttggtagctgcaaatctattgttggtagctgcaaatca

SEQ ID NO: 587937 - DNA, 592 bp, Homo sapiens
atccaaaatgtcttcctagtatctaatgtccataccacttggggctcccttatcccataaaactaatttaatgtatgagcttaattacatagaggtagatcaagggccttagaggcaaaaggctaacgagggcattaaatcctgaaccacttaacagctgccccatcacttggcagaactgtattttaaaatagtgtttgaaatatatttaaactgaaataaataaaacatgttttcctgtaaatgatgccaagtcctgccaattaaattcatatctatttaaaaaaaaaaagatctttagctctcaacaaatgctggctgcttctttccactaaaagcaattctgagcattcatgctctcacttcttccctgtatcattatgctgtgttcctcttgttaatatttaaagcttctgaaactgtttttcccatatgcttttggactagaatgaaaaacttaagttttccatttttatgaagscttgtaagaaataatctcattaagagattactattctcttaagaaaagataatgctaatataaacaacataaattcttactaaatatgaagaaaagaaaaaggtaagattt

SEQ ID NO: 587938 - DNA, 608 bp, Homo sapiens
gcaatcttatttttaattgaaatttgaatattaactaaaatggcattgaatgaataataatataggtggcacatgacattaattttgtatgtaaattgggtctcraagtactatcatatagaacatatactttggagtcaatgtcacggtgcttctttgctggttctcctgcttaatagatgaataactatacaagctattttccttctgtaagcatcagtttttccatacgtaaaattataccacttactgtctcatagtaatgtgaaaattaaattataatgatgacaacttaaacatacatacttttatgtgccaaagaatgttctaagcactttctatctatggattcacttattatttacaaaatctccatcaagtgggtactattattcccattttacagaagaggaaactgaggtttttagtaagtctgaggtcacacaattagtaagtggcagaagaagtctggtgccatagtttgtgctatttaacaactgtgttaaatatatttagaccagtggccacagaaagggcataactagttatattattaagacttcctgtatctgacttaagagtcctttatcttttttacctcaacccac

SEQ ID NO: 587939 - DNA, 554 bp, Homo sapiens
gaaactcaacccttttcattagagtgagtaaaactcacactggtatcttgctattgtttaaggagaacaatggatgggtggatgaaagagaatgtcagctggatcaacaaacagctgttccaacagaagtcctgctatcctatacaataaagcagtattaattgctgccttccctgsagtctctaaagatactcggtaagtgtacagtaccctgatgaactaaagccaaaagttagggctgatttcgggcttcatcacagtgaacacctcacctccagagagaaagttgtaggcctttaaagcttttgatctcagagaagactccaccgcctttcaaggcaataaattcttgcctcttctccaaatactctaactgaaacttctgctgttgcagtataattcaatgtgtttttttccagacttcaatgaaagcaagaattctcattctgcatgtaattatatcccttataatacccacagcctcctgcaatattactttttctaggccaaataaataattttttttctaaaggcagtttggtattcagtaaaag

SEQ ID NO: 587940 - DNA, 594 bp, Homo sapiens
ctacaggtaggtgccaccacacctagctaattttttctatttttaatagagatggggttttgccatgttggccaggctggtctggaactcctggccttaaataatccacctgcctcggcctcccaaagtgctgggattacagacgtgagccaccaggcctggcctgcagttatcaattttacacagcagatcatctgtcatatcactctgaagccagtggctttgctggagggttaaggaatgaaggatgaggtatacatgggatcagctctgaggtcctatgttacataatagagaatcaagaattcatgaaggctggggagtctatactacaacattattcctgctttgtccagagcaacattttctaagcttaaataaaataatgaagttccataatgatagctccatatcaatataaaaccacagactaattaatataccacttctttctcatatcttagtctctaattagaattacttcttcatcygaatatttccctacataaaggttactaagtttgtgcattctgcagttttgttttgtttgtttgtttttcattttttggcatttaaaaatcaaatcatagcaca

SEQ ID NO: 587941 - DNA, 548 bp, Homo sapiens
agtggtttgttttctttttctatttttaattaccttctgaggatattgcctacagggatattttattaactcttccagtcttgagtccactgwggtctggggattagggaggcaggatccaggcatgggaaagcttctgctgtgaagtagtgagagaacatctgcagagagtgagcaaggcctgaagggaggttgttattgaggtgacaatacacatgaaagacatattttggaacatgttggtgtccctctgggacccctcggagagactctgttaaaactctgtattttctgctaatcaaataaatgatctggggcttgggcctacactagttgtttttttgttttgttttgttccgttttgttttgttttgttttgttttgttttgttttgtttttgagacagagtcttgctctgtcgcccaggctggagtacagtggcttactgcaacctctgctgagtggagtactcagcttgaaccgcctcccaggttcaagcaattctcctgcctcagcttctcaagtagctaggactacaggcatgcgct

SEQ ID NO: 587942 - DNA, 254 bp, Homo sapiens
gagaaaattaagataacacagaaaaagaattcagaattctatcagataaatttaatagagatattgaaataattttaaagaatcaagcagaaattctcaagtttaaaaatgcaactgacayactgaagaatgcatcagagtctttcaatagcagaattgattaaggagaagaaatagtgcacttttaaagacaggctattagaaaatacagtcagagaagacaaagaaaaaagaataaaaaataatgaagcatg

SEQ ID NO: 587943 - DNA, 503 bp, Homo sapiens
tgggaaggctgagaactggtgctttargcaaggcttgctttagctggtttaaggcttttgtgttttaggttcccaagttagggagctgcttgagtttcttttaagagttggtataaaggatgagctatttcaccataccctggtgcccacattttgcaaaattcagtaatgcccacattttgcaaaattcagtaatgcccaataattttcttaactcttaaaggaaacggggttaatcctttcctcacctggtactctggttccttctgtgctgtgtctgtcccacagaccttggccgatgggtgaaatgagtactcagacacaggtatgcagtgtaagagcagctaggtgactgcctggctccagtggccagacagcagtcccgagaagctggagctgtttgcttttattcagtgcaggcacaatgccgaaaacctggagccaacacaacctgcaggtaattaacatttattgttcccctttcagggaatgttgcatgggga

SEQ ID NO: 587944 - DNA, 586 bp, Homo sapiens
attatccaaaaaaacaaattgtttgattttataaaaataacgtcttgggtggttcctmgattaaccaaaaatcaacccattcctgaggccgttacagtattcactgatggctctggtaatggcaatgctggctatacaggtcctgcagacaaacttctttctacctcttatacttctcttcaaaatgcggagttaattgctgtgattactgccttacaggatttccccaaacctttaaatattgtctcttattctacttaacgtggggaagaggatatgcttgtgtttcaccaggagatcatcaatcccctgtctgggtgcccaccagaagactcaagcttcttgtgaatactgacaatcaaaaccacagtgaagagacgtctgtgtcagagactgccttcagatgtggtgagatctgtgccgactcctcagaaacaggcacaccaaatcacaatgggtgtaaatcaatcctccctgatgacagtggagacccatctaactaatcacacttatcctgattacctttctttttctccttacaaacctaaatatctcaccatttctattagcctgaaaataacatccc

SEQ ID NO: 587945 - DNA, 571 bp, Homo sapiens
aggcataggaaatcacaagggtattgattggggaagtgataagtgtccatgaaatcttcacaatttatgtttagagattgcagtaaagacaggcataagaaattacaaaagtattaatttggggaactaataaatgtccataaaatcttcataatccacgttcttctgtcatggcttcagctggtccctccatttggggtccctgacttcccgcaacacagcacagtgcctggcacaaaagagttgctcaataaataaatcaggatgaatagataaatacacggataggcactttgaactacagatgagcttaaatactttgtttttcttagtcaaacatgtgcaatgaagcatgtgataaatgttatgatgascatacctgtgtcttgcctgatgttctttgcaatcactaaatgaagtcaattgggcctgttttgacagttctattttcaacctaatgatctgtttattttaacttctggctgttggctttgtttgggtttgttagcctgacaaagtggtagatattggtatttgctcttttgtttaaatgtcacgaactttaaaaatg

SEQ ID NO: 587946 - DNA, 571 bp, Homo sapiens
aggcataggaaatcacaagggtattgattggggaagtgataagtgtccatgaaatcttcacaatttatgtttagagattgcagtaaagacaggcataagaaattacaaaagtattaatttggggaactaataaatgtccataaaatcttcataatccacgttcttctgtcatggcttcagctggtccctccatttggggtccctgacttcccgcaacacagcacagtgcctggcacaaaagagttgctcaataaataaatcaggatgaatagataaatacacggataggcactttgaactacagatgagcttaaatactttgtttttcttagtcaaacatgtgcaatgaagcatgtgataaatgttatgatgagcayacctgtgtcttgcctgatgttctttgcaatcactaaatgaagtcaattgggcctgttttgacagttctattttcaacctaatgatctgtttattttaacttctggctgttggctttgtttgggtttgttagcctgacaaagtggtagatattggtatttgctcttttgtttaaatgtcacgaactttaaaaatg

SEQ ID NO: 587947 - DNA, 571 bp, Homo sapiens
aggcataggaaatcacaagggtattgattggggaagtgataagtgtccatgaaatcttcacaatttatgtttagagattgcagtaaagacaggcataagaaattacaaaagtattaatttggggaactaataaatgtccataaaatcttcataatccacgttcttctgtcatggcttcagctggtccctccatttggggtccctgacttcccgcaacacagcacagtgcctggcacaaaagagttgctcaataaataaatcaggatgaatagataaatacacggataggcactttgaactacagatgagcttaaatactttgtttttcttagtcaaacatgtgcaatgaagcatgtgataaatgttatgatgagcatacctgtgtcttgcctgatgttctttgcaatcactaaatgaagtcaattgkgcctgttttgacagttctattttcaacctaatgatctgtttattttaacttctggctgttggctttgtttgggtttgttagcctgacaaagtggtagatattggtatttgctcttttgtttaaatgtcacgaactttaaaaatg

SEQ ID NO: 587948 - DNA, 571 bp, Homo sapiens
aggcataggaaatcacaagggtattgattggggaagtgataagtgtccatgaaatcttcacaatttatgtttagagattgcagtaaagacaggcataagaaattacaaaagtattaatttggggaactaataaatgtccataaaatcttcataatccacgttcttctgtcatggcttcagctggtccctccatttggggtccctgacttcccgcaacacagcacagtgcctggcacaaaagagttgctcaataaataaatcaggatgaatagataaatacacggataggcactttgaactacagatgagcttaaatactttgtttttcttagtcaaacatgtgcaatgaagcatgtgataaatgttatgatgagcatacctgtgtcttgcctgatgttctttgcaatcactaaatgaagtcaattgggcctgttttgacagttctattttcaacctaatgatctgtttattttaacttctggctgttggctttgtttgggtttkttagcctgacaaagtggtagatattggtatttgctcttttgtttaaatgtcacgaactttaaaaatg

SEQ ID NO: 587949 - DNA, 633 bp, Homo sapiens
acaggtgtgagcccctgcgcccagctagagtctaccattctttgaattcactgcagtgcaaagactggaacatgtggaactccaggtgtatatgggttatgtagagatgctaggggcagattaaggaaggaaagatatgagaagcctgcagagcatgctttcccagactgtatgggccctgggaaaggagaagtggacagaaagggagcactaggtacyctggaagagaagattcatccaagtcatcagggaagttactaatgcaagggaaaaaatttagagacagggccagccacgcttcttccaagtcctttctgtctgctcagtcacctctatgcttatttttcttctttcctctaagtagtgtcatgcgttttcttcctattcctagtcgctcctagtcaactaactcctctctttaccatcttttcatcagaacttgaaacctcctctccttcatgtattagtgatcatgtttctccataatactgctagaaacaagaattgaaacctggaaaacctgcatttgagaaccagatctccctctgctagctatttgagaagttattttgttccattctttttgttgttgtcgaaacagggtctcactctgttgcccaggctagagtgcag

SEQ ID NO: 587950 - DNA, 633 bp, Homo sapiens
acaggtgtgagcccctgcgcccagctagagtctaccattctttgaattcactgcagtgcaaagactggaacatgtggaactccaggtgtatatgggttatgtagagatgctaggggcagattaaggaaggaaagatatgagaagcctgcagagcatgctttcccagactgtatgggccctgggaaaggagaagtggacagaaagggagcactaggtaccctggaagagaagattcatccaagtcatcagggaagttactaatgcaagggaaaaaatttagagacagggccarccacgcttcttccaagtcctttctgtctgctcagtcacctctatgcttatttttcttctttcctctaagtagtgtcatgcgttttcttcctattcctagtcgctcctagtcaactaactcctctctttaccatcttttcatcagaacttgaaacctcctctccttcatgtattagtgatcatgtttctccataatactgctagaaacaagaattgaaacctggaaaacctgcatttgagaaccagatctccctctgctagctatttgagaagttattttgttccattctttttgttgttgtcgaaacagggtctcactctgttgcccaggctagagtgcag

SEQ ID NO: 587951 - DNA, 633 bp, Homo sapiens
acaggtgtgagcccctgcgcccagctagagtctaccattctttgaattcactgcagtgcaaagactggaacatgtggaactccaggtgtatatgggttatgtagagatgctaggggcagattaaggaaggaaagatatgagaagcctgcagagcatgctttcccagactgtatgggccctgggaaaggagaagtggacagaaagggagcactaggtaccctggaagagaagattcatccaagtcatcagggaagttactaatgcaagggaaaaaatttagagacagggccagmcacgcttcttccaagtcctttctgtctgctcagtcacctctatgcttatttttcttctttcctctaagtagtgtcatgcgttttcttcctattcctagtcgctcctagtcaactaactcctctctttaccatcttttcatcagaacttgaaacctcctctccttcatgtattagtgatcatgtttctccataatactgctagaaacaagaattgaaacctggaaaacctgcatttgagaaccagatctccctctgctagctatttgagaagttattttgttccattctttttgttgttgtcgaaacagggtctcactctgttgcccaggctagagtgcag

SEQ ID NO: 587952 - DNA, 543 bp, Homo sapiens
tatcacctggatcctccgggcactgggtgcatttaagagtaaacccactcctgtagcctcagcacatttttttttttactttaagttctaggatacatatgcagaacgtgcaggtttgttacataggtatacatgtgccatggtagtttgctgcacctstcaaccggtcatctaggttttaagccctgcatgcattaggtatttgtcctaatgctctctctccccttgtcccctatcccctgacaggccccagtgtgtgatgttcatgggagcacatttttaaaaagggctaaacgtgattttaatgagggactaattgtatttagagagtaactgagtagtttttgatatatcattttgtttaaaatatttattgatatttggagctgttattataaaatttttcctatattattattcatcagaaacatcttgttaaaatatgtacattataagatattggctactacaaatgaagaggaaatccacaggaaaagagagaaaaaaataaagttgttttcaaaatataggtcaaaaatttag

SEQ ID NO: 587953 - DNA, 543 bp, Homo sapiens
tatcacctggatcctccgggcactgggtgcatttaagagtaaacccactcctgtagcctcagcacatttttttttttactttaagttctaggatacatatgcagaacgtgcaggtttgttacataggtatacatgtgccatggtagtttgctgcacctctcaaccggtcatctaggttttaagccctgcatgcattaggtatttgtcctaatgctctctctccccttgtcccctatcccctgacaggccccagtgtgtgatgttcatgggarcacatttttaaaaagggctaaacgtgattttaatgagggactaattgtatttagagagtaactgagtagtttttgatatatcattttgtttaaaatatttattgatatttggagctgttattataaaatttttcctatattattattcatcagaaacatcttgttaaaatatgtacattataagatattggctactacaaatgaagaggaaatccacaggaaaagagagaaaaaaataaagttgttttcaaaatataggtcaaaaatttag

SEQ ID NO: 587954 - DNA, 543 bp, Homo sapiens
tatcacctggatcctccgggcactgggtgcatttaagagtaaacccactcctgtagcctcagcacatttttttttttactttaagttctaggatacatatgcagaacgtgcaggtttgttacataggtatacatgtgccatggtagtttgctgcacctctcaaccggtcatctaggttttaagccctgcatgcattaggtatttgtcctaatgctctctctccccttgtcccctatcccctgacaggccccagtgtgtgatgttcatgggagcacatttttaaaaagggctaaacgtgattttaatgagggactaattgtatttagagagtaactgagtagtttttgatatatcattttgtttaaaatatttattgatatttggagctgttattataaaatttttcctatattattattcatcagaaacatcttgttaaaatatrtacattataagatattggctactacaaatgaagaggaaatccacaggaaaagagagaaaaaaataaagttgttttcaaaatataggtcaaaaatttag

SEQ ID NO: 587955 - DNA, 584 bp, Homo sapiens
tgctcacatcctcagcccctcagcagwccaatggcaaaaactggactcatttgtgatgtcatcatttgcctacatgggcatggaaatgagaaaattatacgtgtattttaaaactgaaatgggcctggcgcggtggctcatgcctgtaatcccagcactttgggaggccgaggcgggcagatcacaaggtcaggagatcgagacctcctggctaacacagtgaaacaccgtctccactataaaatacaaaatattagccaggcgtggtggcaggagactgtagtctcagctactcgggaggttgaagcaggagaatggtgtgaacccgggaggtggagcttgcagtaagctgagattgcaccactgcactccagcctgggcgacagctggactccgtctcaaaaaaagaaagaaagaaagaaatgaagtcgctgagaatctagaagtgtacaggggctgatagaacccctttgcccattagagactagaaagaatttgaagctgcttatacctgccaaggaaaactaagcttaagtgactgaagagaaagagaaagattaaaacagaaaatagaaaggcacttg

SEQ ID NO: 587956 - DNA, 528 bp, Homo sapiens
ttcattgaactcagtgctgtgttgtcacagtgtgaagcaaaactgtgttgaattcagctgacacccacccatggagagaacattctggccagccctacccagagggaaatcactcaycccagtggtgggaacttgagtccagcaagctttaccagtgtggactgaagggttctggggccctaaataaccttcaaaggcagtctaaaccacaagcaatgtaagacctagcgctgagctgggctcagagccggtggacttgtaggcataaaacttactgagacaccagctgggtcagctaagagagtgcttttgccaccgttccttcaacttcaggcaacatagctcatggttccaaaagactccttccttccacttgaggagaggaaatggaagagtaaagaggactttgtcttgcctcttgggtaccagctcagccacaatagtataaggcaccaatcggagttgggaggcccccattccaggccctagctcctgggtgacatttctagacacaccctgggccagaag

SEQ ID NO: 587957 - DNA, 528 bp, Homo sapiens
ttcattgaactcagtgctgtgttgtcacagtgtgaagcaaaactgtgttgaattcagctgacacccacccatggagagaacattctggccagccctacccagagggaaatcactcaccccagtggtgggaacttgagtccagcaagctttaccagtgtggactgaagggttctggggccctaaataaccttcaaaggcagtctaaaccacaagcaatgtaagacctagcgctgagctgggctcagagccggtggacttgtaggcataaaacttactgagacaccagctgggtcagctaagagagtgcttttgccaccgttccttcaacttcaggcaacatagctcatggttccaaaagactccttccttccacttgrggagaggaaatggaagagtaaagaggactttgtcttgcctcttgggtaccagctcagccacaatagtataaggcaccaatcggagttgggaggcccccattccaggccctagctcctgggtgacatttctagacacaccctgggccagaag

SEQ ID NO: 587958 - DNA, 620 bp, Homo sapiens
ctgtgtcacatgtaaaatggccattggtcattaatgtcacttatgtctttagtgcacacctctacagaaatgattacacattgatcttcatttcttgatggtcttgttgagttatttcttgttgctaatatcgttggtacctcagcatcgatgggaaattggttgcagggctcccatagatgtcaaaatccagagatgcccaagtcccttatataaaatggcataggaggctggatgcggtgactcacacctgtaatcctagcaccttgggaggctgaggctggcagatcacttgaggtcaggagttcaagaccagcctggccaaaatggttgaacttcgtctctactaaaaatacaaaaattagccaggcatggtggtgggcgcctgtaatcccagctactcgagaggctgtgcctggagaattgcttgaacccgggaggcgtaggttgyagtgagtcgagatcataccactgcactccagcctaggagacagagctaaacactctctcaatcaatcaatcaatcaatcaatcaatcaataaaatatataaaaaataaaacgacatagtatttgcgtataacctatgcacatcctcctaaccactccaaattatctcta

SEQ ID NO: 587959 - DNA, 482 bp, Homo sapiens
aagagaataatttccccatccrattggatacccatttgttgcatgtcctttctatttcaattgagaggcatcttatctgtcattattttaactttgtataggagggagttgaggtctgattaaatcaaagaagcacatcagaaaatttcctttcattattataaaatgagtttgagtcacatgaccatttgtaaaagaaatccgtgacatagaacttaactttctccagggcgtatgttatatatacaggatttatatacactaatgttagaataaagaaaaccatagttattacttatttagcacctgtaaaaaccaggtactaagctatgtagttttcattcaaacctttaaaagacaagtaataggcaatgaggccaagattttcacccagatctgtctgactctgtagtccaagattgcacaaagaacatgctttttattaagttgacactgaacttaacttaaagattaggactgtg

SEQ ID NO: 587960 - DNA, 440 bp, Homo sapiens
tctacgtgatttatggcacagtttaaattcaacatttctgtgtttattttctgcctagattacctgtccaatgctaagagtgagtgttgaagtcctcaactactattgcattgtagtctatctttccctttagatctaataatatttgctttatgtatctgggtgctctggtattggataagtatatatttagaattgttataacctcttgctgaattaattactttatatagtgatctcctttctctttacagattttgacttgcatcctgtttcatctgatgtaagtatagctattcctgctcaccttttgttttcattggcatgaatgtagttggttgctgcaaaagtaattgtggtttttgacattacttttaatgycattatgctgcaaaagtaattgtggtttttgccattaatagcattaaaagtaatggcca

SEQ ID NO: 587961 - DNA, 640 bp, Homo sapiens
atagcctccacaatatattataaaaacaaattggatttcaataaaaaattacaaggtgtactaaaagacaaaatcttacaagtaaaattccacaggaaaaaacaaaaatagaaaatagaaacaactaccccctctccataataaccattatattgtacttgcagacaaacaccttcaaataaataygaataatttgttcatgaaaatcgatgaagagatggagaacaagaacatagatataaaaatgaaaaatttcaccagcaattagaatctatttatataaacattctagaaataaaagtatttattatctgaaatttaaacctcaatgtataagtttaacacagattgcaaatagcagaatatattgtcaatagctaggaaatatgtcaatagaaaatatatgactgaagaataaagagaagtagtcatgaagatacagaaaatagtgagtgttaggatacatgtaggcatagcaaaaaggcataatgtacatgtaagcagaaagaaaggagagaaagatgggacatatttaaagatgtaatgactaagaattaccaaatctgatcaaaaacatcaagcaacaattcaggaagttctgaaaagcccaggcagggtaaataaaatgaataacacctag

SEQ ID NO: 587962 - DNA, 500 bp, Homo sapiens
gtgaggatgggaaaatattaaaccctgtacattgctggtggagatgtaaaatggttcagcagctgtggaaaacatcatagcagctcctcaaaaaattggacataaaattaccycaaaagtattgaaagcaagaacttgaacatatatttgtacatcagggttcatatcagcattatttataatagccaaaaggtagaaacaacccaaatatctatcaatggatgaataaataaaatatcatacatacctacaatggaatgttaatcagcctaaaaaaagaagtgaaatttttatatatgctacagcatagatgaaccttgaggacattatgctaagaaaaataagccagacaaaagacaaacattgtatgattctgtttatatgaggcaccaagaatagtcaaatttatagaggcagaaagtagaataacagttatcagggactgtgggagggagaatggagagttactgtttaattggcacagagtttcagtttgagat

SEQ ID NO: 587963 - DNA, 629 bp, Homo sapiens
tgcatatgctacttatatactaatagcccaaatatttgtatggtgtgtgaaatgtgggagtatttcaagctgtaaccaaataatgttaaatagtgaaaactggtttattgaatagaagcacattttcaaaaagctttgttccatggaaacacttttaatatgtgcttgccagccagcatatggcacatgtctcaagaagtgtcaaaatactaatttttaaaaatgaacaaacatgttattgataaatgtattacttggyagaaatggttgttgaatattactgatccttattactctacagagaaagggaaaaactcaattaactaatagcattgtagtctaattgtacacacccatttctgtttctcaaaggataatactaataattatcttagcagaattgaatagcaatatgtctaaaatatcttctacagtagtctatttttaattgctaacaaaggagaaaaaatattgagaattagtatctttttaaacaatgagtaaattgacgttttaaactgcattttaaaattattttctttttaatgatacttctctttttaaggacacaattaatgaaaattatgtataaagcattaaatgttttttccagatttgttctttcattg

SEQ ID NO: 587964 - DNA, 578 bp, Homo sapiens
cagtggtatgttttgcttacgcactccctaaacaaactttgaaaaactgggtactcctttgagcatttttaagtagacatctaaaactttttcattgtaagtataagtagttgcagtggatgtaatttcaactgtattgggaatattgactttataaataaaacttgtattactctttttaatatatccaaagaaatatgagcaccaaggtggcttaatgtccaccattatacattttgactcatgtttgtattttgttgatgatttagactcacttctacttctccttgaagtcaccattttatttcatatcccccacagaattttatcctaatataacatacttttattcttaaacataacatacctttattctttaacataacatacttttattcttaaaactatatataaatagttatatatatatagttttgtatatatatagttttgtatttatatatatgtatttaaatatatagttatatatatattatatatagttttgggatacatgtgcagaacatgtargtttgttacataggtatacacatgccatggtggtttgctgtacacat

SEQ ID NO: 587965 - DNA, 574 bp, Homo sapiens
gcttcattcctttagtggcatttcgagaaaatttcttacctactttaaggttatataagtatttttctacattttcatctaaaactttatattttcatgtcatagttaggacttaagtgtgcctggaattatttgtgcatagtttgaggtaagaatgtactttttttacacaaggctaaccaattgtcccatcataatttttaatagtttttgtctcagcataatttatcaaatactctccccttccttctactgatgttaaagataacctttgtcatatacrcccatggatctccttctgggctgtttttttgatcggtcaaactggtcgttgttaaagtgtaatagactttgagatctgctaggacaagtctcccacattgttattcttcgcaatttgctatttagtattaattttagaatcaagtaccacaaaatattcttacaaagtttgattagaattacactgaatatatgggttaatttgggaagaactgatatctttacaatattgaattatcttagtcattgtagcagtttgttctcacactgctatgaactgctatgaacaccc

SEQ ID NO: 587966 - DNA, 574 bp, Homo sapiens
gcttcattcctttagtggcatttcgagaaaatttcttacctactttaaggttatataagtatttttctacattttcatctaaaactttatattttcatgtcatagttaggacttaagtgtgcctggaattatttgtgcatagtttgaggtaagaatgtactttttttacacaaggctaaccaattgtcccatcataatttttaatagtttttgtctcagcataatttatcaaatactctccccttccttctactgatgttaaagataacctttgtcatatacgcccatggatctccttctgggctgtttttttgatcggtcaaactggtcgttgttaaagtgtaatagactttgagatctgctaggacaagtctcccacattgttattcttcgcaatttgctatttagtattaattttagaatcaagtaccacaaaatattcttacaaagtttgattagaattacactgaatatatgggttaatttgggaagaactgayatctttacaatattgaattatcttagtcattgtagcagtttgttctcacactgctatgaactgctatgaacaccc

SEQ ID NO: 587967 - DNA, 621 bp, Homo sapiens
gcaacatgggtaggggctaagaatctgcattttcgttgagckgtcccagatgtttctgatgtaggatgttgaggaccacacattgagaaatgctctctgaagtgtccatttcctgagatggcatttaagacttactcttttctcgcatagtgagatgagacaatctggttggggagatgagacagtaagctgttatagagcagtgcaaggcatattcaagggttaaaatgacacaggaatgcaagagtactttgggaatgcatacaaggagaagtctagatgggctctggggctacagttgactcttgagcttgaaaataagagggagaaaggccattcccctactgggccagaaaactagaactaaaaaagcatcccctgtctatcacgccacttgactgagcagtgagttacctaccagtactgttgatattctcaacatctcagaaaaaatatatcctggtatggattttgtaagacagcacaggggtaaagattccgtaaatctcaagggaaggcaaacatttttaggagcccactaaggtcatggtgagcctcactttctgcccagtatcttttgttagaccactgtgttcagttctaaagaataacttcatggat

SEQ ID NO: 587968 - DNA, 621 bp, Homo sapiens
gcaacatgggtaggggctaagaatctgcattttcgttgagctgtcccagatgtttctgatgtaggatgttgaggaccacacattgagaaatgctctctgaagtgtccatttcctgagatggcatttaagacttactcttttctcgcatagtgagatgagacaatctggttggggagatgagacagtaagctgttatagagcagtgcaaggcatattcaagggttaaaatgacacaggaatgcaagagtactttgggaatgcatacaaggagaagtctagatgggctctggggctacagttgactcttgagcttgaaaataagagggagaaaggccattcccctactgggccagaaaactagaactaaaaaagcatcccctgtctatcacgccacttgactgagcagtgagttacctaccagtactgttgatattctcracatctcagaaaaaatatatcctggtatggattttgtaagacagcacaggggtaaagattccgtaaatctcaagggaaggcaaacatttttaggagcccactaaggtcatggtgagcctcactttctgcccagtatcttttgttagaccactgtgttcagttctaaagaataacttcatggat

SEQ ID NO: 587969 - DNA, 415 bp, Homo sapiens
tctgaaaaaaaaaaaaatatcttacataggactaggtttttgtgtgataaaacctgttaggagtagcagcacctatttcccagctctcccatccacttctctggaggacattggccaacatccrctaaaataaataaacattccaattatttccagttatttatttgacagtgccatccatggatccatgggagggagtattttgcactgcagtggttctcaaagtgtggtccctgagcatttttttaaactaagcttcttccctccataatgagtgcagccctttcaaaataccacgaaatagcatttgtgttacctgggaacgcataagaaatgtgaattcttgggatcctctccagacctactgaatcgggaattgtgaggcgaggcccagaaatcttcatttttatcagtg

SEQ ID NO: 587970 - DNA, 415 bp, Homo sapiens
tctgaaaaaaaaaaaaatatcttacataggactaggtttttgtgtgataaaacctgttaggagtagcagcacctatttcccagctctcccatccacttctctggaggacattggccaacatccgctaaaataaataaacattccaattatttccagttatttatttgacagtgccatccatggatccatgggagggagtattttgcactgcagtggttctcaaagtgtggtccctgagcatttttttaaaytaagcttcttccctccataatgagtgcagccctttcaaaataccacgaaatagcatttgtgttacctgggaacgcataagaaatgtgaattcttgggatcctctccagacctactgaatcgggaattgtgaggcgaggcccagaaatcttcatttttatcagtg

SEQ ID NO: 587971 - DNA, 558 bp, Homo sapiens
cagtgctggaatgtctctcctggacttctgggttaacacagaggtattcctgtctgtggatggttgtcaaaaatcagtgtttctgtgacagtatgaggactgcaatctcctattttgccctctcctatttgtttatgtatctctttattattgtacccaagagcaaagtattttcctaatttaaagtatgttaaatttcctactcactcttctctttagaattatatgctggctctttcttagcactgtgtcttccagataaataatagcgtttgtcaggtatgaaaaatgttcagtttaaattatatttaaattttgggatttatccaaatttagattaccatttgggaattgatagttgtaaaatatgaagtttccccccaccccaggagcatggtaactctctcctttgttctggtcctttctcttagtaaaatgtacttcttatttacagtgatcattttttgtgaggtttataatttktgttggctattgtgaattggatgccttaaacatattttctaagtgttagaaatatttttgaattgtttattccaa

SEQ ID NO: 587972 - DNA, 627 bp, Homo sapiens
tacataggtgtttatattgtttgttcttgtcctgtatgtgacacacacacataaatacacatacttaaaatttctatgtaataaaatgagccaagtttttgaaaatcctggtacctctagaggcttaatacaatttaattttactatattttcttctagttattcaataattttatttattttaaatgtctaacctcttaatayactggtttttattctggtctgtatttgaaggtgaggccttttaaatttctttcatctaaattgttcttcagttggcctaataaaataatccttatgtagaaaagaatttggatattctcagtgttttgggttttatttttattttttattttttttttgagatggagtttcgctcttgttgcccagactggagtgcaatggcgtgatctcagctcactgtaacctccgcctcccgggttcaggcgattctcctgcctcagcctcccgagtagctgggattacaggcgcctgccaccacgcccagctaattttttgtatttttagtacagatggggtttcaccatgttggtcaggctggtcttgaactcctgacctcaggtgatacatacgcctcggcctcccaaagtgctgggattacaggca

SEQ ID NO: 587973 - DNA, 502 bp, Homo sapiens
ccacatctggctaatttttaaaaggttttgtagagatggggtctctctctgttgctcargttcgtcttgaactcctggcctcaagcgatcctcctgcctcagcctcccaaattgttgggactacaggtgtgagccactgtgcctggcctacaatacgttttttaatatgttttaatatctggtaagttatccacccagattctggctaggggttgcattaaatccataagttaatttggaaacaaccgaaatatgtaagatattgatcccccactgctggaacacgctgaacatctctacctgtacaatggctcttttgtgtccctggtacaatttcattatccggattgtacacacttcccatgagtatggttcctgggtattccatctttgattctatcatgagtagaactgcccacctgtcacatctactgaccttcttgcaggcagaggactacactgtgcatacttcgcatgtgtaggcactgtctctgcagctttc

SEQ ID NO: 587974 - DNA, 502 bp, Homo sapiens
ccacatctggctaatttttaaaaggttttgtagagatggggtctctctctgttgctcaggttcgtcttgaactcctggcctcaagcgatcctcctgcctcagcctcccaaattgttgggactacaggtgtgagccactgtgcctggcctacaatacgttttttaatatgttttaatatctggtaagttatccacccagattctggctaggggttgcattaaatccataagttaatttggaaacaaccgaaatatgtaagatattgatcccccactgctggaacacgctgaacatctctacctgtacaatggctcttttgtgtccctggtacaatttcattatccggattgtacacacttcccatgagtatggttcctgggtattccatctttgattctatcatgagtagaactgcccacctgtsacatctactgaccttcttgcaggcagaggactacactgtgcatacttcgcatgtgtaggcactgtctctgcagctttc

SEQ ID NO: 587975 - DNA, 489 bp, Homo sapiens
acttctccctctgcttagtcctgcttcctttgctttctcacaagtgtccctgagagcaatctccagaaaacctcctacttgcacatctcagattctgaatttgctgccttggaarcccaacctgtgacactggtttttgacaattttacttttaggtacctaggcatggtatctttatttatcttgatcagtgttcactatgcctattcaatctgaaaagacttgtcattgttcagtccttggactttaaacaatttttttttaaattatctatttcctttaaatttttcttaaaaattctctctgttttctcctattgaatggatttcaaaatatctgcattaatattccctttctgttaattctcctttcatactctctaattgtacctttgcactgcattctgagagaagtcctcagctaggtcttcagattaatttagtgattcaaattgatgggctatctggcccatcaattgggtctttatag

SEQ ID NO: 587976 - DNA, 610 bp, Homo sapiens
aggtttaattgactcacaggtctgcatggctggggaagcctcaggaaacttataatcatagctaaaggtgaaggggaagcaagacacatcttacacagtggcaggagagagagagggcaaggggggaactgccaagcactttaaaaccatcagatcccatgaaaactcattcactattatgagaaccatgcggagaaaccaatcacctgccaccaggtccttccctcaacacatgggaattacaatttgagatgagagttgggtgaggacacagcgccaaaccatatcacctcacatactcatcatttttgtggtgcgaaaaaatttatagccactctcttagcatttttcaagaatatgatatrttatcaagtacagttgtcaggctgtacaatggattgcttgactgtattcctcctatttagctgaattttgtggcctttgaccaacagtgccccaattctccccagcccttggtggccatcattctactctccactttcgtgagatcacctttattagatgccacatatgagtgaagtcatctggtgtttgtctttctgtgcctggcttatttcactaagcatctttctttttgatccactcatct

SEQ ID NO: 587977 - DNA, 597 bp, Homo sapiens
taaagatagctatgtagaccaatggaacagaacaaaaagcccagaaataaaccctggcatatctggctacatgattttcaggaagtgtgccacaactacacagtagggaaaaaaagaacagtccctttaacaaatagtattgggaaaactgaatattgacatgcaaaagaatgaagctggactcttactttatagcatatacaaaaattaactcaaaatggattaaagacctaaatgtatcacttctcggccttttggctaagatcaagtgaagtcctaaatgtaagatccaaaactattaaacttctagaagaaaatagaagggaaaggatttaggacagtaatttcttgkctatgacaccaaatgcaaggcaacaaaataaaaaaacaaacaaacaaatgggactacatcaaacttaaaaacttctgcatagccatagaaaacaatcaacagaatgaaaaggcaaccaacagtatgggaagaaataattgcaaatattatatctgataaggtattaatatccagaatatgtaaaaaaacagatttaaaaattggcaaagaagttgaatagatatttcttcacaaaagatatacaa

SEQ ID NO: 587978 - DNA, 532 bp, Homo sapiens
ttgtttccatttttttctcttttaagtgtattgcagtgaacaytgtgcataaatatttatcttcatctttgtcacttcatcaaaatgagttttggacagtattagatgtttttaagaaaataaagaatagaacaagtttgatctccaaactgcttttgtcttgctagttccaaagtcatatgatcatacttttctaaaatcactcctttgaatcaaaaaagtagagaagcatggaacaaacctaaggtctgaacaacaaaagatatggtattctgatgggaaaagttgggttttgttataaacattatttaaatgcaaaagatagctgctaacctgtgttgtgtgcctctagctgtgacagggagttcacagccactttgcatagtgaacaataaagtaattttttggctttttcttcttctgattcaacaacagtaccgggagctccatttgtgctcttggagggagaagtggctgctccaggtggcaggggtgttgtgccagatttgaggagaaatgagccactttcaga

SEQ ID NO: 587979 - DNA, 532 bp, Homo sapiens
ttgtttccatttttttctcttttaagtgtattgcagtgaacactgtgcataaatatttatcttcatctytgtcacttcatcaaaatgagttttggacagtattagatgtttttaagaaaataaagaatagaacaagtttgatctccaaactgcttttgtcttgctagttccaaagtcatatgatcatacttttctaaaatcactcctttgaatcaaaaaagtagagaagcatggaacaaacctaaggtctgaacaacaaaagatatggtattctgatgggaaaagttgggttttgttataaacattatttaaatgcaaaagatagctgctaacctgtgttgtgtgcctctagctgtgacagggagttcacagccactttgcatagtgaacaataaagtaattttttggctttttcttcttctgattcaacaacagtaccgggagctccatttgtgctcttggagggagaagtggctgctccaggtggcaggggtgttgtgccagatttgaggagaaatgagccactttcaga

SEQ ID NO: 587980 - DNA, 610 bp, Homo sapiens
catttttgtttttgataatgtatgtcttggtttattaagttggtttaattaaggccactaagaagtatcattttctgcctctgagagatggcaaagatttagaaattacaataagtggggcagatacaatayaggcatctgggcttggtggagtggaaaagtagtataactgttgttaaacaatatatgaaattaatatcatttcaccaagaaagtctccctctagaaatctgtcctaaggaaataaacatccatccattcaacaactactgattgagcacctattatgtgctatatactatatcaggcatggaagttagcagtaaaaataccaagtctctgactcagtggaattaatcatctagtgggggagagagaaaataagtgtgtgtgtgtgtgtgtgtgtgtgtgtatgtgtgtgtggatttatatatacaaatgtattttaattaatttaaatgtaaatcttaatttataagtctatttattaaataaaaaatgtgcattataataataaatgcataaacttttattatatgtaataaatatcaaagcacatatattcaaaacatatataaaactatatataaattatatatgtaaaaaatat

SEQ ID NO: 587981 - DNA, 610 bp, Homo sapiens
catttttgtttttgataatgtatgtcttggtttattaagttggtttaattaaggccactaagaagtatcattttctgcctctgagagatggcaaagatttagaaattacaataagtggggcagatacaatataggcatctgggcttggtggagtggaaaagtagtataactgttgttaaacaatatatgaaattaatatcatttcaccaagaaagtctccctctagaaatctgtcctaaggaaataaacatccatccattcaacaactactgattgagcacctattatgtgctatayactatatcaggcatggaagttagcagtaaaaataccaagtctctgactcagtggaattaatcatctagtgggggagagagaaaataagtgtgtgtgtgtgtgtgtgtgtgtgtgtatgtgtgtgtggatttatatatacaaatgtattttaattaatttaaatgtaaatcttaatttataagtctatttattaaataaaaaatgtgcattataataataaatgcataaacttttattatatgtaataaatatcaaagcacatatattcaaaacatatataaaactatatataaattatatatgtaaaaaatat

SEQ ID NO: 587982 - DNA, 610 bp, Homo sapiens
catttttgtttttgataatgtatgtcttggtttattaagttggtttaattaaggccactaagaagtatcattttctgcctctgagagatggcaaagatttagaaattacaataagtggggcagatacaatataggcatctgggcttggtggagtggaaaagtagtataactgttgttaaacaatatatgaaattaatatcatttcaccaagaaagtctccctctagaaatctgtcctaaggaaataaacatccatccattcaacaactactgattgagcacctattatgtgctatatactatatcaggcatggaagttagcagtaaaaataccaagtctctgactcagtggaattaatcatctagtgggggagagagaaaataagtgtgtgtgtgtgtgtgtgtgtgtgtgtatgtgtgtgtggatttatatatacaaatgtattttaattaatttaaatgtaaatcttaatttataagtmtatttattaaataaaaaatgtgcattataataataaatgcataaacttttattatatgtaataaatatcaaagcacatatattcaaaacatatataaaactatatataaattatatatgtaaaaaatat

SEQ ID NO: 587983 - DNA, 412 bp, Homo sapiens
ggctggacttccctccagctcccttcgaatatgaccttgaaggtcctgatgcatgttgaraagggcgtggaagtaattacagaaatggaggctacaggaggaagtggaaggaaggaaaaggaatactcgtggaaagccttcatatgttcacaaaaacagcagccttggattcgagagggcaaagtagtaacctccagaggtcttggggcttgagataagagttcacaaatggcaaaggaagaattttttgttatccaaaaggtatgctaactcaaaaaaaaaaaaaaagggtggcatccttaaaaggccagaatgaggccttatgcaggcaaacaaactacttcaaaagccaatagaaaacttggccctgtgtaataacaggaagcaaaagcatatgttaagtggtaaggag

SEQ ID NO: 587984 - DNA, 583 bp, Homo sapiens
ctctacagaaaataagaaaattagccatgcatgatggtgtgcttctttagtcccagctgcttgggaggttgaggtgggaggatcaggtgagcccaggaattggaagctacagtgagccaccaatgtgttccagcctgggtgacagattgagacccagtcttaaatatatagagatggtaataagtggaagcttatttgtcaaccctagaactagcactaaatataacacaaagggcatacataatgagtcaatagccacattagggaagtactagaaattgtgaaaaataaggataaaaaagtagaaaaaatgataagtgtaacataaaatacaaataagttgaggctgtaagttcaccttcaacagcaattactaaaagttattggaacaaacatttcagataaaggaaataaattgttaaaatgtgtaaaaaagcagaacggaattatatgctatttcaagaggtttaccttaaataagaagatacagttttgtcgaatrtacaagaatgaaaaacagtttatcacagaagcactatcatgaaaataactgaagtgtctatattgatattagagaaaataa

SEQ ID NO: 587985 - DNA, 576 bp, Homo sapiens
tgttgtagtttctccacatcttcaccagcttgtagaattagctgcctttttattacagccagtgggtgtgtctcattgtggttttaaattgtatttctgtaaggactaatgatcacaaatactctttcatatgcttattggtcatttatatgtcttatttttgtgaaatattcaaatattttactcattttaagttaggtagttggtcttattactcagttgtaagtattctttatgtattttggttaagagccttgtattagatatacratttgcagatattttctctcagtctatgaactgtatatttttctaagtgtcatttagagtgtaattttcatttttaaaaataattttaaaacgttttaatttttgtgggtacatagtaggtgtatatatttgtgggttacatgagatattttgatacagacttgcaatacataataaccacatcataaaaatggggtatccatctcctcaagcatttatcctttgtgttataaacaattcaattagacccttttagttattttaaaatttacaattattgactaaagtttacatgttctgctatca

SEQ ID NO: 587986 - DNA, 596 bp, Homo sapiens
aggtgcatgccactacgctgggctattttttttttgtatttttgtagagacagggtttcaccgtgttgcccaggctagtctcaaactcctgagctcaggcaatccacctgcctcggcctcctgaagtgctaggattacaggcrtgagccaccatgcccggcccaagttctgttgttttaagccatctagtttgtgataatttgttaaggaagccctagtgtagcagtggaaaggaaacctagcatgactgtctccattttgctcctaaccacttccacttccccacctgcagtgatatcttttaggttaactgcttttgcttatctctgcacatagaccaagctaactatgggaagaatttagtttcttatttaacttgaaagaagtacaacagtagtcccattccaaaattaacccccaaggagataagaagagtatatacacaagtcacaatgtcgtgttaaagatttataggagcattgtaacctgaccaaggacaaaaaagcttcacaaactccccttggacttccagtgctgcccagatgtctgtggtcatcagtcacctcttgacctcaagcctctccctcttttccctt

SEQ ID NO: 587987 - DNA, 575 bp, Homo sapiens
tggagtagcaaaattctgttcctagcatttgttgatgttgacttaataatatcattctgagcattggcagctctgtaaatggtatccttgagwataacctctttaaggaagtcttagattcctggcttctgttcactgaagcaaacatacagtttggaaagaagtgctcagacttgcttttcagtctctaaagctctttggctccaaggctacactcctgatgtcatcttgcaaggaaaagaaaaactgaaaacattatgcaagaagttcaagaggagggtttgtaaagccatggtccagaagtaatagaactttacatttttcttctacatcagcttgctggtaataagcccatattgctggtacaaagtggccattgaatcatcataaagtagttctctaattactcatactttcttgtttgcacaggtaatttgcatatacctttcaaatttcttggatgtaggctttcctcaggtactgtcaattttatcttgttttaaaaacacagtgctggccaggcacagtggctcatgcctgtaatcccagcactttgggaggccaaggtgggtgga

SEQ ID NO: 587988 - DNA, 575 bp, Homo sapiens
tggagtagcaaaattctgttcctagcatttgttgatgttgacttaataatatcattctgagcattggcagctctgtaaatggtatccttgagaataacctctttaaggaagtcttagattcctggcttctgttcactgaagcaaacatacagtttggaaagaagtgctcagacttgcttttcagtctctaaagctctttggctccaaggctacactcctgatgtcatsttgcaaggaaaagaaaaactgaaaacattatgcaagaagttcaagaggagggtttgtaaagccatggtccagaagtaatagaactttacatttttcttctacatcagcttgctggtaataagcccatattgctggtacaaagtggccattgaatcatcataaagtagttctctaattactcatactttcttgtttgcacaggtaatttgcatatacctttcaaatttcttggatgtaggctttcctcaggtactgtcaattttatcttgttttaaaaacacagtgctggccaggcacagtggctcatgcctgtaatcccagcactttgggaggccaaggtgggtgga

SEQ ID NO: 587989 - DNA, 547 bp, Homo sapiens
ggtgattatagaagtaaatgaaggttctttttggcatgctggcaaaaaaagaaacaaacaaacaacaacaaagccatgatagaaatccttggttctgagattatcagtatcctctccatgcatactatctctttacattcttcttcctttcttcagctttcccatgaccaatgataaagcacagattttggatactagtcaaataaactggacagaaagtaataaagttttttctgccatcgtctcccagaagagtgaagaaatgaggaaaacacagtgaaacctcattatacagcatcttcctacagatgtagtgggaccaatcccctccccacacgcatagcaccccgttataacacaaagcagagatccccctggcattctatcagagttctgatggatgtatttttctgaaggatgtctaggcagtgtgacttggcattctgcccagggagtgagggatgtatgtgtgtgtgtgtgtgtgtgtgtgtgtgkgtgggtgggtgtgtgggtgtatacatgcatttgaagaagtttccccagatga

SEQ ID NO: 587990 - DNA, 579 bp, Homo sapiens
cagtatattgtgcaatatttgcacataattgtgctgtatttgtacatagtaaatagtaatcttggattgtattctcagaaaacatgagtcatattgaacataatttatttcaaaaaattttatgtagaagacatcatggttatatatttccctttgaatatttattttgaatatgtagtattttttgctacatttcaagtttgtctcaaaaatatattttaatgagaaatagtatcacaaactaatagtattctgaagtacttttatgagctttgtctctactcaagctgaaatatagcacaatttggtagttgattaatttggcttattaatacattgctataataagtgcattatgttgattatttctgtgggacattgtgtataatgtgagtcatagtttccagaaaatatctttagatttatagattgtggaatgaccttttttacattagatgrataaaagatcttaggtgatgtaatttttattgccatttttaggaaaaatagctaaaaatgtctttccaacgttgttttgaaatttgcttctcttgctcagtgatatatatgtatacacac

SEQ ID NO: 587991 - DNA, 521 bp, Homo sapiens
cagagttctagtatcccaatctgatagtagttttcttagagaattgacagaatgatggttaattggaaatatatatatacatatatatatatatataatggagaattacacagkgcctgggttatattaaggtcatacataatgggcatcagttttatttgttttctctcctgatagcaccaaaggatttcaatgtagatattgggaaggtaagaaatttgaagaagaaaatctgagtttaattcctagctacttattagcttaaccttgagacagataatctctgaagctgaaattcctcatctttaagtggaaactataagaatagatgtctttaatatctctcaggatctttgtcagttgcagataaaaggaacaaaaaagttctcataaacgatgactttcatatatagttattatcatcatcatcatcatcatcatcatcatgacctcttagtgactagtaaaatatctgtgtagttgacaatcatgtacactagacttcaagtgaagatgatgca

SEQ ID NO: 587992 - DNA, 521 bp, Homo sapiens
cagagttctagtatcccaatctgatagtagttttcttagagaattgacagaatgatggttaattggaaatatatatatacatatatatatatatataatggagaattacacagggcctgggttatattaaggtcatacataatgggcatcagttttatttgttttctctcctgatagcaccaaaggatttcaatgtagatattgggaaggtaagaaatttgaagaagaaaatctgagtttaattcctagctacttattagcttaaccttgagacagataatctctgaagctgaaattcctcatctttaagtggaaactataagaatagatgtctttaatatctctcaggatctttgtcagttgcagataaaaggaacaaaaaagttctcataaacgatgactttcatatatagttatyatcatcatcatcatcatcatcatcatcatgacctcttagtgactagtaaaatatctgtgtagttgacaatcatgtacactagacttcaagtgaagatgatgca

SEQ ID NO: 587993 - DNA, 521 bp, Homo sapiens
cagagttctagtatcccaatctgatagtagttttcttagagaattgacagaatgatggttaattggaaatatatatatacatatatatatatatataatggagaattacacagggcctgggttatattaaggtcatacataatgggcatcagttttatttgttttctctcctgatagcaccaaaggatttcaatgtagatattgggaaggtaagaaatttgaagaagaaaatctgagtttaattcctagctacttattagcttaaccttgagacagataatctctgaagctgaaattcctcatctttaagtggaaactataagaatagatgtctttaatatctctcaggatctttgtcagttgcagataaaaggaacaaaaaagttctcataaacgatgactttcatatatagttattatcatcatcatcatcatcatcatcatcatgacctcttagtgactagtaaaatatctgtgtagttgacaatcatgtrcactagacttcaagtgaagatgatgca

SEQ ID NO: 587994 - DNA, 591 bp, Homo sapiens
actgtttaacacctacaagtacattacattgattttaaattagttacgtattttagaaaatttaaatcrctattggggaagtaatttaaattatagagtgttctttagaattaatcaaataccatataacaaattgttgaagcttttattcaaagattgtagatttcttaaaaattccttttaatctttattcttgttcagccatatatatatatataaagctgaacacacacaccttagagatacacatgcttaggtgcaggaagttgcagtacaagaatattcagacaagcattagttacaaaattatcagagttaattaatattgggaagaattcatattccaccaacattgaatgaataaatatatcacattattttcctcactaccatgactcctaccccatagtaagcagtaagctaaatgttgtgttttcatcaggttacgttggtgatatctgggaatccacctttccatacatgaaaacaatgccaattttaaattaaaggcaaataatggttggaaaagtcatttgtgttttatttagtatatttttaaaaactttttttaatggtaaaatatacataaca

SEQ ID NO: 587995 - DNA, 429 bp, Homo sapiens
attgttatactgattgttaaaaatattttaccaatttttatgaagatgccggatacactggaaacccatgagttttttccatgtaaartaatttaatgtaggctcctactttctgaacattcactctataatacactggcaggaacaaattagttttgatacttagagatgtctgtattttattttatcttatttgccttgtttagcatgtctgagtttcctatcaccaatttgattctaagcaatttggaagtttgtcgtaggcttctttgtatccttagcgagcctagaatatgttgaatataaagcaggtgcctttcacatgtattcagattgattaaaagatcacacacacatacacacagacacataaacataagtacttctctggccaccaagtgaactgcacatgctgtgatttcctgaagt

SEQ ID NO: 587996 - DNA, 475 bp, Homo sapiens
gaattcttcccacagaggtctagcagggagccaccactcacgttactgcaccttgttttcagccaataatgagatctcccctcacttcaacctctgcctcctggattcatccaattcttgtgcctcagcctcccaagtagctgggactacaggtgctccccaccatgcctggctaatttttgtattttttagtagagacggggtttcaccatgttggccaggctagtctccaactcctgggctcaagtgatcctcctacctcagcctcccraagtgttggaattacagacgtgagccaccgcacgaggccacacttttactttcttatttattgttacattttgcagttgtgtcatatgcattggtattattattctgattgtctttcagtttgtttacagtcaggttctacctttaaactttttttaaatcacaaaacgcccattctccagcattaaagcaaactgaaataaga

SEQ ID NO: 587997 - DNA, 486 bp, Homo sapiens
ttttaggtcttacaagtctttaatccatcttgggataatttttgtataaggtgtaaagaaggagtccagtttcagttttctgcatatggctagccagttttcccaacaccatttattacatagggaatcctttccccattgcttgtttctgtcaggcttgtcaaagatcagatggttgtagatgtgtggcattatctctgaggcctctgttcagtgccattggtctatatatctgttttggtaccagcaccatgctcttttggttactgtagtcttgtagtgtagtttgaagtcagatagtgtgatgcctccagctttgttctttttgcttaggattgccttggctatgygggctctttttttggttccatatgaaatgtaaagtagttttctctaattctgtgaagaaagtcaatggtagcttgatggggatagcattgaatctataaattaccttgggcagtatggccattttcacgacattga

SEQ ID NO: 587998 - DNA, 576 bp, Homo sapiens
atttatttatctttgtgttcgttgcatttccttttgggttcttggtcatgaagtctttgcctaagccaatgtctagagggggtttttttttttttttgatgttatcttgtagaatctttatggtttcaggtcttagatttaaatatttgatcattttgagttgatttttgtataagatgagagatgaggatccagtttcattcttctatatgtggcttgccaattatccaagcaccatttattgaatagagtgtcttttccccactctatgtttttgtttgctttgtcaaagatcagttggctgtaagtttttgattttatttctgggttctgtattctgttccayggtctttgtgcctatttttataccaatatcacactgttttggtgactatggccttatagtatagtttgaagtcagataatgtgatgcctccagatttgttgtttttgcttagtcttgctttggctatgtgggctcttttttggttccctatgaattttgaggttgttttttctagttctgtgcagaatcatgttggtattttgatggaaattgcattcaatttatagatt

SEQ ID NO: 587999 - DNA, 580 bp, Homo sapiens
aaaaaaaaaaaaaaaaaagacctacaggaagctgctctgaagaggagagccatgggccacatgtcttcattccttcagtctgcatggttgattctggtcttgtcgggtttagaaaacagcttcatttattaacagaagggcatagggctgagaatgggccctctggaagaaggcaatttgaaagagataggtcctcaagaccccagccaagaaacytaaggtgtcagaccaggcacttgtcaaagcaggaaatgagacttgtgtcaggagtgagggggaggctggggtatcaatgagtacatcttgtcctagatggaggtgttctgtagcagcccaggggcagagagctgactcaccagacaacagacacagtagcagtgaccagcacatgactgctctcagagaggagacggtattggactatgcttctaaattatgtaccacactgctgcattgattcaggtaaggcagggtagggctggacttgtaagctgaaggccttgtgggttgctggagatttggcctggggaaagtaggagctgacagctgcagtctcactttttgtacagacacaggttag

SEQ ID NO: 588000 - DNA, 580 bp, Homo sapiens
aaaaaaaaaaaaaaaaaagacctacaggaagctgctctgaagaggagagccatgggccacatgtcttcattccttcagtctgcatggttgattctggtcttgtcgggtttagaaaacagcttcatttattaacagaagggcatagggctgagaatgggccctctggaagaaggcaatttgaaagagataggtcctcaagaccccagccaagaaacctaaggtgtcagaccaggcacttgtcaaagcaggaaatgagacttgtgtcaggagtgagggggaggctggggtatcaatgagtacatcttgtcctagatggaggtgttctgtagcagcccaggggcagagagctgactcaccagacaacagacacagtagcagtgaccagcacatgactgctctcagagaggagacgrtattggactatgcttctaaattatgtaccacactgctgcattgattcaggtaaggcagggtagggctggacttgtaagctgaaggccttgtgggttgctggagatttggcctggggaaagtaggagctgacagctgcagtctcactttttgtacagacacaggttag

SEQ ID NO: 588001 - DNA, 590 bp, Homo sapiens
catatagaagagaacgtctaaaactgatatagaagagaacgtctaaaactcatatagaagagaatgtctaaaactcatatagaagagaatgtctaaaactcatatagaagagaatgtctaaaactcatatagaagagaatgtctgaaactcatatagaagagaatgtctgaagctcatatagaagagaatgtctgaaactcatatagaagagaatgtctgaaactcatatagaagagaatgtctgaaactcatatagaagagaatgtctgaaactcatatagaagagaatgtctgaaactcatatagaagagaatgtctgaaactcatatagaagagaatgtctgaattttaaggcacaacaatgatgaagaacaaaagataccttgcatgagatataacaaaagatctacataaatttttgaagaaaattttaaagccttactaaaaaaaaaaaagtaaagaggacttaaatacatgtagaaatatactatttgtgtgcaagggaaaacccactattattaagatggtgatygtcccccaagctaatgtataaaatttcaatgaaaatcctagtatttggggggagggg

SEQ ID NO: 588002 - DNA, 633 bp, Homo sapiens
cagcctcctcaatagctgggactatgggatgcaccaccatgtatgggtaattttggtatttttagtggagacgagatttgctccatgttggcgaggctggtctggaacccttaaactcctggcctcaaacagcctgcctcggcctcccaaaatgctgagattacaggtgtgagacaccatgcctggcccccattatactttagaagataaattaactttcccagcccacagtgcttaarccatatggttgtgatgcaaattaatgcaataacatatgcaattcacttttatctaatttgattctgctttatgaaatgccatcttttcttacacccactgttttcttgctgaaataatctacatcatggattaattccaggatttctagcaggcttttttctttctccacctccacgtatagcccttttcttgtaaacaggtgcagtttattgtggccttttccacgtctctttccattgctcttgcacggtcacacgtgctgccacctgttgcattctagaatatgctagctgtcaatgttagcaaaaagatgagagtagggtcagggtcatgagcttggtgcttcatctgtctcacagaacagtagtctcatgcggtcgaaggatgattgcc

SEQ ID NO: 588003 - DNA, 566 bp, Homo sapiens
caaggcctacctggccaactactgccagcacccaagcaagctgcttggaggcccaaggactggtctgcctaggcccaccattgctggcactcacatacactactcaggggcccgaagacctgcacacccagctcgctgctgccaccactgacacccaaggactggccctcctggcatccctgtcttgtgcaaaacctcaccatagcctctgctaaccactgcaagctaagccactgaygaactcacagatgctgattgtagtgaaaaaaattatacagacactatactactgcagccactcagaatcagagccaaaacatcctacctaaccaatgctataaatacatgaaaaagtctttctctacaaaaaccaatccataaaatttgaaggagtaactcatactaaatgcacagatatcaacacaaggacacaataaatatataaaagcaaggaaacatgatgcctccaatgaaaaaacaacacttctccagtaaaagatcccaaagaaaagaaaatctatgaaatgcctgaaaaattattcaaaataatgatattaaagaaacta

SEQ ID NO: 588004 - DNA, 501 bp, Homo sapiens
acaatgcccgaaccttcttatttttttttttttttttgtagagtcagggtctccttatgttgcccaggctggtctcaagtgatcctcccacctgggctcccaaagtgctgggattactggcttgagccagcctggctgctaaactctactttttgagcaatggcctcaattttatcttccatcctttctattaagtttttcatttcttctatcacacatacatatataggtacacacacatataaatatatagacatacatatatatacacataaatgtatgtatgggtattgtatatatgtatatgtatattttagagacgggatcttgyattcttacccaggctagagtgtggtgatgcaccatagttcactgcagcctcaaactcctgggctcaagtgatctttctgcttcagtttcccgagtagctgggattataggcgtgtgctaccatgcccagctaactttaaaatttttgtagagccagggtctcactatgtt

SEQ ID NO: 588005 - DNA, 556 bp, Homo sapiens
gaaagtagattggtggttgccaggagttggagcaaggggagaacagggagtgactgctaatggccacagggcttcttattggaatgataaaaatagtctggattagatagtgatgatggttgtacaactgtgcaaatatactaaaaacaattgaactgtacattttatttgttttttttattattatttttgagatggagtttcactcttgttgcccaggctggagtgcaatggtgcgatctcagctcactgcaacccctgcctcccaggttcaagcgattttcctgcctcagcctcccaagtaggtagctggggttacaggagtgcaccaccatgccaagctcattttgtatttctagtagagatggggtttcatcatgttggtcaggctggtcttgaattcctgacctcaagtgatccaccagcgtcggctcccaaatgaactgtacattttaaaagggtgaattttggtatgtgaattcyctctctctctctctctctctctctctctctgtatgtctctctctctctctctctctccccattctgactaggg

SEQ ID NO: 588006 - DNA, 566 bp, Homo sapiens
attttctaatcaccatatatctgcttatctataaacagttgaatcctgggcagttatgcaattcttgcaattcttgtaatcttggtttccatctgctaaayttgaaagaatggaattgcctatcaggacattaaggattaagtgagaaaacatagcgaagtttctgccatagttttgattacttactaggccatcagtaaaaggtgattcctgcctctaccccatccccaattcttctaccctttggcagcagccaagaagctatcaggatcctccatgacagactccacccacacagaaacagtactccccaaccacctccacaagaacaacatttcccctagaaaaagttttctgcctttcttcctataaacttcaaagagactcatttgaaaagtcatctttttcatactctcttgtatgtattctcttgtgatccaatgtaactttccaactcatttcttattagaattattattgtgttctgcaaaacagaatgaggggggagagagctagagagagcttatgtacttttcctttacattgtactattttggtttaagtgt

SEQ ID NO: 588007 - DNA, 567 bp, Homo sapiens
ataatttaaagaaatgtgctattacactttgaccttcactatcattacagtttgagttcactgaaaaatctgttctcctaattttgagcttcagcttggagtttgcaacagcttcctaggactttcttttatgtataaagttattatccccttttgtatcaggtctgttgtaaatgttcattataatcactgctgcttaatttagcagatggttggaactgtacarttcttctcagaggaattaaatatggttatgtcatttcccaagttgacttaaaagaagtaatttgagatcaagtaatgtttcagtttcagtattagttcagaatcattgccataagtgttttcttttctctacttctacagttttgagtatctgtgatgaactgagttggtcttccattttcttagctcttgatgttcttcaataaagaaataaaggtgaataaatcattgtacccaaatcccatgctttgccacatgattctgcaggagtcccaaaagaggttttcttattatatttgcacagcactgtttctcatctgttgtcagccaatacaaggtgca

SEQ ID NO: 588008 - DNA, 628 bp, Homo sapiens
cacatttctttctacaggtacatgacataagtgcatgatgatatttactaaagcctagaaagagaagtcctaactatcttgaaaacatgaaacaatttaatggtgagtttaaaaaaaacctatgtattgcaattaattgacaaataaaatattgagacatgggctttaggttcctctgaggcaaaaaaaaataccctgtttattaattttttgtccccttctccttgctgttgtagaatatatgaacatggtcttataataggttcagaaccatggatagcagatccatgcttttaggtagatgcggcattatcttaagagacaaagtatctgctgatcttcagtctgctttgtagtggcctcgttatgagggcaaatcagttaccttctctgggcytcctttgcctcactggtaaagcaattcattgccttgcctttccaataggggaaaattagactaaataaattttggccatttacagctgaggactaggacttttttttaatcgttctgatacacaaataaatatgctctgacattattccacggatgagttttactttttttgtttacttgaatgagaataatggataagaaaaacattttcaataaggttaatttatcaat

SEQ ID NO: 588009 - DNA, 480 bp, Homo sapiens
atgcacaacctaaatacatctttgaggctttatccagtggaaaaaaaactcaaataaatttttctcttggatgttcaaacagcatgtaattatgttgtatcatatgaataactttccatcaaacatttactgaacaccaattttctaggagttttatttaacaatgaagctaaagcagtggttgtcaattggagaagattttacttccagggacatttgacgatgttgagagatagttttgattgccatgactaagaaagaagtgccactagcatctagtaggtaaargccagggatgctgctaaccatcctacaatgcacaagacagcctacacagcaaagaattacccaccccaaaatgtcagtaatgccacagttgagaaactctcagataaagacataaggatgacttaaagggagataaaaatgaagaaagataccttttgtattagtctatctcatgctgctaataagacatac

SEQ ID NO: 588010 - DNA, 480 bp, Homo sapiens
atgcacaacctaaatacatctttgaggctttatccagtggaaaaaaaactcaaataaatttttctcttggatgttcaaacagcatgtaattatgttgtatcatatgaataactttccatcaaacatttactgaacaccaattttctaggagttttatttaacaatgaagctaaagcagtggttgtcaattggagaagattttacttccagggacatttgacgatgttgagagatagttttgattgccatgactaagaaagaagtgccactagcatctagtaggtaaaggccagggatgctgctaaccaycctacaatgcacaagacagcctacacagcaaagaattacccaccccaaaatgtcagtaatgccacagttgagaaactctcagataaagacataaggatgacttaaagggagataaaaatgaagaaagataccttttgtattagtctatctcatgctgctaataagacatac

SEQ ID NO: 588011 - DNA, 545 bp, Homo sapiens
tcttgaataatcccttgtggtcacaatggaaaaaatatttttttattttgatacttactgatacatgttatgccttattatagtaacttaatatatacaattaagaaatatatatttatatatcttccccttaatcttcttaaaggaatttggtattattaatctactcttaccaataaggaaacagaaggttgcagatgttagataatttgcttatgattccgtagctactatgtgacggaacttgactttgaatsaaatattatacttcaaaggccatctatgttctttcaagcatagcagttgcctccacaaaagcattctgatcattgaagagtctaaactcaagaaacaaaatatgatcggctttagttcttctaataattgttctaatccatactattctgaatcagctatcatttgggaaagttctcttaatatcttggcccaaagtttacagctttttggccatttcaaatctcttccctgctattcagtaccacaagttagggcctttgttgtttccatgtagagtaggagggaca

SEQ ID NO: 588012 - DNA, 614 bp, Homo sapiens
tttggctctgtgtcccactcaaatctcatctgaaatggtaaaccccataaaccccatatgttgagggcagggcctggtggaaggtgatgggatcatggagtggctttgccmatgctgttctcatgatagtgagttctaacaagatctgatggttttataagtgtttgacatttcctcctacacacacttctgtctctcctgctgccttgtgaagaaggtgcctgcttccccttctaccatgactgtaagtttcctgaggcctcctcagccacacagaactgtgagtcaattaaacctcttttctttatcaattacccagtctcagggaagttctttatagcagtgtgaaaatggactaatagagcatttggtgcactagtcttacctcaatgcatcattcattggccacccattttggttctattattttgaggtcctgaatagaaccaaaaaagaaagaaaaaagattggattttccctctgtcttcttctgactgcttaaaatgggacattgttgttttcctgcctttgcagcttcttgttctcatgccttcaaacctggactaaaatctacatcgttgtttctccagttgtcagtctcataatcgataccc

SEQ ID NO: 588013 - DNA, 559 bp, Homo sapiens
cactagtcttacctcaatgcatcattcattggccacccattttggttctattattttgaggtcctgaatagaaccaaaaaagaaagaaaaaagattggattttccctctgtcttcttctgactgcttaaaatgggacattgttgttttcctgcctttgcagcttcttgttctcatgccttcaaacctggactaaaatctacatcgttgtttctccagttgtcagtcycataatcgatacccctagcttttctggttctctaacttgcagacagcagatcatatatgatttgatcatatatacatgattatacataataagagaaaatatgaaaacttaggccacaaaacatcttgtatttatagaaaaatagcttgtaccaagagtaacatttatgtgtaaaagttgtgtgtacagcagtatgttttgaagaaaactatacattgaattgccatgattaccaagtttaccagttaaatggagttgacctactatcacatttgtgtacatttaataaaacagctgacaatattgattttgtggccatttttggaagcaac

SEQ ID NO: 588014 - DNA, 630 bp, Homo sapiens
tgttgttttcctgcctttgcagcttcttgttctcatgccttcaaacctggactaaaatctacatcgttgtttctccagttgtcagtctcataatcgatacccctagcttttctggttctctaacttgcagacagcagatcatatatgatttgatcatatatacatgattatacataataagagaaaatatgaaaacttaggccacaaaacwtcttgtatttatagaaaaatagcttgtaccaagagtaacatttatgtgtaaaagttgtgtgtacagcagtatgttttgaagaaaactatacattgaattgccatgattaccaagtttaccagttaaatggagttgacctactatcacatttgtgtacatttaataaaacagctgacaatattgattttgtggccatttttggaagcaactcttctttgttttctgttacagacatttccacaggcctttgagaaattccaaagacctctgcaatatgcctattgtacctgatgcttaaataggacttggtatatagaccttttccaagaaacatgttaggagaaaattgaatgcaaaagtgataaacatgaatactgttaaaatgcaaagctatagaggctgtacccttctctattaat

SEQ ID NO: 588015 - DNA, 449 bp, Homo sapiens
ggttctctaacttgcagacagcagatcatatatgatttgatcatatatacatgattatacataataagagaaaatatgaaaacttaggccacaaaacatcttgtatttatagaaaaatagcttgtaccaagagtaacatttatgtgtaaaagttgtgtgtacagcagtatgttttgaagaaaactatacattgaattgccatgattaccaagtttaccagttaaatggagttgacctactatcacatttgtgtacatttaatwaaacagctgacaatattgattttgtggccatttttggaagcaactcttctttgttttctgttacagacatttccacaggcctttgagaaattccaaagacctctgcaatatgcctattgtacctgatgcttaaataggacttggtatatagaccttttccaagaaacatgttaggagaaaattgaa

SEQ ID NO: 588016 - DNA, 420 bp, Homo sapiens
tgcctattgtacctgatgcttaaataggacttggtatatagacctyttccaagaaacatgttaggagaaaattgaatgcaaaagtgataaacatgaatactgttaaaatgcaaagctatagaggctgtacccttctctattaattttgcagataccaatgcatgaaaacagtttatctctttcaagagagaaaaggcaagccatatttcaaaagcaccagtcagtgcacaaagaaaattcagaatatacagagtgtagatcagaaatcccagggctttcctgagccacttatgttctacatcctcagaagcttgttcatcataatctttataggcaaacactatttgagaaatatttttctgcctggtaatttttgcaaatgattaagtattaacttttctagtgaagcccattgttgat

SEQ ID NO: 588017 - DNA, 538 bp, Homo sapiens
ggttcaaacccctgcatgtayagatgaaattgggttatctgcacttcttgtacctttcaatagtgggaggagagaaggaaatccatcactactggaaaatatgctctgtactctatcaactctgttgaacctcagcataaaatattttaaagcatttccctaacaaacaactctagttagacaatctgtatcataaccactacttttatctatgagacccctctgtctcttagaacatagtggtcatgggtactggtagcccatatgatgcctttaggaaaatagaaaaaaagcaaatctccaaaaccctctacttctgcctattgaaaattttcatgatttttgtcagaacaagacatttgcttgatatttcctagaaaattgtcatattaaatatgcaactccattgtgaaaacagtataaatggtgccaccttaacaagtgtacaacttgcacaaacatccatggcatccttttagtaagatgtaggaaatgattaggttttgggttaagacggagactcaacacatttggaccc

SEQ ID NO: 588018 - DNA, 526 bp, Homo sapiens
tctaaacacaatatagattgatggaagaaaaaaagaaacaaagacattgcttgagggttaagaaccagtttggggaatacatactgaatatgggtcatttgcacaatgatcaggaaaattacttttattacacacacacamaaaaaaaaaatgcgctgaaagccataagcaaaatgcatggcagtagcggttacaaaatagaaacagcattgtaaatatgtcagccaaagaccagaaaacaagatgatgatggtgattctacagcattagaatcctattaatgctgatgctggcccactctagacatgggcaagtttatttaaacaatggaaggaaataatctaggtgcatagatagggggtactcaagttaatagtagacataaataatccaaattataaattagaatcggaggactaggcataatttttatggggtctgagaaattcttctgatgaaacaatttgtgatgtctctaggagttactttaggagatggtgtgctagacccagactagggattctta

SEQ ID NO: 588019 - DNA, 542 bp, Homo sapiens
atcttttcatgtgcttatatgccacccatrtatctttggtgaagtgtttgttcaaatctttcacccatttttaaaataaattgggtgctttgttttcttattattgagttttgaagattctttgtaaattctaggtataaacatttcatcggacatgtattttaattttatagctatttttcccattctgtgccttgtctattcatttccttaattgtgtctttcaaagagtagaagttttacattttgattagttctaattaatcaatattttcttttatggattgtgcttttagtgtgatatctgaagacgttttgcctaactcaaggtcacaaaaattttcttctataaattttatagtttttgttttaacatttaatttaaatctatttttgtgtgtgatgtgaggtatgtgccaattcatacattcctgtatgaatgtcagattgtcccaccacaatttattgaaaatatgattctttccctatgaaattactatggtcaattacaatcaattgaccatgtatatgtggctgtgttt

SEQ ID NO: 588020 - DNA, 606 bp, Homo sapiens
  misc_feature 1, 2, 3, 4, 5, 6, 7, 8: n = A,T,C or G
nnnnnnnnatggacattttaacgacatggattcttccaaaccatgaacataaaatatctttacatttttgatgtcttcttcaatttctttcattagtgttttacagtttttattatagagattgttcacttctttggttaagttaattcctaattctatttgtggccattattaatgggattacgttttttgttgttgtttttattttttgagatggagtctcgcactgtcacccaggctggagtgcagtggcacgatcttgactcactgcaacttctgcctcctgggttcaagtggttctcctgcctcagcctcccgagtagctgggattacaggtgcccaccaccacgcccggctaattttttgtatctttagtagagatggggtttcactatgttcggcaggctggtctcaaactcctgacctcgtgatccacctgcctcggcctcccaacatgctgggattacaggcgtgagccaccacacctggctgggattacttttatttctttttcagattgttccttgttggcatgtagaaatgctattgatttttgtatgttgattttgtatccggcaacttcaytgaatgtgtttatcagtccta

SEQ ID NO: 588021 - DNA, 587 bp, Homo sapiens
aaaagctttttgcttcaagattaaagctacatctgcataaatcartgggcattggccaaatgtaggtcatatctagcccaagatgggatcatgagattgctttctcatatactgtggtcattacgacagcaaaacaacaagctgatcaattaataattaaatttttaactagaagacatctgcaggcatgcatctgcctagtcagagctgtgatccttaagaagctaaagtgggctgggcgcggtggcttacacctgtaatcccagcactttgggaggctgaggcgggcagatcacaaggtcaggagatcgagaacatcctggctaacactgtgaaaccctgtctctactaaaaatacaaaaaatttagccaggcgtggtggcgagtgcctgtagtcccagctactcgggaggctgagacaggagaatggcgtgaacccgggaggcggagcttgcagtgagccgagatcgcgcctctgtactccagcctgggcaatgagcaagactgcgtctcaaaaaaaaaaaaaaaaagaagctaaagtgatttaagccacatgattaagttgtcacaggaaaggagataccaag

SEQ ID NO: 588022 - DNA, 587 bp, Homo sapiens
aaaagctttttgcttcaagattaaagctacatctgcataaatcagtgggcattggccaaatgtaggtcatatctagcccaagatgggatcatgagattgctttctcatatactgtggtcattacgacagcaaaacaacaagctgatcaattaataattaaatttttaactagaagacatctgcaggcatgcatctgcctagtcagagctgtgatccttaagaagctaaaktgggctgggcgcggtggcttacacctgtaatcccagcactttgggaggctgaggcgggcagatcacaaggtcaggagatcgagaacatcctggctaacactgtgaaaccctgtctctactaaaaatacaaaaaatttagccaggcgtggtggcgagtgcctgtagtcccagctactcgggaggctgagacaggagaatggcgtgaacccgggaggcggagcttgcagtgagccgagatcgcgcctctgtactccagcctgggcaatgagcaagactgcgtctcaaaaaaaaaaaaaaaaagaagctaaagtgatttaagccacatgattaagttgtcacaggaaaggagataccaag

SEQ ID NO: 588023 - DNA, 587 bp, Homo sapiens
aaaagctttttgcttcaagattaaagctacatctgcataaatcagtgggcattggccaaatgtaggtcatatctagcccaagatgggatcatgagattgctttctcatatactgtggtcattacgacagcaaaacaacaagctgatcaattaataattaaatttttaactagaagacatctgcaggcatgcatctgcctagtcagagctgtgatccttaagaagctaaagtgggctgggcrcggtggcttacacctgtaatcccagcactttgggaggctgaggcgggcagatcacaaggtcaggagatcgagaacatcctggctaacactgtgaaaccctgtctctactaaaaatacaaaaaatttagccaggcgtggtggcgagtgcctgtagtcccagctactcgggaggctgagacaggagaatggcgtgaacccgggaggcggagcttgcagtgagccgagatcgcgcctctgtactccagcctgggcaatgagcaagactgcgtctcaaaaaaaaaaaaaaaaagaagctaaagtgatttaagccacatgattaagttgtcacaggaaaggagataccaag

SEQ ID NO: 588024 - DNA, 560 bp, Homo sapiens
ggtttcttctggggctgtcagggagaatttgttccaggtctctctcagagctgccagtggtacgatgtcagcctttgacatcccttggcttgtaaatgcatcaccctagcctctgccttcactcacctggtgttccccctgtgtgtgtccatattcaaatctccctatcagatgaggactcacttaatgacttcacttgaactcaaaagccttcataagaactccatctccaagcaaggtcacactctcaagcactgggggtgaggactccaacatagcttttctttggygggagagcacaattcagaccataacagggcaggattagtagaccaatttggacagagcagaatgcttgagtagtttaataaggaagtaaggttggaaagagcatttcaggcgctacttctggagtttgtcgatccacataactaaggtgttgcagaggaatcagctagttttccatatacaggaggtatagaagtaaccacaggaagggatcaaagctccctctgtaaggataaagcccccatagactggatcagcctgaattcctgttt

SEQ ID NO: 588025 - DNA, 492 bp, Homo sapiens
gagactgcatgggacggcctcaagctgctccacagtgagtaatctgttcactcgtttaaggtgttgacagcgacttttccctttgtgattattcagttatctgtgggtgatacgttggcctcgtgtgaatatcctgtttcccaatagtttttcaaccaatgatcattctgacctgaatcaattattctactcaggctgcaacatgaagttcttccattcctcttggattctgcagctggagatgttgcataaagaagaacttccctccccatcccaaatttctgcccacttggccaagttctctcacctcgccgagcctcctrtgctttggggaatttaatctcagcgctcagaaatgttgtagactcagtgagacaaaatacagtaaagttctgtatttgcttatgcaaactcaggggacttgccacaggtgcaagctggctgggttggctgctgctgagtgaggatcacaaaaaatccagcacttagtca

SEQ ID NO: 588026 - DNA, 669 bp, Homo sapiens
tgcctttcagaatatcaacagggaaaacaattgtcgtggtaataagctactgctaaaagcaaaatgcataccacagagcaaaaaycagcatgtacatacacaaaagtgactgaaaagcaaggcaaataaaatgtgatacacaaaatggcataaatgcataatcaactgttgtcaaaatgcacaaattatttgagctctgaaaatgtattcaaagaaaagaattcaaatgaagaaaaagtatgaaaatgttttctcacaatatgatatatgataatagaaaattgggacagtggtggaggtgtggctgagtaaattacaggccattaaaaataatcattacaaagcctgagtaacagcatgaaaaatgttactggtatgtctttaagttaaaaataaaataaccggatatgtaacattattgcaatatggggggaaaaatctgttcgcataaggaccacggaatcatgcataatgttttaaaattttgctggatgttataatattgtctttacagtaaaaaaaaaattcagagtaaaatagatgatgagtcactgcctgacaattgtcactgtataagaaagtcccctttgcagggacaatgacaggtggttaaatgtaagcacagatgccaggtccatctcacttatcccactttatttattaatgtcg

SEQ ID NO: 588027 - DNA, 669 bp, Homo sapiens
tgcctttcagaatatcaacagggaaaacaattgtcgtggtaataagctactgctaaaagcaaaatgcataccacagagcaaaaatcagcatgtacatacacaaaagtgactgaaaagcaaggcaaataaaatgtgatacacaaaatggcataaatgcataatcaactgttgtcaaaatgcacaaattatttgagctctgaaaatgtattcaaagaaaagaattcaaatgaagaaaaagtatgaaaatgttttctcacaatatgatatatgataatagaaaattgggacagtgrtggaggtgtggctgagtaaattacaggccattaaaaataatcattacaaagcctgagtaacagcatgaaaaatgttactggtatgtctttaagttaaaaataaaataaccggatatgtaacattattgcaatatggggggaaaaatctgttcgcataaggaccacggaatcatgcataatgttttaaaattttgctggatgttataatattgtctttacagtaaaaaaaaaattcagagtaaaatagatgatgagtcactgcctgacaattgtcactgtataagaaagtcccctttgcagggacaatgacaggtggttaaatgtaagcacagatgccaggtccatctcacttatcccactttatttattaatgtcg

SEQ ID NO: 588028 - DNA, 533 bp, Homo sapiens
tcactgcctgacaattgtcactgtataagaaagtcccctttgcagggacaatgacaggtggttaaatgtaagcacagatgccaggtccatctcacttatcccactttatttattaatgtcgaccttccagaaattaaaattaatctagtcagcaaattaaactctgattttatttgattgccaacaagtaatcagtaaatattgaaagatgccaagacatgagctttgagagtgcagtatagatgggagggttggggaggactgcagacgggagggatctgagctcacaaagatcacagtttcctaatgttcacgcgtggggcatttgtgatcttggcttctcaatgtcggcagatgttagaagaatttgaagatttcttgtataagttcagaaagcacctgaggtcctgctgaccctactgcgcccctccacaaagcccccaagctctgcrtgaccaccgtccacatggctggagccacacaacatccctcagggatgcagctctacctccgtctccacaaccagccctgag

SEQ ID NO: 588029 - DNA, 594 bp, Homo sapiens
caattgtgctcaggttgagtcctggagtagaacaagatacattcttctttaaagggaacagattcaaagggttgtgcagggaaacatggggagggatggagaagagctaagcaaaagaaaggcatcaggcatcacacattacaactttcatacctcagctatcccttctcttagctcctgaaagagttgtaaaccagggatctttcctcctcaaagttggatgttgccagggaattgcaaacctttattctaaaactctaggtatcctgggattctttttacctccctaaatgtctatmattcccttcttcactcaggctaacaatggcacatgtggctgtctctattaccctgtaggtccactgaattattcagcacacaggtgtttgaatctgagcctctgctaccatgtctatcatctggatcctgagctcatgctcctttgttagtggtctttattccttgcctctcatagcttggatattatacagggataggtgggctgccagctcttatcttattcacagaacatcccttaggcattaaaatctgctgctgccatttgaggctagctgtattttttgtttctttctt

SEQ ID NO: 588030 - DNA, 580 bp, Homo sapiens
ttagggggaaaaaaacgaccaaataaaaactgtactttcccagttaagtcttcaaaacatgtaagaatctagtacacataataaactaatatacacaccatggaatatcattttgaaacttcaaaacatcagaaataaagaaaagattctaaaagtttccaaagaggaaacaagcagtaaaaggaacacacacaaagaaagaaagaggaataagaatgacatcagaattctcaatagcagcatctgaagctagaagaatggagggatggtgctttcaaagttcaaaagggaaagatttttcatcctagaatttttacactcagccaaactatcaatcatgatggcaaaataaagacattttcagattcacagactctcaaaaaatctatttttcatacaccatttccatgaagctactgaagcagcagtccccaamctttctggcaccagggactggtttttccaccatctgggggtgggggatggttttgggataatttaagcatattatatgtattgtgcactttatttctattattattaaattgtaatatataatgaaataaaattacacaactta

SEQ ID NO: 588031 - DNA, 621 bp, Homo sapiens
aagaagtcactaaaaacactttattttacttctacctagctttttctctatgcatagtatttttggacataattgcaagaacactgttttttaaattttgtatcatgattttttaaacattagatcataggaatttttcaaagtaataacaagccctttgtaaaataattttgcattgttcttatttttgaaatctgtttttaaatttataactactggtgataaattatcttagttttccttcatctgaatatatctttatttcatttgctttcattcctgaaggatatttttgctagatataggaattatgtctttgagaactttaaaaataattttcaataatcttttggtttccctggtctttaataagaaatgacactgaggctctgttgatttatttttaatcttttatctctttatcactgggtaatttctattgatctgtgccatggtttggatatagtttgtttgaccccaytaaatctcatgttgaaatttatcccctgctgttggaaaaggggcatggtgtgaggtgtttgggtcatggcagtggatccctcatgaaaggcttggtgctgtccttgtggtaatgagtgagttctcactctgttagttccc

SEQ ID NO: 588032 - DNA, 637 bp, Homo sapiens
tcaccatgatgctggctctaccacaatatgggtactcaacaaacaggttcaccattgtcaagtgctgctaccaacattgggtctatccagagatgaatcagacaaggcccctgctcttaagcattcacaggctttcagaaccaaagaaccgtgcacgggaatcactgtgatatgagaaaggagggaaccagcaccataagaaagaagcaygggaaactaaagagaggtgatcagaggaggcttcctggaagtgggatttgcagagcactgaacttctaaggcagaggctgacaaactatagcccatgtaaaggtcaaatacagcccaccgcctgtttttgtatgatctgtaaaataagaataaactttaaatattttaagggttaccttttaaatggttatataagcacttatataatatcctggattttggctcttagctactaaagcataaaatatttacaatctgatcctttaaagaagtttgccagcccctgttctaaggcacacaaaagaccccaagacggtaaattaaagtcacagctaatgtttgctgagagcttactgtgtgctgtgtgctacactgtgcagacattatttaatcttcacaatatgcctataaggttaatattattccc

SEQ ID NO: 588033 - DNA, 515 bp, Homo sapiens
tgcagtgatccaagattgcaccactgcactccagcctgggctacagagtgggacctcgtctaaaaaagaaaaaagatttatgtaaaataaatacatttgacactcctaattcatcactcatgacaggcaaggagtttagtgactctatacataatacctttgaccatatgtggagaaccaagggacataatgaatctgcttggttgctcctaagttcagtgggcaaagtgatgaaagaaaatgatgaactcagggattctatctcccagcttcacaagctgatactgagcctcaaatctgctaagtttgccctgagtgacagccttatccctggtagagaaagagctgaaattgtggaaaaacagacacaagctctcatcatgtgagtggctgacctgcaatgaaaggtgcatrcacagcctcatcagatgtttagtgttaaagtgagggcattcattggaaaagaatgggatcctgcaacttggaatgggacgttttggaggaccctgatgaag

SEQ ID NO: 588034 - DNA, 251 bp, Homo sapiens
tcagaagatgataactaatttaaaagaatctggggaaagagtactaaaagcattttattccaaaatattgagattaagaaaaagaaaacagaagaaacagctaatgggtttgcaattgttgtcttgggagaccagaattgaaactgagaaaagtatgagacatgggccaccatgttttattaaaagtagcattatttggccttttaaacyacaaaataatttttaattaaaaaatcaatccacttcactcc

SEQ ID NO: 588035 - DNA, 542 bp, Homo sapiens
ttgcatttttttttatttcatacaagataaaaccatgatggatttagataaaatgcctccgcttggtctgtaaaagggaaaaacttcaagctttctgtacatgttttaaaatggccagggaaacaagtatttctactttgtttttcttttcccaagggtgggaacatacttcaaaagtatgtgaaggctgagtttctaacaaagtcaaataatattgatgcttatcagtacagtgaaaccgacaataaggatgtgctcatttgaggtttcacagcagccgtgttactgcagaggggagtccgcargggatgggaacttatcacgactgtttctgtgagccacacgtcaagcacatccacatcttccacctgcgtaatcctcacagcttcctagagggagctggtactaccaccaccatcctcctcctcctcttcatcatcatgcccgtttttacaaatgaaaaagtgcaagggttcagagaggttaagtaactggccctggatcacacagcagggccagtgatagagtgggatttgaacccc

SEQ ID NO: 588036 - DNA, 542 bp, Homo sapiens
ttgcatttttttttatttcatacaagataaaaccatgatggatttagataaaatgcctccgcttggtctgtaaaagggaaaaacttcaagctttctgtacatgttttaaaatggccagggaaacaagtatttctactttgtttttcttttcccaagggtgggaacatacttcaaaagtatgtgaaggctgagtttctaacaaagtcaaataatattgatgcttatcagtacagtgaaaccgacaataaggatgtgctcatttgaggtttcacagcagccgtgttactgcagaggggagtccgcaggggatgggaacttatcacgactgtttctgtgagccacacgtcaagcacatccacatcttccacctgcgtaatcctcacagcttcctagagggagctggtactaccaccaccatcctcctcctcctcttcatcatcatgcccgtttttacaaatgaaaaagtgcaagggttcagagaggttaagtaactggccctgsatcacacagcagggccagtgatagagtgggatttgaacccc

SEQ ID NO: 588037 - DNA, 477 bp, Homo sapiens
tgaattctcaactttgccaggtgtcattaggatgttaggtggaaaaacaaacaaatgaacaaaaaacaactaaaacaggttctgtgggaaacatgagagcagatttagaagatggaagactcaggggcctccctagtctcctgcccacatcagcacccttgggcatcctaactgaaccaagtggcattgccgccgtctgtcttcatcaccctactgctcacttctggagggcctggatgaccctgtactgtgagttactaaaggagcccaccctgctgctcctcctccagtacgtggcacccacatgtgctgtgctgggggctggaacgccaagggagagcagctgtcctgtctccagctcccttgaatccccagtagaagtccgatcttttgttgttgttgtttgtttgttttgagcttgcaatatrcttgtctaaaatatagcatttcccagccttccttgcagtggttgatacc

SEQ ID NO: 588038 - DNA, 565 bp, Homo sapiens
agcatacagcttcaggccctggtggctttttccaatgttgtaaattctggtgatattgggacacatttcattcacaactttcatcaactgaaaaacaaggtgaatcaaaaactctaagcattgatgacgatgcactaaaaggacagagctcccaagaaaacggacacctcttgctttcctccacagcctcccaagcgcccccacattctgcacaccccagctgctatcgcctctgcccagaacactctccttacatccctctgccctggataatgccyactttccttccagcacccgctctatcatcgtccccctaggaggaaactcctggccattgcccccacccggtcctgtactttccacaccccttggttgtggctatcacttcctgttatcctccaaatgttatgtctctcaaaatccataggctgaaacctaatccccaatgcatgaattgctaggccctctaggaggtgattagtgtccttacgaaagaggcccaaaggagcctgtttgcccatctgccatgggaggatgcagcacgatgacggccctgtgaaccaga

SEQ ID NO: 588039 - DNA, 565 bp, Homo sapiens
agcatacagcttcaggccctggtggctttttccaatgttgtaaattctggtgatattgggacacatttcattcacaactttcatcaactgaaaaacaaggtgaatcaaaaactctaagcattgatgacgatgcactaaaaggacagagctcccaagaaaacggacacctcttgctttcctccacagcctcccaagcgcccccacattctgcacaccccagctgctatcgcctctgcccagaacactctccttacatccctctgccctggataatgcctactttccttccagcacccgctctatcatcgtccccctaggaggaaactcctggccattgcccccacccggtcctgtactttccacaccccttggttgtggctatcacttcctgttatcctccaaatgttatgtctctcaaaatccataggctgaaacctaatscccaatgcatgaattgctaggccctctaggaggtgattagtgtccttacgaaagaggcccaaaggagcctgtttgcccatctgccatgggaggatgcagcacgatgacggccctgtgaaccaga

SEQ ID NO: 588040 - DNA, 485 bp, Homo sapiens
ggagtaaagttccctgggagcagggcctagggaccctggaggagccctctcccatctgagactgtgattctgttgggtcttgggaaagacagtgacgttwccccaaggtggccatccaggggtcacaagagggtttgtggttcatccaagagcaggctcttgcccagagggtcctttgagaaagggcctcctgctttggacaactctgcatgggttctttatgcggagcccaggcccatggccctgcggcttctgctctccaggcggggatgtggggaaccagggactgcatcgtttcccttgctgctgtaacaaacgatgacaaacttagtggcttcaaacaacacctatctcacagctctgcaggtgagaaggctgatgcgagtgtcaccaggccaaaatcaaggggtcagcaggactggtttcttaggggagcctctggcgaaaagtccacttccgggctcactcaggtattggctgaattc

SEQ ID NO: 588041 - DNA, 599 bp, Homo sapiens
ccttcaaggcaacaagccattcattctccctaaacacccgttaacaaccttgctccccgaccgaagaatctgcagggctaaccaatcccaagtaaacctaacccctctaggtaaggttcaaggctcaccagctcactcaaacttggctctttccacttgccactgggcaacaaccataagacagattcttttttttttcttttttttcttttttttttttttttttttttgacagagtctcactttgtcacccwggcttgagtgcagtggcaccatgtcggctcacggcaacctctgtctcctggcttcaagcagttctcctgccacagcctcccaagtagctgggattacaggtgcctaccaccacacccagctaatttttatatttttcatacagacagggtttcaccatgttggtcaggctggtctcgaacttctgacctcaggtgatccacccgccttggcctcccaaagtgctgggattacaggcgtgagccaccatgcccggccaagacagactcttaatggcctcctgcacagcactgataagctctgtgattattataatatgctaactttgcatcttccacagaaaccaa

SEQ ID NO: 588042 - DNA, 608 bp, Homo sapiens
agctcctgggagcagcaaacaccttgttttccttccatccaagcaagtttgtgtgtgtgtgtgtgtgtgtgtgtgtgtgtgtgtgtgtgtgtgttttcccctatgcaaatgaaggcaagttttcacattgcattataagcttggtagctaagaaaccatttctgtttctgagaaggttaactttcaagttcaaatatctgatgctttgggtattgtgaacaaatgtgaacctgaaagagccaatctttcaagatggatcaccactggctaactgagccaaaatttaaaatacagtcaagtggccatttgctgagtagagaggtcacacacataactctgagttcctgaaaaacaatacctctgtttaacttcgggactttcacagagcacctgaaccaaccaatcagagttcacctgcttgtgccaatcagagaycagctgtatcaaccaatcaaggctcagctgtattgaccaatcagggctcagttatattgaccaatcagaactcagctgtgtcatcactcggaggtaagcggggctgaatttttcatttgcctgaattgcaaactgttcactggaatgaagtctctttcctccgaactgttttc

SEQ ID NO: 588043 - DNA, 608 bp, Homo sapiens
agctcctgggagcagcaaacaccttgttttccttccatccaagcaagtttgtgtgtgtgtgtgtgtgtgtgtgtgtgtgtgtgtgtgtgtgtgttttcccctatgcaaatgaaggcaagttttcacattgcattataagcttggtagctaagaaaccatttctgtttctgagaaggttaactttcaagttcaaatatctgatgctttgggtattgtgaacaaatgtgaacctgaaagagccaatctttcaagatggatcaccactggctaactgagccaaaatttaaaatacagtcaagtggccatttgctgagtagagaggtcacacacataactctgagttcctgaaaaacaatacctctgtttaacttcgggactttcacagagcacctgaaccaaccaatcagagttcacctgcttgtgccaatcagagaccagctgtatcaaccaatcaaggctcagctgtattgaccaatcagggctcagttatattgaccaatcagaactcagctgygtcatcactcggaggtaagcggggctgaatttttcatttgcctgaattgcaaactgttcactggaatgaagtctctttcctccgaactgttttc

SEQ ID NO: 588044 - DNA, 513 bp, Homo sapiens
tgttactgtgtgtggttttgtgctcttacaaacaccacagccccgtatgttgacaaccactggttttagagtatgacatcasagctttttccatttcacatgtagagggcaaatatattgtatatgataaaactgccctatttggtccttttaaaaaaaaaaaaatctgggtctttttcagcccagttatgccttaggaggaacgtgtgcataataccacaagccccatcaacctgggggtggcagatgccatacagatggtggctttccatcctggtatgactctaggtttctctgtccctaaactctatttctgagggtaccatgctctgaggaacatctttttcattattattctcttctctctcagaatacaacattgttgacttgtgtataaatcaaacatttcacagttgtcactcataaggacctctgacaccacatgctgtattaagttcctgattattgggttaaaaaaaaatctgaggtcacttgcagggattaaaagaattc

SEQ ID NO: 588045 - DNA, 295 bp, Homo sapiens
gatgcggtactcagaaaggaccctggaacagaaaatgaaaattagggraaaaaagctaaggaaatctgaatgaagtatagctcgagttaataataatacatccatattggttcactaattgcaactaatattaataaccagaaactgggtgagagatacataggaattctcagtgttgtctctgcagtttttttgtaaatcaaaaattattctatatttgaaagtttattaaaaaataaaatatctgccaggtgtggatattttaaaattgagtcatttacgagcttaaaaaact

SEQ ID NO: 588046 - DNA, 584 bp, Homo sapiens
aagcttctgacactttctgcaactttttctccattgccagtctctttgggtttgttccattgggaagatgcaccatcagccccgggaaatcgtcctgtccctgcatgcctgtggcacaaacgacactttctccatgtggctcccgcacaaggagggcaggtcagcaatgggccrtcctaggacttgacttaatctctttcatacgtgaacttttctgcccacgcttgtattcctaactcctttaactgatgggtgttcttgggcacgtcgtcactgatcctgcaactctcctaacttcagttcttggtctgagccaagtgattatttggtacagtatatacgtctgtgacccattgggcaggtgacatttaggaacaccaatgtgaaggataatttaaaatagcatcaacttgtaaatgtaagacaaaataatggcggagcctctgttctgctacttgaaaaaacaacttcccattgtctgttgtagcattatgaattgagatggcagtgaaggggtggctggaactcttatttctccaggcgagagagggaagtcaagccccctgtattgacattgctgccag

SEQ ID NO: 588047 - DNA, 584 bp, Homo sapiens
aagcttctgacactttctgcaactttttctccattgccagtctctttgggtttgttccattgggaagatgcaccatcagccccgggaaatcgtcctgtccctgcatgcctgtggcacaaacgacactttctccatgtggctcccgcacaaggagggcaggtcagcaatgggccatcctaggacttgacttaatctctttcatacgtgracttttctgcccacgcttgtattcctaactcctttaactgatgggtgttcttgggcacgtcgtcactgatcctgcaactctcctaacttcagttcttggtctgagccaagtgattatttggtacagtatatacgtctgtgacccattgggcaggtgacatttaggaacaccaatgtgaaggataatttaaaatagcatcaacttgtaaatgtaagacaaaataatggcggagcctctgttctgctacttgaaaaaacaacttcccattgtctgttgtagcattatgaattgagatggcagtgaaggggtggctggaactcttatttctccaggcgagagagggaagtcaagccccctgtattgacattgctgccag

SEQ ID NO: 588048 - DNA, 584 bp, Homo sapiens
aagcttctgacactttctgcaactttttctccattgccagtctctttgggtttgttccattgggaagatgcaccatcagccccgggaaatcgtcctgtccctgcatgcctgtggcacaaacgacactttctccatgtggctcccgcacaaggagggcaggtcagcaatgggccatcctaggacttgacttaatctctttcatacgtgaacttttctgcccacgcttgtattcctaactcctttaactgatgggtgttcttgggcacgtcgtcactgatcctgcaactctcctaacttcagttcttggtctgagccaagtgattatttggtayagtatatacgtctgtgacccattgggcaggtgacatttaggaacaccaatgtgaaggataatttaaaatagcatcaacttgtaaatgtaagacaaaataatggcggagcctctgttctgctacttgaaaaaacaacttcccattgtctgttgtagcattatgaattgagatggcagtgaaggggtggctggaactcttatttctccaggcgagagagggaagtcaagccccctgtattgacattgctgccag

SEQ ID NO: 588049 - DNA, 584 bp, Homo sapiens
aagcttctgacactttctgcaactttttctccattgccagtctctttgggtttgttccattgggaagatgcaccatcagccccgggaaatcgtcctgtccctgcatgcctgtggcacaaacgacactttctccatgtggctcccgcacaaggagggcaggtcagcaatgggccatcctaggacttgacttaatctctttcatacgtgaacttttctgcccacgcttgtattcctaactcctttaactgatgggtgttcttgggcacgtcgtcactgatcctgcaactctcctaacttcagttcttggtctgagccaagtgattatttggtacagtatatacgtctgtgacccattgggcaggtgacatttaggaacaccaatgtgaaggataatttaaaatagcatcaacttgtaaatgtaagacaaaataatggcggagcctctgttctgctacttgraaaaacaacttcccattgtctgttgtagcattatgaattgagatggcagtgaaggggtggctggaactcttatttctccaggcgagagagggaagtcaagccccctgtattgacattgctgccag

SEQ ID NO: 588050 - DNA, 552 bp, Homo sapiens
ttcagtctatgtgtatcttcaaaggtgaaatgtatttctcataggcaacagatcattggatcttayttttttgtccattcagctactctgtgtcttttgattggagaggttagtccatttacattcattgttattatgataaacaggaacttattgctgccttttttgttgttgttttctggttgttttgcaatctccttttccttctttcctttcttcatgtcttccttttagtgaagctgattttctctggtggtatgctttaatatcttcctttttattttgtgtgtatccattgtacgtttttcagtttgaggttaccatgaggcttgctagtagtttcttataacccaatattttgaattgataacaacttaacactgattgcataaacaaacgtgcaaaaagaaatctaaaaaaactatactttgtctcttcactttttaactctttgttgtttctcatcatatcttattgtactgtctgtgtcttgaaaagttgttgtagtattttttttattggttcatcatttagtctttctacttaagtcat

SEQ ID NO: 588051 - DNA, 416 bp, Homo sapiens
tactggccgccatggtggctcacacctataatcccagcactttgggaggctgaggtgggtgggtcacctgaggtcaggagtttgagaccaggctggcccgtctctactaaatctggagatggggtgaaaccccrtctctactaaaaatacaaaaattagccaggagtggtggcatgtgcctataatcccagctactggggaggctgaggcaggggaatctcttgaacccaggaggcagaggttgcagtgagctgagagggtgccactgcactccagcctaggcgacagagcgagactctgtctcaaaaacaaaaacaaaaacaaaacattaccaacaaccagtagctgaacttgtttttagtcatacgagagttagtgggtttcatctgaatcaagagactcatgcctaattacat

SEQ ID NO: 588052 - DNA, 497 bp, Homo sapiens
aataaataatccctagttgatcaagagaagrgaaagaaagagggagttctttgccaaatgactgtgattgaagagaataactttgaaaatatgatgaaaaccatcccgcattttgtcaacaagaagaaataaagaccactagaaagagatgaaaaaatgcacagaaaagtaatgatgtcaatgtatatcaaaacaaatagggcatgaatttgagctagtagaatgtagaaaagataatctatttgcttttaagccaaggaatcttttctttccattgttgttgggttcatgacattagactctgagaaaaggaaacataatcctaggaacctttcagttctaatgattaatatttatgtagtcatattaatgcagcttttgtttgttgatttttaagtgttagaatcagtcaatcaaaggaaagtatacatagtcatgcttatgaaagaaaatgtgtgcatcattcttgaaaacataaaaagagaggtttatttaca

SEQ ID NO: 588053 - DNA, 497 bp, Homo sapiens
aataaataatccctagttgatcaagagaagagaaagaaagagggagttctttgccaaatgactgtgattgaagagaataactttgaaaatatgatgaaaaccatcccgcattttgtcaacaagaagaaataaagaccactagaaagagatgaaaaaatgcacagaaaagtaatgatgtcaatgtatatcaaaacaaatagggcatgaatttgagctagtagaatgtagaaaagataatctatttgcttttaagccaaggaatcttttctttccattgttgttgggttcatgacattagactctgagaaaaggaaacayaatcctaggaacctttcagttctaatgattaatatttatgtagtcatattaatgcagcttttgtttgttgatttttaagtgttagaatcagtcaatcaaaggaaagtatacatagtcatgcttatgaaagaaaatgtgtgcatcattcttgaaaacataaaaagagaggtttatttaca

SEQ ID NO: 588054 - DNA, 587 bp, Homo sapiens
ttatcttaaataaatatatcatagtttttagaaaataaatgtaatcattaatctattatttcggtttatcaatgttagcaatggaggaactgaaaatakcagtatctctcagaaattgagggaaaaagtaagtaaaatgaagtataatgagccaaatcttcatattttagaacaagagttaattgttgaaagagaaaaatagcatattagtgttgaaaactcacaatgagaaataaaaatatgcatacttgcaaacatttgcttctgaacttgaggtggccggtgtggaagggtgggctgaaaactggcatttctcattttgaaacctacaaccattgattgcttgaattttcatgggaatgtacttttttgtttaaaaatattatttacataaagacaatattttgcaatggaacagcttaagtgcatggagtttgaatttcccaatttgaaaacagaaaaaggacataacaagatgttcatgagatattccttggaaaaataaaagagctcttacttagacatgttcataaaaaactcatctgtaatgaaattattactggctggatgacaattgacagaatgac

SEQ ID NO: 588055 - DNA, 604 bp, Homo sapiens
gtctaaccttcctagagtttagatgcaggataatcacctttatgacaagtacaaataccactgcacatcttgacagccatctcagagcaatctaattcccttgctgctctaacctgaagactacttctgtgttgttggttcacaatacatattttttttgaaggaagtaatagtgtttgttcagaagctagccttccatgtaataattagacagcgttttcttaaagtaaacatttggcggttyggcatccatttcaatttttatttctttttaagataaaattaagaaaaaaggcaaaacaaaaaatattcacttttttcacatttttatggcttgtgtgaggtgtagatgcttagttacaaggaatgatgggggccattgaggttataaattattagcaaagctggaggaatcaggaaggattgctatttagcaacaaaaaggtatggggttgggtcaaaggagcaaaatgtttagcagcgtttcatctgcatattttgattgttgatatagtctttttcaatggagctattatttagtcagtatactcctccaattgtagctaacactgaaagcgtatcaagatatccagcctctccagtt

SEQ ID NO: 588056 - DNA, 598 bp, Homo sapiens
aatacttttatcactcttgctaaatgaatgactawaatgactcgtgattcaatttgtgatattaagggtcttaatactttgatatttggccaactttccaacagcaaaatttcaagttctaaattcgggctttttgacctcaaactatttttttggacattaggtttcttgaagaccaagagacacatattagtcctatattacagtttttgttttgttagaattatgcagaaagctttgtcaaatctgaggtggtgtttagcttccgttgggatatatttatatagatgtgttgataatatgtgttccaggattgtatgagattcctaaaattctaatacatcttaatacatgttttcagtaaaaatgattattattttaaattgctgtgtgccccagaaataaccaaatttccttgtcaactgtgtctttaactatggctatcttacgacttttgtcattcacaattgatgtttaaggttgatccttctcaaacatgtgacataatcagccacagtccaaagcttgcttctttggaggagttcacaaaaaaagacacttgagtgtagattgctgataactttggagattgtgacat

SEQ ID NO: 588057 - DNA, 572 bp, Homo sapiens
taaattcgggctttttgacctcaaactatttttttggacattaggtttcttgaagaccaagagacacatattagtcctatattacagtttttgttttgttagaattatgcagaaagctttgtcaaatctgaggtggtgtttagcttccgttgggatatatttatatagatgtgttgataatatgtgttccaggattgtatgagattcctaaaattctmatacatcttaatacatgttttcagtaaaaatgattattattttaaattgctgtgtgccccagaaataaccaaatttccttgtcaactgtgtctttaactatggctatcttacgacttttgtcattcacaattgatgtttaaggttgatccttctcaaacatgtgacataatcagccacagtccaaagcttgcttctttggaggagttcacaaaaaaagacacttgagtgtagattgctgataactttggagattgtgacattggattagagagagatattccagtgcactaattgaaaggcccttgtattcataaacattattaaaccaatatgaagcagagtaggagttgatt

SEQ ID NO: 588058 - DNA, 572 bp, Homo sapiens
taaattcgggctttttgacctcaaactatttttttggacattaggtttcttgaagaccaagagacacatattagtcctatattacagtttttgttttgttagaattatgcagaaagctttgtcaaatctgaggtggtgtttagcttccgttgggatatatttatatagatgtgttgataatatgtgttccaggattgtatgagattcctaaaattctaatacatcttaatacatgttttcagtaaaaatgattattattttaaattgctgtgtgccccagaaataaccaaatttccttgtcaactgtgtctttaactatggctatcttacgacttttgtcattcacaattgatgtttaaggttgatccttctcaaacatgtgacataatcagccacagtccaaagcttgcttctttggaggagttcacaaaaaaagacacttgagtgtagattgctgataactttggagattgtgacattggattagagagagawattccagtgcactaattgaaaggcccttgtattcataaacattattaaaccaatatgaagcagagtaggagttgatt

SEQ ID NO: 588059 - DNA, 558 bp, Homo sapiens
tcagtagggacaaactccggacacgcagcctttaagaactgtaacaytcaccgcgagggtccgcggcttcattctttaagtcagtgagaccaagaacccaccaattccggacacagtactactgcctatcctcttaatcacaggacaaggactccaaaaaggcaagtctcaaagacaaagccattacacacaagctctgctcactgatactctgtactctggttctgagcccattaacaatcatcctcaaggtgcgaaggctgatttgggtgagggaggaagattattaattgagtcccactggagttcaagactttaaaattaaaataacaataaaaaattaaaattaatgaaaaattactatgtgccaggcactatgaaaagccatttacaaggattgacaaaaatgctgtgagaaggatattataatcctcaatttatacatgaataggtcacagaaaggtgaagcaattattttaaatgtagcataagaagtaggtggctgagtaattgttcaaatcagctcagtctgatgggtgttaatatgtttttatctaa

SEQ ID NO: 588060 - DNA, 602 bp, Homo sapiens
ccatcttgtcctactggcaggtcttcaaggacagtatcatacatggaattgtcatcttctgtaacaatgccttcttctgaaataccctttgaaggatctgctcaagactgttttacagttaactttgtttaaataaataagtggcaggaggacactctaaaataataatgaaatatatagtatagtaaataagtaaattggtaacatagtcatttaggcaatagtaatttttcagctccattaaaatcttatggtaccaccattttatatgttgttcagtgttgactgaaacatgcagcacattactgtatgttattttattaatagtagtattggtgaatggaggcgctctgtggtgattttattaagaaaaattgtgttttctctggaaaacagttgcctttaatctgggaaattcctaggtggggaacaatcatgtttacaagacttggaaagggagaagaaaacagatcagcaaataattttaatcaaagccttggtggaaaggttcctacatgttgcaataaacccaaagagrcttagagaagttttaatcaacttgaacagacaaatagtgaatgagccacatgcaggaggtagtt

SEQ ID NO: 588061 - DNA, 578 bp, Homo sapiens
aaaaccaaattcatggacattttagattgattaatgtgacataatgccagcarcttatactaaaatggttttatgggcgagataaatttatttgtatcctacttttagtgtttctgtgttagattatttcaaattaaaagtgaaattgctttaacaacaaaaaaaataaaacgggagaagtgacagtgggggatttgctgattaaaaacaatgcaattttaaataaagggtgaacagaaaatgaaggaatggtagaatggagagatgttaaatgtagcagtactacaatttagaaaaattttgttttcaggataaaatcaaagaacagggtttttgctctttcactatcatttggatagagaatattaagagttgcatagattctgagaacatgaatttctgtatattaacaatatattcctatcttttagagaattttcaagcatctaagcaaacatcagaattgctttgaaaaatatctttctgtgttccaactacataaaggagtaaatctgactgaatcaaggtttcttccagttctattagttctatacttatggtattctgaagggaataaa

SEQ ID NO: 588062 - DNA, 585 bp, Homo sapiens
ctcatttctgttaggatggctattatcaagaagacaagagctaacaagtatcagcaagggaatggagaaagcagaacccttacatactactggtggaaatgtaaactggtccattaytgaggaaaatggtatgaaagtttctaaagaaattaaaaattaaactaccatatgatctagcaatccctcttttgggtatatacacagaggaaatgaaatcactttattaaagatttctgcactcccatgttcactgcagcattattcacaataaccataatatggaaacaacttaagtgtctgtcacaagatgactagataaagaaactgtggcctatgcatatataaatacacaataggatattattctgccttagaaagggagatcctgccattcatgacaacatggatgatgctcacttatttctcacttgggccttgataatgttgaaaactagagtgccctcaatctccaataatttaacaaacctttaaaaccttgaatgcttgagccctttttagccttcctgaattttggtggtggcaattttctgtcggaacccatatccacaaactaattagctatgc

SEQ ID NO: 588063 - DNA, 552 bp, Homo sapiens
taaactaccatatgatctagcaatccctcttttgggtatatacacagaggaaatgaaatcactttattaaagatttctgcactcccatgttcactgcagcattattcacaataaccataatatggaaacaacttaagtgtctgtcacaagatgactagataaagaaactgtggcctatgcatatataaatacacaataggatattattctgccttagaaagggagatcctgccattcatgacaacatggatgaygctcacttatttctcacttgggccttgataatgttgaaaactagagtgccctcaatctccaataatttaacaaacctttaaaaccttgaatgcttgagccctttttagccttcctgaattttggtggtggcaattttctgtcggaacccatatccacaaactaattagctatgccctcaggcacatcatctaagtggactaaccctcagttttgtcaaatgtagaaaggtggtgataatagttccaggttcttaggatgattatgagaattggtaatatatttaaatgcttaataaag

SEQ ID NO: 588064 - DNA, 512 bp, Homo sapiens
ttttcctggctagaaatttgttcttcctcttgtgaactcaaacgtgccaaatatatacatctttagacrcttcactttttatccagttaaaatgatggtaagagtttatttccaatttgccttattattttgtttgcctcttaatggcaggaaatttatcttgttgatcattgtacctcattactactactgttatgatgcctggaatagtattaaaaagttaactaatgaatgtccttcctcagtttcccatctctgcacagcctggaaattctcttgtcagtaagtgaaggaaatcatatgcccatctcacttatctcagttctcaggaatttttgtgatccatttgcctgatggttagtatttaaaaaacattctttcatttatttattttgttttcatttggctgttttacttgggaaggtaaatttagtcttggttgctccatcttttccagaagcaagtctcacaatcagttacatttaaggcaagaaaggggagacttgaagtta

SEQ ID NO: 588065 - DNA, 512 bp, Homo sapiens
ttttcctggctagaaatttgttcttcctcttgtgaactcaaacgtgccaaatatatacatctttagacgcttcactttttatccagttaaaatgatggtaagagtttatttccaatttgccttattattttgtttgcctcttaatggcaggaaatttatcttgttgatcattgtacctcattactactactgttatgatgcctggaatagtattaaaaagttaactaatgaatgtccttcctcagtttcccatctctgcacagcctggaaattctcttgtcagtaagtgaaggaaatcatatgcccatctcacttatctcagttctcaggaatttttgtgatccatttgcctgatggttagtatttaaaaaacattctttcatttatttattttgttttcatttgrctgttttacttgggaaggtaaatttagtcttggttgctccatcttttccagaagcaagtctcacaatcagttacatttaaggcaagaaaggggagacttgaagtta

SEQ ID NO: 588066 - DNA, 326 bp, Homo sapiens
tccttgcgcacaggacaaaagtgagaagcagtagtcccttctccagtgctaagtccaattttcatatttagttaacttatgctatactttgaattgtgccctccactgccaaattcatatgttgaagtcccaaccaacaatgtgacagtatttgragtttcactctttgggaaataattaagtttagatgatgttatgagggtggggccctcatgatgagattagtatccctgtaaaagataccagagagcttactctcttttcttgtcaccatgtgaggacatagtgagaaaacaagtcaggaagaaagccttcagcagaactca

SEQ ID NO: 588067 - DNA, 632 bp, Homo sapiens
tatttagttaacttatgctatactttgaattgtgccctccactgccaaattcatatgttgaagtcccaaccaacaatgtgacagtatttggagtttcactctttgggaaataattaagtttagatgatgttatgagggtggggccctcatgatgagattagtatccctgtaaaagataccagagagcttactctcttttcttgtcaccatgtgaggacatagtgagaaaacaagtcaggaagaaagccttcagcagaactcaacacagctggcaccctgaactcagacttctggcttgcaaaattgtgagaaaataaatttctgttgtttaagctacccagtttaaggtattttgttatggaaaaactagctgactagtagaacatagatayacaatcattactggctccacagagcagcatctgttttagaacctacccaaacactgaatggcaacagtagccaaccaatgcatttgattttttacttctgagtgaaaaaatcagagaccaggaaatcccatcttagcttagcttagcttggcttaacgaataagcagcccatactatacttgatgtattatcctcatacctctcaatgccatatgcacacacacacacacacacacacac

SEQ ID NO: 588068 - DNA, 632 bp, Homo sapiens
tatttagttaacttatgctatactttgaattgtgccctccactgccaaattcatatgttgaagtcccaaccaacaatgtgacagtatttggagtttcactctttgggaaataattaagtttagatgatgttatgagggtggggccctcatgatgagattagtatccctgtaaaagataccagagagcttactctcttttcttgtcaccatgtgaggacatagtgagaaaacaagtcaggaagaaagccttcagcagaactcaacacagctggcaccctgaactcagacttctggcttgcaaaattgtgagaaaataaatttctgttgtttaagctacccagtttaaggtattttgttatggaaaaactagctgactagtagaacatagatatacaatcattactggctccacagagcagcatctgttttagaacctacccaaacactgaatggcaacagtagccaaccaatgcatttgattttttacttctgagtgaaaaaatcagagaccaggaaatcccatcttagcttagcttagcttggcttaacgaataagcagcccatactatacttratgtattatcctcatacctctcaatgccatatgcacacacacacacacacacacacac

SEQ ID NO: 588069 - DNA, 563 bp, Homo sapiens
tctacttttgttttcacaaggatgatgatgatgatgtttataattatagtgataatgattgagtcagttaatccgtgtatctgtggtgtttaagtatgatggttctgaagacaggctgttggggtttgaaacctaactctactttttactagctctgtgacttttctcaagttaattaaagcctgtatgcctcagtttccttatctgtaaagtgaagaataagcatactttctttacrtgataatggtgaagattaaatgagttaataccttaaagtcttaggaactgtgactatcacatattaagtattaaaaaattcaacactattatgaggagtaatatgaaattatttaatgacgtgctatgctagctgaacttcagtgttcatcatttattagtgatacatatggttggaatatgcctgatgttgaattttcttataaccacactctaagataagaagttaagtacaaatgttttatttggagatgatcaaggaagcacaggtgttagataaagtaatacagcgattggaaaaaggccaataacctgtgttaatgagt

SEQ ID NO: 588070 - DNA, 604 bp, Homo sapiens
catttggtatttgttttcctccaaacctcattatgggttgaggatatttgctttatcagagagataaagtgaagccaatgtttttcagagtcgataacagygtcagatgtcatcacatctttagtactccatgataagtgcacatgtccactgcttgagataattttgagagtttaagacctttactttttaaaaattgttctgacttaggggtcagattcttgtagagtctggatatatttggaaataattatttggaaattgggttctctttataatgaagagcaggcattaagagaagttttctactgactcttatagtcattactgcttaaaaccactacatgaattcttagttgagagaaaggaaaacaaaagtaaaaagaagaggcagagaaatagacaatatacaggtatagataatatgactttttatagatagcttcactatcttccaaaaaggcaaaaatggctttatgggtataacttcactcactgagaaaaaaaaaaaaaagaccaaaatttcccaaaatgttcatgaatacagctctctctcctttgatattaccacaaatcttttctttgaataatgatacagggtatc

SEQ ID NO: 588071 - DNA, 414 bp, Homo sapiens
tgggtcttctattccgaatctaaaggaaacatgtttgctatttgtcacamaaaaaaaagaaaaaaaactgtgaaaaacatatgcatttgaaaatttgggactgtagtgctcctaaaaaaagccaaatgatgaatgtgatgtcttaacagcacgtccaaggtgaaatgaccaaagacagcttaattaaaattcacggaaaaagataaacaaaagacttgcttaaaaataaataataataaaaacaaaagttttttaaactgtcacttaacatagaccagtagttagactaataaagaagaaaagagagaagattcaaataaacactttcagaaatgataagaaggatactatcactgatcccacaaaaatacaaacaagcatcagcgaatattataaacacctttatgcaaataa

SEQ ID NO: 588072 - DNA, 510 bp, Homo sapiens
tggtgtgatctaaggggtattcctaaaaaataatctgtattaaaaggaaaatctgtggtcctgctccagagcctttcaaattgccattataattttatcctatagcaggagttggcaagttttttttgaaaaagggcgagttagtaagtattttttattttgtgggcgataaggtcttcattacaactacttgtcttaktttttatagaactaaagaagtcatagagaatacgtaaatataaatggatgtggcagtgttccagtaaactttatttacaaatataggcaatagaacaatttttttcctaggaactgtagtgtgccaacaccaattaaaaaaaaaaactgcatctttaggaagctttgataaatttcaaaccctttgtaaaagaaccatattaagctatcatctatttttgatagaacgtaaatttaaggcaaagcaataatcaaaaatgtgttttagacaatgcaaattatgtaggaaatgaacagatattataaacccaa

SEQ ID NO: 588073 - DNA, 489 bp, Homo sapiens
tgatgaaaattgtggtgatgcaaagaagaaaatcataacaggcattcattctttggggaaactatttttaaaacctamaaataaaccatagaattcctaaaactacctttggaaaattaaagttatataatgctagctttaagtatctaattacctatgtgtaaattataatttaatatttttactttaaatttttatgatattaataaaaaataatttccattgtcttgcttccaccattgtttatttctgctattttccttattccccatatggcatattccaagcacaaagtagtgcatgagatcctgaacacagaacaggacacactgatgttctaagttcttttctggttttcagaagcttctattcaacactccaaaattttaggctttttatattacttctaattgtccaacatgcttgataaagtctaattcttcttaagtattgagcctttcactacctcctttcttccacatccctgta

SEQ ID NO: 588074 - DNA, 478 bp, Homo sapiens
tgcagtgttcaacactagagaggtgcgttggtttcattctgaagcattaactcttttgtcccagcctgatgcctgatggactctgagaggctcagaagtaggattttttgctcaactaggcaagatttacacttacttcactgagataatcctttagcctagaaccatattaggtttgtggttggtaaattggaatacatagaaaaascacattctgaaattttccataatcctggaaaacactctggtccatttaagcacaattctagggagaaatgtacacttaaatgttctttaccatctcccacaatactgactgcttgaagaaggtgatgtggctgagtatgcctgatgaggagaatccagcatctggaataagccaaacatgttacttaactgctctgagggatttttcataaccatgaattggtgatgataaaaatgctcatctgcattcatcagaaaattataaggcctg

SEQ ID NO: 588075 - DNA, 528 bp, Homo sapiens
ttctaggccgggcccggtgtctcacgcctgttatcccagcactttgggaggccaaggctggcggattatctgagatcaggagttcaagaccagcctggttaacatggtgaaaccccgtttctactaacaatacaaaaaattagccaggaatagtggcatgcgcctgtaatcatagctgctcgggaggctgaggcgggagaatcgcttgaacccgggaagcggaggagctgasatcacaccattgaactccagcttgggaaacaagagtggaactccgtctcaaaaaaaaaaaaaaaatctataagctaagggaaaattaaaaattaaaaagagtataaaagaaaacaaagcaataaattaggaccctgaggtgtctctctgaagaaaatcttcagcctgtccactcgttagattgtattcctgtctcggtgaggagatacaaaacaatttccaggtaggtcagagaatctgacatatgagaagcagacatctgtctgcttctcaagtagctacatggacattcactgg

SEQ ID NO: 588076 - DNA, 541 bp, Homo sapiens
tatccctatgttttcttctaatattgttataattttatctcatatttaggtctttgtccattttgagttaatttctatatgatatgaaagtcaagcttcattattttgtgtgtggatatacagttttcccagtactatttgttgaagaaaccagttttttccgtattaaatcttcttggcatccttgtttaaaagaaacttaaattgtcaaagagtgaactgtttttccccacatatttgtaaataattctgttttctttctgttattgatttctcyctttattcatcatgtcagatgctttgtatgatctcaattttttacatgtactgagacttgttttgtggcctaacatatgttttatcatgttcacttgaaaagaaagtatttgtttttattgagtggggtattccatatatctcttttaggtctggttcatttataacgttgatcaagtgccctatttaacaccaagaaaatcatttttttattctttttttctacacctaaaaaactatttttctgcaataataaaataaaata

SEQ ID NO: 588077 - DNA, 482 bp, Homo sapiens
taaggacaaatacagactgaaactrttctgatccttagacagtataaagagaaccagaagagaaaataacaatcttataaaattattagttcattcaaagttgaactttaagaataaagataaaataaaaatctttactacatggatttaaaattacatgggatttttgacaagtaaggtgatacctaacagagttaaattagaagaactgaaacttaaaatgctatgcttagttcattcacttaacctttcatttcagatgagttattgagtaactgtggtgagcaaggccttaacattgctataggaaatggaaatataaatcaggaaaaaatagtagcccagttgcagaataagataaaggcacatataaacataacttgtggcagaatataatatgggctcaaaaagaagcataatttaggtgttatatcatttagataaatgcaaggtcataatcaaatatggcaaaatcacacaat

SEQ ID NO: 588078 - DNA, 415 bp, Homo sapiens
tattcaattgtgaatattttttatgctctgcatcataccatatgctttggtgatatgagaaagaggtatatccaaatggtttctgtttttcagaggctcatgagacagtggcaaaaaaaaaaaaaaaaaaagccataaggtgcaatgggttaaggacaaatacagactgaaactattctgatccttagacagtataaagagaaccagaagagaaaataacaatcttataaaattattagttcattcaaagttgaactttaagaataaagataaaataaaaatctttactacatggatttaaaattacatggsatttttgacaagtaaggtgatacctaacagagttaaattagaagaactgaaacttaaaatgctatgcttagttcattcacttaacctttcatttcagatgagt

SEQ ID NO: 588079 - DNA, 482 bp, Homo sapiens
taaggacaaatacagactgaaactattctgatccttagacagtataaagagaaccagaagagaaaataacaatcttataaaattattagttcattcaaagttgaactttaagaataaagataaaataaaaatctttactacatggatttaaaattacatgggatttttgacaagtaaggtgatacctaacagagttaaattagaagaactgaaacttaaaatgctatgcttagttcattcacttaacctttcatttcagatgagttattgagtaactgtggtsagcaaggccttaacattgctataggaaatggaaatataaatcaggaaaaaatagtagcccagttgcagaataagataaaggcacatataaacataacttgtggcagaatataatatgggctcaaaaagaagcataatttaggtgttatatcatttagataaatgcaaggtcataatcaaatatggcaaaatcacacaat

SEQ ID NO: 588080 - DNA, 482 bp, Homo sapiens
taaggacaaatacagactgaaactattctgatccttagacagtataaagagaaccagaagagaaaataacaatcttataaaattattagttcattcaaagttgaactttaagaataaagataaaataaaaatctttactacatggatttaaaattacatgggatttttgacaagtaaggtgatacctaacagagttaaattagaagaactgaaacttaaaatgctatgcttagttcattcacttaacctttcatttcagatgagttattgagtaactgtggtgagcaaggccttaacattgctataggaaatggaaatataaatcaggaaaaaatagtagcccagttgcagaataagataaaggcacatataaacataacttgtggcagaatataatatgkgctcaaaaagaagcataatttaggtgttatatcatttagataaatgcaaggtcataatcaaatatggcaaaatcacacaat

SEQ ID NO: 588081 - DNA, 593 bp, Homo sapiens
ttgctgagattctaagactagctggattcaggtgagactcagcacattcccagctgtgatggcaatgaggtgagaccccttccacttaagaaaagcagagggaaaagcaaaggaaactttatattgcacctaaagtaccaccttggccacaggggtgtagagcaccaagtagaatcttggggtcccggactctggcacttggctcttggatgacatttctggtcctgccctgggtcaratgggagaccattgccctaaagagtgagtctcaggccagagagcattcattataaactgattgaaactgattgaagagcccttgggcctgaagagaacattggcggtagtctggcaggactccctatgagggtgtggtggtggtggccatgggatgaggctcctctgcctttggaaaggggagggaaggactgcatcttgtggtttaaatgccagatcagctgcagtacaatagaacagcaggtacaattctaagatttttgactacagtccctagcttctaggtggaaactttgaacatatctcagacctgggggaactttccaccctgaagagaaggacaaaggcctggctgg

SEQ ID NO: 588082 - DNA, 593 bp, Homo sapiens
ttgctgagattctaagactagctggattcaggtgagactcagcacattcccagctgtgatggcaatgaggtgagaccccttccacttaagaaaagcagagggaaaagcaaaggaaactttatattgcacctaaagtaccaccttggccacaggggtgtagagcaccaagtagaatcttggggtcccggactctggcacttggctcttggatgacatttctggtcctgccctgggtcaaatgggagaccattgccctaaagagtgagtctcaggccagagagcattcattataaactgattgaaactgattgaagagcccttgggcctgaagagaacattggcggtagtctggcaggactccctatgagggtgtggtggtggtggccatgggatgaggctcctctgcctttggaaaggggagggaaggactgcatcttgtggtttaaatgccagmtcagctgcagtacaatagaacagcaggtacaattctaagatttttgactacagtccctagcttctaggtggaaactttgaacatatctcagacctgggggaactttccaccctgaagagaaggacaaaggcctggctgg

SEQ ID NO: 588083 - DNA, 311 bp, Homo sapiens
tttgtaaaatttgtggttcagcaatttttgcaatctagagctgccacatacagtcattcagcttggctactgtccaactytagcatgtatcatgcacacagattaaaatgtaaaatgcatactcttacagtcattcaatggtgcttctaactacaaaatacatattaattgtaaattttcttactaaaaaactgcagcctgatactctcatctctggtgaattaccatgggatcttaaattctgaaaaaaaaaaaaaaaaaaaaaaagcatcaacaactaggcaatacgcaaatagaactgaaaacacgct

SEQ ID NO: 588084 - DNA, 417 bp, Homo sapiens
ttcagcaatttttgcaatctagagctgccacatacagtcattcagcttggctactgtccaactctagcatgtatcatgcacacagattaaaatgtaaaatgcatactcttacagtcattcaatggtgcttctaactacaaaatacatattaattgtaaattttcttactaaaaaactgcagcctgatactctcatctctggtgaattaccatgggatcttaaattctgaaaaaaaaaaaaaaaaaaaaaaagcatcaacaactaggcaataygcaaatagaactgaaaacacgctgaagaaggaaggtgatgccagtaatgtaattcaaactgattaaaattccttcaaggttgtaatttctgtgcttgtatttgcagcatttataccaccaattcagtcaattaataataactgga

SEQ ID NO: 588085 - DNA, 597 bp, Homo sapiens
tactgtccaactctagcatgtatcatgcacacagattaaaatgtaaaatgcatactcttacagtcattcaatggtgcttctaactacaaaatacatattaattgtaaattttcttactaaaaaactgcagcctgatactctcatctctggtgaattaccatgggatcttaaattctgaaaaaaaaaaaaaaaaaaaaaaagcatcaacaactaggcaatacgcaaatagaactgaaaacacgctgaagaaggaaggtgatgccagtaatgtaattcaaactgattaaaattccttcaaggttgtaatttctgtgcttgtatttgcagcatttataccaccaattcagtcaattaataataactggacccatcaagagcggtcttcagtgagtttctatttggaattataaacaaataaacaaagacagtatagtcatattcatattttctcctccattctcctttctgccagtctgctgccaacaactctagtgagcctttctgcatggcctagttttctactgaatggagagtttactctgtttcaaaattaaaacttttttwaaataaatgtagtataaagatctttctaaaatg

SEQ ID NO: 588086 - DNA, 593 bp, Homo sapiens
tgattgctagctaatatatgtaaatctcctatgattattcctgactatttccacatttctgtcaggttatccagagaataaaagtgggaaaagggtattaaaatgtgatctagctgagaaagcaaaatatttatctcaaaacagcaaatayatgctgttgtataataagagtttgtctgatctttgtccagagtttctgtaggaagcttctaaaatccttggaatttctccagtggtaggagtttgtttgtttttttgtttgttggttgttttgttgttttggtttttgttgttatatgaatgaagtgactcaatgtgtcctatagatagctctgggattggagctggtcacgagaaagaccaaccaggtaattagaggattgggactagagccagctcaatgttcagggaatgaaggggcaagagtttgagctaaacgatacagccaatgattgaatcaatcagtaatttctacataataaaaccccagtaaaacactagatactaacatttagtgcagtgtcccagttagtgaacatattgttttgctgtgagaaaaataaaccttcattccagtgagagaggacacagaa

SEQ ID NO: 588087 - DNA, 593 bp, Homo sapiens
tgattgctagctaatatatgtaaatctcctatgattattcctgactatttccacatttctgtcaggttatccagagaataaaagtgggaaaagggtattaaaatgtgatctagctgagaaagcaaaatatttatctcaaaacagcaaatatatgctgttgtataataagagtttgtctgatctttgtccagagtttctgtaggaagcttctaaaatccttggaatttctccagtggtaggagtttgtttgtttttttgtttgttggttgytttgttgttttggtttttgttgttatatgaatgaagtgactcaatgtgtcctatagatagctctgggattggagctggtcacgagaaagaccaaccaggtaattagaggattgggactagagccagctcaatgttcagggaatgaaggggcaagagtttgagctaaacgatacagccaatgattgaatcaatcagtaatttctacataataaaaccccagtaaaacactagatactaacatttagtgcagtgtcccagttagtgaacatattgttttgctgtgagaaaaataaaccttcattccagtgagagaggacacagaa

SEQ ID NO: 588088 - DNA, 593 bp, Homo sapiens
tgattgctagctaatatatgtaaatctcctatgattattcctgactatttccacatttctgtcaggttatccagagaataaaagtgggaaaagggtattaaaatgtgatctagctgagaaagcaaaatatttatctcaaaacagcaaatatatgctgttgtataataagagtttgtctgatctttgtccagagtttctgtaggaagcttctaaaatccttggaatttctccagtggtaggagtttgtttgtttttttgtttgttggttgttttgttgttttggtttttgttgttatatgaatgaagtgactcaaygtgtcctatagatagctctgggattggagctggtcacgagaaagaccaaccaggtaattagaggattgggactagagccagctcaatgttcagggaatgaaggggcaagagtttgagctaaacgatacagccaatgattgaatcaatcagtaatttctacataataaaaccccagtaaaacactagatactaacatttagtgcagtgtcccagttagtgaacatattgttttgctgtgagaaaaataaaccttcattccagtgagagaggacacagaa

SEQ ID NO: 588089 - DNA, 542 bp, Homo sapiens
tagctttggtttagacattgagtcacatttgcaatactattattctgatgtccaagggctccatagcccttacctgctgctttaggttgactcaggacacctgtgtttgacttttgcaggatatattatcacaacttacatcccaggattgttaccaagaaaacatacttttcccagaagtaaaataaaagctgacaggaaagtgctatacctaatttaactcagtctcaacttttactcctcttgaaacttgccaatttaccctgttgtcagcccattattgctccacttcttcaattcctgatctttttctaattattccttgcaacttgagctctgtctaggtttatttgctaaattcacttccgcaaaattcaattcactgactggayaacatctctgaaacactagctgtctttcagaataaattctttctgttttaaagaattgtttctcttcagttagcattttctttgtgaaagacatatgtagttgtttctgtagtcattataaagtttacagcaatttgaattatgtttttt

SEQ ID NO: 588090 - DNA, 542 bp, Homo sapiens
tagctttggtttagacattgagtcacatttgcaatactattattctgatgtccaagggctccatagcccttacctgctgctttaggttgactcaggacacctgtgtttgacttttgcaggatatattatcacaacttacatcccaggattgttaccaagaaaacatacttttcccagaagtaaaataaaagctgacaggaaagtgctatacctaatttaactcagtctcaacttttactcctcttgaaacttgccaatttaccctgttgtcagcccattattgctccacttcttcaattcctgatctttttctaattattccttgcaacttgagctctgtctaggtttatttgctaaattcacttccgcaaaattcaattcactgactggacaacatctctgaaacactagctgtctttcagaataaattctttctgttttaaagaattgtttctcttcagttagcattttctttgtgaaagacawatgtagttgtttctgtagtcattataaagtttacagcaatttgaattatgtttttt

SEQ ID NO: 588091 - DNA, 574 bp, Homo sapiens
aaaaaatctatgtgagactacactattgacagtgatctgaaaatctgtgatcttttctcatttagcagttttgcaagagatttgctttgtggacttgaggaaacaacaccctcaaagttgctaatagataatttaaattatgktaagtaacattttttatttaatccatgagaaattccaaattgaatctgttagaatgtaagttatagcaggctaattaataaatgggataactatgttgtcctttttaataagaaacagcacccctccatagaccaaaaatgaagacgctagaaattcagaaacactagtctccgttctagttctgccattaaatttctatgtgatctgaggtgtctcctttaacttctctgtgtcccatgttttcttattagcaatatgaagaataataaggctggcctacagttattcttttaaaggtgatggtcaaaaacagtataaatgataagggcttataaaatagtgtgtttttttacttacaatattatttgaatttaaaataattttattttattttacatggtatgatagacaatttaaaatcatggaattt

SEQ ID NO: 588092 - DNA, 536 bp, Homo sapiens
taatgtttgtatgtaggaaattatctcagccttttagatgaaacattttagttttagaaacccatttctcaagccgttcttttatatttgtgctgaaggactgctgcaaacacccatttgtatgttgaagccctaatcccccatgtgatagtattaagaggtggggtcttctggaggtaattaggtttagattaagtcatgaggatgagatcctcgtgatgggaatagtgcccttataagaagagcctggagagcttgctcttgctctctctccctcatgtgaggatatatcaagaaggcaaacatctacaagccagcaagatggccctcaacagaacccaccatgctgtcaccctgatcttaaacttcctagccttcaaaagtgtgaggaataaattcctattgtctgagccaccgagttctatgacatttttttwaaaaaatcataattatcttattttatttttttaagttccgggatacatgtgtaggatgtgcatgtttattacataggtaaacgtgtgctatgatggttt

SEQ ID NO: 588093 - DNA, 568 bp, Homo sapiens
gagttggtattattgtaagaatggtacataactttatgttttctacatgactcaagatactacatgactcaagatttcttgcaaggaaggtctagtggaaacaaaatagaccctcagctttgtctgggaatatcttatttttttgtatgtatttttaaaagagttttggtggttacaagattcttggttgacaatttttttgtttctgtttttccttttarcactttgaatattttagcccactcccttctggcctccgaagtttttgatgaggaatctgatgtcagtcttacttagaatctcttgtatgtgacaagtcatttctctcttgttcttttacaattctttctttggcttttgactgtttgattataatgtgtctcagtgtgactattttttaggacatcctacttgggttttgttgagcctcctcttggattttatattcatatcattaatcaaatttgagaagttttcaactgtattttctttaaatattccctctgtctctttctttcttctccttctgagatttccattgtgtatgttggtctacttgatgatgtcc

SEQ ID NO: 588094 - DNA, 568 bp, Homo sapiens
gagttggtattattgtaagaatggtacataactttatgttttctacatgactcaagatactacatgactcaagatttcttgcaaggaaggtctagtggaaacaaaatagaccctcagctttgtctgggaatatcttatttttttgtatgtatttttaaaagagttttggtggttacaagattcttggttgacaatttttttgtttctgtttttccttttaacactttgaatattttagcccactcccttctggcctccgaagtttttgatgaggaatctgatgtcagtcttacttagaatctcttgtatgtgacaagtcatttctctcttgttcttttacaattctttctttggcttttgactgtttgattataatgtgtctcagtgtgactattttttaggacatcctacttgggttttgttgagcctcctcttggattttatattcatatcattmatcaaatttgagaagttttcaactgtattttctttaaatattccctctgtctctttctttcttctccttctgagatttccattgtgtatgttggtctacttgatgatgtcc

SEQ ID NO: 588095 - DNA, 489 bp, Homo sapiens
gtaataatgtggcagctatggaagtcacattcttcttttttatcagggtttgctgttttacgcttttgttttgatttaatttttgtaggctgtcttcatgctgagggtcaggctgagttgtgaacttagttcttatttttttttctgagcctgcatctttccctggtcacacacagtgagtttctaatttctccaatgcatgttgttgcttttgaatattgtggtatttaatgtagagcttcacaaaaggagaaaaagagaaaaataaagcggggaagggtactagccatttaaatgccctgaaatccacttccattggatgggtagtrgcttgcaataatgtgggtatgcaacagtgtctactctcttttgtttctgtacttccatgattataaatgccatcatttatcagactacagatccagatattggaggacagggtgtttattacccaccctggtttctgcaatcttcatgcaagctgcatca

SEQ ID NO: 588096 - DNA, 489 bp, Homo sapiens
gtaataatgtggcagctatggaagtcacattcttcttttttatcagggtttgctgttttacgcttttgttttgatttaatttttgtaggctgtcttcatgctgagggtcaggctgagttgtgaacttagttcttatttttttttctgagcctgcatctttccctggtcacacacagtgagtttctaatttctccaatgcatgttgttgcttttgaatattgtggtatttaatgtagagcttcacaaaaggagaaaaagagaaaaataaagcggggaagggtactagccatttaaatgccctgaaatccacttccattggatgggtagtggcttgcaataatgtgggtatgcaacagtgtctactctcttttgtttctgtacttccatgattataaatgccatcatttatcagactacagatccagatattggaggacagrgtgtttattacccaccctggtttctgcaatcttcatgcaagctgcatca

SEQ ID NO: 588097 - DNA, 381 bp, Homo sapiens
ttatatgagataaaataaatgtcaagacaaaaactatgaaataagacaaagtcattatataatgacaaaggggtcaattcagcaagaggatataacaatcgtaaatacatatgcacctgacactggaacacccagatatataaagcaaatattattagagctaaagacagaaatggaccccaatacaataatagctggagacttcaacacctcactttcagcattggacagatcttccagacagaaaatcaacmaaaaaaaacactggattaaatctgcactatagaccaaatgtacctaacagatatttacaaaacatttcatccaacagctgcaaaatacacactcgtctcagcacatggataatccttaagaatagac

SEQ ID NO: 588098 - DNA, 452 bp, Homo sapiens
gcagtgagtcaccagtaatgtccagtgttattggagtatgtaggaaaacaagcattctcaaacacaatatgaggaagtgcacattgataaagatattttgaagggtaatttggcatattaagtaaaatttaaatttgacccagcaattctacttatagcaatctatccaaagcatatttgtacaaagataagtatacaagcttttgtgcaacactgtttttaataccaaagagttggaaatgttaatcagtaagaaaatggttttatgaagtatggtgcattcgcaatgtgaaatactatagaaaagttaaaagaattatggagacaaatatgtactgaaatggaaaaaattctaaattatattgttaagagaaaaaagaaagtcatacartatacctacagtgtgattccattttattatgaaataatataaatatatatccacacattca

SEQ ID NO: 588099 - DNA, 351 bp, Homo sapiens
gcaaaaaggacaaatctgaaggcatcacattacccaatttcaagctatactgtaagactatagtcaccaaaacagcatggtactggtataaaaataggcacaaagaccaatggaacagaataaagaacccagaaataaacccaaatacttacagccaactgatcttcaacaaagcaaacaaaaacataaagtggggaaaggatacccttttcaacaaatggtgctgggataactggcaagccaaatgtaggagaatgawattgcatcctcacccctcaccttatataaatatcaactcaagatggatcaaggacttaaatctaagacctgaaactataaaaattctagaag

SEQ ID NO: 588100 - DNA, 616 bp, Homo sapiens
tgttttaaaagaattgttgaacattttaaaagatttattggtatactatcatcagctataagtacatatagacaatagtatgtatagtctatagtataccaagcaacttaacaatgaatgagagttttggaataagtaaagctaggaacagaagtgggtagcgattataggagtatttttctkacttaacaatccttctcttcttatccaccaactgtggtggtaaatgacttcttcctctgtgctacttctataccttattcttactttttggattgcacttatatcactgtatgtggtactgtcataatctgtttttaagtatccgtcccttctataagacgaagcttcctaaaagtagggttgagttttattcttttggattttctgcattcagcaatacctggtacaaactaaacacatgggaatgttcgatggataagtgaatgaaaaaaatgaatgctttattttaaacacctctaaacattaggcaaattttgctaaaacttcttatattcttgtttgaattttacactgagttaagtctccccaccaaatatgtgtgtgtataaacacacacacacacacacacacacacacacgcacacacacacgc

SEQ ID NO: 588101 - DNA, 616 bp, Homo sapiens
tgttttaaaagaattgttgaacattttaaaagatttattggtatactatcatcagctataagtacatatagacaatagtatgtatagtctatagtataccaagcaacttaacaatgaatgagagttttggaataagtaaagctaggaacagaagtgggtagcgattataggagtatttttctgacttaacaatccttctcttcttatccaccaactgtggtggtaaatgacttcttcctctgtgctacttctataccttattcttactttttggattgcacttatatcactgtatgtggtactgtcataatctgtttttaagtatccgtcccttctataagacgaagcttcctaaaagtagggttgagttttattcttytggattttctgcattcagcaatacctggtacaaactaaacacatgggaatgttcgatggataagtgaatgaaaaaaatgaatgctttattttaaacacctctaaacattaggcaaattttgctaaaacttcttatattcttgtttgaattttacactgagttaagtctccccaccaaatatgtgtgtgtataaacacacacacacacacacacacacacacacgcacacacacacgc

SEQ ID NO: 588102 - DNA, 480 bp, Homo sapiens
agaccaaattgttagatttcctcaaargcaaaaacttttgctactgacaaagcaccaataaaaaataagtcaagtcaaagattgaaagaaaatattcacagtgaacatcatagagttgtatctggactataagaagaacttttatgactcaataatataaagacaactacatttttaagaggagcaaaagatttgaacatacacttcacagaagaatataagggtcagtaaacactaaaagatactcaacatcatagtcaccatagaaacgcaattttaaaccacaatgagataccactacacacctactaaaatagctaaaatgtaaaaaggcagatattaccaagatttggagaggttttaggagtactggaaatgtcatacatgggtagtgagagtgtaaaatagtataaacatcttagaacacaatttggtagtttcttataaagttaaagacatgcttatcatataactcaccaa

SEQ ID NO: 588103 - DNA, 502 bp, Homo sapiens
aggcgtgagccaccacgccctgcatctattttgtataatactatatagcttcattttttaaagtaatgagcccacagaaatacataaagtaaaaataaaagttgcatatacagagaggcaacttagtattgtgactaagaagattttgacaacacacataacaygattaaagtcaacactctaccacttactagctgtgggatcttaagttatctgatttctttgaacctcagtttcctcatctataaaataaaaatcataacaactagattatagggcagttgtgatgacgaaattagataatgtctggcacatagtaaggactggatcaataccagttattcttgttatcacttcaggaaacctagaattccataaagtaattcattgaaaaggcaacatctaacatctcccatctgattttgaaaattcataagaattttgcattctcctccacgctttcattttaatttgtacataatttcctcccaaatgcatccag

SEQ ID NO: 588104 - DNA, 567 bp, Homo sapiens
atcacacacatttggcatcttctctaagtaggggggtctgtcctgaaatgtggggctcagaatttatcataaaacttgaaatgctttgtactagtgcagagccccacgtggccattagctccctttctcctgcaactctgctctaagaagaacagtctatatatgtatttgctttgggaagtcatatcagatggtggggtcacttctagtttggcaatccacacttagagattaacatgcattaaaaggaagatatctgaactggccctcaacacccttgatatttactggtagcagagagaatccctaatrtgaagatggggaagggaggaagggaatacacatttattggaagtcaactgtgtgttgggaattgtggtacatgcttcacatacctaaccttctctgactctcacgaggaccctaggaagtaagtaccattttagttcccacgtgtgtttgttctgaacgagtttcactgcaagtaacagagagactgacaacaaagactcgtctctaaaaataagaagtctggaggcaggctgcccaggctttcccaggagctct

SEQ ID NO: 588105 - DNA, 426 bp, Homo sapiens
attgaatgtgaaagcttaggacacaaccgtacaccttataaacactgtacacgtagatggcactacatttataaaaaatatttttctttcttcaatactgaattaactttagcttactgtaacatttttactttataaacctcttaatttttttaatgttttgattattttgtagatatttggcttaaacacacattgtacagctgtacaaaaataattctttttttttttttttttgagatggagtctcgctctgtggtccaggctagagtccagtggtgcgagctccactcactgcaagctccacctccctggttcacgtcattctcctscctcagcctcccaagtagctgggactacaggtgcccgccactaagcccggctaattttttgtatttttagtagagacggggtttcaccgtgtta

SEQ ID NO: 588106 - DNA, 435 bp, Homo sapiens
tctaattgtgggtgacagattaatatatatatgatggtgaaaaagtatcgttacacaaaagtaagtgcaggcatgaaagctaaatttatgatactgaatgaccaagaagataaattctcatggtaattcttccattgtatgtggatagaatagaactgcaatatactagttactaagtagtttcgtagagcactgaaaaatcacatcctttcacattagttacattacttttaatgtgacatctatttgcctccaattgtctcttgaacactaaaattgcaayaacttttcctaaatggactgaaaataataaaaaattcatattaagtgaaattcatctttgtaactctgccactttccaaatctgcctttttcttttccctaacagaacactacattttctttgattttagaacctttgtgacttccagttct

SEQ ID NO: 588107 - DNA, 660 bp, Homo sapiens
taattttttgtaattttagtagagacagggttttaccatgttggccaagatggtctcaatctctcgaccttatgatccgcccaccatggcctcccaaagtgctgtaattacaggcacgagccactgcacccagccgcaaatgaatmttttaaggttctacgcacaaccacaggagatgctcatagtcacctcttgaacacattatccactgcagagaagtctaaagctcaaaggatttaggtgatctgtgcaaaatcacatcacagatgagaaaaaaatccacttttttttgagatatggccatccattctgtgtttaataccccaaaatgagactcctgcaaaaccctgtcctattccactcttgaagggctccatctattagaaatttccaaactaatgttatttccctatcccctactcagtctgaccaaaattctatatttcaccacaattatccaaatccatctttaaacaatttatgtgtatggtacccaaattttcacgagctgtatctgctgcatttatttcctgatgtggtttggctgtatccccacccaagtctcattttgaactgtagctcccacataaaaaggagctgcacaagcttgctcttgcctgttgccatgtaagatgtcccttactcttctgccatgattgt

SEQ ID NO: 588108 - DNA, 660 bp, Homo sapiens
taattttttgtaattttagtagagacagggttttaccatgttggccaagatggtctcaatctctcgaccttatgatccgcccaccatggcctcccaaagtgctgtaattacaggcacgagccactgcacccagccgcaaatgaatcttttaaggttctacgcacaaccacaggagatgctcatagtcacctcttgaacacattatccactgcagagaagtctaaagctcaaaggatttaggtgatctgtgcaaaatcacatcacagatgagaaaaaaatccacttttttttgagatatggccatccattctrtgtttaataccccaaaatgagactcctgcaaaaccctgtcctattccactcttgaagggctccatctattagaaatttccaaactaatgttatttccctatcccctactcagtctgaccaaaattctatatttcaccacaattatccaaatccatctttaaacaatttatgtgtatggtacccaaattttcacgagctgtatctgctgcatttatttcctgatgtggtttggctgtatccccacccaagtctcattttgaactgtagctcccacataaaaaggagctgcacaagcttgctcttgcctgttgccatgtaagatgtcccttactcttctgccatgattgt

SEQ ID NO: 588109 - DNA, 660 bp, Homo sapiens
taattttttgtaattttagtagagacagggttttaccatgttggccaagatggtctcaatctctcgaccttatgatccgcccaccatggcctcccaaagtgctgtaattacaggcacgagccactgcacccagccgcaaatgaatcttttaaggttctacgcacaaccacaggagatgctcatagtcacctcttgaacacattatccactgcagagaagtctaaagctcaaaggatttaggtgatctgtgcaaaatcacatcacagatgagaaaaaaatccacttttttttgagatatggccatccattctgtgtttaataccccaaaatgagactcctgcaaaaccctgtcctattccactcttgaagggctccatctattagaaatttccaaactaatgttatttccctatcccctactcagtctgaccaaaattctrtatttcaccacaattatccaaatccatctttaaacaatttatgtgtatggtacccaaattttcacgagctgtatctgctgcatttatttcctgatgtggtttggctgtatccccacccaagtctcattttgaactgtagctcccacataaaaaggagctgcacaagcttgctcttgcctgttgccatgtaagatgtcccttactcttctgccatgattgt

SEQ ID NO: 588110 - DNA, 604 bp, Homo sapiens
tctctatttttatttcctctctttatacctaacataagtgtgtagagcaaggtcacctttttctttacggatagaagtttgcatatttttgctcttcttctaattctcctttgtcactgggtagaccactctgggtgcttctgggccacartcttaggttctcagagagacagagaaggcattgccccattctccggtattttatcagtaataaagtttatcggtaataaatcactgttttattgctgatttggcttattgtgtgctcctccgtgactacaaccaagagagagaaggaaagaggataaattagtagcctcgtagccagatttatttcagttaagtgtaatggttttgatatcaccacatagagtccacagaaaacttaaatgaacaaaacacaatttacacacagaataaataaaccagctaagcaatatagaatctaatcagattctaaaatgcaaatgaaatcttgctgttttctgcattttacactgtaattggctgtgtaaaccatgggtaaatgagcaaagaattattaaaatgaaaagcactgtataagtaaccacgactattctaactaaaagggtctctgttaaga

SEQ ID NO: 588111 - DNA, 596 bp, Homo sapiens
ccacaatcaaacccaagtatatttgtgtttcatccatttattaattttgcaagagctttatttttaacacaggactgagctctaccaaaattatttgtgtaatcactataaaaaactattttatatttaattatgaatttttaaatttgaaatctccctcaagataattttagactttttgactaaacattaatgttcaatttcaaatttaatttttaaaatcagaccattatttaaatcactctaactcattttctacttgaaatgttacatggcactgatataaagctagcataaatcatctatttgtaagtgccctttctgttaatttaggaaaacatatcgatagctacattttactttttctaccctcaaaaggaaactcataattgaaatgagcaaagttaaataaaaacaacaataatttaagctaataaaaagtcatattcccaagatgatatgcaaatacaacttgtgctactgcaggtggtaacttgtcactttcaggagcagtttcactaaaataaatactaacttttgaagtagttgctgaygttttagtagctttgcgtcatctgtttttttatgtacccagt

SEQ ID NO: 588112 - DNA, 580 bp, Homo sapiens
ttttttatgtacccagtcatatcagtatggtttcatggttaatgataaatgtcaaaaaagaatttgtgaaaattaactgttttccaacatctttcttaagtagcagaaatacagtatttaaattttcattaaatatgtgcttttgcttcctagtgctcattgtttccaaaagagctcattgctaaatgaaaaaaatgacaaaataataaaataaatatatgtacaataaatgacaaaaccacaggagcagattgttcagactactttaaatatgatctatggcaattctgctcagctgctatttcctgcacatattttaygcacatctaatcccaaattacccatgtttcttataactcactgactggtggcctggagttttctgtctcaaagaccagagtataagccatgacacaattggttagtatcaccataatgacaaatgggagttagctctccctagcctcaggaatcagagcacacctagttttatcaaccagtgctctgccttggatttagatagtgccaggaaaaaagaagatttaacgacatagtgaagacaaaattctgttaattgcac

SEQ ID NO: 588113 - DNA, 676 bp, Homo sapiens
ttgaagctaccctttttcctctaaaaacagccatattccacaagctataacatactgtattttttcataagcatttagttctaaatatttccaattttggttgtgatttggtttgttatttaaaattgtattgtttaatttaactatttgtgtatcttctagattttttctaatattgatttctagattaatccaacaatggtcagaggacatactcttatgtgatatgaggcctttaaaatttgttgaggcttgctttctagaaaagataaaagtcattttgacagatgttttatatgtatttaaaagagaatgtttattttgcaatttttggatacagatttgtatatttttattaagtcaaatctattaaatattgttataatttgtatataaaccaacattttcatgaacattgacatactgattcacattagtatgtcagaaacaaataggaaatgaaccagagcattacccctcttctttcctgaaatcttgtrttttcagacttaccacttttagactacatcttaactcaaaaagtaagtctattgatgggaatttcagacacaatcttgtaagtgaaatgataattttagacttataatagctaaaacagctaataattgtggctgaagggaaacgttgagcatttttaattttttaagaatgattc

SEQ ID NO: 588114 - DNA, 626 bp, Homo sapiens
atttttggagaatgggtgggatattttacagaattaaagacatgtaacctcagtttgaaagtgataattgaaagtacaaagcaagatataaatgataaagaagtaaatacccatagctaaatgcttcgtgaatgaaaacattagagatgatgagagaaaacaattaccaacaaaagaactgtcgatccrgactctgacatccaattaatctaccatccaaacatgaagataatataaatagatacacaaagataaagttgggaacaatagacaccgaggactattactggagagagagagacaggcagcatggtttgaaaaactacctattggatacaatcaatgctcactacctgggtgacagaatccataccccaaacctcagaatcacataaaatacccatgtaatgaacctgcacatggattctctgaacctaaaataaaagttgaagaaaaaaaagatgaagagaattttatgatccatagcccacactgtaagaacttttatagaaataagcaatttcatatcatttgtcaaattaaaagtgatttgccatttgctattttattcaaattctcaacaatcagaaccagtgttatttatataatcttcaacaaagtaaaat

SEQ ID NO: 588115 - DNA, 518 bp, Homo sapiens
tttgggaaaaatatttttttgcatggtcctttacaaagaatgcacttatataatgcttttatctctataatttccctgaaaattcttgattttatactatcgtacttgaataattattctctcattagctaggacattatcagtgaaaatttttgtattaaatttagtggcccacactaaatttaattgattatgtggtattatgtgattgcattatgtacctagagttaataatgtagtatgtttccgtcacttagataactactgaaatgcatgaagatagagctgtgcatgtgcaacgtgctgattgtgcaaaattaaacactgcttggagaaatgggctgaaaaagatcttaatttaaataggctgttcatcccttaaactccttcataacttctcactcagcaagtctttagaatgggcctctgagatgacggtaatattccatttcttgatccaaaaactagttgcccaggtacatttacaataytgtaaaaaattaaaaatcaaactgaac

SEQ ID NO: 588116 - DNA, 550 bp, Homo sapiens
tagtaggtagctcgcaaatgaaaacagtggctcatgtttactattattaaattattttcgattttaaatatatgtcttcaaattattttccaaatttgtacctttgggtagattgcatgttcagaccaaataaagttgaagttttgtgtacgtggacaaaaatttgacctaaataattaaaagcattttccctggattttttagaacagtatttatattttggggacgtgatgcttgacttccctgtttacttggtagatgtaacatcgttattacattaaaaattaatgaaatcagaatttttttttttaagaaaagcagcaaacagaccgggcgcggtggctcacgcctgtaatcccagcactttgggaggccaaggcgggtggatgatgaggtcaggagatcgacaccattctggctaacatggtgaaaccccgtctctactaaaaaatacaaaaaatgagccgggcgtggtggcrggcgcctgtagtcccagctactcgggaggccgaggcaggagaatggcgtgaacccgggaggcggagcttgc

SEQ ID NO: 588117 - DNA, 529 bp, Homo sapiens
gtttcttgcctggagaaaatcagaatcttctaggtgttaagtatttagggaagtctgaaggattcttctatgtactgagaatctgaatttgaaactagttagaacaggaacaatgctgtggacacaaagacatcaaagaatccaccataagaatgcattttctttctttctttctttctttttttttgagacaagctcttactctgtcccctaggctggagggcagtggcttgatttcagctcactgcacttctgctgcractacagacacgtgccaccacacccagctaatttttttttttttcagatggagtctcgctctgttgcccaggctggagttcagtggcacaatctcggctcactgtaatccccacctcctgggttcaagcgattctcctgtttcagcctgctgggtagctggattacaggtacatgccaccatgcccagctaatttttgtatttttagtagagatggggttttgccacattggccaagctgatctcaaactcctgacctcaagtgatcca

SEQ ID NO: 588118 - DNA, 626 bp, Homo sapiens
ctgacctgcctcttcctgcatgtagcaagccataaagactcctctggggtggcacccccacacaagggcaagaagagagcccttagcactggagactggggattgggggcagcaactgacccaagtaaatgtacttcatgaagtaagccttgttgccattgattttatattcccgcatatcacctagaggctcccctggaaatttactgcccctagccagattctgcttggccttgtcatttcttctcaaatttatcattctgtctaaaaagtacaaaagcatcttgctttggctacttcagacttcactaacttgggaagatccccatgtacctttaatactaatacaatttgtatgcttttctcttgttaatatgcttgatttcaatttggtttctagatccagctgaggagcccatgtaagagctaagtggggttggaggtgatctctgggtccctgcagaacgtggcacagagtccggggccctccctcactgactgggaaattgcttattctggagatactgcagctaagacccgggacctctgacctaagccagcaaaggcagggttcttactgcyagccttccaggtctctgctgtggggctgatctaggtgagaatgg

SEQ ID NO: 588119 - DNA, 618 bp, Homo sapiens
  misc_feature 614, 615, 616, 617, 618: n = A,T,C or G
caatagccacaaataaaattaaatacctaggaattaaccaaagaaatcaaagatcaatgaaaactataaaacactgatgaatgaaattcaagaggatacaaaaaaatggaaagacrtttcatgttcatggagtggaaggatcaatattattaaaatgtgcataccacagaaaacaatctacagatttaatacaatccctataaaaataccaatcttcacaaaatagaaaaatcaatcctaaaatttatatgaaaccacaaaagacacagaatagccaaacctatcctaaataaaaacaacaaaactggaggaatcacattacctgatttcaaattatactatagagctatagtagccaaaacagcatggtactggcacaaaaagagacacaaagaccaatggaacagaatagagaacccaaaaacaaatctacacacttatagtaaactcattttttataaaggtgccaagaacatacactgaggaaaagtcagcctctttaacaaatggtgctaggaaaactcaatatacagatgcagaagaatcaaaccagccccctatctctcattatgtataaaaatcaaataaaaatgaattaaggacttaaatataannnnn

SEQ ID NO: 588120 - DNA, 618 bp, Homo sapiens
  misc_feature 614, 615, 616, 617, 618: n = A,T,C or G
caatagccacaaataaaattaaatacctaggaattaaccaaagaaatcaaagatcaatgaaaactataaaacactgatgaatgaaattcaagaggatacaaaaaaatggaaagacatttcatgttcatggagtggaaggatcaatattattaaaatgtgcataccacagaaaacaatctacagatttaatacaatccctataaaaataccaatcttcacaaaatagaaaaatcaatcctaaaatttatatgaaaccacaaaagacacagaatagccaaacctatcctaaataaaaacaacaaaactggaggaatcacattacctgatttcaaattatactatagagctatagtagccaaaacagcatggtactggcacaaaaagagacacaaagaccaatggaacagaatagagaacccaaaaacaaatctacacacttatagtaaactcattttttataaaggtgccaagaacatacactgaggaaaagwcagcctctttaacaaatggtgctaggaaaactcaatatacagatgcagaagaatcaaaccagccccctatctctcattatgtataaaaatcaaataaaaatgaattaaggacttaaatataannnnn

SEQ ID NO: 588121 - DNA, 518 bp, Homo sapiens
gaattcattggaatggaagggaatgtagtgtaatggacaggtctggaataaagtggaatgctacggtctcgaatggaataaaaatgtatggaatggaatgcamtgaaacggaatcgaatgtcatagaatgtaatggaatgcaaaaaaatggaatccaaaatcattgactggaaaggctgggtgtcgaaaggaattgactccaatggaatggaatcgaatggaatggaagtgaatagaatcgaactaaatcgaatggaatggaattgataggaacggaatggaaaggaatgcaatgatttggcatggaatggaatcgaatggcatcgaatggaatggaatggaatgcaatggaatggaatgtattagaatgtaatgaactttaatggaatgtactcgaatggattcgactggaatggaatgttctggaagtgaatggactccaatggaatggattcaaaaggaatggaatcgtacggaatggaatctaatggaatggaattaaatggaaatgaatcaaa

SEQ ID NO: 588122 - DNA, 402 bp, Homo sapiens
ccgttcacatcaattcctggcgattccattacattsgatttcttgccattcgattccattccttttgactccatttcattcgattccattccattccattaatttccattccattcgagacctttccattgcagtcttttcccttcgagtccattccgttcgattcccttccgttcgattcccttccattcgattccattccattggagtccgtaccagtcgagtccattctattccagtccattagtttcgactccattgcattcgagtgcattccattccgtggctgtccattccattccgtttgatgccattccatacgattccattcaattcgagaccattctattcctgtccattccttgtggttcgattccatttcactctagtccattccattcc

SEQ ID NO: 588123 - DNA, 462 bp, Homo sapiens
ggaagggaatgtagtgtaatggacaggcctggaataaagtggaatgctacggtctcgaatggaataaaaatgtatggaatggaatgcaatgaaacggaatcgaatgtcatagaatgtaatggaatgcaaaaaaatggaatccaaaatcattgactggaaaggctgggtgtcgaaaggaattgactccaatggaatggaatcgaatggaatggaagtgaatagaatcgaactaaatcgaatggaatggaattgataggaacggaatggaaaggaatgcaatgatttggcwtggaatggaatcgaatggcatcgaatggaatggaatggaatgcaatggaatggaatgtattagaatgtaatgaactttaatggaatgtactcgaatggattcgactggaatggaatgttctggaagtgaatggactccaatggaatggattcaaaaggaatggaatcgtacgg

SEQ ID NO: 588124 - DNA, 541 bp, Homo sapiens
gaattccattccattccaatccattcctttcctttcgcttgcattccattctattctcttctactgcatacaatttcactccattcgttcccattccattcaattccattccattcaattccattccatttgtttccattctcttcgattccatttctttatattccatgccattcgattccattctattgggttgcattacattcgtgttcattccattccagaccattccatttgactccattcctttcgwgccctttcaatttgagtccattcctttccagtccatttcactccagtccattactatccattccataccattccatcccattccattccattccattccattccattccattccattccattgcattccattccattccattccattgcactgcactccattccattacattctactctatctgagtcgattttattgcattagattctattccattggattactttccattcgattacattccattcatgtacattccattccagtcaattacattcgagttcatta

SEQ ID NO: 588125 - DNA, 513 bp, Homo sapiens
attcatttccatttaattccattccattagattccattccgtacgattccattccttttgaatccattccattggagtccattcacttccagaacattccattccagtcgaatccattcgagtacattccattaaagttcattacattctaatacattccattccattgcattccattccattccattcgatgccattcgattccattccatgccaaatcattgcattcctttccattccgttcctatcaattccattccattcgatttagttcgattctattcacttccattccattcgattccattccattggagtcaattcctttcgacacccagcctytccagtcagtgattttggattccatttttttgcattccattacattctatgacattcgattccgtttcattgcattccattccatacatttttattccattcgagaccgtagcattccactttattccaggcctgtccattacactacattcccttccattccaatgaatt

SEQ ID NO: 588126 - DNA, 558 bp, Homo sapiens
gaattccattccattccaatccattcctttcctttcgcttgcattccattctattctcttctactgcatacaatttcactccattcgttcccattccattcaattccattccattcaattccattccatttgtttccattctcttcgattccatttctttatattccatgccattcgattccattctattgggttgcattacattcgtgttcattccattccagaccattccatttgactccattcctttcgagccctttcaatttgagtccattcctttccagtccatttcactccagtccattactatccattccataccattccatcccattccattccattccattccattccattccattccattgcactgcactccattccattacattctactctatctgagtcgattttattgcattagattctattccattggattactttccattcgattacattccattcatgtacattccattccagtcaattacattcsagttcattacgttacattccagtatattccattgtattcgatcccattcctttcaa

SEQ ID NO: 588127 - DNA, 460 bp, Homo sapiens
ggaagggaatgtagtgtaatggacaggcctggaataaagtggaatgctacggtctcgaatggaataaaaatgtatggaatggaatgcaatgaaacggaatcgaatgtcatagaatgtaatggaatgcaaaaaaatggaatccaaaatcattgactggaaaggctgggtgtcgaaaggaattgactccaatggaatggaatcgaatggaatggaagtgaatagaatcgaactaaatcgaatggaatggaattgataggaacggaatggaaaggaatgcaatgatttggyatggaatggaatcgaatggcatcgaatggaatggaatggaatgcaatggaatggaatgtattagaatgtaatgaactttaatggaatgtactcgaatggattcgactggaatggaatgttctggaagtgaatggactccaatggaatggattcaaaaggaatggaatcgtac

SEQ ID NO: 588128 - DNA, 482 bp, Homo sapiens
gtgtcccactggatttggtattttttttttcattttcattcattttaaaaaacattgatatatttgtcttaatttttgtggcccaatgatcattcagtagcatgctgtttaaatttcatttgtttagatagtttccaaagcttctcttggtattgatttcaagttttattccactgtggtctaagaatatgcttcatatagcttcaatttttaaaatttgttgatatttgtttagtggcctggcatatggtctatcttagagaatgtttcaagtactgatgaaaagattgtgtattctacagttgtcaratatatcgttctataaatgctggttgcatcaatttttgatctaaagtctattttaagtccaattttttgttgattttctctctatgtgacatctctaatggtctgaatgggctattagagttcactctcccctattatggtatttatgtctatatttccgtttaggtctaata

SEQ ID NO: 588129 - DNA, 610 bp, Homo sapiens
tggtgacagaaaagagtgtgataagatcatatattatccttgttgaggttatgccttgaaatggttatggaattagtggaaaatcatttttaagatatgattggcataatatttataaaaacaattgatgttattctaattacacatatttaaaatagcttgccaaagaccctacagctaggaagcagaaaaggccaaaatttgatcttaatttttacaatgaatatttgacaatcatatgtcttttaaatgtatatacatttcttgcctattcctgtgagtttttttttttaattatattttacccaccagtctgtgatagatcttaacttttgtgttagttttatagtttggttttgctttcagctaaaaactctttttataacctattgtaaactttccttcacttagattcaggcagtcattcttgtcctattatcgtttgtgactgtaaataatttgcttagtttattttgttgccttgatgatatttatagatcctgtcacagagaccctaccttgaagacctctcttttgtagactgtataaatttcatcccttattcctcaactcatatrccttattctcttatcttgggatatattttgtt

SEQ ID NO: 588130 - DNA, 525 bp, Homo sapiens
gatattgatgaaccctcacaggtcaggaactcaaccttggaaaattgcttattcaaatgatgtacaatcttgaagttgctgagtgagccatagctcagcctctctgtgaatattcccagggcttctcaggctgttctcagatggaaaagttggcagaaatgctcagcttgcagtaccctacattccatttggatcaattcctagatggaaacaggacctaaattatgttgaatcatctaaacatttggggagtgggagcagttgtggcaatcgcctctaaatatataaggtgaagggaaatgatttcataatttaatttacttgstccatttcttatgtttacatgcttaatgtgtttttatccacagttgaggatccatgacttttagtccaagggtttttttttttttttttttttttatttaccagtatcagtactaagctgttggtagcagtaagcaagtaaatacaggatggactagacatggatttatggctgtgagacagtgtactcaaggatttcca

SEQ ID NO: 588131 - DNA, 500 bp, Homo sapiens
gccactttgaacttccctgaggctttgtttacactgcgagggtaaaactacctacacaagcttcagcaatggcagactcccctcccccccgccacctaaacttgagcatcccaggtcaaccacagacagctgtgctggcagtgagaatttcaagccagtggatcttagcttgctgggctctgagggggtgggactcactgagccagactacttgtccccttgcttcagcccctttccaggggagtaaacaattctgtctcgctggaattccaggcactactggggtatgaaataaaaattcctgaagcccccawttttgtgcttgaaacccagggccctggtggtgtagcactggaggaatctcctggtctgtgggtttcaaagactgtgggaacagcatggtatctgggcccagtgcaccgttcctcactgcttcccttgggtaggggagggaatttcctgattccttgcacttcctgggtgaggtgatgccccaccct

SEQ ID NO: 588132 - DNA, 499 bp, Homo sapiens
atatgactttgtaattttgagatattgctaaattgccctctacaggactgtatattgtgtttgcccaccagccatctataagagtgcctcgatacagcctcaccaacacagtacctcaaacctgtgtgatttttgacaatattctaaatgaaagatggactccctgtatagttttgatttgtatttatactactgagtgagactamacatgtctccattatgttcatgagctatttgtttctgtttctgtaaagactttcaatatcctttttccttttttttttttttttttgaggcaaagtctctctctgtctccaggctggactgcagtggtgcgatctcagctcacggcagcctccgcctcctgggattcaaacaattctcctgcctcagcctcctgagtagctgggactacaggcgcccaccaccacgcccagttaatttttgtatttttagtagagacggggcttcaccgtgttggccaggatgatcttgatct

SEQ ID NO: 588133 - DNA, 612 bp, Homo sapiens
ttattgtatttaaattaatatgaagctcaaaaacaaatgamatttttactatgtgagaaataagactagtagtaatcacagtatgtggatgatggtgtctgttgggtaggaacataaaggatcattctgtgatactaaaaaatgccctatatcttctttcatatggtggtacacagggttatacatatgtaaacatacatggttctatatactgaacatgtgtgcgtgaacatttgtagtagaatatatgtacatgtgtgtatattgtgtgtgtgtgtatgtgtgtgtgttatacttgagtcaaacatctttgtaaaatatatacagtcagacctccctatcaatgggttccgcatccatggattcaaccaactgtggattgaaaatatttgcccattccatttgcctcttaataagaaagaataaactataatttttggagaatataaaaggaaaaaaatggaaaaagcatggttctgccagtgctaaacatgtatagtctttttttcttatcattgtttcttaaacaatatagcataacagctattttatagaatttacattgtattagatattaaaattaatctaacgattaaagtatgtggaaaaatg

SEQ ID NO: 588134 - DNA, 584 bp, Homo sapiens
taatgttataatatgatatgagaaagagatgtgtaaataactagttttctaaaagataacaacagctgtagcctaaagcatgrgtgtccaatcttttggcttctctgggtcacatgggaagaagaagaattgtcttgggccacacataaaatacacaaacactatcaagagctgttgagctaacaaaaaaaaacaaaaactcatagtcttttaagaaagtttacgaatttgtgttgggccatgttcaaagccgtcctgggccacatgtggactgtgggccatgggttgaacaagcttggcctaaagacaaaagtaagctctcctgtaacaaatccacggtgcatcatctattgtgtgcattagagccctctttgctttaacacaagcaaggcttatggagcctccagtaagccagagataaacacttaagctaaatgaaaatatttttaaaattctctgagttctaatcattaaaatttaaaattactggaaaagttaaatagctggaaagctacatgattaaactgtataatactataaaagaaatagattgtaccttcatttttaaaatcaaaaactgggat

SEQ ID NO: 588135 - DNA, 517 bp, Homo sapiens
gatatttgaaatatagattcatgtatacatttaaaaaccttctcaatttgagaatgaaaatcaagatgaaaaatcgcagaagtgaggaagataatttagtggaaatagaaataaaaattgaaaccacctgaaaacaactaggaattcactatagtgtcgcatgattacggagaagagaaatgggttactccgtatattaatacattcattccttcatttatttatrtattcacttattcaatatgcttcttttcaagcattggttacatgtgtcatgatgggaacaatgggaacaagcgagacagagcctgtcttcaggcttgtgggttggatgtgtgcagtgaaaacccagcgaatgtgcatcaaaccttgaatttgatgcatgagaaagtgtacaaggcaaagagaacaggaaaaactgatgcaaatatggtaacaatctagaggcaagagatagcatgcattttcaaagaattaagagtgcttcacactctttgcatacaatataaatactacc

SEQ ID NO: 588136 - DNA, 517 bp, Homo sapiens
gatatttgaaatatagattcatgtatacatttaaaaaccttctcaatttgagaatgaaaatcaagatgaaaaatcgcagaagtgaggaagataatttagtggaaatagaaataaaaattgaaaccacctgaaaacaactaggaattcactatagtgtcgcatgattacggagaagagaaatgggttactccgtatattaatacattcattccttcatttatttatgtattcacttattcaatatgctkcttttcaagcattggttacatgtgtcatgatgggaacaatgggaacaagcgagacagagcctgtcttcaggcttgtgggttggatgtgtgcagtgaaaacccagcgaatgtgcatcaaaccttgaatttgatgcatgagaaagtgtacaaggcaaagagaacaggaaaaactgatgcaaatatggtaacaatctagaggcaagagatagcatgcattttcaaagaattaagagtgcttcacactctttgcatacaatataaatactacc

SEQ ID NO: 588137 - DNA, 491 bp, Homo sapiens
taatttattatcagcaagaatcatwgtttttattgaactattttactcttcttaaacatataggttgtttctaatttgtagctattaaaaactcactgtcatggagaactgtttatctctctggctatctagttatctacttgcctatctatccattttccatatgaacacatatgtttacacactttggcacactactggcagagtctgtgccttaaaatgagttcatatatgtagagttgaaagtctcagtgtatcaacattaaagaaaacctgaagaatggagagatataacatgtgaagagataagtcatgtcaatatttaaatttgccaatattcctcaaattgagcttctggttttgattacattttattaaaatcccaacctgttgtggtatgtaaaatttaaccagctcactaaatttatttggtgtgaaaagtacggtagtgaaaacttagaataatcccaaagtagcaaaattgaagaaat

SEQ ID NO: 588138 - DNA, 566 bp, Homo sapiens
tctccaggtgaatgcaaatttaaactgcaatgataaatatacctatattctccactaaatggtaaaaaaataaggctaacaatgccaaattttggaattaaggtgaagtaatgtcaacttacataaataaaagtttatatacttatatacagtgataatatcatataatattagcatatttttataatattgatatggttaggctgtttccccaccaaaatctcatcttgaatttctacatgttgtgggagggaccagtgggaggtaattggatcatgggggcaggtctttcctgtgctgttctgttctcataatagagagataagtctcatgagatctgatggttttaaaaagggaaggttcccggcacagtttctcttctgttgtctgccaccatgtgagacctgcttttcaccttacaccatgactttgaggcctccccagccrcgtggaactgtaagtccaattaaacctctttcttttgtaaatcgcccaatctcgggcatgtctttatcagcagtgtgaaaatggactaataaaaatattaatataaatttgtaaatgtt

SEQ ID NO: 588139 - DNA, 605 bp, Homo sapiens
gaactatggaaaagaaacaaaaacagattaacagttaagagtgacaggggtagagaaaaactctgaggaactgacatttgtgcagagacctaaccatatgagtggcaaaagcatgcagataggaaggagaacatagctgtgcagcaagtacaaagtcatgctgtggagtgagcttggcttggtcaagaaataacaaggatgagatgatgtagcatggtgtgtggggacagagcatcgacaatgagattgataggaatgaactaggactaatctttttagagacctgtcatccatcatagtctactaaagggttttcaacacgtgagtggaaagaactacttgacatttcaaagagtggggcaggaatgaaagcaattagtagatctttgtatcaatttagaaaagaggtagtagccrtgagcaataagtgggcagaactggaggtggtgagaaatgtttgaaataggatttgttttaaatgtagttccaacagatttggccaatatggaagagaagagtcagtgatgacactggattgaggccttgatatttgggtgaacaataacttttaaggaataagggagcctaaaagtagagcaggtttc

SEQ ID NO: 588140 - DNA, 529 bp, Homo sapiens
ccattaaagacaagactaaaagccaaattaaagtagatgtaaaatttaacagctcaaagtaaaaaagtaaacattttaaggtctcaggaatttgtcaaaattgcattttgtttttgcagtttaagaataaaggaatagacatgtttagatctatttttttttaaattattatttattttactttaagtttgcggtacatgtgtaggatgtgcaggtttgctrcataggtaaatgtgtgccatggtggtttgctgcacctatcaatacatcacctaggtatcaagcccagcatgaattaattatttttttctgatcgtatccctccccctccacacccacccctgacaagccccagtgtatgttgttcccctccctgcatccctgtgttctcattgttcacctcccacttataagtgagaacatgaggtgttcggttttctgttcctatgttagtttgctgaggataatggcttccaggtctatccatgttcctgcaaagacattgtctcattctttttcatgactgcat

SEQ ID NO: 588141 - DNA, 434 bp, Homo sapiens
acacaaaagaaaaatctcacttatctagttacwcacaaacttattttgactcgattattgcataaaataaaaacaccaatttataatgccagatatgcaatggtatggcaatattttaaaaaaccaaattggaaattatctgaatttttaagattgaggcatagttgactaaattgtgatttggcagaataaaatattttgctgctataaaatacatagatcagtaactaaaatatttttataatatatttgaaatgataaaataaagatatgaagatacttggagtgtgatcctactttctaaagtgaacagcaacaagaagataattccttttatgtttgtacataattatatgaacatgaagcatggtgtggaaagatgcatgccaggcttctaacctattttgttgtagaaagggttgcagtgtggagaa

SEQ ID NO: 588142 - DNA, 595 bp, Homo sapiens
cgtgttcacaactctcaatgaactaaaattgaaggaacataccccaaaataataagagccattgatgacaaacccacatcatacaaaatggccaaagagctggaagcattcctcttgaaaacaggcccaagacaacaatgccttctcttaccacttctaatagtattggaagcaagagaaagarataaaggaaatccaaataagaagaaaggaagtcaaactatctctgcttgcagatgttatgatcctatatatagaaaaccccattgtttcagcccaaaagcttcttaagctgataaacaacttcagcaaagtctcaggatacagaataaatgttcaaaaatcactagcaatactatatactaccaaaagtcaagctgagagccaaatcagaaacaaactcccattcacaactgccacaaacaaaaaaacagaattcctagaaatacagctaacacggtaggtgaaagatctttacaaggagaactacaaaataccactcaaataattcagagatgacacaaacaaatgaaaaaatattccatgctcatatatagaaagaatcaatatcattaaaatagccatagtgcccaaa

SEQ ID NO: 588143 - DNA, 595 bp, Homo sapiens
cgtgttcacaactctcaatgaactaaaattgaaggaacataccccaaaataataagagccattgatgacaaacccacatcatacaaaatggccaaagagctggaagcattcctcttgaaaacaggcccaagacaacaatgccttctcttaccacttctaatagtattggaagcaagagaaagagataaaggaaatccaaataagaagaaaggaagtcaaactatctctgyttgcagatgttatgatcctatatatagaaaaccccattgtttcagcccaaaagcttcttaagctgataaacaacttcagcaaagtctcaggatacagaataaatgttcaaaaatcactagcaatactatatactaccaaaagtcaagctgagagccaaatcagaaacaaactcccattcacaactgccacaaacaaaaaaacagaattcctagaaatacagctaacacggtaggtgaaagatctttacaaggagaactacaaaataccactcaaataattcagagatgacacaaacaaatgaaaaaatattccatgctcatatatagaaagaatcaatatcattaaaatagccatagtgcccaaa

SEQ ID NO: 588144 - DNA, 595 bp, Homo sapiens
cgtgttcacaactctcaatgaactaaaattgaaggaacataccccaaaataataagagccattgatgacaaacccacatcatacaaaatggccaaagagctggaagcattcctcttgaaaacaggcccaagacaacaatgccttctcttaccacttctaatagtattggaagcaagagaaagagataaaggaaatccaaataagaagaaaggaagtcaaactatctctgcttgcagatgttatgatcctatatatagaaaaccccattgtttcagmccaaaagcttcttaagctgataaacaacttcagcaaagtctcaggatacagaataaatgttcaaaaatcactagcaatactatatactaccaaaagtcaagctgagagccaaatcagaaacaaactcccattcacaactgccacaaacaaaaaaacagaattcctagaaatacagctaacacggtaggtgaaagatctttacaaggagaactacaaaataccactcaaataattcagagatgacacaaacaaatgaaaaaatattccatgctcatatatagaaagaatcaatatcattaaaatagccatagtgcccaaa

SEQ ID NO: 588145 - DNA, 627 bp, Homo sapiens
gcaacatggagcgaggagaacctccccaacccggaaaagcagtgaggaaatgtgagacatgagaacccacacttctcccatggatctttgcaaccctcgggtcaggagattccctcataaacccgcttcaccagggccttcagtctgacacatagagctacatggagtctcagcagagcagccgttcaggcacgcatggagacccagatacctgggcttcctggcaaaagcagctgcaactctggcaaagcaggagctggcaaagcaggcaaagacccctgtgcatacccttaggaaagaggctggatccaggggactgagcagcaacagtttgcaggccccacttccacattacctcacagataagayctgctggcttggagctccaaccttccaccaacagcagcattacacctctctgaaacagagctcccagaaagaggggtgggccactatattttctgtttgggtgacttagccattccagcctttgggctttggagagtccgggatgaccagggactggagcagacccccagcatagtaccgctgctctataaaaacgtggacagacaacctttttacaaatataggaaacatagtggacccacatgcccaggcaagagc

SEQ ID NO: 588146 - DNA, 650 bp, Homo sapiens
cctcataggcttggatatggttgttagtggagtctctggtaaggctttactggacttagggatgccaggtgggccatttctcaagccccagtggtgacagtggtgggccaaatgtacctctctttgggaccccaggtagtgtatgcaggctcctgtattagtggattcagggaggttaattcttaggatcccagatggccagagtgaccatggtcagttggataggtgggcaggttcttgggcccctgggcaygggcgatggtagtagctgtggttgaacaaccttctaggtcacaggtagcactcgctaatgatagctgtggctatgatgggcttggtgagccagttcccaggtgctcaggtggcatatgctattggttgccagcagtggtgttggcagcaacctgggggtcccatcttcaggtctctgggagaatgatagctgtagctatgaatggcttggtgagccagtctccaggtactcaggtggcacattctattgggtgccagcagtggtgtggcgcgcaagctgagtggtcacatcttcagatcgctgggagatgctagtggtcgacgctgggtaggctgttccctactctccggggtggcattcttgagcctgggtggggggtttgtgccaagccaggtgg

SEQ ID NO: 588147 - DNA, 497 bp, Homo sapiens
tccttgcctcaccctctcgagtagctgggactacaggtgtgcactactgtgctaggtttcctttttaaagctcctaattttgcatcgtacacaacattttgttcatccatccaattcatccactgatggacacctgggttgtttcctgtttctaccttttgactattgtaaatagtactgttatgaacactagcatacaaatatgtgttcaagtcctygctttcaattcttttgtgtgtatacctagaaggagaattgctggatcatatggtaatactatgtttaattttttttggaagcaccacactcttttccccagcagcagtaccattttacattcccaccagcaatgcacaaatgttctaatttctccatatccttgccgacaatttacattttaataatggccatcctaacaagtgtaaactggtatctcattgcggtgtacatttttttaaaaaattaggttgtacccaaatgtttgaagattgctgttg

SEQ ID NO: 588148 - DNA, 497 bp, Homo sapiens
tccttgcctcaccctctcgagtagctgggactacaggtgtgcactactgtgctaggtttcctttttaaagctcctaattttgcatcgtacacaacattttgttcatccatccaattcatccactgatggacacctgggttgtttcctgtttctaccttttgactattgtaaatagtactgttatgaacactagcatacaaatatgtgttcaagtccttgctttcaattcttttgtgtgtatacctagaaggagaattgctggatcatatggtaayactatgtttaattttttttggaagcaccacactcttttccccagcagcagtaccattttacattcccaccagcaatgcacaaatgttctaatttctccatatccttgccgacaatttacattttaataatggccatcctaacaagtgtaaactggtatctcattgcggtgtacatttttttaaaaaattaggttgtacccaaatgtttgaagattgctgttg

SEQ ID NO: 588149 - DNA, 412 bp, Homo sapiens
ccttctcctacccacattgttccccctctttataaccctgcctcttgggaaytgtcccaacagcctgctcactatcaccctaagtactcttccctgaaaggacttcagtgtgagatagagcaatgtaaaagggatattcagaacttccccttcccctctacctcgggagaattagctccacctctcttcccctgaagagaggtgtccctacgaggaggaggtattcactttgtaaatgctcctttaaccagctcggaggtccaaaacctaaaaacagagttcaagccacactattagacaactccagtggaatagcagatcgaattaaccaatttctaggaccacagttatatatacttgggctgagttaatgtccatcctaggcatccttttctcaggggaagaaagaagc

SEQ ID NO: 588150 - DNA, 531 bp, Homo sapiens
tagcaggcagttttgcttgctggtgcttgcgatagagccacacattggtctcagtggatttatggagaaaaataggtacggaaagttatttctaaataagaccaaaaatccttttcttaagcagtgacaggtaaagaggttgtcttggctaatattgaattgtgttgcccttgattgagacagttttatggtggggatggtagtggtgataaacttgtttgaaatttgtccacctatagtaacctttgtggtagctgtcacagacagcttcatcctcacaggccctaaaattactataaaactaatagattggaggagaaacaaaggacctgaataattagatgcttagataattgttctgtgttttcataacaagtgaaaaagagcagtgttagaagtacttaaactttccatgtaaggagcactgcctgartttatattgtgattttagagcatcattcactgtttaaaaacaggcatattgtgggtcatattttaaagacaaacagaaagcttatcttttcaagatgg

SEQ ID NO: 588151 - DNA, 654 bp, Homo sapiens
gacaactaggagataaattttagtgcaacgatgaaggcagaatccagagtataatgagctcagtgaaaaaaggtgaagacatgtagcttattctctcaagaaactaggctatgataaactggcagaggctctaagagtgggaggtgagttgttttctccttcatgtaaatatatttaccttttaaacactaggcccaattttatatcctatttcatttaactttatgaacatatttatgtatgtatgcatgtatgtatgtatctcatgtggtgttttagacactgaaaaataactcatttctattataaaactgatatctttagatgttcagaagcaacttcctaaaaggaggtagcagtaatggagctatgtctatcattctttcccatcaacccccttgatggagatgtaaacatgtgtccatcaagcctttaatttttacctcttatcttcatggctctccatataaaacttaactcttttttttttctatttgtatacgtatatttatatgtatatctatatcgagagagagagagagagaaagagtcttgctatgttkcccaggctgatctcaaactcctgggctcaagcaatcctcccaccttggcctcgcaaagtgctgggattacaggcgtgaaccactgtgccca

SEQ ID NO: 588152 - DNA, 533 bp, Homo sapiens
cctaggtgacagagtgagactctgtctcaaaaaaaaaaaaaagttgtttcatctgaaaatctgttgttttatgcagccaccttctaatgatcttagctagatcttctgaatgacttgcttaattttctacawcagcacttgctgctccaccttgaactcttatgttacgtagatggcttattttcttaaatttcatgaaccaacctctgctagttgcaaacttttcttctacaacttcattacctctctcattcttcatagaattgaagagaggtttggcctttttctggattagattttggctaagggaacgttgtgcctggtttcatctcctctacagtccactaaaactttctccatattaccaatatgggtgttttgctctctgattatttgtgtattcacttgaatggcacttttaatttccttcaataactttttatttgcttttgtaccttggctaacagtttggatgaagaggtctggcttttggcctatctcattttttaatattcctttctcactaagcttca

SEQ ID NO: 588153 - DNA, 652 bp, Homo sapiens
atgttaaaaaaaaagattacatattttaaatatcaaacagtggaaaatgaggctaaatgggggtattaggtgtgcaaaatttatcttcactaagacatcaatgtttggaagactgtgattaggatcaattttttttataacttatttggtcttctttctgcacctgcatccatccactagttaacaaggagaataacaatgttgggtcatgcagtcctttaacawaataatttaataatggttcttttctcaaacagtctctcattgggataaaagtccttaattatttggatacttttcccttcacctgctaagttagtctccccttggtactttgctgctgaccctttctgattctctttatcaagagctacaatctctatgctacaaaagaatcataggcagctcagagagttaaacttcacagccttcctttgccttatcatgctgtgctataaaattgctgttaaccaaactgcagacttctctttgttgcaaagggagggatctcttttcaggtcctaaatggacagcagggccaatgactcttctttttgcccccaaaagttattttatttatctaacgcatcatcctcttttccaaaaagtgagaaatcaggactcacatagaatacttgtctgtcttcctttc

SEQ ID NO: 588154 - DNA, 505 bp, Homo sapiens
gaattccattgtgtatatataccacgtttgctttattaattctgttgttgatggacagtcaggttgattccatatcttggttattgtgaatagtgctgcaataaacaagtggggtacagctatctatttgatatgctgatttcttttcctttgaataaataccatcaaatgagattgctggatcctattgtaggtctttttttttagttttatgaaaaattgtcacactgctttccataatggctaaactaatttacattcccaccaacaatgtrtaatagttcccttttctcccagtcctttccagcatttattttttatttctttgataatagccattctgaggtgagatgataactcgttgccgtttgaacttgcatttccatgatgattagtaatgttgagcatttttaaatatacatgttagacatttgtatgtcttgtatgtcttattttgagaaaagtctactcagattctttgcccactttttaatgggtttattta

SEQ ID NO: 588155 - DNA, 509 bp, Homo sapiens
gatagaattccattgtgtatatataccacgtttgctttattaattctgttgttgatggacagtcaggttgattccatatcttggttattgtgaatagtgctgcaataaacaagtggggtacagctatctatttgatatgctgatttcttttcctttgaataaataccatcaaatgagattgctggatcctattgtaggtctttttttttagttttatgaaaaattgtcacactgctttccataatggctaaactaatttacattcccaccaacaatgtgtaatagttcccttttctcccagtcctttccagcatttattttttatttctttgataatagccattctgaggtgagatgataactcgttgccgtttgaacttgcatttccatgatgattagtaatgttgagcatttttaaatatacatgttagacatttgtatgtcttgtatgtcttattttgrgaaaagtctactcagattctttgcccactttttaatgggtttattta

SEQ ID NO: 588156 - DNA, 444 bp, Homo sapiens
tatagtaataattgaaggactaatattttagtccttatggatccagttatatgttaagtactttatgtatattatttgatttaattatcactatatttctacatattaggtaattatatttgtttcacaaaaaagggtactgaggcaccaagagggtaaatacctcatccaagatcacataactcagtggcagcatttgaagtcagttctatttgacttcaaagtgcatgcttttaatccccatactgtatggttgcattgctctatgctatgaagcatgctgtattgttatattgtttcccaacagtccatctactgctctgatgaataaatattctttcatttcaatgataagaaattcaattattgattctgttstcaacctgaaatggaagaatcaactagcacattctaagagaaagaatgaggtgatatatttaaaac

SEQ ID NO: 588157 - DNA, 645 bp, Homo sapiens
tgcctgtaattccagcactttgggaggctgagacgggtggatcacgaggtcaaaagatcaagaccattctggccaacatggtgaaaccccatctctactaaaaatacaaaaattagctgggtatggtggcatgtgtctgtagtcccagctactcgggaggctgaggcaggaggatcacttgaacctgggaggcagagattgcagtgagccgagatcatgccactgcactccagcctggcgacaaagcgagactctgtctcaaaaaaaaaaaaaaggaaaaaaaggagaaagagggaagaagaaacatgcaaagactcataagacaatgtggtagatgctaagatggaagtcagtagagtatagagagagctgtgaaaccactgaaaatgtgacttacttctacatggaggtgagattgggctgtctcagattccttaattaaactagctgtcgaatagtgaattgaaaytaatgaatcaggaacaagaatattctaagctaagagatatttcatggagggggaaagctgagaaagaataatatgtgtggttcagcacaagtagtttcacagcatgcacatgcagtgctcaattgcagaagctgcttggggtgaggaggaacataaatgatgaggaggcctgtatg

SEQ ID NO: 588158 - DNA, 572 bp, Homo sapiens
ctgcgtggctggagaggccttgggaaacttaacaatcacagcagaagtgaaagtaaacccatccttcttcacatggtggcagcagagagaagtgcagagtgaagggaggaaaagccccttataaaaacgatcagatctcatgagaactcactcgctatcatgtgaactgcgtgggggaaacaccgccatgatttactcacctcccatgaggtacctcccccaacatgtggggattacaatttggattacaattcaagatgagatttcggatggggaacaaccaatcatattgttctgccctgggccctcccaaatttcatgatctcgcatttcaaaacacaatcatgcctttccaactgtgccccaaagtcttaattcattccaggattaacccaaatgtccaagtccaaagtctcatttgtggcaaggcaagtcccttctgcctatgagtctgtaaaatcaaaagcaasttagttacttcctttagacaatggggatacaggcattgggtgaatacacccatttcaaatgggagacattggccaaaacaaagggtctacaggccccatgca

SEQ ID NO: 588159 - DNA, 558 bp, Homo sapiens
gtttgcttcagttaaaggattccattataaatcctttaatttccacagtctatttatacctaatattgcaatgcttcatgtaaaacatagaaaatattccaatttgtagtgtttttactcccatcattttttagagtatagttatcaaaggcattttatataggtatatatatatatatatccatatgtgtgtttgtatccatatatatctgtgtgtgtgtatatatcaaaggcatcatatgatatatattatgatgcctttgataactttaccataaagaatgaactattcatgaaacatatatattccatgaaaaattattataatttcaaatttatagtcaaakttgtttaaatttttaatgattttttttttcaacggagtctccctctgttgcccaggctgctggagtgcagtggcatgaccttggctcactgcagcctccaccgccgggttcaagtgattcttctgcatcagcctcccgatagctgggactacaggtgcatgccactatgccaagctaatttttgtatttttagtagagacagggtttcacc

SEQ ID NO: 588160 - DNA, 558 bp, Homo sapiens
gtttgcttcagttaaaggattccattataaatcctttaatttccacagtctatttatacctaatattgcaatgcttcatgtaaaacatagaaaatattccaatttgtagtgtttttactcccatcattttttagagtatagttatcaaaggcattttatataggtatatatatatatatatccatatgtgtgtttgtatccatatatatctgtgtgtgtgtatatatcaaaggcatcatatgatatatattatgatgcctttgataactttaccataaagaatgaactattcatgaaacatatatattccatgaaaaattattataatttcaaatttatagtcaaagttgtttaaatttttaatgattttttttttcaayggagtctccctctgttgcccaggctgctggagtgcagtggcatgaccttggctcactgcagcctccaccgccgggttcaagtgattcttctgcatcagcctcccgatagctgggactacaggtgcatgccactatgccaagctaatttttgtatttttagtagagacagggtttcacc

SEQ ID NO: 588161 - DNA, 558 bp, Homo sapiens
gtttgcttcagttaaaggattccattataaatcctttaatttccacagtctatttatacctaatattgcaatgcttcatgtaaaacatagaaaatattccaatttgtagtgtttttactcccatcattttttagagtatagttatcaaaggcattttatataggtatatatatatatatatccatatgtgtgtttgtatccatatatatctgtgtgtgtgtatatatcaaaggcatcatatgatatatattatgatgcctttgataactttaccataaagaatgaactattcatgaaacatatatattccatgaaaaattattataatttcaaatttatagtcaaagttgtttaaatttttaatgattttttttttcaacggagtctccctctgttgcccaggctgctggagtgcagtggcatgaccttggctcactgcagccyccaccgccgggttcaagtgattcttctgcatcagcctcccgatagctgggactacaggtgcatgccactatgccaagctaatttttgtatttttagtagagacagggtttcacc

SEQ ID NO: 588162 - DNA, 266 bp, Homo sapiens
gggccttaatctatgcatgaggcatttgccctcataacccaaacacctctcaataggccccatctccactacagggatgaaatttgaacatgagatttggaggagacaaacatacaaaccatggcatagtatgacacataattacagttttaaaatcctattcaaatctttaagaatcattcaaaagggatctatattaaaattgaattattaccaaaaataatgttcttactcccaaaataatkaatgaagtcacttaatgctat

SEQ ID NO: 588163 - DNA, 572 bp, Homo sapiens
ctgcgtggctggagaggccttgggaaacttaacaatcacagcagaagtgaaagtaaacccatccttcttcacatggtggcagcagagagaagtgcagagtgaagggaggaaaagccccttataaaaacgatcagatctcatgagaactcactcgctatcatgtgaactgcgtgggggaaacaccgccatgatttactcacctcccatgaggtacctcccccaacatgyggggattacaatttggattacaattcaagatgagatttcggatggggaacaaccaatcatattgttctgccctgggccctcccaaatttcatgatctcgcatttcaaaacacaatcatgcctttccaactgtgccccaaagtcttaattcattccaggattaacccaaatgtccaagtccaaagtctcatttgtggcaaggcaagtcccttctgcctatgagtctgtaaaatcaaaagcaacttagttacttcctttagacaatggggatacaggcattgggtgaatacacccatttcaaatgggagacattggccaaaacaaagggtctacaggccccatgca

SEQ ID NO: 588164 - DNA, 580 bp, Homo sapiens
  misc_feature 556: n = A,T,C or G
caatacacctagtccccaagagctctgacagagatatacaaggagattcatattgttttcatgcctgctctcacatctattctgcagcccatggatcaagaagtagttttttgttttttcttttgttttttgagacaggttctcactctgttgcccagactggtgtgcagtggtgcaatctcggctcaccacaacctccaactcccaggctcatgtgattgtcctgcctcagcctcctgagtagctgggattacaggtgcacgacactgctacccagctaatttttgwatttttattagagacagcgtttcaccatgttggccaggcttgtcttgaactccctgacctcaaatgatccacctgcctcagcctcccaaagtgctggaatatgaccggtgagccaccacgcctggataagaagttattttgacatttaagtcttactacttgagacatttcataaggctagttgccatagatacatagcttttacataggcatgcatctaagtatatttttatttcattgacttcttatgcatgtggtgcatttgatnatatccccaaaacaaatagcagag

SEQ ID NO: 588165 - DNA, 498 bp, Homo sapiens
  misc_feature 490, 491, 492, 493, 494, 495, 496, 497, 498: n = A,T,C or G
ataatgagtgagtctcatgagatccgatggttttataagggtctggcatttcccctgcttgcactcattctctctcccactgccctgtgaagaggtgccttctgtcatgattgtaagtttcctaaggcctccccagccatgtgtaactgtcaggcacttgagtgtagagtaaggatgatggattatagtggaggttgtttttattttaaatgaaattgagggaaattttatagctctgtgtgtgtgtgtgtgcatgttgtgtgtgtgtgtgtgtgtgtgtgtgtctgagtatttgattttgtttttggtttttgtttgttttaatgtctgatgtgaaatgagtaacagctttagaggaaactatgcaagtaagtgaattaaacctgcctcaatgtaacagcaataagatacttaccagaatgtgggccagctgtgagtagmatttagatggtcataatactgattcaaaaacaaaatgtgtaataaaatnnnnnnnnn

SEQ ID NO: 588166 - DNA, 610 bp, Homo sapiens
aaagctccctgttttatattctagaaaatgcagtttcctagagtgtttttaatctggattttgaagggcattggtgacaatgaatgyctatatctattaggattcaaactattatttgttctaattaacctgaggtttcctgtcatatggtgtgctttctcagaggaaaaaaatttgtacattgtcttctggaagagaaatgtgctcaaaagtatcgtattttcccaagcaaacattaagaaaagtcttaacaataattacagggaatggtaaacacaactacatggatagtgctgtcaaagtcacaaattcattcattaataagtactctggaagttacattgctcctgtaagaaagcaaaacaagattttattaaaaattagaaaactttggttaaagaaaagagaagcatcatttttttctcatcaaaatataactaaattctttgagtttgacaattgtaaagtattctgtaaagttttgtaggttttatgttatttagatataatatctgaatataattttaattgtttatacattatttaaaccttaaaaacaatgtcaatgtaaacattattcatggatcacagaactaaaagagctcaatct

SEQ ID NO: 588167 - DNA, 542 bp, Homo sapiens
tactccatacagatttatgtgtggccatggacagacccttgaagtctgtgagggatttgactctagtgtgtttaatgctgctttttatttattattattattatttttacttttattttttgagacggagtctcaccctgtcacccaggctggagtgcaacgcatggccttggctcactgcaacctccrcctcctgggttcaaactatcctcctgagtagctgggattacaggtgcccgccaccatgcccagctattttttgtatttttagtagacagggggtttcaccatgttggccaggctggtctcgaactcctgaccttgtgatccaccctccttggcctcccaaagtgctgggattacaggtgtgagcccctgtacctagtcttatttattattttttaaccctcagaagcctttataaatcttttttcttcttgtttttttttccattgactttcagttcagagataatctcttttcttttttttttttcctttgagacagggtcttgctctgttgcccaggctggagtacagtgg

SEQ ID NO: 588168 - DNA, 542 bp, Homo sapiens
tactccatacagatttatgtgtggccatggacagacccttgaagtctgtgagggatttgactctagtgtgtttaatgctgctttttatttattattattattatttttacttttattttttgagacggagtctcaccctgtcacccaggctggagtgcaacgcatggccttggctcactgcaacctccgcctcctgggttcaaactatcctcctgagtagctgggattacaggtgccygccaccatgcccagctattttttgtatttttagtagacagggggtttcaccatgttggccaggctggtctcgaactcctgaccttgtgatccaccctccttggcctcccaaagtgctgggattacaggtgtgagcccctgtacctagtcttatttattattttttaaccctcagaagcctttataaatcttttttcttcttgtttttttttccattgactttcagttcagagataatctcttttcttttttttttttcctttgagacagggtcttgctctgttgcccaggctggagtacagtgg

SEQ ID NO: 588169 - DNA, 479 bp, Homo sapiens
tgtttctaggcgttgttttcttgcatttatcctgcatagagttcattgagcatcttgttctctaagtcagtatttttatattttatcaaacttgggaaatttttggccattatttctttaaataatctttccytattcttatttgcttctataggaaccccaattacatgtatattagactcttggattttgtttcacagtttccaaagtgttattgatttttaaaaatcaattcttcaatctttttttctgtcagataatttctcttgttctgtcatcaaatttacagactcctttatctgttctctctaatccattaagctcatctagtgaatttttgttcctttgaattattgcacttttcgattctggaattttcatttgtttcctttttataatttccatctatctgctgagatcccttatccgttctttcattaaaataatattttcctttaatttttgaatatgttttcctt

SEQ ID NO: 588170 - DNA, 480 bp, Homo sapiens
ataaaatcacaaattttattaaatgattacatttaaaacttctgacataatataaattaacaatagattttaatgcaatttttgacatattttgagctgatttttctgattcacagtagcagagctagatataaaggaggctgattacatgtcatctcctcatgtatctgggaattcttttactgtgcactaggaggatagaasggtgcttgtgggcggatccagggacatgcccagctgaagaatattctatcccagtgcaatgtgatgaattatactctcccaacctggcaagtttctgatgacttctctctgccactttatgacagcttaatttctgaattatattttagggaatcactgaaattattatttatactgtccttaaaaattattatacaaaaatctcagataacgtatttctttcagataataattattcttgtatatttaataattttcttaatgcactataatata

SEQ ID NO: 588171 - DNA, 549 bp, Homo sapiens
gcagtattgctgccagcatgtcccacctacagccctaaggcggttttcccctatctcagtagatggatatacaatcggctttacactgagacattccatcgcccagggacgagcaggagacagaagccttcctcttacctcaactgcaaagaggcgttccttcctcttttactaatcctcctcagcacagaccctttacaggtgtcgggctgggggacggtcaggtctttcccttcccatgaggccatatttcagactatcacatggggagaaaccttggacaatacctggctttcctaggcagtggtccctgcagtcttccgcatgtgtctctgggtacttgagattagggagtggcttgagattagggagtggtgatgactcttaacaagcatgctgccttcaagcatttgtttaacaaagcacatcctgcacagccctyaatccatttaaccctgaggtgacacagcacgtgtttcagggagcacagggttgggggtagggttacagattaacagcatctcaaggcagaagaatttttcttagtac

SEQ ID NO: 588172 - DNA, 549 bp, Homo sapiens
gcagtattgctgccagcatgtcccacctacagccctaaggcggttttcccctatctcagtagatggatatacaatcggctttacactgagacattccatcgcccagggacgagcaggagacagaagccttcctcttacctcaactgcaaagaggcgttccttcctcttttactaatcctcctcagcacagaccctttacaggtgtcgggctgggggacggtcaggtctttcccttcccatgaggccatatttcagactatcacatggggagaaaccttggacaatacctggctttcctaggcagtggtccctgcagtcttccgcatgtgtctctgggtacttgagattagggagtggcttgagattagggagtggtgatgactcttaacaagcatgctgccttcaagcatttgtttaacaaagcacatcctgcacagcccttaatccatttaaccctgagktgacacagcacgtgtttcagggagcacagggttgggggtagggttacagattaacagcatctcaaggcagaagaatttttcttagtac

SEQ ID NO: 588173 - DNA, 549 bp, Homo sapiens
gcagtattgctgccagcatgtcccacctacagccctaaggcggttttcccctatctcagtagatggatatacaatcggctttacactgagacattccatcgcccagggacgagcaggagacagaagccttcctcttacctcaactgcaaagaggcgttccttcctcttttactaatcctcctcagcacagaccctttacaggtgtcgggctgggggacggtcaggtctttcccttcccatgaggccatatttcagactatcacatggggagaaaccttggacaatacctggctttcctaggcagtggtccctgcagtcttccgcatgtgtctctgggtacttgagattagggagtggcttgagattagggagtggtgatgactcttaacaagcatgctgccttcaagcatttgtttaacaaagcacatcctgcacagcccttaatccatttaaccctgaggtgacacagcacrtgtttcagggagcacagggttgggggtagggttacagattaacagcatctcaaggcagaagaatttttcttagtac

SEQ ID NO: 588174 - DNA, 578 bp, Homo sapiens
tctttttccacccttttaccttaagtttayttgagtcctcatgtgtcaggtgaatctcttgaagacagcagatacttggctggtgaacttttagccaatctgccattccatatcttttaatggagcatttagcccatttgcattcaatgttactgttgagatgtgaggtattattgtgttgttgttttataggccctgtgagatttatgctttaagaaggttctattttggtgtattttgaggtttcatttgaaaattagaaactctttttagcaactcttgtagtgctggctaggtaatggcaaattctctcagcatttgtttgtctgaaaaaaagaaaaaaaactttatctcctcttcattcatgaagcttagtttgctgggtacaaaattcttggctgacaattattttctttcaggaggctaaagataaaatcctaatcccttctcacttataaagcttctgctgagaaatctgctgttagtctgatagattttctttcatagattacctgatgatatttgtctcacaggttttaagattctttccttcaccttgactttagataacctgatga

SEQ ID NO: 588175 - DNA, 314 bp, Homo sapiens
caatatactcaatattacattaattatcaaaaatattttasaaaataaaacctgaaaattaagtaatatatatggctacattttaaaatatcctgcaatatacacataatttatgtttttgaataaaaaataaaataagctacacactgtagagaaaaaaatttaattgaagcataactgttttgttaagtggaaatatattatctattctaaattttaggggagtctgagttcatttaccttgaggaatttgaatctggaaaatgctagatgctgattatttattctgcattatgaaatgaaatgctgaatgg

SEQ ID NO: 588176 - DNA, 559 bp, Homo sapiens
attttccatatctatttttaatgatttataattattatgtgaaagcatggtctatatttaactgtaaatggctaaggatgtgtgtaaaattagtaatgaaaataaatcaagtaaatctttacaatatatgatgaatagtaaagataggtaatgtaatagaaaattgagaactgcattaattttgcaaatggcttggatgcattatcctgttaattatcctgttttaaaaataagtattggctgagcattatggctcaaatcagtaatcccaacactctgggaggccaaggtaaaaagattgcttgaggccaggggtttgagactagcttgagtaacatagcaagaccccatctttaaaaataaattaaaaagttaaaaaagtattaataattcagaaaatggatgctttaaataattgttaaataacttaatgytatttaacaatgtaatacattaaataaggtgcataaatatttttaaatattttctggtatgatacttaaaatttaaaataaaatgtgtaatggtaatttttatttccttatcccattttaaaatt

SEQ ID NO: 588177 - DNA, 599 bp, Homo sapiens
attcctttatccttataaaagagacaaactgtctaatgcaatatactctcagttctcatcattagtgcccccaaaaagatttctattgaccctaaccatctctactgactatttcctccctgctggcttttcctggttttctgctgaactattctgtcacgagacatgagtcagatgtggtgggatagtgcagagaaagagaaatcacaaccttcaatgttgtagtaattacatttttactagaaatatccagagaaataggatgcaatctttaaatgcatatgcaaatcatgtgcaaattatatgctaatacatgtgtggcccgcctaacgattacacataactgaatgcagcccttgggaaaatcttattggagatcattggtctaatgaaarttgctgctgcatgctaattacagtgacatgtgtgctgctgtattgccccttagtggtgaggggaatgacagaggttagttgaagttagatgactgactgacaggaattatgtctgtcaccacagaagtaaatagcaaaatatctctattctctgaaatccgaatttttatgtctttgtatctaaattaaaatgcagtcttgtat

SEQ ID NO: 588178 - DNA, 691 bp, Homo sapiens
ggatcctaaatacattgctgttaaatgaaactgcacaaattgaaatgtatgtgctatgacttctttcccaaaatatgttgtgagatccttgaaggtaggcacatttctttgtttctttttttttttttcctttactttttggtgcctagaacatggtcaattgatcagcataccctaaggatagtgtaaccattgttacaaatcactggttctggcccggatcacagacttgctttctttggatcatgcaatgacttttragaactagaattaggtgccaatacttttaacgttgggaaattttatattttttaaacagatctagatgttttgctttaatccaaaaaattggtaggtgcagccacaaaagacctacactcacacataccaccctccactgaagacgctcctgtcgaggtggggagagcacactccacttagcacagtctgctaccaggttgttttgcttatttacattacttccctggatcctctggggtttgaattttctaccatttatcttctttaaatattaattttcatgaagtgttctggatatactagtctcagtggatgctctaaggaaaaaagaaaaatcacaacaacaacaaacttaactaaacttgtttacccaacattttcagacactgttggctgcagaggcctttaaagatatgtaacagatatgtaa

SEQ ID NO: 588179 - DNA, 644 bp, Homo sapiens
tataaataaacactggaaatttcttattatttccttattacttttttatcaagaattaagtagaggaaagaagatatttatgccatccctacatctttccatcccatttttaatggtaaaccaaggaaatctacatgttatcctgtgagtcactctggtcattatgttccatttatgatatcatctaataacgtccttctctctttttgtatttccctaaaccaaaaactatatgtgaaatatctcttaccacaaagatttttagtactcacacaataacaaaaacatgtgagactggcaaggtagggtggcagggagaccctgtrtaagaatagtgttatttttcacttggaatagcgaaacttatccttatttccagggatacctggaagtctggtactgatccttggtcagaaaaaaaatgaagtgtagatgcaatagatagtgattatcatatccgttttaaagctggaaacaccactagagaaatcctctactattaatagcttgtctacgttctttgggatatataaataaatgttctgtatttggtttaaatggtttcccagcctgtctttagctgtgtgatatgtaggaaaaactgattgctctgtagttctgtggttggacttcctggaaactga

SEQ ID NO: 588180 - DNA, 644 bp, Homo sapiens
tataaataaacactggaaatttcttattatttccttattacttttttatcaagaattaagtagaggaaagaagatatttatgccatccctacatctttccatcccatttttaatggtaaaccaaggaaatctacatgttatcctgtgagtcactctggtcattatgttccatttatgatatcatctaataacgtccttctctctttttgtatttccctaaaccaaaaactatatgtgaaatatctcttaccacaaagatttttagtactcacacaataacaaaaacatgtgagactggcaaggtagggtggcagggagaccctgtgtaagaatagtgttatttttcacttggaatagcgaaacttatccttatttccagggatacctggaagtctggtactgatccttggtcagaaaaaaaatgaagtgtagatgcaatagatagtgattatcatatccgttttaaagctggaaacaccactagagaaatcctctactattaatagcttgtctacgttctttgggatatataaataaawgttctgtatttggtttaaatggtttcccagcctgtctttagctgtgtgatatgtaggaaaaactgattgctctgtagttctgtggttggacttcctggaaactga

SEQ ID NO: 588181 - DNA, 555 bp, Homo sapiens
taaccattataaatattttacaaatttgtgttttgtatctctccatttttttggaatacatcaaaagcatatcctaaaaaacttatttcacccataaatactaagggaagtgttactaagaaataatatttttaatatgtcrttttttgttgtagtattttaaaacaaatttcaaaaatgttattttaccctaaatattttggtatgtatctctggcagttaaagcatttttaaaatcaaataatattaaacacacaactccttaatatcatctaataaactgggccctgttcaaatgtttaacatttttgtcatgagctctatttttcagacagtttttgactaaggatctaaatagagtttataggttgtacttagtcaattaagccttttaaatcttcaaaaatatataactgcttattctactttttttcttgccattgattttaaatcaccgacatttaccttgaagaattgtctacattctgacttggttaatttcccttgtatttattgtaaacctctacttatatttagaagtttgattacattcag

SEQ ID NO: 588182 - DNA, 652 bp, Homo sapiens
ttatggcagctttatttataattgccaagacttggaagcacttgagataccctatagtaggtgtgcatgtagataaactttgttacagccagaaaatgtgctataattcagtgctaaaaataaatgagttatgayaaacccacagccaaaatcataccaaatgagaaaaagttggaagcctttcccctaggaattagaacaagaaaaggatatttactctctccactcttattcagcatagtactagaagtattagcctaagcaatcaggcaagagaaagaaataagacgaatacaaagtggaaaagaagaagtcacattatctctgtttactgatgacatgatcatatacccagaaaaaccctaaagattcctccaaaagactcttagacttgacaaacaacttaactaaggtttcagaatgcaaaatcaatgtacgaaaatcagtagcattttataactaaagtagcatggtactgatataaaaataaacatatagatcaatgtaacagaatagagaatgcataagtaaagccacatatctacaactaacttattttcaacaaagttgacaaaaaaataaaataaaataatgggaaagggcatcttattcaataagtggttctgggaaaattgactagttatatgcagaa

SEQ ID NO: 588183 - DNA, 567 bp, Homo sapiens
atctgtgaatatttacaatgttcatgtcatttttattttctaatccaatttaagtagctctgctttttatgacatcatgaattcttcagtctttttggtctttttgggactaattattccattagttcctttgaactagctctgtgttgtcagtcatttcttctcttttgatcataagatctttgctgccctcctttgcatgtacaatcagtcttaggcctatgcaaccaacctatgaagcaagtacagtcttcattcccctgcaaactgcaattcacaatcatttctgtcctgagggcactttgcaggtaaatcttctcttaacaccatggcttttaaagttcttagctattgaaagtaagtttggatacattttaacaatagtatttrttctatgagaataaacatttatataaagtacttgttaagacagagatttataaaataaaacaagcatgagtaagaaaaatggcaagaaaaaaacagaataaattttacttgtctcaatgttgtatgacacacagtttatgtttgttgtttaatgctgattttggcataagtacaaaa

SEQ ID NO: 588184 - DNA, 319 bp, Homo sapiens
gcattttactgcgatataaaatccttaacttttctcytccactgacattatgtatgattttgttattaatttacaagcacctaaaaattcttttacataaggtttatattaattttgtgaggaaaataaaaggtcggttttctatttgcattgtgctaattcagactgcacttggttcttcatgcacactggtataagcgaagtttagacaaattattgtaaaaactgataaacatatagaccattatattgttatttttaaaagcacaagaaactaaaagatcacaaggagattacagcaaatgaatcttcatattca

SEQ ID NO: 588185 - DNA, 319 bp, Homo sapiens
gcattttactgcgatataaaatccttaacttttctcctccactgacattatgtatgattttgttattaatttacaagcacytaaaaattcttttacataaggtttatattaattttgtgaggaaaataaaaggtcggttttctatttgcattgtgctaattcagactgcacttggttcttcatgcacactggtataagcgaagtttagacaaattattgtaaaaactgataaacatatagaccattatattgttatttttaaaagcacaagaaactaaaagatcacaaggagattacagcaaatgaatcttcatattca

SEQ ID NO: 588186 - DNA, 357 bp, Homo sapiens
attatattgttatttttaaaagcacaagaaactaaaagatcacaaggagattacagcaaatgaatcttcatattcattacctcaatgaaattaatttaacactagtttcaatgtcttttttttccaaaagactaattttcaagtgaaasctttagatctttgaaagtaatagaagtaaagataaagatagaaaagatacataattcatttcagtagttttctgagaaataccacattttccaaaatatatatattcttataagaaatggattctctttaggctactagaatatcaatcttctacaataggccaattttcaaagcactaggcctatgttcactcaaccagtctcatga

SEQ ID NO: 588187 - DNA, 357 bp, Homo sapiens
attatattgttatttttaaaagcacaagaaactaaaagatcacaaggagattacagcaaatgaatcttcatattcattacctcaatgaaattaatttaacactagtttcaatgtcttttttttccaaaagactaattttcaagtgaaacctttagatctttgaaagtaatagaaktaaagataaagatagaaaagatacataattcatttcagtagttttctgagaaataccacattttccaaaatatatatattcttataagaaatggattctctttaggctactagaatatcaatcttctacaataggccaattttcaaagcactaggcctatgttcactcaaccagtctcatga

SEQ ID NO: 588188 - DNA, 357 bp, Homo sapiens
attatattgttatttttaaaagcacaagaaactaaaagatcacaaggagattacagcaaatgaatcttcatattcattacctcaatgaaattaatttaacactagtttcaatgtcttttttttccaaaagactaattttcaagtgaaacctttagatctttgaaagtaatagaagtaaagataaagatagaaaagatacataattcatttcagtagttttctgagaaataccayattttccaaaatatatatattcttataagaaatggattctctttaggctactagaatatcaatcttctacaataggccaattttcaaagcactaggcctatgttcactcaaccagtctcatga

SEQ ID NO: 588189 - DNA, 357 bp, Homo sapiens
attatattgttatttttaaaagcacaagaaactaaaagatcacaaggagattacagcaaatgaatcttcatattcattacctcaatgaaattaatttaacactagtttcaatgtcttttttttccaaaagactaattttcaagtgaaacctttagatctttgaaagtaatagaagtaaagataaagatagaaaagatacataattcatttcagtagttttctgagaaataccacattttccaaaatatatatrttcttataagaaatggattctctttaggctactagaatatcaatcttctacaataggccaattttcaaagcactaggcctatgttcactcaaccagtctcatga

SEQ ID NO: 588190 - DNA, 426 bp, Homo sapiens
tcagtggtcaggtgtcaatgaagagattaagaaaataattgaaaaaaattactggatcaaatgataatggaaacacaatacaccaaagctataggatataattaaagcaggactagagggaaatgaatagatatacgtgcctacatmaagaaagaagaaaaacttcaaataaacaacctaataaagcatcttaaaaaactagaaaagcaataacaaactgaacacaaaattaggagaggaaaaaaataataaggatcaaagcagaaatgaatgaatttgaaattaagaatacaacacaaacgatcaatgaaatataaagctgtccttttttaaaaaaagagataaacaaaatggacaagcctttagctagactaagaaaaaaagaaagaagacccaaataaataaaatcagagatgaaaaaggaaa

SEQ ID NO: 588191 - DNA, 542 bp, Homo sapiens
ttgaaatgatcccgcattaccttcagaaatccacaacgttttgccaagaccattttatttagaaaggtattgttctggtagactagtagttggagacaccatttagcatgatgaaaaatagctttttaaaaagtcatctggtaccaggttttagcagttgcaaagtctggtagaaaatgccaaggagcgactgaagagggagtttttattttttttgcctaattatatttgtcagggtgaatagttttactctgggctctgaacaatgttatttaacctattccctttgagtaattgtatagctataaaatatggcagtgtgtctctataagtagaaatatcaatattgtaatatatatgtgtattagtctgttttcatgctgctgataaagacatacccgagactgtgaagaagaaggggtttaattagacttatggttccacatggccggggaggcctcaaaatcatggcggaaggtgaaaggcacttcttacatggtggyggcaaaagaaaatgaggaagaagcaaaagtggaaacccc

SEQ ID NO: 588192 - DNA, 656 bp, Homo sapiens
tcttcagtttttaaatttactcttcctggcaagagaatgaatacaactaatttcagattatcctcaaccaatttccaactaggtagggtcatcagaagtgtgtttgcataggtccacagatttactctagataaaagactaaaactaccaggaatttgtccaggagctatgaacatcagttttccaaaaataactaagtagatccaataatacccagatggatgtatgaagagckaaggaaaaacacctgcagtgatttggactaacatctgacctagaaaggtccagcctcctttaagaacaagtaatgaggctggacccaggggctcacgcctgtaatcccaacactctgggaggctgaggtgggcagattgcctgaggttagaagttcgagaccagtccagccaagatggtgaaatcccgtctctactaaaaataccaaaaaaattagccaggcgtggtggtgggagcctgtaatctcagctactcgggaggctgaggcaggggaattgcttgaaccagggagttggaggttgtggtgagccaagatggcgccactgcactccagcctgggtaacagagcaagactccgtctcaaaaacaaacaaacaaacaaaaaacaagtaatgaaaaataacaagtttttgaaaagtttt

SEQ ID NO: 588193 - DNA, 625 bp, Homo sapiens
attttcttggtagttaacatatggctcctcattacttatgcaaatttctgcagccaacttgaatttcttctcaaaaacatgggtttttatattctattgtatcctcaggctgctaattttccaaacttttatgctctacttcccttttagacataagttccaattccaaaccatatctttatgaatacaaaaaactgaatgtttttaacagcacaccaagtcacctctgctgctttgaaatgttgttcaccagataccctaaatcatctycctcaagttcaaagttccacagatctctaggtcagggacaaaatgtcaccagtctctttgctaaaacatagcaagagtcacctttattccagttcccaacaagttccccatctccatctgagaccacctcagcctgaacttcattatccatatcactatcagcattttggtcaaagccattcaacaagtctctagggagttccaaactttcccacactttcctgtcttcttctgagcccttcaaactgtttcaacctgttacccagttccaaagtcgcttcaatatttttgggtatctttagagcagcaccccattacccagtaccaatgtactgaattattagtttgttttcac

SEQ ID NO: 588194 - DNA, 616 bp, Homo sapiens
gtagacgttttattattgattcaatattgttactagtaattggtatrttcgggttttctatttcttcctggttcagtcttggtaggttgtatgtgtccaggaattcatccattttccctagattttctcatttgttgacataagttgtttataataatgtttaatgatcgtttgtatttctgtggtatcaattgtaagtctccttttttgtttctcatttttacttatctcagtcttctctcttatttttttagttagtctacctaatggtttgtcaattttgtttatctgttcaaaataccaacgtttcagctcagtgtagtggctcatgcctgtaatcccagcactgaggccaaggcaggaggatcacttgaggccaggagtttgagaccatcctgggcaataaaaaaaatactacatcttttaaaaaagaagaaaaaaaatcttagctgggtgtggtggcacatgcctgtattcccagctgctcagaagaatgaaggtctctggcgctcatgagctggaggctgcagtgagccatgacagaggcactgcacttcatcctgggtgacagagtaagatgctcaccccagaaaaatacaaaaacaaacaaacaaac

SEQ ID NO: 588195 - DNA, 616 bp, Homo sapiens
gtagacgttttattattgattcaatattgttactagtaattggtatgttcgggttttctatttcttcctggttcagtcttggtaggttgtatgtgtccaggaattcatccattttccctagattttctcatttgttgacataagttgtttataataatgtttaatgatcgtttgtatttctgtggtatcaattgtaagtctccttttttgtttctcatwtttacttatctcagtcttctctcttatttttttagttagtctacctaatggtttgtcaattttgtttatctgttcaaaataccaacgtttcagctcagtgtagtggctcatgcctgtaatcccagcactgaggccaaggcaggaggatcacttgaggccaggagtttgagaccatcctgggcaataaaaaaaatactacatcttttaaaaaagaagaaaaaaaatcttagctgggtgtggtggcacatgcctgtattcccagctgctcagaagaatgaaggtctctggcgctcatgagctggaggctgcagtgagccatgacagaggcactgcacttcatcctgggtgacagagtaagatgctcaccccagaaaaatacaaaaacaaacaaacaaac

SEQ ID NO: 588196 - DNA, 546 bp, Homo sapiens
atcgtttgtatttctgtggtatcaattgtaagtctccttttttgtttctcatttttacttatctcagtcttctctcttatttttttagttagtctacctaatggtttgtcaattttgtttatctgttcaaaataccaacgtttcagctcagtrtagtggctcatgcctgtaatcccagcactgaggccaaggcaggaggatcacttgaggccaggagtttgagaccatcctgggcaataaaaaaaatactacatcttttaaaaaagaagaaaaaaaatcttagctgggtgtggtggcacatgcctgtattcccagctgctcagaagaatgaaggtctctggcgctcatgagctggaggctgcagtgagccatgacagaggcactgcacttcatcctgggtgacagagtaagatgctcaccccagaaaaatacaaaaacaaacaaacaaacaaaaacctccccaacttttcattttattgatctctagtctgtttgttgtttatttctgctctgatttttcaagtttctttctactaattttgagtt

SEQ ID NO: 588197 - DNA, 616 bp, Homo sapiens
gtagacgttttattattgattcaatattgttactagtaattggtatgttcgggttttctatttcttcctggttcagtcttggtaggttgtatgtgtccaggaattcatccattttccctagattttctcatttgttgacataagttgtttataataatgtttaatgatcgtttgtatttctgtggtatcaattgtaagtctccttttttgtttctcatttttacttatctcagtcttctctcttatttttttagttagtctacctaatggtttgtcaattttgtttatctgttcaaaataccaacgtttcagctcagtgtagtggctcatgcctgtaatcccagcactgaggccaaggcaggaggatcacttgaggccaggagtttgagaccatcctgggcaataaaaaaaatactacatcttttaaaaaagaagaaaaaaaatcttagctgggtgtggtggcacatgcctgtattcccagctgctcagaagaatgaaggtctctggcrctcatgagctggaggctgcagtgagccatgacagaggcactgcacttcatcctgggtgacagagtaagatgctcaccccagaaaaatacaaaaacaaacaaacaaac

SEQ ID NO: 588198 - DNA, 551 bp, Homo sapiens
atttctgtcatttataagctacttagtctatggtattttgttatagctgctaaaatgggctaacacagagacaattcccagcctgcccaaagagcaccaggaagtgttgggtacagcaaaactggaacagaggcatgaggggaagagcaacagggctgtratcaaagaggtgtgcctggtggggagcatgagtagagctgtataatctgtacaataatgacccagagtggaattagaagtccttaaaagtgagtgagcagagtggcatgatctccatgatactatgttatattcttgcttgggtattgagaatagactgagggtgagggctaatgcagaagcaggaagggggataaaaattcagagacatgattttggcttggcctgggtggataacagcagtagtaaaaattatttaaatgttttgaaggtgggtttgctgagaagtaaaggatgtgtggagaaaactggattgagaattgtgtaaggactgtattgtatattgtatgagattgtagatccaggatgagtcacagtatttttgaagttgt

SEQ ID NO: 588199 - DNA, 551 bp, Homo sapiens
atttctgtcatttataagctacttagtctatggtattttgttatagctgctaaaatgggctaacacagagacaattcccagcctgcccaaagagcaccaggaagtgttgggtacagcaaaactggaacagaggcatgaggggaagagcaacagggctgtaatcaaagaggtgtgcctggtggggagcatgagtagagctgtataatctgtacaataatgacccagagtggaattagaagtccttaaaagtgagtgagcagagtggcatgatctccatgatactatgttatattcttgcttgggtattgagaatagactgagggtgagggctaatgcagaagcaggaagggggataaaaattcagagacatgattttggcttggcctgggtggataacagcagtagtaaaaattayttaaatgttttgaaggtgggtttgctgagaagtaaaggatgtgtggagaaaactggattgagaattgtgtaaggactgtattgtatattgtatgagattgtagatccaggatgagtcacagtatttttgaagttgt

SEQ ID NO: 588200 - DNA, 551 bp, Homo sapiens
atttctgtcatttataagctacttagtctatggtattttgttatagctgctaaaatgggctaacacagagacaattcccagcctgcccaaagagcaccaggaagtgttgggtacagcaaaactggaacagaggcatgaggggaagagcaacagggctgtaatcaaagaggtgtgcctggtggggagcatgagtagagctgtataatctgtacaataatgacccagagtggaattagaagtccttaaaagtgagtgagcagagtggcatgatctccatgatactatgttatattcttgcttgggtattgagaatagactgagggtgagggctaatgcagaagcaggaagggggataaaaattcagagacatgattttggcttggcctgggtggataacagcagtagtaaaaattatttaaatgttttgaaggtgggtttgctgagaagtaaaggatgtgtggagaaaactggattgagaattgtrtaaggactgtattgtatattgtatgagattgtagatccaggatgagtcacagtatttttgaagttgt

SEQ ID NO: 588201 - DNA, 594 bp, Homo sapiens
aggctctcatccatttattcattaatctatttaacaattacttattgccagaaatggtgcaattttctgggattcaatagaaagcaagattaggcagagaccttgctttcctaagtcattaggagtggatcgtgtatacttctgtcatctctgggccattcagaaacatcagaaaaggcaaccatcattcctttccgaagacctgaatgtccacactcttctcttcatcaaaaggatatgacaactgtaaatatatatgcacccaacaccagaacaccaagataaaaacaaatattattagatgtaaaaggagagacagactccaatacaataataattggggacttcaacagtttactctctgcagtgttagatcatttagacagaacatcaacaaaaaaaagttggtttaaactgtgttgcagaccaaacggacctaacagacatttgcagaatatttcatctgacagctacagaatacccattcttcttatcagcacatggaacattctccaggatacattgttttaggctacaaagtaagaatcaatgaatgaaaatattaaaatkatatcaagaacttttttgaccaca

SEQ ID NO: 588202 - DNA, 601 bp, Homo sapiens
cctgcctctcgggctctgcccagcttcctgagtcctgacagagcacagtgggggagatgttggcagaggtggcagatgggctcacggccatccctcctgcaggagcagcgactggacccagagccatgtggctgtgccctctggccctcaacctcatcttgatggcagcctctggtgctgtgtgcgaagtgaaggacgtttgtgttggaagccctggtatccccggcactcctggatcccacggcctgccaggcagggacgggagagatggtctcaaaggagaccctggccctccaggtactgtgctgcagaccccaccctcagctgagggacacagaccccttttcaggaggcccatctgtccaggcccctaggctgtgggccatagtgagctgggggctatagtaagctgggtgggacttcagtctgcagggctggtgggttcctggggcccttatgatggcgcatcctggagagtctgtcctcatagtgcccayggagtgatagagtgatagctgagccagccctggtgataatgggcatcgagtctcactagctccaaccagttgtgggtgacagatcctacacatccatgtctctt

SEQ ID NO: 588203 - DNA, 549 bp, Homo sapiens
cttgtggaccctctgagcctagggtctgggtggcgcctaacagcaatgaaagggcagagttccaggattgcagatggcaaaacacctgcgtggcagcaagtgggagtcttcactggcctgcccctccttctgtgtggggcactctccacagggcttccagctcatctagatgaggagctccaagccacactccacgacttyagacatcaaatcctgcagacaaggggaggtaaggggaccccctgggcctcacggggtaggagtttcccacaaattcccctcattctcagcaccagcttctagaacatagagattacaaataggcatgcacatgcaggtcttggggaaaggaatgacgcttgcttttctgatgtctttgaatggcccagaggagacagaagcagacacaattcactccccatttcataggaaagcaagttctccacctgccttgctttccactgaattccaggaaattgcaccatttctggcaataagtaattgttacttaggtgaatgaataaatggaggagagtctaaaagtgaatt

SEQ ID NO: 588204 - DNA, 549 bp, Homo sapiens
cttgtggaccctctgagcctagggtctgggtggcgcctaacagcaatgaaagggcagagttccaggattgcagatggcaaaacacctgcgtggcagcaagtgggagtcttcactggcctgcccctccttctgtgtggggcactctccacagggcttccagctcatctagatgaggagctccaagccacactccacgactttagacatcaaatcctgcagacaaggggaggtaaggggaccccctgggcctcacggggtaggagtttcccacaaattcccctcattctcagcaccascttctagaacatagagattacaaataggcatgcacatgcaggtcttggggaaaggaatgacgcttgcttttctgatgtctttgaatggcccagaggagacagaagcagacacaattcactccccatttcataggaaagcaagttctccacctgccttgctttccactgaattccaggaaattgcaccatttctggcaataagtaattgttacttaggtgaatgaataaatggaggagagtctaaaagtgaatt

SEQ ID NO: 588205 - DNA, 630 bp, Homo sapiens
atggaatgaggctgctcaggctccctggattttacccccttcctaggggtatgtgtggacctcccacctttgtacctctgagttgcagacacagtttttggggatcccggggctagggcatataaaactcctaagtctctgtgtgtgcatgagtagctgctctgccaagactgcacacagctctgtgtgtcagacctggcatgggctcatgaggggatctcctgatcagtgggttacaaagctctgtgggagaacagtggtttcctggggtaatacaatcacacaccccttcccttggctgggggtgggggttcccttagctctgtgtcactcctgggtgggccattgtccaatcctgctttccttcattgtctgtgggtcaagttatttccctgaacagtcccaatgtgactatctggatatttcaatttcaggtgctgtgttcactcgcccctttcattcctctttgtgagtgcygcgaactacagctgcttctaatcggccatcttctcatttctttttagatttatttttacttactttgtggtttaattttctgttgttactatactattttatattctaaattaattattgctagtttgtaagaaaaatttttgatatatatta

SEQ ID NO: 588206 - DNA, 541 bp, Homo sapiens
atgccttgccctatcaaatgaaattatataccacgaagtcaggatcatatctcaactcttctgtaaactccacaatgcatagcatagtgttactcatggaaaaatcaaatacttgtgattgaaaygggttaacattcttctcatgttaaggaacatacttctttaattgtacctgttgttatgccgggtgtaagacttattcttttctccagagttgatatcaataatttaaaaacatataagaattggagataaatggggaaacaaacaatttatgaaggtcaaaactatgaagtaaatttcagttcatggttatttggtagaaatactaggttggagagtatggttcacatttgagaccaaattaaatattatttaatagatttctttcacacttagttgaaggaaagcatgcagtaaaaacctagcttgaccaaaaacctgacttgctcttggcaaaaattgtggtggagagagagagagatagagaatgaataacctctaccctgtgggagggtctttccattgcaaatgactcaag

SEQ ID NO: 588207 - DNA, 541 bp, Homo sapiens
atgccttgccctatcaaatgaaattatataccacgaagtcaggatcatatctcaactcttctgtaaactccacaatgcatagcatagtgttactcatggaaaaatcaaatacttgtgattgaaacgggttaacattcttctcatgttaaggaacatacttctttaattgtacctgttgttatgccgggtgtaagacttattcttttctccagagttgatatcaataatttaaaaacatatargaattggagataaatggggaaacaaacaatttatgaaggtcaaaactatgaagtaaatttcagttcatggttatttggtagaaatactaggttggagagtatggttcacatttgagaccaaattaaatattatttaatagatttctttcacacttagttgaaggaaagcatgcagtaaaaacctagcttgaccaaaaacctgacttgctcttggcaaaaattgtggtggagagagagagagatagagaatgaataacctctaccctgtgggagggtctttccattgcaaatgactcaag

SEQ ID NO: 588208 - DNA, 612 bp, Homo sapiens
ttcttataatattatgtattttaactagttttctaatrtattgctataaaatctactgtagatggtataattttataatgttagtactatctattttagtataatctcttttctttcctgatttgttaatttcttataccttttctattaatcattgatattgtatcagtcagctaacacaatagtaaatctccctctcagggcttacaacaataaatgttttattttctgctctgtatcttccagtttgttgagctttggctgatttcagctgagcgagcctggactcagcagcagtcacctggactccagactttcaggtgaattcatgtctgttccatatcactttccagggaaatatacttcccatgagtgggaaagaaacacaaaagccatatcaaacctgtaagcacacgtaaagctgtggctcccttcatcttagctcatggtcacatggccacaccaaacagcaaagggactggagtgtttactcctcacactctagtgggagcctttgtgaagtcctatggcaaagggcctgagatgtaattttacaacaaagaggaaacaacccaaactaccatggccatatttgctaagtttatgtctctt

SEQ ID NO: 588209 - DNA, 633 bp, Homo sapiens
acagatggtctggtgtctgctcgaggtctctgcctctctcttcatccttgtacacaatcctcctctgtgcccagccctggattgcaccctgggaacagagatgtgaactgagtacagctcctgccctagaaaagtgagatcactggtaaagggggcacagatggtagctcccgtcagagagaagagggctgatttgaggacacgctgctggaggattcatttgttccataaatgtttattgagcattgactctgtttccaggcactcttctcggtggagaaacaaaagctagagaacaagacccctgttctcatgagcttctcgttctacagggatggggggtggttgatggtcaatmaatatggaaccaaataagcaaagatacagggagatgtctggagagagggagcagcaggtgccaacatccacattcagctttggattgaagtcagctgcaaataccccttccccttgtgcctggccctgtgaggtgcccaaagaagacatttgacaaacattctaaatgagaaaagaggaaggaggtgactcagtgctaggggtatttagtctctccaccccagtcctgcaataaacaaaacacaaatggaagtagtccgatcaactgatacaaag

SEQ ID NO: 588210 - DNA, 633 bp, Homo sapiens
acagatggtctggtgtctgctcgaggtctctgcctctctcttcatccttgtacacaatcctcctctgtgcccagccctggattgcaccctgggaacagagatgtgaactgagtacagctcctgccctagaaaagtgagatcactggtaaagggggcacagatggtagctcccgtcagagagaagagggctgatttgaggacacgctgctggaggattcatttgttccataaatgtttattgagcattgactctgtttccaggcactcttctcggtggagaaacaaaagctagagaacaagacccctgttctcatgagcttctcgttctacagggatggggggtggttgatggtcaatcaatatgraaccaaataagcaaagatacagggagatgtctggagagagggagcagcaggtgccaacatccacattcagctttggattgaagtcagctgcaaataccccttccccttgtgcctggccctgtgaggtgcccaaagaagacatttgacaaacattctaaatgagaaaagaggaaggaggtgactcagtgctaggggtatttagtctctccaccccagtcctgcaataaacaaaacacaaatggaagtagtccgatcaactgatacaaag

SEQ ID NO: 588211 - DNA, 552 bp, Homo sapiens
attttgaaggacaaatggttaataccttctttcttgcttttttatattggcatttttttctatgttttggaggaattgaggattagaaggttatttatgagagtatgacttgtaagagtataggcaaatttaactcaattcattaaatagttattgaatctgcaaaacattatggaggatatagaaaattgttacagtatgaatcttatcctcaaggagcataatcttctcccaatatgaagtttaagagactaccaaaaaacaatcttcttgttagaacagattataatggattttgctcctaaatccaatgtaataatgacacatttagaaactgagataaaaatgtgaaataagacttagaacttatttgatataaaatttactgggtaaatctattgatagcagatattatgtagaatttaaatwcccctacctcaactggaaagtaataaggtctcattattatcttatactcatgcaatccagtgcgttttcagttaacccttgaacaacacagtggttagggtgctgacctctatgaagtcaaaa

SEQ ID NO: 588212 - DNA, 588 bp, Homo sapiens
aatttgctaactcttgagtaaactgaaatgcacatatgaaagctttgtaattcatccatgaacttataagcacacatatacatacactcccccacacacaccacacacacatttatgcacttgtagagatgtagataaataggcagatagatatagaccacttctgtagtagttaaaatcattaccaatagtaaaatatgaaaaaattgtatggtgagaataagaagatatttaattaaattaattattattagaaatatatagagagaagcagtaatgagagcttgtaactaccagaataaaagttgcttcagtttctaaattttcaaatcccaaaccctatgtttcccagaaggctaacccttgagtgcgaaaaagtgtcatcttagaaatgacataccatcactactggcatattctactggtcatatagatgaaccgtggtacactgaggggggaaactacaccagtgcatgaataccaggaggtaatgtycattggggtccttcttagaggccagttactgtagactgctctctggctccaagtaatgcacacacctcactaattgtatcctaagtctaccaa

SEQ ID NO: 588213 - DNA, 407 bp, Homo sapiens
ctctgtttcagctaagatagtcagggaatggacatgatgactgtgttagtcaaggtatctagaggaacagaaaaaatatgtatatatacacatccatgtatattcaaagtaggcagccctcatccactcaaggactttgcttcctcttttagggaaggggttagtgcatttttggttgccacaggatagttgtatcacatcaggcagaactatgaccttgctattttctttaattgacaattaagtatggttttaggagayacatggctgccacgttgacaggggatgaacttgtaatagctaattttatgtgttgatttgactaggctatgagtacccagatatgctgacaaatgttattaagtgtatctgcaaggatgttctagataagattaatatttaaattc

SEQ ID NO: 588214 - DNA, 407 bp, Homo sapiens
ctctgtttcagctaagatagtcagggaatggacatgatgactgtgttagtcaaggtatctagaggaacagaaaaaatatgtatatatacacatccatgtatattcaaagtaggcagccctcatccactcaaggactttgcttcctcttttagggaaggggttagtgcatttttggttgccacaggatagttgtatcacatcaggcagaactatgaccttgctattttctttaattgacaattaagtatggttttaggagatacatggctgccasgttgacaggggatgaacttgtaatagctaattttatgtgttgatttgactaggctatgagtacccagatatgctgacaaatgttattaagtgtatctgcaaggatgttctagataagattaatatttaaattc

SEQ ID NO: 588215 - DNA, 407 bp, Homo sapiens
ctctgtttcagctaagatagtcagggaatggacatgatgactgtgttagtcaaggtatctagaggaacagaaaaaatatgtatatatacacatccatgtatattcaaagtaggcagccctcatccactcaaggactttgcttcctcttttagggaaggggttagtgcatttttggttgccacaggatagttgtatcacatcaggcagaactatgaccttgctattttctttaattgacaattaagtatggttttaggagatacatggctgccacgttgacaggggatgaacttgtaatagctaattttatgtgttgatttgactaggctatgrgtacccagatatgctgacaaatgttattaagtgtatctgcaaggatgttctagataagattaatatttaaattc

SEQ ID NO: 588216 - DNA, 407 bp, Homo sapiens
ctctgtttcagctaagatagtcagggaatggacatgatgactgtgttagtcaaggtatctagaggaacagaaaaaatatgtatatatacacatccatgtatattcaaagtaggcagccctcatccactcaaggactttgcttcctcttttagggaaggggttagtgcatttttggttgccacaggatagttgtatcacatcaggcagaactatgaccttgctattttctttaattgacaattaagtatggttttaggagatacatggctgccacgttgacaggggatgaacttgtaatagctaattttatgtgttgatttgactaggctatgagtacccagatatgctgacaaatgwtattaagtgtatctgcaaggatgttctagataagattaatatttaaattc

SEQ ID NO: 588217 - DNA, 455 bp, Homo sapiens
gactaatagagtcatcatgtccattccatgactatcttagctgtrtatactgctctcaatattgaaagatagagagagagagagagagagagagagagagattacaagaaattggctcacattatggaggctgataagtctcaatatctgcagttggcaagctggagacacagaaaagctgaagtttagttctagtttgagtccaaaggcatgagaaccaggagacctgatagtgtaagcttcagtccaaaagctggcaagctcagtacctgagaaaatccatgtttccatttgaatttaaaagcaagaaaagaccaatggcccagctcaggtagccaggcaagaggagtcctcccttaatcaacatttttgtgctattcaggtcttcaattgaccggataaggcctacctactttagagagaacaatctgctttattcactctatgaatttaaa

SEQ ID NO: 588218 - DNA, 426 bp, Homo sapiens
taacgttgactaatagagtcatcatgtccattccatgactatcttagctgtatatactgctctcaatattgaragatagagagagagagagagagagagagagagagattacaagaaattggctcacattatggaggctgataagtctcaatatctgcagttggcaagctggagacacagaaaagctgaagtttagttctagtttgagtccaaaggcatgagaaccaggagacctgatagtgtaagcttcagtccaaaagctggcaagctcagtacctgagaaaatccatgtttccatttgaatttaaaagcaagaaaagaccaatggcccagctcaggtagccaggcaagaggagtcctcccttaatcaacatttttgtgctattcaggtcttcaattgaccggataaggcctacctactttaga

SEQ ID NO: 588219 - DNA, 453 bp, Homo sapiens
atagagtcatcatgtccattccatgactatcttagctgtatatactgctctcaatattgaaagatagagagagagagagagagagagagagagagattacaagaaattggctcacattatggaggctgataagtctcaatatctgcagttggcaagctggagacacagaaaagctgaagtttagttctagtttgagtccaaaggcatgagaaccaggagacctgatagtgtaagcttcagtccaaaagctggcaagctcagtacctgagaaaatccatgtttccatttgaatttaaaagcaagaaaagaccaatggcccagctcargtagccaggcaagaggagtcctcccttaatcaacatttttgtgctattcaggtcttcaattgaccggataaggcctacctactttagagagaacaatctgctttattcactctatgaatttaaatat

SEQ ID NO: 588220 - DNA, 521 bp, Homo sapiens
tgaacaggttttcccaagatcacggatcaagagttctctactatcatgagactcttatctttgattatttgtcccttgcttatgcttctatgaataatagaggtgaaagggttctcttgtgtgcacttatggggtatacttttatttgtgaaggattttgcagccagccttatacatggataaccttacamcttaatagacaaaaatgaaggcccaatgtagatgagaaactttaatggtacgtacattgcctcataatcagtcagaaacagaacattgatttactccttttagtccacatcatgggctaaggagaacattgctgggaggatttcactcttctaaaagggcatcatttgttaggtccttattccatagtttggaataaaaatgtcaatgattaaaaatgtatccctcatgataggctctaaagcagattctactgtaaaggctatggttacacacaaactttaaattctcttgtgaaagttatgctaaataatagaattgatctggattag

SEQ ID NO: 588221 - DNA, 538 bp, Homo sapiens
ctttaacatcaggaacaagacaaggatgtctgctttaatcactagtgaacattgcaacttctagcagagcaattagcaagaaagacaaataagaggcatccaaactggaaaggaataaattatttctcttttcagattacataattctacatataaaaaaatctgaaaaaaaatccatcagaaagctagtagagctaataaaaaattcagcaaaastgcatattacaaggtcaacacacaagattcattcatgtctctatatgctagaaataaataatccaaaaacaaaattaggaaacaaattccatttatgatagtatctaaaagatcaaaacacctaagaataaatttaatgaaaaatgtgaacacttgtacactgaaaagagcaaagcatcaccgaaagaaattaaagaagtcctaaacaaattgaaagcaaccctatgttgatggatttgaagacaaattaatagtgctaaaatagcagaactaccaaagctgtctaaagattcaatacaatatttagtaaaattccaatagt

SEQ ID NO: 588222 - DNA, 538 bp, Homo sapiens
ctttaacatcaggaacaagacaaggatgtctgctttaatcactagtgaacattgcaacttctagcagagcaattagcaagaaagacaaataagaggcatccaaactggaaaggaataaattatttctcttttcagattacataattctacatataaaaaaatctgaaaaaaaatccatcagaaagctagtagagctaataaaaaattcagcaaaactgcatattacaaggtcaacacacaagattcattcatgtctctatatgctagaaataaataatccaaaaacaaaattaggaaacaaattccatttatgatagtatctaaaagawcaaaacacctaagaataaatttaatgaaaaatgtgaacacttgtacactgaaaagagcaaagcatcaccgaaagaaattaaagaagtcctaaacaaattgaaagcaaccctatgttgatggatttgaagacaaattaatagtgctaaaatagcagaactaccaaagctgtctaaagattcaatacaatatttagtaaaattccaatagt

SEQ ID NO: 588223 - DNA, 538 bp, Homo sapiens
ctttaacatcaggaacaagacaaggatgtctgctttaatcactagtgaacattgcaacttctagcagagcaattagcaagaaagacaaataagaggcatccaaactggaaaggaataaattatttctcttttcagattacataattctacatataaaaaaatctgaaaaaaaatccatcagaaagctagtagagctaataaaaaattcagcaaaactgcatattacaaggtcaacacacaagattcattcatgtctctatatgctagaaataaataatccaaaaacaaaattaggaaacaaattccatttatgatagtatctaaaagatcaaaacacctaagaataaatttaatgaaaaatgtgaacacttgtacactgaaaagagcaaagcatcaccgaaagaaattaaagaagtyctaaacaaattgaaagcaaccctatgttgatggatttgaagacaaattaatagtgctaaaatagcagaactaccaaagctgtctaaagattcaatacaatatttagtaaaattccaatagt

SEQ ID NO: 588224 - DNA, 538 bp, Homo sapiens
ctttaacatcaggaacaagacaaggatgtctgctttaatcactagtgaacattgcaacttctagcagagcaattagcaagaaagacaaataagaggcatccaaactggaaaggaataaattatttctcttttcagattacataattctacatataaaaaaatctgaaaaaaaatccatcagaaagctagtagagctaataaaaaattcagcaaaactgcatattacaaggtcaacacacaagattcattcatgtctctatatgctagaaataaataatccaaaaacaaaattaggaaacaaattccatttatgatagtatctaaaagatcaaaacacctaagaataaatttaatgaaaaatgtgaacacttgtacactgaaaagagcaaagcatcaccgaaagaaattaaagaagtcctaaacaaattgaaagcaaccctrtgttgatggatttgaagacaaattaatagtgctaaaatagcagaactaccaaagctgtctaaagattcaatacaatatttagtaaaattccaatagt

SEQ ID NO: 588225 - DNA, 268 bp, Homo sapiens
cctaaaacagttcctctgtctcatcaatgcagttgtttaattgatttgtttttttttctccaagtaaagggattaagttattctaacctaataacgtgctaatatagtttggcttagtcagrcaaaatcaatcatacttatgaaatcattatcatctgaaaagaaatagagagagacaaagttgggaagagattaaaagtgagagctgatgtaggattgcctggatggaactaaaatcccagttccatcacctttctcctctgtaaca

SEQ ID NO: 588226 - DNA, 244 bp, Homo sapiens
ttgagatcacattacaaataattagccatttgatgagyggcatttagtatattgacactgctgtgcaacctctatttagttccaaaacgtttttcaccacctgaaaaggaaaccgcagaggcattaagcagtcactccccattctcctgtccccacagcccctggccattgctcaatctgttttctatctctatggatttacctgttctaggtgtttcatacacatggaatcacacactacatg

SEQ ID NO: 588227 - DNA, 435 bp, Homo sapiens
gcgtattttattctttcagttttcagatgattggccaggtgtctgaacaccctgcattgagatgtttcctttgtcccattctctatttctgtatggatttctgtctacatctggacttcctcttctatttgtctgtccatatatacacgtttactacacagttttaataattgaagctttgtaactgaattrcctttaataaatggtaccagctccaataccaattatagcagaaaacatggtcccctgtattaggtatttgagagcaagatggatgttctggatgctcgagctgagtttctttccctatgccaggcctcctttttactcttagagaaaggtaccccattttatagatacagaaagtgaggtgagatcaaggaaggtcagtccccaactgtgccagctctgaattttgtagggtttaggagcacc

SEQ ID NO: 588228 - DNA, 552 bp, Homo sapiens
tctgtgtctgtatgtcatggagaataattatccacagatcacagatacaaatctcagagtttaactgtgtatgcatttttaggatctcttcatctcgtaaggatctgaattctaatcttggagacaggggctttcccttatcttttgaaagagaaactggaaatcccagagcctgagctgctacaccctaaggtttattaaatgaacttcartgaacaccttttgctgatcttctgactggaaatattttcatttaaccagcgggaggggtgaggctctaccatctaccagctattttgcaagatgccttccttatgagcttggtctccctgtcctcaccatgacctcataatcgcatcattcccagctcatttctgagaaagctggggctctgagctctactgagagttggtgtctgggcttaggcagcaaagacacagggaaggggaagcattttgcctgccaaggttgggagatgcaaagctgagagttgtaggtgggaaggagagggtgcaggagatcagagtaggtcacagcagctcaggattggcc

SEQ ID NO: 588229 - DNA, 552 bp, Homo sapiens
tctgtgtctgtatgtcatggagaataattatccacagatcacagatacaaatctcagagtttaactgtgtatgcatttttaggatctcttcatctcgtaaggatctgaattctaatcttggagacaggggctttcccttatcttttgaaagagaaactggaaatcccagagcctgagctgctacaccctaaggtttattaaatgaacttcagtgaacaccttttgctgatcttctgastggaaatattttcatttaaccagcgggaggggtgaggctctaccatctaccagctattttgcaagatgccttccttatgagcttggtctccctgtcctcaccatgacctcataatcgcatcattcccagctcatttctgagaaagctggggctctgagctctactgagagttggtgtctgggcttaggcagcaaagacacagggaaggggaagcattttgcctgccaaggttgggagatgcaaagctgagagttgtaggtgggaaggagagggtgcaggagatcagagtaggtcacagcagctcaggattggcc

SEQ ID NO: 588230 - DNA, 552 bp, Homo sapiens
tctgtgtctgtatgtcatggagaataattatccacagatcacagatacaaatctcagagtttaactgtgtatgcatttttaggatctcttcatctcgtaaggatctgaattctaatcttggagacaggggctttcccttatcttttgaaagagaaactggaaatcccagagcctgagctgctacaccctaaggtttattaaatgaacttcagtgaacaccttttgctgatcttctgactggaaatattttcatttaaccagcgggaggggtgaggctctaccatctaccagctattttgcaagatgccttccttatgagcttggtctccctgtcctcaccatgacctcataatcgcatcattcccagctcatttctgagaaagctggggctctgagctctactgagagttggtgtctgggcttaggcagcaaagacacagggaaggggaagcattttgcctgccaaggttgggagatgcaaagctgagagttgtrggtgggaaggagagggtgcaggagatcagagtaggtcacagcagctcaggattggcc

SEQ ID NO: 588231 - DNA, 565 bp, Homo sapiens
aggggaagcattttgcctgccaaggttgggagatgcaaagctgagagttgtaggtgggaaggagagggtgcaggagatcagagtaggtcacagcagctcaggattggccttgagtttccagccagagttgrcctcattctgaaggccaaggccgcagctccactgaaccagacccatcctcattgttagtctccttaggccgtgaaaactcagggagacaggttcccctgacagaaccaagttaaaattttcagacctctaggcattcattcaccccgatctagagccttcatgcacccagggaaagaatcatcttcctaccaataatggactaaaggctgtagggcaacaaggaagtgctggggtggtaatttcctgtgcacaatgtggtatctgagctcccatggcagctctgtgtggccctcaccgcagcctccatgctcctgctcacgctgcttgcctggctaggagcagccttccagctctacctgagttcaacaaccccccatgtcacacctccctgcttcagctttctcttccacagcctcctgtttactcccaggag

SEQ ID NO: 588232 - DNA, 451 bp, Homo sapiens
ttatggctcccattctaaaatgttactagtgttacttttctcaaataataataaaaaaaataaagccttcccactgactcaaggttggaaggggagctgacccatttgccttctaggctcatcccctcagttaaaagtaaccaagacatcagggtggaatgatgtccacagtcagtggaggggcctgtgctccgctattcacaggggaccagccaagagtcattcagctgtggcacgtgagaaaaacggtcctgccacccagcgggataactgttctctttagtaagtgcttggaactgtttccaggaaacataacaatwacccaacccaagccctcaccccagaaaggagaagcaggggtgtggattgtggagcagaagttaagcgggtgccttcccagagagctcctacctctccagaaagggttctctagccctagctgtccctgggc

SEQ ID NO: 588233 - DNA, 552 bp, Homo sapiens
tggaaaacaagtagactgagggtctgctagtgaaggtgacccctactgaagtccactggctttggttgggacccagaagagtcacacgccaggaatagaggtggacaggaaacaccctgacttttgtagggactgaacctcactgataacctcaattgcggatggtatggagggtgtctaggtgtgctaggacccctgcccattccccagaaatagactcccatcttttctrcagcaagataacgtgctagtaggcctcaattcattgctaaatatttttaacgagtgtcttacatttagccaaaaagactagtcatgtggcaggaaaaatacaatgtcatatgaccaaaagctaaaagactgtgaaaatgaatccagaggtgacccaagcattgaatttaacaatgccagtacctggacctccgcttgcccctaaaacattacaatcaagaatgtaggaagggaaaggaaacacgaagattaatcaagcaggaaggacaagctcagttttgcacccactgaatttgccacaaatattgtggaaaatattct

SEQ ID NO: 588234 - DNA, 293 bp, Homo sapiens
agatctgggggaacttgattatcggaggggacattaggagaaggggaacctgggtctggagactccccaggaagatgcggccacagagatgctttgcccaggacccagcrttgccctggtcagtcctgctcagatgaggtccaaccaggtggctgtgttcccagcccagcacctccatctatgagtgagggtcagtcacagctgtggtgatggggatatatcatagcatgttcctcatagcattattgtgacgcagagagtgccagcccactcaggcacagggcatggttctg

SEQ ID NO: 588235 - DNA, 293 bp, Homo sapiens
agatctgggggaacttgattatcggaggggacattaggagaaggggaacctgggtctggagactccccaggaagatgcggccacagagatgctttgcccaggacccagcattgccctggtcagtcctgctcagatgaggtccaaccaggtggctgtgttcccagcccagcacctccatctatgagtgagggtcagtcacagctgtgrtgatggggatatatcatagcatgttcctcatagcattattgtgacgcagagagtgccagcccactcaggcacagggcatggttctg

SEQ ID NO: 588236 - DNA, 449 bp, Homo sapiens
gggtcatgtctgcagtggggggctcttccctagaggccttggccggctgcctccaggtcagggggctgagttggcatccaaagactcaaaggagtgaatcgtacatgtcagtcacagggttggcttgggcaccaccgtgctggggcaccactgggccctctgaccacctggagagcctgaccaggcctgccacagagacctcagagtgccagagaatctccactgtgtccttagctccacacagtcagggcttccctgaaatctgcctctctctgtcattatgcttggccggkactgctcatcctgatggcactgggcaggcagtgggctgcagaggcagagctgaggggaccaggaggcaggcactctgtgtgactttggaggatccttctaccccaaggcctcactgctgccatctgtaagtgaaggaactggaccagatggggaat

SEQ ID NO: 588237 - DNA, 465 bp, Homo sapiens
ggataggttaagggaggatcaaggtgatgagggcctggaaagaggggctggggtcgaatcaccagatcctgttggttgcaatggaagagcctggagtttattctcagagcagtgagaagccactggaaagttgtttttttgtttttctgtttttgagacagagtctagctctgtsacccaggcagactgcagtggtgcaatcttggctcactgtaacctctgcctcccaggcacaagcgattctcctgcctcaggctccccagtagctgggattacaggcacatgccaccacacccatctaatttttctttttctttttttttttttttttttgagacagagtctctgtcacccaggctggagtgcagtggcgcaatctcagctcactgcaacctccacctccctggttcaagcgattctcctgcctcagcctcccgagtagctgggactacaggtgcatgccac

SEQ ID NO: 588238 - DNA, 515 bp, Homo sapiens
aaactttttaataacatcttatcaagtgttccatttgtgataaagaacttaatgagccacatcaagatgaaaatcaagaaaaatatttagctgaaacactactttgtcctttatcaaacaaaatggctagataaatctcaaagtattaaggtggtcattttttttatttgacttaattttaagtgcttttcatttcccaaatcaaacataaatagggcagccctaaatttgttgcttcacatgggattctgcccccacaaaaatgtaaaataacttccagattttccagtaaaatatactaagccaaacattttgagcaacttgtccactaaaataactttaaaactattttctcaagtacctacctattttttcttttgatcctccagcaagtagattgatattttctcctggtaacaattctaattgctcggtacatttgacaaattttccagactcaaagctgcttaatgatctgtaattaaaatattgsttagcttgtattcctatgcagc

SEQ ID NO: 588239 - DNA, 625 bp, Homo sapiens
ttttcttgcattattaaagaaatggtattgatagatggtcactgggggaccactgctcctccccgacagtatttaaataactggtataggctgcaagacttaccagatacctgctgcgtgagcgaaggtttctgagtatgatctctatgccatccaactaatataccaactgtatccttgatggaaacaaagagagagggggccaatcattttaagatattactgcaatccacctgtggaccatttcacagcaaaagatcctaaaaggagcatctatgttctacctacttgacattctagaaacttagaaaggggagaggggcaggaaaataaaagaactacatttctgacarcaatgaaatagtttattttcttcaaatattttaaggtacgaacgtcagaaagaaaaatgcggcatttaaccctggaacctcaaatatcactgattatattcaaaggagcagaggcactgttttccatctgattcctcagttcctcacacacacaaccatccccctcaccccatgatctgaacagcggaatgaggaactcaccctaaaattagtgctgaaaatatgagggtaacatcgagccaccaaaagaatgcacttaacacatttgcaaa

SEQ ID NO: 588240 - DNA, 353 bp, Homo sapiens
ctcctcctgttctcctccaccacacttagcatctggcttttcccctcatggttgaatatggctgctgcacctccaggcgtccaaactgtcttccaaaaagttagaaggagaaaacgatgaagtcaaagatcaaagagaaagggctaaagagcatgccagttgaatctgtttctttttaaatatccacccaccagtcaggcatggtggctcatgcctataatcccaggactttgggagaccgaggtgggtggatcatctgatgtcaggagtttsagaccaacctgaccaacgtggtaaaaccccatctctactaaaaagagaaaaaattagctgggtgtggtggcgggggcctg

SEQ ID NO: 588241 - DNA, 607 bp, Homo sapiens
gtgagcagaatattctacaatgtgataagtcatgaaagataaattcgccattttgggaagaggcttttttcagaaagttaccacaaaaggggtgaccttggatttttgatatctgattgcatgttctcattctctccaattagaatcataagatattcaaatggtctgaattgtcatttctgctttccttagaaaatggtgaactggcctgagaagacaggagtggagagtcaaggtaatgtattatctctccactccaccttagcagagccttgctcttggttaaaggtctctgcttattcctcatggaaaaaaatcttgttgcagtctcagtcagctcagaatacaagaatgcaggtaattaaatagctaacagttacatagcattcactatgtgtcaggcactgccttaagtactatatagttatttactcatttactcttcacaacaaatccatgacatgacgactatcactcttcccacttgggtaacttgcccaagaccatacactagtatacgcrtggcatgactgggattaaaacctgagtagtctggtcccagtctttaaccactatgctatactgaagtaggcctggagagggagat

SEQ ID NO: 588242 - DNA, 534 bp, Homo sapiens
ttcttgggggttatctctcttcctctttctttctctttctcccctctaaatagaaaatacatttttaaaaaatctctagaacacctacccttttctttctgagacagataaatgggcttttatttttttctcaggcaagagcaggtaagcgtctctctcgggctctctctctctctctctctctctctctctctctstgtgtgtgtgtgtgtgtaggaaagacagataaagagagggagacatatacaaagagtactcactggcaggaagttgtattgcagaattcacttgaactagtaggttataaagggagagtggcaattggcagggttactgtacagctttggcaatcaagcacaggagtataacaagcaagtttttagagatttaatttgcaaggaaacatcagccttgatagctttctatttgattatgaaatattttatataaaagcaacccctaagcctttcagaaatttaaaacatattgaaatttacatgaaaattaaatattgatcatgcatttagacaatga

SEQ ID NO: 588243 - DNA, 578 bp, Homo sapiens
gggacagacccagatacaatactagctagggacttccaacacccctaacagcactgggctgatcatttagacagaaaagcaatgaagaaacatcagacttaatctgcattataaaccaaagggacttaatagccatttatagaccctttcattcaacagctgcagaatacacattctcctcagctcagggaacattattaagggaagatcatatgttaggatacaaaatacatttcaatttttaaaaaattgaaatcaagtatcttttctgaccacaattaaataaaactagaaatcaataacaagaggaactgtggaaactatacaaacacacgggaaataaacaatatgctcctgaataaccactttatcaatgaaaaaattaaaaaggaaatktattatttttggaaacaaatgaaaatagaaacacaacataccaaaacttacgggatacaacaaaagcagggaagcttatagcagtaaatgcatacataaaaaagtagaaaaactttaaatagacaacgaaacaatgtgtcataaagagctataaaagcaagagcaaaccaaactcaaaatta

SEQ ID NO: 588244 - DNA, 564 bp, Homo sapiens
tcaatggaatgtactagaatggactgcaatggaatggaatacaaaggaatggaatggaatggaatggaatggcatggcaaggaatcaaacagaatggaactgcatggaatggaatggaatggagtctaatagaatggtaaaaattgaataaattgaaatggaatggtctcgaatggaatagaatagaatggaatggaatggaatgcaatcaaatggagtcgaatggaaaagaatggactggaatggaacggaatagactggaaagtaatggacagaaayggaatggactcgaatgcaatatattcgaatagaatggaataaaatggaatgtaatcaaatagaatggactcaaattgaatggattgtaatggaacggtctcgaagggaatggaattgcatggaaaggaatacaatggaatggaatggaatcgagtggaatggaaaggagtggaatggaatggaatggaattgaaaggaaaggaaatgaatggattggaagcaaatggaatagaatccaatggaatggaatggaatggaaatgaatggaatggaatggaatggaat

SEQ ID NO: 588245 - DNA, 564 bp, Homo sapiens
tcaatggaatgtactagaatggactgcaatggaatggaatacaaaggaatggaatggaatggaatggaatggcatggcaaggaatcaaacagaatggaactgcatggaatggaatggaatggagtctaatagaatggtaaaaattgaataaattgaaatggaatggtctcgaatggaatagaatagaatggaatggaatggaatgcaatcaaatggagtcgaatggaaaagaatggactggaatggaacggaatagactggaaagtaatggacagaaacggaatggactcgaatgcaatatattcgaatagaatggaataaaatggaatgtaatcaaatagaatggactcwaattgaatggattgtaatggaacggtctcgaagggaatggaattgcatggaaaggaatacaatggaatggaatggaatcgagtggaatggaaaggagtggaatggaatggaatggaattgaaaggaaaggaaatgaatggattggaagcaaatggaatagaatccaatggaatggaatggaatggaaatgaatggaatggaatggaatggaat

SEQ ID NO: 588246 - DNA, 610 bp, Homo sapiens
gaatggaattcaatggaatgtactagaatggactgcaatggaatggaatacaaaggaatggaatggaatggaatggaatggcatggcaaggaatcaaacagaatggaactgcatggaatggaatggaatggagtctaatagaatggtaaaaattgaataaattgaaatggaatggtctcgaatggaatagaatagaatggaatggaatggaatgcaatcaaatggagtcgaatggaaaagaatggactggaatggaacggaatagactggaaagtaatggacagaaacggaatggactcgaatgcaatatattcgaatagaatggaataaaatggaatgtaatcaaatagaatggactcaaattgaatggattgtaatggaacggtctcgaaggraatggaattgcatggaaaggaatacaatggaatggaatggaatcgagtggaatggaaaggagtggaatggaatggaatggaattgaaaggaaaggaaatgaatggattggaagcaaatggaatagaatccaatggaatggaatggaatggaaatgaatggaatggaatggaatggaatggaatgaaatagaatggaatggaatggaatggaattc

SEQ ID NO: 588247 - DNA, 564 bp, Homo sapiens
tcaatggaatgtactagaatggactgcaatggaatggaatacaaaggaatggaatggaatggaatggaatggcatggcaaggaatcaaacagaatggaactgcatggaatggaatggaatggagtctaatagaatggtaaaaattgaataaattgaaatggaatggtctcgaatggaatagaatagaatggaatggaatggaatgcaatcaaatggagtcgaatggaaaagaatggactggaatggaacggaatagactggaaagtaatggacagaaacggaatggactcgaatgcaatatattcgaatagaatggaataaaatggaatgtaatcaaatagaatggactcaaattgaatggattgtaatggaacggtctcgaagggaatggaattgcatggaaaggaatacaatggaatggaatggaatcgagtggaatggaaaggagtggaatggratggaatggaattgaaaggaaaggaaatgaatggattggaagcaaatggaatagaatccaatggaatggaatggaatggaaatgaatggaatggaatggaatggaat

SEQ ID NO: 588248 - DNA, 574 bp, Homo sapiens
ttgaattcaatgaatcatcatcaaatggaaccgaatggaatcctcattgaatggaaatgaaaggagtcatcatctaatggaatcgcatggaatcatcatcaaatggaatcgaatggaatcatcatcaaatggaatctaatggaatcaatgaacggaattgaatsgaatcgtcatcgaatgaattgaatgcaatcatcgaatggtctcgaatggaatcatcttcaaatggaaaggaatggaatcatcgcatagaatcgaatggaattatcatcgaatggacccgaatggaatcaacatcaaacggaatcaaacggaattatcgaatggaatcgaagagaatcatcgaatggccacgaatggaatcatctaatggaatggaatggaataatccatggacccgaatgcaatcatcatcgaatagaatcgaatggaatcatcgaatggactcgaatggaataatcattgaacgcaatcgaatggaatcatcgagtggaatcgaatggaatcatgatcaaatggaatcgaatgtaatcatcatcaaatggaatccaaaatcaccatcatcaattggtac

SEQ ID NO: 588249 - DNA, 574 bp, Homo sapiens
ttgaattcaatgaatcatcatcaaatggaaccgaatggaatcctcattgaatggaaatgaaaggagtcatcatctaatggaatcgcatggaatcatcatcaaatggaatcgaatggaatcatcatcaaatggaatctaatggaatcaatgaacggaattgaatcgaatcgtcatcgaatkaattgaatgcaatcatcgaatggtctcgaatggaatcatcttcaaatggaaaggaatggaatcatcgcatagaatcgaatggaattatcatcgaatggacccgaatggaatcaacatcaaacggaatcaaacggaattatcgaatggaatcgaagagaatcatcgaatggccacgaatggaatcatctaatggaatggaatggaataatccatggacccgaatgcaatcatcatcgaatagaatcgaatggaatcatcgaatggactcgaatggaataatcattgaacgcaatcgaatggaatcatcgagtggaatcgaatggaatcatgatcaaatggaatcgaatgtaatcatcatcaaatggaatccaaaatcaccatcatcaattggtac

SEQ ID NO: 588250 - DNA, 549 bp, Homo sapiens
gaatcctcattgaatggaaatgaaaggagtcatcatctaatggaatcgcatggaatcatcatcaaatggaatcgaatggaatcatcatcaaatggaatctaatggaatcaatgaacggaattgaatcgaatcgtcatcgaatgaattgartgcaatcatcgaatggtctcgaatggaatcatcttcaaatggaaaggaatggaatcatcgcatagaatcgaatggaattatcatcgaatggacccgaatggaatcaacatcaaacggaatcaaacggaattatcgaatggaatcgaagagaatcatcgaatggccacgaatggaatcatctaatggaatggaatggaataatccatggacccgaatgcaatcatcatcgaatagaatcgaatggaatcatcgaatggactcgaatggaataatcattgaacgcaatcgaatggaatcatcgagtggaatcgaatggaatcatgatcaaatggaatcgaatgtaatcatcatcaaatggaatccaaaatcaccatcatcaattggtactgaatggaattg

SEQ ID NO: 588251 - DNA, 549 bp, Homo sapiens
gaatcctcattgaatggaaatgaaaggagtcatcatctaatggaatcgcatggaatcatcatcaaatggaatcgaatggaatcatcatcaaatggaatctaatggaatcaatgaacggaattgaatcgaatcgtcatcgaatgaattgaatgcaatcatcgaatggtctcgaatggaatcatcttcaaatggaaaggaatggaatcatcgcwtagaatcgaatggaattatcatcgaatggacccgaatggaatcaacatcaaacggaatcaaacggaattatcgaatggaatcgaagagaatcatcgaatggccacgaatggaatcatctaatggaatggaatggaataatccatggacccgaatgcaatcatcatcgaatagaatcgaatggaatcatcgaatggactcgaatggaataatcattgaacgcaatcgaatggaatcatcgagtggaatcgaatggaatcatgatcaaatggaatcgaatgtaatcatcatcaaatggaatccaaaatcaccatcatcaattggtactgaatggaattg

SEQ ID NO: 588252 - DNA, 574 bp, Homo sapiens
ttgaattcaatgaatcatcatcaaatggaaccgaatggaatcctcattgaatggaaatgaaaggagtcatcatctaatggaatcgcatggaatcatcatcaaatggaatcgaatggaatcatcatcaaatggaatctaatggaatcaatgaacggaattgaatcgaatcgtcatcgaatgaattgaatgcaatcatcgaatggtctcgaatggaatcatcttcaaatggaaaggaatggaatcatcgcatakaatcgaatggaattatcatcgaatggacccgaatggaatcaacatcaaacggaatcaaacggaattatcgaatggaatcgaagagaatcatcgaatggccacgaatggaatcatctaatggaatggaatggaataatccatggacccgaatgcaatcatcatcgaatagaatcgaatggaatcatcgaatggactcgaatggaataatcattgaacgcaatcgaatggaatcatcgagtggaatcgaatggaatcatgatcaaatggaatcgaatgtaatcatcatcaaatggaatccaaaatcaccatcatcaattggtac

SEQ ID NO: 588253 - DNA, 545 bp, Homo sapiens
tgaaaggagtcatcatctaatggaatcgcatggaatcatcatcaaatggaatcgaatggaatcatcatcaaatggaatctaatggaatcaatgaacggaattgaatcgaatcgtcatcgaatgaattgaatgcaatcatcgaatggtctcgaatggaatcatcttcaaatggaaaggaatggaatcatcgcatagaatcgaatggaattatcatcgaatggacccgaatggaatcaacatcaaacggaatcaaacggaattatcgaatggaatcgaagagaatcatcgaatggccacgaatggaatcatctaatggaatggaatggaataawccatggacccgaatgcaatcatcatcgaatagaatcgaatggaatcatcgaatggactcgaatggaataatcattgaacgcaatcgaatggaatcatcgagtggaatcgaatggaatcatgatcaaatggaatcgaatgtaatcatcatcaaatggaatccaaaatcaccatcatcaattggtactgaatggaattgtcatcaaatggaattc

SEQ ID NO: 588254 - DNA, 549 bp, Homo sapiens
gaatcctcattgaatggaaatgaaaggagtcatcatctaatggaatcgcatggaatcatcatcaaatggaatcgaatggaatcatcatcaaatggaatctaatggaatcaatgaacggaattgaatcgaatcgtcatcgaatgaattgaatgcaatcatcgaatggtctcgaatggaatcatcttcaaatggaaaggaatggaatcatcgcatagaatcgaatggaattatcatcgaatggacccgaatggaatcaacatcaaacggaatcaaacggaattatcgaatggaatcgaagagaatcatcgaatggccacgaatggaatcatctaatggaatggaatggaataatccatggacmcgaatgcaatcatcatcgaatagaatcgaatggaatcatcgaatggactcgaatggaataatcattgaacgcaatcgaatggaatcatcgagtggaatcgaatggaatcatgatcaaatggaatcgaatgtaatcatcatcaaatggaatccaaaatcaccatcatcaattggtactgaatggaattg

SEQ ID NO: 588255 - DNA, 545 bp, Homo sapiens
tgaaaggagtcatcatctaatggaatcgcatggaatcatcatcaaatggaatcgaatggaatcatcatcaaatggaatctaatggaatcaatgaacggaattgaatcgaatcgtcatcgaatgaattgaatgcaatcatcgaatggtctcgaatggaatcatcttcaaatggaaaggaatggaatcatcgcatagaatcgaatggaattatcatcgaatggacccgaatggaatcaacatcaaacggaatcaaacggaattatcgaatggaatcgaagagaatcatcgaatggccacgaatggaatcatctaatggaatggaatggaataatccatggacccgaatrcaatcatcatcgaatagaatcgaatggaatcatcgaatggactcgaatggaataatcattgaacgcaatcgaatggaatcatcgagtggaatcgaatggaatcatgatcaaatggaatcgaatgtaatcatcatcaaatggaatccaaaatcaccatcatcaattggtactgaatggaattgtcatcaaatggaattc

SEQ ID NO: 588256 - DNA, 545 bp, Homo sapiens
tgaaaggagtcatcatctaatggaatcgcatggaatcatcatcaaatggaatcgaatggaatcatcatcaaatggaatctaatggaatcaatgaacggaattgaatcgaatcgtcatcgaatgaattgaatgcaatcatcgaatggtctcgaatggaatcatcttcaaatggaaaggaatggaatcatcgcatagaatcgaatggaattatcatcgaatggacccgaatggaatcaacatcaaacggaatcaaacggaattatcgaatggaatcgaagagaatcatcgaatggccacgaatggaatcatctaatggaatggaatggaataatccatggacccgaatgcaatcatcatcgaatagaatcgaatggaatcatcgaatggactcgaatggaatmatcattgaacgcaatcgaatggaatcatcgagtggaatcgaatggaatcatgatcaaatggaatcgaatgtaatcatcatcaaatggaatccaaaatcaccatcatcaattggtactgaatggaattgtcatcaaatggaattc

SEQ ID NO: 588257 - DNA, 585 bp, Homo sapiens
ggaattcaaaggaatcatcatcaaatggaaccgaatggaatcctcattgaatggaaatgaaaggagtcatcatctaatrgaatcgcatggaatcatcatcaaatggaatcgaatggaatcatcatcaaatggaatcgaatggaatcattgaacggaattgaatggaatcgtcatcgaatgaattgagtgcaatcatcgaatggtctcgaatggaatcatcttcaaatggaaaggaatggaatcatcgcatagaaacgaatggaattatcatcgaatggacccgaatggaatcaacatcaaacggaatcaaacggaattctcgaatggaatcgaagagaatcatcgaatggccacgaatggaatcatctaatggaatggaatggaataatccatggacacgaatgcaatcatcatcgaatagaatcgaatggaatcatcgaatggactcgaatggaataatcattgaacgcaatcgaatggaatcatcgagtggaatcgaatggaatcatgatcaaatggaatcgaatgtaatcatcatcaaatggaatccaaaatcaccatcatcaattggtactgaatggaatt

SEQ ID NO: 588258 - DNA, 585 bp, Homo sapiens
ggaattcaaaggaatcatcatcaaatggaaccgaatggaatcctcattgaatggaaatgaaaggagtcatcatctaatggaatcgcatggaatcatcatcaaatggaatcgaatggaatcatcatcaaatggaatckaatggaatcattgaacggaattgaatggaatcgtcatcgaatgaattgagtgcaatcatcgaatggtctcgaatggaatcatcttcaaatggaaaggaatggaatcatcgcatagaaacgaatggaattatcatcgaatggacccgaatggaatcaacatcaaacggaatcaaacggaattctcgaatggaatcgaagagaatcatcgaatggccacgaatggaatcatctaatggaatggaatggaataatccatggacacgaatgcaatcatcatcgaatagaatcgaatggaatcatcgaatggactcgaatggaataatcattgaacgcaatcgaatggaatcatcgagtggaatcgaatggaatcatgatcaaatggaatcgaatgtaatcatcatcaaatggaatccaaaatcaccatcatcaattggtactgaatggaatt

SEQ ID NO: 588259 - DNA, 577 bp, Homo sapiens
aaatggaattcaaaggaatcatcatcaaatggaaccgaatggaatcctcattgaatggaaatgaaaggagtcatcatctaatggaatcgcatggaatcatcatcaaatggaatcgaatggaatcatcatcaaatggaatcgaatggaatcattgaacggaattgaatggaatcgtcatcgaatgaattgagtgcaatcatcgaatggtctcgaatggaatmatcttcaaatggaaaggaatggaatcatcgcatagaaacgaatggaattatcatcgaatggacccgaatggaatcaacatcaaacggaatcaaacggaattctcgaatggaatcgaagagaatcatcgaatggccacgaatggaatcatctaatggaatggaatggaataatccatggacacgaatgcaatcatcatcgaatagaatcgaatggaatcatcgaatggactcgaatggaataatcattgaacgcaatcgaatggaatcatcgagtggaatcgaatggaatcatgatcaaatggaatcgaatgtaatcatcatcaaatggaatccaaaatcaccatcatcaattggta

SEQ ID NO: 588260 - DNA, 585 bp, Homo sapiens
ggaattcaaaggaatcatcatcaaatggaaccgaatggaatcctcattgaatggaaatgaaaggagtcatcatctaatggaatcgcatggaatcatcatcaaatggaatcgaatggaatcatcatcaaatggaatcgaatggaatcattgaacggaattgaatggaatcgtcatcgaatgaattgagtgcaatcatcgaatggtctcgaatggaatcatcttcaaatggaaaggaatggaatcatcgcatagaawcgaatggaattatcatcgaatggacccgaatggaatcaacatcaaacggaatcaaacggaattctcgaatggaatcgaagagaatcatcgaatggccacgaatggaatcatctaatggaatggaatggaataatccatggacacgaatgcaatcatcatcgaatagaatcgaatggaatcatcgaatggactcgaatggaataatcattgaacgcaatcgaatggaatcatcgagtggaatcgaatggaatcatgatcaaatggaatcgaatgtaatcatcatcaaatggaatccaaaatcaccatcatcaattggtactgaatggaatt

SEQ ID NO: 588261 - DNA, 585 bp, Homo sapiens
ggaattcaaaggaatcatcatcaaatggaaccgaatggaatcctcattgaatggaaatgaaaggagtcatcatctaatggaatcgcatggaatcatcatcaaatggaatcgaatggaatcatcatcaaatggaatcgaatggaatcattgaacggaattgaatggaatcgtcatcgaatgaattgagtgcaatcatcgaatggtctcgaatggaatcatcttcaaatggaaaggaatggaatcatcgcatagaaacgaatggaattatcatcgaatggacccgaatggaatcaacatcaaacggaatcaaacggaattmtcgaatggaatcgaagagaatcatcgaatggccacgaatggaatcatctaatggaatggaatggaataatccatggacacgaatgcaatcatcatcgaatagaatcgaatggaatcatcgaatggactcgaatggaataatcattgaacgcaatcgaatggaatcatcgagtggaatcgaatggaatcatgatcaaatggaatcgaatgtaatcatcatcaaatggaatccaaaatcaccatcatcaattggtactgaatggaatt

SEQ ID NO: 588262 - DNA, 577 bp, Homo sapiens
aaatggaattcaaaggaatcatcatcaaatggaaccgaatggaatcctcattgaatggaaatgaaaggagtcatcatctaatggaatcgcatggaatcatcatcaaatggaatcgaatggaatcatcatcaaatggaatcgaatggaatcattgaacggaattgaatggaatcgtcatcgaatgaattgagtgcaatcatcgaatggtctcgaatggaatcatcttcaaatggaaaggaatggaatcatcgcatagaaacgaatggaattatcatcgaatggacccgaatggaatcaacatcaaacggaatcaaacggaattctcraatggaatcgaagagaatcatcgaatggccacgaatggaatcatctaatggaatggaatggaataatccatggacacgaatgcaatcatcatcgaatagaatcgaatggaatcatcgaatggactcgaatggaataatcattgaacgcaatcgaatggaatcatcgagtggaatcgaatggaatcatgatcaaatggaatcgaatgtaatcatcatcaaatggaatccaaaatcaccatcatcaattggta

SEQ ID NO: 588263 - DNA, 577 bp, Homo sapiens
aaatggaattcaaaggaatcatcatcaaatggaaccgaatggaatcctcattgaatggaaatgaaaggagtcatcatctaatggaatcgcatggaatcatcatcaaatggaatcgaatggaatcatcatcaaatggaatcgaatggaatcattgaacggaattgaatggaatcgtcatcgaatgaattgagtgcaatcatcgaatggtctcgaatggaatcatcttcaaatggaaaggaatggaatcatcgcatagaaacgaatggaattatcatcgaatggacccgaatggaatcaacatcaaacggaatcaaacggaattctcgaatggaatcgaagagaatcatcgaatggccacgaatggaatcatctaatggaatggaatggaataatccatggacmcgaatgcaatcatcatcgaatagaatcgaatggaatcatcgaatggactcgaatggaataatcattgaacgcaatcgaatggaatcatcgagtggaatcgaatggaatcatgatcaaatggaatcgaatgtaatcatcatcaaatggaatccaaaatcaccatcatcaattggta

SEQ ID NO: 588264 - DNA, 363 bp, Homo sapiens
aaaaagtagattaatgtttgcaaggggctggggctggaagctggtagtgactgctaatgggcatgaggaatcttacagtgatggaaatgctstaaagttggattgtagagatggctgcacaactcagtaaatgtactaaaaatcttttaactttaagtcaaaacagatacattctatagtatgtaaattatatttcaacaaagctgttttaataaaaaaggaaaaatgtttactatatcggcttagaaacatgcctcatttctaggaaataaaagaggtgagagatgatttactttgagaaaagacattgtgtcacctatgaaattttattaggcacagagtcatattttaaggtagatagtt

SEQ ID NO: 588265 - DNA, 538 bp, Homo sapiens
tactgtataattccatttacatgaagcatccagaaaagataaatgtatagggacaaaaagtagattaatgtttgcaaggggctggggctggaagctggtagtgactgctaatgggcatgaggaatcttacagtgatggaaatgctctaaagttggattgtagagatggctgcacaactcagtaaatgtactaaaaatcttttaactttaagtcaaaacagatacattctatagtatgtaaattatatttcaacaaagctgttttaataaaaaaggaaaaatgtttactatatcggcttagaaacatgcctcatttctaggaaataaaagaggtgagagatgatttactttgagaaaagacattgtgtcacctatgaaattttattaggcacagagtcatattttaaggtagatagtwctgtactgctgaaatagtaattttaatgtctttatattgccacatgttaagaccataatgtagttataaatggaaatgtttacacctgaagtattttcaaattaaaatttaattaagtgat

SEQ ID NO: 588266 - DNA, 223 bp, Homo sapiens
tcttgcctcagcctccccccacagctgggactacaggcagtgytgccatggctggccaacttttaaattaggtaacccttcccaataactttcacgattagttaacatcttctaccttcctatttattttcccctttttaatacaaacacatgcccattaaataagcaaaataggaaaaaattttaatcacccaaagccctaccatctacttaccagagagac

SEQ ID NO: 588267 - DNA, 223 bp, Homo sapiens
tcttgcctcagcctccccccacagctgggactacaggcagtgttgccatggctggccaacttttaaattaggtaacccttcccaataactttcacgattagttaacatcttctacmttcctatttattttcccctttttaatacaaacacatgcccattaaataagcaaaataggaaaaaattttaatcacccaaagccctaccatctacttaccagagagac

SEQ ID NO: 588268 - DNA, 223 bp, Homo sapiens
tcttgcctcagcctccccccacagctgggactacaggcagtgttgccatggctggccaacttttaaattaggtaacccttcccaataactttcacgattagttaacatcttctaccttcctatttattttcccctttttaatacaaacayatgcccattaaataagcaaaataggaaaaaattttaatcacccaaagccctaccatctacttaccagagagac

SEQ ID NO: 588269 - DNA, 236 bp, Homo sapiens
acaatgatccactcttagatacttgaaagtcagataagaagacatctatcccttaactagttgttatgcactatatgtgaataaaaccatataatttaaatttcctcaattaattctcacagacagtacscaacctcacatcaccatgatcttttacataaatgtcaatgttctattgtaaatcgtgacagactatctacatagaatactcatgatttacaatttgagattgtcaa

SEQ ID NO: 588270 - DNA, 236 bp, Homo sapiens
acaatgatccactcttagatacttgaaagtcagataagaagacatctatcccttaactagttgttatgcactatatgtgaataaaaccatataatttaaatttcctcaattaattctcacagacagtacgcaacctcacatcaccatgatcttttacataaatgtcaatgttytattgtaaatcgtgacagactatctacatagaatactcatgatttacaatttgagattgtcaa

SEQ ID NO: 588271 - DNA, 465 bp, Homo sapiens
aatgtgggggtgagggactctgatccctgtgcwgttgaaaatctgagtataacttttgattccttcaccttagctactaatagcccacaattgactggaagccttcctgataacataaacagttgatgaacacctattttgtttgtgctgcattattatatactgtgttcgtacaataaaataagctagagaaatgaagctgttagaaaggaaatcatcaggaaaaacatattgacttttcataaagcataagtagtcctgacaaaggtcttcatgatcttcaggttgattaggctgaggaggaagaggagaggtggatcttgctgtctctctgttgcagaggcagaagaaaatctgcatataagtgaatccctgcagttgaaacccttgctgttcaagggtgaactgtattacatattgatttgtgtcactaagaaagtaactatctttagaaccgggaactca

SEQ ID NO: 588272 - DNA, 465 bp, Homo sapiens
aatgtgggggtgagggactctgatccctgtgcagttgaaaatctgagtataacttttgattccttcaccttagctactaatagcccacaattgactggaagccttcctgataacataaacagttgatgaacamctattttgtttgtgctgcattattatatactgtgttcgtacaataaaataagctagagaaatgaagctgttagaaaggaaatcatcaggaaaaacatattgacttttcataaagcataagtagtcctgacaaaggtcttcatgatcttcaggttgattaggctgaggaggaagaggagaggtggatcttgctgtctctctgttgcagaggcagaagaaaatctgcatataagtgaatccctgcagttgaaacccttgctgttcaagggtgaactgtattacatattgatttgtgtcactaagaaagtaactatctttagaaccgggaactca

SEQ ID NO: 588273 - DNA, 465 bp, Homo sapiens
aatgtgggggtgagggactctgatccctgtgcagttgaaaatctgagtataacttttgattccttcaccttagctactaatagcccacaattgactggaagccttcctgataacataaacagttgatgaacacctattttgtttgtgctgcattattatatactgtgttcgtacaataaaataagctagagaaatgaagctgttagaaaggaartcatcaggaaaaacatattgacttttcataaagcataagtagtcctgacaaaggtcttcatgatcttcaggttgattaggctgaggaggaagaggagaggtggatcttgctgtctctctgttgcagaggcagaagaaaatctgcatataagtgaatccctgcagttgaaacccttgctgttcaagggtgaactgtattacatattgatttgtgtcactaagaaagtaactatctttagaaccgggaactca

SEQ ID NO: 588274 - DNA, 465 bp, Homo sapiens
aatgtgggggtgagggactctgatccctgtgcagttgaaaatctgagtataacttttgattccttcaccttagctactaatagcccacaattgactggaagccttcctgataacataaacagttgatgaacacctattttgtttgtgctgcattattatatactgtgttcgtacaataaaataagctagagaaatgaagctgttagaaaggaaatcatcaggaaaaacatattgacttttcataaagcatwagtagtcctgacaaaggtcttcatgatcttcaggttgattaggctgaggaggaagaggagaggtggatcttgctgtctctctgttgcagaggcagaagaaaatctgcatataagtgaatccctgcagttgaaacccttgctgttcaagggtgaactgtattacatattgatttgtgtcactaagaaagtaactatctttagaaccgggaactca

SEQ ID NO: 588275 - DNA, 589 bp, Homo sapiens
tgggggagggggagggaaagcattaggagatatacctaacataaatgacgagttaatgggtgcagcacaccaacatggcacatgtatacatatgtaacaaacctgcacattatggacatgtaccttagaacttaaagtataattaaaaaatgcaaatattgttaaggtgcttaataygaaaacaaattacgataaatgtgttcactgtaatactacctatcatttataataaataaatgcctgatacacacaagaaaaagctaaaatatctaagtatttgtgttgagtaaaataagctaaaccagtaagtatactatgttatttcattgttataaatcctgataaataaaaatgcatctaacataaaataatgaagatcagtagttgcccgggaaactggtagaagaagggaaggggaaagtagtagtaatatagctgaacagaggaaatgttgagaagaattcccatgtacactttcttgataatgatgacagttctatcatgtttattaattgtacattttaaatatgtgaaatgcattatctttcaaataagcctcataaattgtattacaagcaaacaaatggaa

SEQ ID NO: 588276 - DNA, 340 bp, Homo sapiens
tgcaaggccaacgtgggtggattgcttgagttcaggagtttgagaccagcctgggcaacataatgagaacacatctctgctcaaaaaataccaaaaggagtcaggcatgatggtgtgtgcctgtagtcccagctgcttgggaagctgatgtgggaggatcacttgagcctgagaggtggatactgcagtgagccaagatcatgccactacactgcagcatgggcaacagagcaagaccctgactccccaaaaatttcaatttaaaatgtgagaatgaagagagatacaaacaaaaaacaarcctaattggtcaatgaaatatgagcttaagccaagaaag

SEQ ID NO: 588277 - DNA, 541 bp, Homo sapiens
gtggcctgccccttcctctgggggcatcatcccagggaggtttcaaatctctgttgtacagaaaccaccagtgggggttgctgtagaccctggttgggaggtcctcccagtgaggagaaagaggactggggacccgcttaaaagaggagtctggtcacattttcatagagcagctaagctgtgctgggggaccacttccacccccagccagcttggaccctccacagcccaaagtctgaaacagctgttgcccaaataacaaagatagtagcccacctttccccctgggagctccacaccagagaggtttcaaatctctgttggccagaaaacagcaacaggggtgtctggagaccctggtcgggaggtcctgctcagtgagaaggaacaggatcagggacttactttaaaaagtggtctggctggcaaggcatggtggctcatgcctgtaattccaacactttgggaggccaagacrggcagatcatgaggtcaggagattaagaccatcctggctaacacagtgaaatcctgtctgtac

SEQ ID NO: 588278 - DNA, 264 bp, Homo sapiens
gtgattttaaatgataaaatccacaagtctttagctagaataagaaaaagagatgattcaaataaataaagtcagaaacaaaagaggagccattgcaactaatatcacagaaatacaaaggatcayaagagactactatgaccaattatacaacaaattggataaactagaagaaattgacaaatttcttcacatatatttaggttagtgcaaaagtaattgcggtttttgccattgccatgcaacctaccaagactgaatcat

SEQ ID NO: 588279 - DNA, 604 bp, Homo sapiens
tgaacaataaggaatgtcattgtacaactctatagtttttatttagaaaaatgagtaaaactttcagtttcatgatggcaaaagaaagatacttttgctcttgttacttctttcaaaattccataaccacaaagatgataggaaacaaaaacacaaactccagtttcaatgaaataaagaagtgactgcagtctaacatctgaagatgaaagtagttggaggaaacagcagagagaagaaaagtcaagccagtgactacaagaagcaagctgatttgtccctggaaatgtttaagaaattgagatactggatactttagaagctaaaggtaagggaagttgctaaaatgaatgggtatttagactttccatcattggtgagctgcagctggcttataccggcttgcaagagttattgttaaygtttctttccaactttgcagtgacctcacattcttagcttgaaatcaatgctagtgaaagtatttacacaacacaaactgcacatgctacaaatcagagttttgctttgttttgtttcagagagctagttgttaaacatttaccagcacaccactgctcccaagttgtaacctctaccaccc

SEQ ID NO: 588280 - DNA, 609 bp, Homo sapiens
gcgggggttgcagtgggctgagatcataccactgcactccagcctgggtgacagagcgagactcagtctaaaaggaaaaaaaaaaaaaaagaaatcaacttggtctttttaaacatcataaatgtctaayctgttttcattcagtacacaggaaatatgcattacatatggagacaatggaccttaacagcggttttaagaagtaacagtatgttacttctgtttagagatgtgggctggtaagtaattcaggaatttaaatgataagcagatggtttgtttccaaattgagagcagtcatctggctctaaagaagagtgtacttttgtaaatatatgttctgtcatgttttacccaatgtgacatgacgtaacaacatactatgttatgtcttgctttgcttcttttaacataatgaaaattaacaaaagaaaagcatgaggttttttcccccatcatgctatcttcttacacttacgtcaaagcaaacaaaataataaaaaaaaaatgctgagatttagagttatacttcaactatgtttcaaaacaagatagtgtccctcttcctatcagagctgaactttctcaaccattaaatggggataatac

SEQ ID NO: 588281 - DNA, 609 bp, Homo sapiens
gcgggggttgcagtgggctgagatcataccactgcactccagcctgggtgacagagcgagactcagtctaaaaggaaaaaaaaaaaaaaagaaatcaacttggtctttttaaacatcataaatgtctaacctgttttcattcagtacacaggaaatatgcattacatatggagacaatggaccttaacagcggttttaagaagtaacagtatgttacttctgtttagagatgtgggctggtaagtaattcaggaatttaaatgataagcagatggtttgtttccaaattgagagcagtcatctggctctaaagaagagtgtacttttgtaaatatatgttctgtcatgttttacccaatgtgacatgacgtaacaacatactatgttatgtcttgctttgcttcttttaacataatgaaaattaacaaaagaaaagcatgaggttttttcccccatcatgctatyttcttacacttacgtcaaagcaaacaaaataataaaaaaaaaatgctgagatttagagttatacttcaactatgtttcaaaacaagatagtgtccctcttcctatcagagctgaactttctcaaccattaaatggggataatac

SEQ ID NO: 588282 - DNA, 431 bp, Homo sapiens
aatcaaacataggtttggtcttttcatatagtcccatatttcttggaggcttccttcgttcctttttagtcttttttttttctaatcttgtcttcgttgatcttcagtctctgatatcctttttccacttgatcagtttggctattgatatgtgtttatgcttcacaaagttctcatgctgtgtttttcagctccatcasgtcatttattttcttctctaaactggttattctagttagcaattcctctaaccttttttcatggtttttagcttccttgcattgggttagaacatgcttctttacctcagaggagtttgttattacccaccttctgaagcctatttctgtcattcctcaaacttattctctgtccagttttgtttccttctggccaggagttgtgatcctttggaggagaagaggcattct

SEQ ID NO: 588283 - DNA, 431 bp, Homo sapiens
aatcaaacataggtttggtcttttcatatagtcccatatttcttggaggcttccttcgttcctttttagtcttttttttttctaatcttgtcttcgttgatcttcagtctctgatatcctttttccacttgatcagtttggctattgatatgtgtttatgcttcacaaagttctcatgctgtgtttttcagctccatcaggtcatttattttcttctctaaactggttattctagttagcaattcctctaaccttttttcatggttyttagcttccttgcattgggttagaacatgcttctttacctcagaggagtttgttattacccaccttctgaagcctatttctgtcattcctcaaacttattctctgtccagttttgtttccttctggccaggagttgtgatcctttggaggagaagaggcattct

SEQ ID NO: 588284 - DNA, 605 bp, Homo sapiens
ctactcaaccaaattctgctgatcatgtttttgtttctttgcatamagtaaatataacaagggaagtgcaataatagaaaaaactgacttgtacaaacaaacatgagaatactgttagccaaacagggtaaagttataacatggtgaaaacttagttttgataattgcaagtcttagttgagcagaagtcccactgagattgatgagacactggccttctagaaatgcagactaaggcttagttgatcctgtcaaagaaaattggattatcacttttgcaataagacctctgatttatctatcatattttaatgggaagaaaatattaagataccttacacatgtctattgccattgaaatatactttctattaacatgattcacttctgccaatatccccatatcatgtaggaaaaaaaagaattctgaccactctagaatgttcctgataactttttcaagtctattcttttattcttctgttgttggttttcaaagtgtatacttagtaagctctacataatctattagaatatagcctagaagagttagaatgatttttcctttttaagcagcaattcaaatatagcagtgttaaaaagca

SEQ ID NO: 588285 - DNA, 605 bp, Homo sapiens
ctactcaaccaaattctgctgatcatgtttttgtttctttgcataaagtaaatataacaagggaagtgcaataatagaaaaaactgacttgtasaaacaaacatgagaatactgttagccaaacagggtaaagttataacatggtgaaaacttagttttgataattgcaagtcttagttgagcagaagtcccactgagattgatgagacactggccttctagaaatgcagactaaggcttagttgatcctgtcaaagaaaattggattatcacttttgcaataagacctctgatttatctatcatattttaatgggaagaaaatattaagataccttacacatgtctattgccattgaaatatactttctattaacatgattcacttctgccaatatccccatatcatgtaggaaaaaaaagaattctgaccactctagaatgttcctgataactttttcaagtctattcttttattcttctgttgttggttttcaaagtgtatacttagtaagctctacataatctattagaatatagcctagaagagttagaatgatttttcctttttaagcagcaattcaaatatagcagtgttaaaaagca

SEQ ID NO: 588286 - DNA, 605 bp, Homo sapiens
ctactcaaccaaattctgctgatcatgtttttgtttctttgcataaagtaaatataacaagggaagtgcaataatagaaaaaactgacttgtacaaacaaacatgagaatactgttagccaaacagggtaaagttataacatggtgaaaacttagttttgataattgcaagtcttagttgagcagaagtcccactgagattgatgagacactggccttctagaaatgcagactaaggcttagttgatcctgtcaaagaaaattggattatcacttttgcaataagacctctgatttatctatcatattttaatgggaagaaaatattaagataccttacacatgtctattgccaytgaaatatactttctattaacatgattcacttctgccaatatccccatatcatgtaggaaaaaaaagaattctgaccactctagaatgttcctgataactttttcaagtctattcttttattcttctgttgttggttttcaaagtgtatacttagtaagctctacataatctattagaatatagcctagaagagttagaatgatttttcctttttaagcagcaattcaaatatagcagtgttaaaaagca

SEQ ID NO: 588287 - DNA, 494 bp, Homo sapiens
ctctgtcacccaggctggagtgcagatcacaactcactgcagcctcaacttacttgggctcaggtgatcctccaacctcagcctactgagtagctgggactacaggcaaatgccaccacactcggcgaatttttggtattttttcatagagatgggattttgccatgatgcccaggctcgtctcaaactgctgggcatcagctatctacccacctcggtctcccaaaatgctggggttacaggcatgtattagtctgttttcatgctgctgataaagacatacctgagactgggaagaaaaagagttttagttggactcacagtttcacatggctggggaggtctcagaatcatggcaggaggtgaaaggcacttcttacatggcagwgacaagagaaaaatgaggaagaagcaaaagtggaaacctctgataaacctatccaatctcatgagacttatttactatcacaagaatagcatggggaagactggcc

SEQ ID NO: 588288 - DNA, 494 bp, Homo sapiens
ctctgtcacccaggctggagtgcagatcacaactcactgcagcctcaacttacttgggctcaggtgatcctccaacctcagcctactgagtagctgggactacaggcaaatgccaccacactcggcgaatttttggtattttttcatagagatgggattttgccatgatgcccaggctcgtctcaaactgctgggcatcagctatctacccacctcggtctcccaaaatgctggggttacaggcatgtattagtctgttttcatgctgctgataaagacatacctgagactgggaagaaaaagagttttagttggactcacagtttcacatggctggggaggtctcagaatcatggcaggaggtgaaaggcacttcttacatggcagtgrcaagagaaaaatgaggaagaagcaaaagtggaaacctctgataaacctatccaatctcatgagacttatttactatcacaagaatagcatggggaagactggcc

SEQ ID NO: 588289 - DNA, 606 bp, Homo sapiens
ccaaaaaactttataaaagaggtatttaaattgccaataaacatgaaaaaatatgtcaacgtttggtttcattccaattgcttttggtgtcttcatgaaatctttgccgggtcctatgtccagaatggtatttcctaagattatcttccagggtccttatagttttattttttacatttaagtttttaatccattttgagttggttattgtatatggtgtacrgaaggggtccactttcaatcttctgcatatggctagccagttatcccagcaccatttattgaatggggaatccttaatccattgtttatatttgtcaattttgtcaaggatcagatggttgtaggtagtatagtttgaaatcaggcaacatgaggcctccagttttgtgagttgttttttttgtttgtttttgttttgttgttgttgttgctgctgcttaggattgccttagctatttgggctctttttttggtttctacatgaattttaaagtagttttttttttagttctgtaaagaatataattggtactttgataaaaatagtggtgaatctgtaaattgcttaattgctttgggcaggatggcatattaacaatattg

SEQ ID NO: 588290 - DNA, 405 bp, Homo sapiens
tcactggggttcaggagctttttgtgaatgaacttggatcttggccatgaaaaagaaccagatatctaccaagatatgtctgatgaaagaggctgtgcgaacagaagttaaattacagaggaggacaaagaaactcctgaaagaaaaattgtgccatctaggtttaaggagtctggctgggagggtcagatgttatgaggttctgagatttaggaagaagctgcagttcaggatccattagaaagcttctcttaaacaccccctgamtccaacgcctctttgtgcttctccaaaatctcaaaaagagggaattatgttcttagaggccctctggaagaactggacattaggtaagaaggaatggggagagacaagactatgtgctgcaagtagggatctatcagc

SEQ ID NO: 588291 - DNA, 442 bp, Homo sapiens
  misc_feature 401, 402, 403, 404, 405, 406, 407, 408, 409, 410, 411, 412,413, 414, 415, 416, 417, 418, 419, 420, 421, 422, 423, 424,425, 426, 427, 428, 429, 430, 431, 432, 433, 434, 435, 436,437, 438, 439, 440, 441, 442: n = A,T,C or G
cacacgtctagctatgcatgtcagcaccgcctaccttgtcctgccactattttccatcttcccgaatagaccaccatgcagcccgagtgtatgctgggcattcgaccaccaactttgctggggtgatcagacccaacaccaggtcgtcggggtgacgaagtccagcggagtcaaaggattgagcggggtgaggggggaaaaggtggtacgccagggggccatcactattgtatggaggctgcgaaggccccgagctctgggagcccatggtatttattggtaatgcaacgaagaaacaggtggtgagaacgtggaggtcaaaagggcacattgcgttaagcacatgatttacagctgtgatggcttagcatttatraggaacatgttctgctacttgagannnnnnnnnnnnnnnnnnnnnnnnnnnnnnnnnnnnnnnnnn

SEQ ID NO: 588292 - DNA, 617 bp, Homo sapiens
aaaataaactattttggttgaataatttgctttttattacttattgtttccaatagggagacccacctgcagctgtgcactgggtttcactgggccaaactgtggtaagacagtctgtgaggatttttgtcaaaatggaggaacctgcattgtgactgctggaaaccagccttactgccactgccagccggaatacaccggagacagatgtcagtactgtaagtaaaagcagcacccagaagccagctttgatgtttatgttaatcttctgatttcctgtatccactccttccattatcttaattttagccatcctctatttttcaggttcagtctctgtcactccaacaattatttacccattcttcacctttctcttattgtaaagattttatctttcttcctccctcagctttgattgcatggtccattattataaccattccctgtgtacaccctcagctcccttcctctctcttcccctcttttgcacttcttagcaaatcataaccatmgttaaatccaattctccatctctcctgaattgacatcccataggcgaatgcaactgaagaaaaactcataattatattggctggcctcatttcagttctatc

SEQ ID NO: 588293 - DNA, 418 bp, Homo sapiens
acaatgcatgcaacacaatagamcacagaactctccaagcagagcaccacccacacaccatctcagccccccttccacagaccccccagcttcacccacctcatcctgctggttgatgtcaccaggcccacggttgagctgctcctgtaggctggacaccactgcattgttgccaggcactcggtaaaagcctgtggactccagccctcgtgcctccacaatgtgacagcatgcagccacgattaaggggacatgctggggacacaggggaggggtgttaggggggacaggggccagaggagctggggaggccaagaaggggacaatgcaaggcccagagctgctgccaggaacccttggggggaacaaaaggcccttgctgcctccagtctgggagctacaaatgacaccaaagcct

SEQ ID NO: 588294 - DNA, 532 bp, Homo sapiens
ccatcatgcctggctaatttttgtatttttagtatcgacgrggtttcaccatgttggccagtgtggtctcgatttcctgacttcgtgatctgcacacctcggcctcccaaagtgctgggattacaggcatgagccaccacgcccggcctagttttattaatgtctgtccataccagcaactacatacctatggggacattaatttacatctgcagacatatgtgtaaatacacaagcctatacatacatgtgtagtcatttatatttaacattataacaaaataattctaaaatattttctaaagaattaaacttaatgatgagctaaatataaattagagtaatctataattgatttcaacagttctctatagtttacataaatggatgtctatttctaagctttaacatagtgtatttgtcattttaaaatagtcaagaaaaaattacaaatgttcttgtcacaaaaaagataaggatttgacgatttgaggtaatatatatgtgaattaactcgattcaattattccat

SEQ ID NO: 588295 - DNA, 532 bp, Homo sapiens
ccatcatgcctggctaatttttgtatttttagtatcgacggggtttcaccatgttggccagtgtggtctcgatttcctgacttcgtgatctgcacacctcggcctcccaaagtgctgggattacaggcatgagccaccacgcccggcctagttttattaatgtctgtccataccagcaactacatacctatggggacattaatttacatctgcagacatatgtgtaaatacacaagcctatacatacatgtgtagtcatttatatttaacattataacaaaataattctaaaatattttctaaagaattaaacttaatgatgagctaaatataaattagagtaatctataattgatttcaacagttctctatagtttacataaatggatgtctatttctaagctttaacatagtgtatttgtcattttaaaatagtcaagaaaaaattacaaatgttcttgtcacawaaaagataaggatttgacgatttgaggtaatatatatgtgaattaactcgattcaattattccat

SEQ ID NO: 588296 - DNA, 572 bp, Homo sapiens
tttccattttatgaatattataggcaaagctgtttcaaatatattagtgtaggttttcctatattgtttcatttttgttaagaaaatatgaagtatgtatttcttttttatttttgattactatttatttctattttaaattttactttaagttctgggatacatgtgctgaacatgtaggtttcttacataagtacacatgtgccatggtggtttgctgcacctatcaatctgtcatctargtttgaagcacctcgtgcattaggtatttgtcctaatgctctccctcccctttcctaatgctttttctccccgacacatcccagtgtgtcatgttcccctccttgtgtccatgtgttctcattgttcaactcccacttatgagtgagaacatgtggcgtttggttttctgttcctgtgttagtttgctgaggatgatggcttccagcttcatccatgtccctgcaaaggacctgaaatcattcttttttatggctgcatagtagttcatggtgtacatatgccacattttttcatccagtctatcattgatggacatttgagttggttcc

SEQ ID NO: 588297 - DNA, 572 bp, Homo sapiens
tttccattttatgaatattataggcaaagctgtttcaaatatattagtgtaggttttcctatattgtttcatttttgttaagaaaatatgaagtatgtatttcttttttatttttgattactatttatttctattttaaattttactttaagttctgggatacatgtgctgaacatgtaggtttcttacataagtacacatgtgccatggtggtttgctgcacctatcaatctgtcatctaggtttgaagcacctcgtgcattargtatttgtcctaatgctctccctcccctttcctaatgctttttctccccgacacatcccagtgtgtcatgttcccctccttgtgtccatgtgttctcattgttcaactcccacttatgagtgagaacatgtggcgtttggttttctgttcctgtgttagtttgctgaggatgatggcttccagcttcatccatgtccctgcaaaggacctgaaatcattcttttttatggctgcatagtagttcatggtgtacatatgccacattttttcatccagtctatcattgatggacatttgagttggttcc

SEQ ID NO: 588298 - DNA, 430 bp, Homo sapiens
gtgggtatcactggaggaacctgaactttttgtgaacaggagaagctgacttcaactctgatagccgtggcaaccatacacttgaaayccaaccctgactagattcatagaaatgtggttaataaaggcccagcagaatgtaatgtgtgatcgtctccatgaataaaataataaacacaagaaaataaattacaagtgaaatgcaaactggaattctacatgcattacattttcattaaaagtgaaaggcaaataaaattctgtcattaaaaaaagatcttgagacaatttattgtcagcacattcatgcttcagtgcacattttaacaaactttctctgctagtagccatgtgatatacattcaaaacataaacctataggaagaaattaagactacaaaatgagaaaatcaagatgaagtgcagtttt

SEQ ID NO: 588299 - DNA, 430 bp, Homo sapiens
gtgggtatcactggaggaacctgaactttttgtgaacaggagaagctgacttcaactctgatagccgtggcaaccatacacttgaaatccaaccctgactagrttcatagaaatgtggttaataaaggcccagcagaatgtaatgtgtgatcgtctccatgaataaaataataaacacaagaaaataaattacaagtgaaatgcaaactggaattctacatgcattacattttcattaaaagtgaaaggcaaataaaattctgtcattaaaaaaagatcttgagacaatttattgtcagcacattcatgcttcagtgcacattttaacaaactttctctgctagtagccatgtgatatacattcaaaacataaacctataggaagaaattaagactacaaaatgagaaaatcaagatgaagtgcagtttt

SEQ ID NO: 588300 - DNA, 430 bp, Homo sapiens
gtgggtatcactggaggaacctgaactttttgtgaacaggagaagctgacttcaactctgatagccgtggcaaccatacacttgaaatccaaccctgactagattcatagaaatgtggttaataaaggcccagcagaatgtaatgtgtgatcgtctccatgaataaaataataaacacaagaaaataaattacaagtgaaatgcaaactggaattctacrtgcattacattttcattaaaagtgaaaggcaaataaaattctgtcattaaaaaaagatcttgagacaatttattgtcagcacattcatgcttcagtgcacattttaacaaactttctctgctagtagccatgtgatatacattcaaaacataaacctataggaagaaattaagactacaaaatgagaaaatcaagatgaagtgcagtttt

SEQ ID NO: 588301 - DNA, 259 bp, Homo sapiens
ttcacacacacacacacacacacacacactccatttaaaaaaaatgtatgtgagatgatagatacacaaattaccttgatcatgatgagcattttacaatgtgtatctgatatggtttgcaacttgtcctggcctgaatctcgtgttgtattataatcctcaatcctgaagctgggacccagtgggagaggcttgggtcatggggtgggtctttcatgaatggtttagyaccgactcttcgtgctgttctcataatatt

SEQ ID NO: 588302 - DNA, 562 bp, Homo sapiens
attcctcttgctcttttacagacatatttttgtttttctcctcttttcttctaccatttctttataaaagtactgatgttttcatatttctttagactagtttttattctctagaatttataagaatgaaacaatatagtatgtactcttatctatttggcttatttttctcagtagaaataccgagaattaaaccttttatgttgtattgtttattttttaataaataataggtagcatttcagcaaacaaatgtagcataatttgtttttctaagttgctaattggtattcaaacttttcattactttgggtcttactaataaatctgctactcaatttggtaatgtacatagatgataaattatatataaaatatattatttttgcaacaataacacrtaaacaagagaatgtgctatttggcaaattttctttagcatgtcaaataattgaagttatgaaacaaaaaacaaacttgtaaaccaaagagtatctgagactaatctcaatagatttaggaagttcattttcgaagattaaggacatgcctgtgacaccgc

SEQ ID NO: 588303 - DNA, 349 bp, Homo sapiens
tttgttatcagtcaatccattattaacaaaaactcatagtttaacaataaattgtgttctgttctacctgtataccattctggaccagaatttgagatattaggaacttctttttatagtttttctgattttcctaatgastgtgactacatgtataaataaatgaggaaagagacacttgggaggcaaactccaaagtatgacccatgacttccttttctcatttctgttctacataataaagttctgattgggatagacaaaaagtgcttcagacacttcaaaatatcagctggagctgaagagaccagaattagaaacacaacatccagtagaaccaaagtctcaa

SEQ ID NO: 588304 - DNA, 558 bp, Homo sapiens
ttttattttccccaggctttgctcttggagacaaatgttaatttttatagcttcaaattctatactcaatattaatctttcaaagttctatctagcaaaaattataagaggtgtgagaaatattaatttttagagtgcctaacatagctctcgagtctgtaagattcttaatgatgctaaataagcagaagtacttatttaaaaactgagattggaatattaaaattttggcatttgggcttcacttaaaaacaaaatsttttttacttattttgttattgattatttggtcattttaagatgtagcaaataaaatgcttggatatttttcttcaaagcatgctttttctttttttgaaatatcttctcttacctgatttcatgttctagtacagtaaagaatgtgttgttctttcctaaatggcttttttgaacataaatattgtgcaattgcaacaaatatttattaataagccagatttttaaaaactagaagaatttaagtacacaactattcattctttcttaataatgaataaaaaagccatgacctttatt

SEQ ID NO: 588305 - DNA, 558 bp, Homo sapiens
ttttattttccccaggctttgctcttggagacaaatgttaatttttatagcttcaaattctatactcaatattaatctttcaaagttctatctagcaaaaattataagaggtgtgagaaatattaatttttagagtgcctaacatagctctcgagtctgtaagattcttaatgatgctaaataagcagaagtacttatttaaaaactgagattggaatattaaaattttggcatttgggcttcacttaaaaacaaaatgttttttacttattttgttattgattatttggtcattttaagatgtagcaaataaaatgcttggatatttttcttcaaagcatgctttttctttttttgaaatatcttctcttacctgatttcatgttctagtacagtaaagaatgtgttgttctttcctaaatggcttttttgaacataaatattgtgcaattgcaacaaatatttattaataagccagatttttaaaaamtagaagaatttaagtacacaactattcattctttcttaataatgaataaaaaagccatgacctttatt

SEQ ID NO: 588306 - DNA, 601 bp, Homo sapiens
ttctgttcttttacagttctatagtgtggtctttgcaatgtattggggacatctggtatcccctaggggatatttgtgtctcattctgctacatacttagaaggaaaccaagatatctgtttcaagttgtagcatatctggctgaacatgtaaaggagttaagatgatcctagagcatgggccactgtgtctgtcatatgtcatacagtgcaccttaccagccccagcacagagcaatctcccaagaagctccacttccagacagagccattggttagacttccctccctctccttccttccttccttcctgtaatrtacactaaggctatgtattagtctgttctcacactgctcttaggttggtgcaaaagtaattgcgggttttgccattgatgtaaagaattacctgagactgagtaatttttgaagaaaagaggtttaattgaatcacagttccataggctatacaggaggcatgacaggggggacctcaggaaatgtacaatcatggtggaagggtgaaggggaagcaagcacatcttcatgtggcagcaggagagagggagctaaggggaaagtactacacacctttaaacaac

SEQ ID NO: 588307 - DNA, 601 bp, Homo sapiens
ttctgttcttttacagttctatagtgtggtctttgcaatgtattggggacatctggtatcccctaggggatatttgtgtctcattctgctacatacttagaaggaaaccaagatatctgtttcaagttgtagcatatctggctgaacatgtaaaggagttaagatgatcctagagcatgggccactgtgtctgtcatatgtcatacagtgcaccttaccagccccagcacagagcaatctcccaagaagctccacttccagacagagccattggttagacttccctccctctccttccttccttccttcctgtaatatacactaaggctatgtattagtctgttctcacactgctcttaggttggtgcaaaagtaattgcgggttttgccattgatgtaaagaattacctgagactgagtaatttttgaagaaaagaggtttaattgaatcacagttccataggctatacaggaggcatgacaggggggacctcaggaaaygtacaatcatggtggaagggtgaaggggaagcaagcacatcttcatgtggcagcaggagagagggagctaaggggaaagtactacacacctttaaacaac

SEQ ID NO: 588308 - DNA, 394 bp, Homo sapiens
acaattccagaaatatagataatcaggagtcaatggatgcatatgaagggacagtaaaccaaccctaggacctgtagctcatttgaaaccccatgatacagctggcaaaaccaaacaggctatactttctgtgaacatgttgactgagaaaaattggaaactaaaaggaaatccatttgtctctaggattctgggtgtaaaaaaaattacagttacaatattagtctgtactaaaactgaaaatcacaatactgctttccaacaaatctaggtttcaaatttatattactcatgtgttcatggaaaatccaagctaagaaatgtaatttatctggtctcaaatagaagcacccccctggcaatgwctgaagataaaatgtctgagaattttcag

SEQ ID NO: 588309 - DNA, 616 bp, Homo sapiens
gctgctcctgcagcaaacttctgcctggacatccaggcatttccatacatcctctgaaatctatttggaggttctcaaacgtcagtacttgacttctgtgcacctgcagtctcaacaccaagtggaatctgccaaggcttgggacttgcaccctctgaagtcatgggccatgcttggccccttttagtcatggctggagcagctgggatgcagggcatgagtctctagactgcacacagcatgacaacgctgggcctggcccatgaaatcatgttttcctcctagacctccgggtgtgtgatggtaggggctgctgtgaagacctctgagatgccctggagacattttccccatagtcttggggattaacatttggctccttgttatttatgcaaatttctgcagcgagcttgaatttcttctcagaaaatgayattttctttcctattgcattgtcaggctgcaaattttccaaacttctatgctctgcttaccttataaaactgaatgcgattaacaacatccaagtcgcctcttgaatgctttgctgcttagaaatttcttctagcagataccctaaatcatctctctcaagttcaaagttccacaaaactct

SEQ ID NO: 588310 - DNA, 616 bp, Homo sapiens
gctgctcctgcagcaaacttctgcctggacatccaggcatttccatacatcctctgaaatctatttggaggttctcaaacgtcagtacttgacttctgtgcacctgcagtctcaacaccaagtggaatctgccaaggcttgggacttgcaccctctgaagtcatgggccatgcttggccccttttagtcatggctggagcagctgggatgcagggcatgagtctctagactgcacacagcatgacaacgctgggcctggcccatgaaatcatgttttcctcctagacctccgggtgtgtgatggtaggggctgctgtgaagacctctgagatgccctggagacattttccccatagtcttggggattaacatttggctccttgttatttatgcaaatttctgcagcgagcttgaatttcttctcagaaaatgacattttctttcctattgcattgtcaggctgcaaattttccaaacttctatgctctgcttaccttataaaactgaatgcsattaacaacatccaagtcgcctcttgaatgctttgctgcttagaaatttcttctagcagataccctaaatcatctctctcaagttcaaagttccacaaaactct

SEQ ID NO: 588311 - DNA, 550 bp, Homo sapiens
gggccagtgtagtcccagctactcgggaggctgaggcaggaggatcgcctgagctggggagatcaaggctgcagtgagccatgactgcatcactgcactccagcttctgttacagagcgagaccctgtctcaaaaaaaaaagaaagaaaaaaatgaactttacatgtaaaagagagaggttcttacacgtaaaggaaagagaactggaactcatgaataatgccatcaatcattctttttgtttgcatatctaaataaaaatatacttactaaatattaagaaaaattgttggaaatgtgatttactatctaagaccacagtayctgaggaatcatatatttaatcctgttttacttgctacaagtttcctaatgactatttttgttttatcaatcacttcaagagcaaggtataccttttcatgctgctcacaatttgttctaaattccatgcagattcatcatgctgaatttgtggcaatcattttcataaacaagagactgacattttaccacaaaatttctcctagggatttacagttagtcagca

SEQ ID NO: 588312 - DNA, 534 bp, Homo sapiens
gggcctgtgttattaatgggattttcaaaatagtgaacctttttcccagtgcattcctctcagggcgatggagagctataatgttgacatgggtaattggaggcttaagtatatccttcatataaatctacatgtaagtaaattaaaaaataaatacatgagataaattgacatatttgtatatggagaaattatccccaggaatgtcaatatgcaatctatttcatctctgccattgatctgctcttatttggggtatagagagggaagagaatagagaaatggggctgttctgaccctgagtctattttctaaaagcagcatagtcaatattaaacttttaaactagtacattgacacgatggttgtctaagtctacagtgaaaaatatcrgggaagcattgtgaatgtaagggtcacattcaatatgcaactgagatgtaatggtcaggctgtgagatacacagaagggagcctgggactgacattttttaatgctcttgctcccacatttaatcactggtgcatgcttcc

SEQ ID NO: 588313 - DNA, 650 bp, Homo sapiens
caatttaccccttagcctgatttaacaatttaaacaggccttttaggtaatgctcatttttaggggataattgtttagtcaatcttgtatgcaccccaccaccactwtctccactttcaccactgcttctcccaagatcagatttggtagatgaaagaggtgggctaatgtgagctcaggagacagagtgaaggagtgctcaggaatgtgcacagtgctccaggtcctcactagcaccatctgtaaaacagctgtcctggtgctcactgggtgaccgttggctccatccaagccacatgtattcagtaagcatctaccactggcattctgcagctggtgacaccaaagtctatttcttctcagcctggtaagaaccatagcagcctccccactcccttggcttcctctggtctttgctggattgcagactccactgagcatctgccacatatttcctctttataaattttctttataaattacccaacctcaagtatttccttattgcaacacaaacacatatatatatatttatatacacataaacacacatatatacaaatataggaatacatccatacaaatatatatggccctccggcctaggtgaccaacacttaagtgtttggtgcagggccaacccacccact

SEQ ID NO: 588314 - DNA, 650 bp, Homo sapiens
caatttaccccttagcctgatttaacaatttaaacaggccttttaggtaatgctcatttttaggggataattgtttagtcaatcttgtatgcaccccaccaccactttctccactttcaccactgcttctcccaagatcagatttggtagatgaaagaggtgggctaatgtgagctcaggagacagagtgaaggagtgctcaggaatgtgcacagtgctccaggtcctcactagcaccatctgtaaaacagctgtcctggtgctcactgggtgaccgttggctccatccaagccacatgtattcagtaagcatctaccactggcattctgcagctggtgacaccaaagtctatttcttctcagcctggtaagaaccatagcagcctccccactcccttggcttcctctggtctttgctggattgcagactccactgagcatctgccacatatttcctctttataaattttctttataaattacccaacctcaagtatttccttattgcaacacaaacacatayatatatatttatatacacataaacacacatatatacaaatataggaatacatccatacaaatatatatggccctccggcctaggtgaccaacacttaagtgtttggtgcagggccaacccacccact

SEQ ID NO: 588315 - DNA, 650 bp, Homo sapiens
caatttaccccttagcctgatttaacaatttaaacaggccttttaggtaatgctcatttttaggggataattgtttagtcaatcttgtatgcaccccaccaccactttctccactttcaccactgcttctcccaagatcagatttggtagatgaaagaggtgggctaatgtgagctcaggagacagagtgaaggagtgctcaggaatgtgcacagtgctccaggtcctcactagcaccatctgtaaaacagctgtcctggtgctcactgggtgaccgttggctccatccaagccacatgtattcagtaagcatctaccactggcattctgcagctggtgacaccaaagtctatttcttctcagcctggtaagaaccatagcagcctccccactcccttggcttcctctggtctttgctggattgcagactccactgagcatctgccacatatttcctctttataaattttctttataaattacccaacctcaagtatttccttattgcaacacaaacacatatatatatatttatatacacataaacacacatatatacaaatataggaatacatcyatacaaatatatatggccctccggcctaggtgaccaacacttaagtgtttggtgcagggccaacccacccact

SEQ ID NO: 588316 - DNA, 538 bp, Homo sapiens
gttctttctgtatgtgaaccctacataaattgaatctttaaattgctttcaagcaatttatagccattcatgttagccaggatggtctcgatctcctgacctcatgatccgcccgcctcrgcctccaaaagtgctgggattacaggcgtgagccactgtgcccggccttttttttttttttttactatttctatctttctctttctttctctctttgactccctctttgtctctctgcctctttctcttctctgtctctctcctctctgccccttctctctagctgcctttaacattttttttctttcattttaaccaaggagaatgcgatgactatattttcttgagatggttgttttgtatatcaatagtatctggcaagggttctctgcatttcctaaatttgaatgttgacctctctagcaagataggggaaatttttatgggtgatatcctgaaatatgtttttcaagttgattgttttctctttcagagatgccactctgacgtagatttggtctctttagataatcccata

SEQ ID NO: 588317 - DNA, 237 bp, Homo sapiens
ccaccacctaataccacgtcacatctttttttcattattcaacattcccttcaaatccatatctaagcataaacagaattttcactcaaagacatgacccaggtcctatttctcacttaatttagacaaagattttctcaaactaagtcctatagggccctagtgctcctggatgtgcctcaggagccaccacaaaggaaayctgccagtaggcagccaagtgataaggcttccttc

SEQ ID NO: 588318 - DNA, 430 bp, Homo sapiens
ccctcctgggcctcccaaagtgctgggattacaggcgttagccattgcacctgacccttactttttcatttgtatagcttctttggagaaatgtctatttmaatcttttgcttatttttaaaattgaattgcctttcagttgttgagttataagaattatttatctattctggctcctagactcttatgagatacatgatttgtaggtattttctcccattctgtgggttgtcttttcactttcttaatggtgtcctttgaagcacaaaagtgtttaattataatggagcccaacttatcaattttttattttgttgtttgtgcttttgatgtcatatataagaagccattgcctaatccaagattatgaagctttacacctatgttttcttccatgagtttaatagttttgactttcactttaggtctt

SEQ ID NO: 588319 - DNA, 573 bp, Homo sapiens
gggtacttattttaacacttcattcmctcattctccaagtgcttccttctcaaagttccatagtcctcttccccagaaagaggaggaccattttcctctccagcttccatgtttcaaactccaagcaagctcagaacacccataattaacttactggcccaaatcaactaattattccagaagatttacttttttacaactgaagcaatgaacttggatcttccttgcctgtctcctctactctccttcctgcctcaggtttgctgtcttacacagcgggaaggccttattagctagctggatacctaagggagtttacatttcccttttactcttgttttcaccctagttcttacatagaagtgcctagaacttctcaaagtatttgaaaaatttcaagggcaaacccagaaatttttagaaattcacaatcttacagaaaaaataaatttattttgaaattgtaagtcaagttatgtatgcattgttcccttattttatatattaataccacttttagatttttatgaagagctgtccgagttctttgaagagaattttacagccaattaa

SEQ ID NO: 588320 - DNA, 518 bp, Homo sapiens
ctggctggcttttctacctactgactgcagagccctgtagccttgagcaaacattggtggtagccaggtagtggttacactaggccttgagcaatacccggtgctgtgttggtttcaggtctgatccagcacagccccagtggtgatgcccatagggttgcttatgtcctatcacccacagctctagagagctcagcaaagatagagagactgcttgtttgggagaaagtaagggaaagtaacaagagcctctgactggtaattgaaataactcttttgcatcttattcaagaccaaaatgtcagtatctctatgagtctgcaaaaaccgcagcattactaggctttaggggtcccccaatgcagatatggsttagacaacaacacccaagtcattctgaatacctgaaaagtcttcctgagggcccttaaaaaaaaaaaaaaaaaaaaaaacgactgtgaagaccacaataaaaaactaactcttcgatgcccagacactgatgaatattcacaagc

SEQ ID NO: 588321 - DNA, 605 bp, Homo sapiens
cattaaggacattcacacattattgtgcaaccatcaccaacattcagctctagaattctttttatctttccaaactgaaatcctctacacaataaacattaactctccactttccctttccccagctccttgcaaccaccattctactctgtgtatctacgaatttcgttattgtaggtaacttgtataagtaagattacacctttggtgtcttgttcatttcacatagcataatatcttcatgtttcatcatgctgtaacatttgtgcatttttttctttcttttcaaggctgtataatattccattgtataaacatactacaatttgttcatccatccttccattaattgacatttacaatgtttccattttctgctattgtgaatgatgttaccatgaacattggtgtgcaaatatctgttcaagtaactgctttgaattatttgtggtatattcccagaagtgaaatcaccggatcatatggtaacttaatttttaattgttttaccacattcctaccaacacttgctattttctagatttgttattttttttaatagctgtcytaatgggtgggaattaaaatcatattttgggttttat

SEQ ID NO: 588322 - DNA, 508 bp, Homo sapiens
aaaaccatttgatactagcataagaatagatatatagacaaattgaatcaaaaaaagagtgcagatataaacatacagatatggccaatttttgacaagattgccaagtacattcaatggggaaaggacaatcttttcaacaaatggtttcagcacaactgaatatccaaatgcaaaagaatgaagttggattcctacctcacataatacagttgactcttgaacaacaagagattgaactgtatggatccacttatgcacagcttttattcaaccaaacatagattgaaactacagtatttgtggtatgcaaaacccacatatgggaaaggctgactttttatatatgagggcttcacagggccaactgcagtacttgcgtatgtgtagatttggttctatataggcagtcccrcaacaaatctccctcatattgtgagggacaactgtatacaaaacttaactttaaatagatcaaagtcctaaatataaaactgaaactttaaaa

SEQ ID NO: 588323 - DNA, 616 bp, Homo sapiens
atcattagtggctattatgagcaactayatgcaagtaaattggaaaatctagaataaattaacaaattcctagatacataaaacctacaaagattgaaccagaaagaaatccaaaacaagaacagactaataagtaacgagttcaatgccataataaagtctctcagctaagaaaatcctaggaccagatggcttccctgctgaattttactaaacatttaaaaaactaatactatttatcctcaaattatgctgaaaaaatagagtagaaggaaatacttccacactcattcttttaggtcattattaccttggtaccaaaaccagacaaagacacatcaaaaaaagaaaaccacaggccaatatctctaatgaatactgatgtgaaaactctcaacaaaacactagcaaaccgaattcaataatacattagaaagatcattcataatgacaaagggggatttacctctggaatgcaaagttgtttcaacatacgcaaatcaatcaatgtgataaatcagatcaagaaaatgaaggataaaaaccatatgatcatttcagctgatgctgaaaaagcatttgataaaactcaacgtaatcttatgacaaaaaaaac

SEQ ID NO: 588324 - DNA, 580 bp, Homo sapiens
tgagttattatattgttatatcaattaggaaaatctggtattggtgcaagaatagtcaaatgggccaatggagcagagttttctttgtctaatgtaacaaattaccacaaacatggtggcttacaaccatatatatttattctcttatagctctgggggacataaatacatgatgagtcttatgggacaaaatcaaagtgtcagcaagtccaattccttctgaaaactcaagggtaaatcaatttccttaccttttctagctcctggaggctgcctgaatcccttggctcatgaccacttcctcaccccttgcttccatggtcacatattctacttcttcctttgaacttcttgcctccctcttataatgaccattatggtaacatttaggacctatctggataatccagaaaagactctccatctcaagatctttarcttaatcacatcggtaaattctcttttgccatgtaaggtaacaggttctaagaattaaaatgtagatatcattgaatggccattatacagcccaccacacagactaatatagatatatagtatattatttatgaaaaatgga

SEQ ID NO: 588325 - DNA, 619 bp, Homo sapiens
attaccaatgatatttttcacagaaatcggaaaatcaatcttaaagtttatgtgaaaccatataagacccaggatagacaatgctattccaagcaaaaagaacaaaactggatgaatcgcatcacctgacttcaaattataccgcaaagctatagtaaccaaaacagtgggatattggcataaagatagacaaataaaccaataggacaaaatagagaacccagaaataaatccacagacctacagtgaagtcatttttgacagaagggtcaagaacatacaatgggaaaaagtctcttcaataaagggtgctgtgaatactggatattcatatgcagaagaatgaaactaaacctctatctctcactatatataaartgaaaatgtatcacagaataaaatctaaaactttaaactatgaaatcaccacaagaaaacattggagaacatctctaggacattgggctggcccaaaatttcttcagcaattacccacaagcacaggcaaccaaagcaaaaataaacaaatggaatcatatcaagttaaaaaccttctgcacaacaaaggatacaagcaatgaagtgaagagacagctccaaaaatggcagaaaatgtttt

SEQ ID NO: 588326 - DNA, 491 bp, Homo sapiens
taaccatccagccctacttaaaragaagggagataaaactgagaagcacttgtaaaattcacagcccagggacataggttcactgaaagactgagacctaatcataggactatagaaaacttcccctcctccaacaccttaccacctcattaataaggtctattgccacaattccttttactcactacatcatgtccaactcaacaacaacaacaacaaaaacaaaatacagggccatactgtctgggaatggtggctcatgcctgtaatcccagcactttgggaggccaaggtgggaggatcacttgagctcaggagtttgcgaccagcacaggcaacacaaggtgaccccatttctacaaaaaaattacaagcacactgaaaggaaaaatatacaggttgaagagacagagcacatatcacaaccagactcagatatgacaatgatgttggaatgatcagatcaggaatttaaacaactatcattaata

SEQ ID NO: 588327 - DNA, 556 bp, Homo sapiens
ttttttaacgttatcttctagaatttttatggtttcaggtcttacatttaaggttttttttaatccatcttgaattgatttttgtataaggtgagagatgaagatccagtttcattcttctacgcgtaacttgccaattatcccagcaccatttgttgaatagtgtgtcctttcaccactttatgtttttgttttctttgccaaagatcagttggctataagtatttgtgtttayttctggattctctattctgttttattggcctatgtgcctatttttataccagtgtcatgctgttttggtgactatggccttataatacagtttgaagtcaggtaatataattcctttagatttgttttcttttgcttagacttgctttggctatgtgtgctttttttgattccatatgaattttagaattttttttagttctttgaagaatgatggtgaactaacctccttggttaggtgtattcctaaggattttattttcttgtagctattgtaaaagtggttgagttcttgattcgattttcagctttgtcgctattg

SEQ ID NO: 588328 - DNA, 399 bp, Homo sapiens
gaattctgaagtgatatcagtgtggactgcagttccctttgagaactctctatgtcagcaataattgccaagggaagggggaagcaggcttgtacatttgtgataaattatccctatgaaaagaacacatgtatgaaaaagtttaggacacttataagaaattaatgtttgcattttttatgaagaataactcatagtaggttaaggtagtctcaaggaaaatccccaatctctggacctttgaaattcagtattattgaaaccattgatacttaaaacaatggaatggaaggagcatgttagtgaatcattatcatagcaatatatatayccagaaaggaaaccggatctagttaaattgagccaagacagtggagaatagagatcaagaatgttatt

SEQ ID NO: 588329 - DNA, 399 bp, Homo sapiens
gaattctgaagtgatatcagtgtggactgcagttccctttgagaactctctatgtcagcaataattgccaagggaagggggaagcaggcttgtacatttgtgataaattatccctatgaaaagaacacatgtatgaaaaagtttaggacacttataagaaattaatgtttgcattttttatgaagaataactcatagtaggttaaggtagtctcaaggaaaatccccaatctctggacctttgaaattcagtattattgaaaccattgatacttaaaacaatggaatggaaggagcatgttagtgaatcattatcatagcaatatatatacccagaaaggaaaccrgatctagttaaattgagccaagacagtggagaatagagatcaagaatgttatt

SEQ ID NO: 588330 - DNA, 443 bp, Homo sapiens
gttttcacatttttggattcaagatccctttttactttttaaatgtattgaaaacctctgagaagtttatgtttgttgtataggttatgtatatgtattagtgtttactctattgagaattgactgagaaaacatttatatatttattaattcattttaaaatagccaccacattgcatgttgcatgttaaaataaattgtgtacttttatgaaaaataattatattccaacactaagataattttgtgagaagagtgacttattttacattattgacaatctctttgatgtttggcttaagasagctagattctcacaactacttctgcaggcaatcttttgtgatagcatatatcctttggcctctagacagcaccgttgtatatttgtgagatgatgaaaaagattttggcccttggccctcccgaaagtctcagggact

SEQ ID NO: 588331 - DNA, 564 bp, Homo sapiens
gttctaagggaggggccattccttgactcttccaggttctggtatctgccagcattccttggctgtggctgcatcactctgatctctgcctccattttcatatcgtcgtcttctctctgtgtgtctagcctatctttgccttttaattataaggatgcttttgatggtgtttagggcccacccagttaattcaggatgatctccccatgtcaagatccttaacttaatcacatctgcaaagacccatttttccaataagtttctgtggatgaggactgcggagttayctttgggacttaggatctgcacatactcagacacagtgcctgccacttgagagcacttgatcagctctcgtggtagctctgccgtctcacggggttctttggagagcaggagccctgggggaaagaccttggctggtcacattttcctcttttctaacaaagctttacgctttaccagaaataatcataactgtcattgattcagcaccactctcccagttgctgtgtgtgtggctctacacctcttctcattgaatccttatgatagctctaccat

SEQ ID NO: 588332 - DNA, 543 bp, Homo sapiens
aggtttaatggaagccaaacgtgaggatcaacccgggaagatacagcgaaaaagttgggcatattccaaagtttgtttacaagttagaacgcttctataagaaagtttaggagaagggaaggggactcctcacattagaattgtcttttttcactggaggatacaatacagargtttcaatcattggctacatgttacaacataaaggcaaaaatgttctatgtgtaagtcaatcaatataacttcatgatttggaacaaatcagtgtcctcttattatcagtagtcctgtacatattaatcagttcatcaacagtttgaggaactcatgataagatttgagtgactcacaataagacttttatacttagggacacgatgtaagcaatgaaacattagaacttccccaggccattaatttgtgatctataggttatcatttcccccttttgatacatgaaaacatggaagattagtctctgtttagagtgatagacattctttatcccccagtgctgaaaaggctcatttccaggaagtcatg

SEQ ID NO: 588333 - DNA, 617 bp, Homo sapiens
caagagagagagggatgcttattctgcagagaaaccagttagctctttgttactttgtagaacaccattctggaactctactattggtaaataaggagtttacttgtgactggttcagtgctggacctcttgggaagaaagtacaatggctgagagaaatgagcttgagtatcacccagcctctgaagacttttagggctggttaactattcctgggaactctgtcaaggcctgtgctgtcttttctggggacatgggtgggcgagtggactaaaagtgatagaatgaagttctataattaaagtatttggtggatatgttgagaagtgtcctcaatcacattcctatgtcttttcagtgactctgatctctacttcacacaaggggacaacagaataggaggaaaatactggaaggttcggtatactgaatttgttgatgcaacttttactaaaagaaagagactctctgctgaagaagcccatcttggaattcttggtacagtaaaaccatcccccatgcattgaacccagggagatgttttagctgggcatgtacatctgcacagaatgactcttctgctytacttctttctgtctcttttcattctcttctct

SEQ ID NO: 588334 - DNA, 496 bp, Homo sapiens
agtgcaaagaaaagtcgaagtgtcaattatctgtgtgattgggccttcaraagctattttctaaaatattgacttaaagaaaaaactaattgttttgccccataccttcacttcattctcttatttatttttttgacttcatttttgctacctggataataaaatttctattcatgtcattgggatttaatgtagcccagctaatatttctcatttgcctcacatatatgttgcatataaagccctgttcccaatatactatacttaacactagtcagagctcatccagttgagagtttcacagctactcatccagaaattgggtttaagaaaatgtaaatgaatggatattaatctttttatatatttattaagcattatcacaatgcatacaaccctactgtggttttaggacacaaattaagaaaaacagccctggtttctgacaccagaagttaaaacctaatagaaacagcaaacacgtccatatattttg

SEQ ID NO: 588335 - DNA, 583 bp, Homo sapiens
aacatgactatttatagaagctttattcgtatcatcaaaaaccagatgcaaccaacatatccaataggtaaatggataaacaaactatggtacacgtatacattggaatattatttagcaatraaaaggtattgagctgtgaagccacaaaaagacaaggggaaccttaagtacatattgctaagtgaaagaaaccagtctgaaaaagccacatactgtatgattccagccatatgacattctggcaaaggcaaaactttagagatagtaagatcagtggttgcaagggccttgaggagaggagaaaaaggatgaaaagctgaatcacaggggatttttaaatcagtgaaactattctgcttaatactgtaatagtggatacacgatatacatttgtcagaactcatagaactatacaaagcaaagcgtggaccttagtataaactgatggtataaataaatattggctcatctattgtgataaatgtgccacattaatgctagatatttataatggaggaactgtggggggaaatggagattgtttatgggactctattatctgctcatttttttttttttt

SEQ ID NO: 588336 - DNA, 583 bp, Homo sapiens
aacatgactatttatagaagctttattcgtatcatcaaaaaccagatgcaaccaacatatccaataggtaaatggataaacaaactatggtacacgtatacattggaatattatttagcaataaaaaggtattgagctgtgaagccacaaaaagacaaggggaaccttaagtacatattgctaagtgaaagaaaccagyctgaaaaagccacatactgtatgattccagccatatgacattctggcaaaggcaaaactttagagatagtaagatcagtggttgcaagggccttgaggagaggagaaaaaggatgaaaagctgaatcacaggggatttttaaatcagtgaaactattctgcttaatactgtaatagtggatacacgatatacatttgtcagaactcatagaactatacaaagcaaagcgtggaccttagtataaactgatggtataaataaatattggctcatctattgtgataaatgtgccacattaatgctagatatttataatggaggaactgtggggggaaatggagattgtttatgggactctattatctgctcatttttttttttttt

SEQ ID NO: 588337 - DNA, 583 bp, Homo sapiens
aacatgactatttatagaagctttattcgtatcatcaaaaaccagatgcaaccaacatatccaataggtaaatggataaacaaactatggtacacgtatacattggaatattatttagcaataaaaaggtattgagctgtgaagccacaaaaagacaaggggaaccttaagtacatattgctaagtgaaagaaaccagtctgaaaaagccacatactgtatgattccagccatatgacattctggcaaaggcaaaactttagagatagtaagatcagtggttgcaagggccttgaggagaggagaaaaaggatgaaaagctgaatcacaggggatttttaaatcagtgaaactattctgcttaatactgtaatagtggatacacgatatacatttgtcagaactcatagaactatacaaagcaaascgtggaccttagtataaactgatggtataaataaatattggctcatctattgtgataaatgtgccacattaatgctagatatttataatggaggaactgtggggggaaatggagattgtttatgggactctattatctgctcatttttttttttttt

SEQ ID NO: 588338 - DNA, 583 bp, Homo sapiens
aacatgactatttatagaagctttattcgtatcatcaaaaaccagatgcaaccaacatatccaataggtaaatggataaacaaactatggtacacgtatacattggaatattatttagcaataaaaaggtattgagctgtgaagccacaaaaagacaaggggaaccttaagtacatattgctaagtgaaagaaaccagtctgaaaaagccacatactgtatgattccagccatatgacattctggcaaaggcaaaactttagagatagtaagatcagtggttgcaagggccttgaggagaggagaaaaaggatgaaaagctgaatcacaggggatttttaaatcagtgaaactattctgcttaatactgtaatagtggatacacgatatacatttgtcagaactcatagaactatacaaagcaaagygtggaccttagtataaactgatggtataaataaatattggctcatctattgtgataaatgtgccacattaatgctagatatttataatggaggaactgtggggggaaatggagattgtttatgggactctattatctgctcatttttttttttttt

SEQ ID NO: 588339 - DNA, 380 bp, Homo sapiens
cacccaatgctcattcaggagcaggttatttaaattccatgtatttgcatggttttgaagattccttttggagttgattttcagttttgttccactgtgatctgagagagtgcgtgatacaattycaattttcttcaatttactgagacttgttttatggcctatcatatggtctatcttagagaaaattccatgtgctgttgaatagaatgtgtattctgtggttgttggatgaaatgttctgtatatatctgttaagtccatttgttccaaagtatagtttaaatccagtgtttctttgttgactttctgtcttgatgatctgtctagtgctgtcagtggagtattgaagtcccccactatcattgtgtttctgtcta

SEQ ID NO: 588340 - DNA, 380 bp, Homo sapiens
cacccaatgctcattcaggagcaggttatttaaattccatgtatttgcatggttttgaagattccttttggagttgattttcagttttgttccactgtgatctgagagagtgcgtgatacaatttcaattttcttcaatttactgagacttgttttatggcctatcatatggtctatcttagagaaaattccatgtgctgttgaatagaatgtgtattctgtggttgttggatgaaatgttctgtatatatctgttaagtccatttgttccaaagtatagtttaaatccagtgtttctttgttgactttctgtcttgatgatctgtctagtgctgtcagtggagtattgaagtcccccaytatcattgtgtttctgtcta

SEQ ID NO: 588341 - DNA, 254 bp, Homo sapiens
taggcagcctgtaaaatggcttccagtgatccctgctytctggtatgtatgcctttgtataataccctcctcatgagtgtaggcagaggtaacatcacttttgaaactaggttatatatattcaaacaaacaaacaaacctgtggcttccattttgggtactttatctcacactctgatttcttgcttcgtgggaaacagactgtaatattgtaagcagtgctatggagaggtccatgtggtaaggaagtgata

SEQ ID NO: 588342 - DNA, 254 bp, Homo sapiens
taggcagcctgtaaaatggcttccagtgatccctgctctctggtatgtatgccyttgtataataccctcctcatgagtgtaggcagaggtaacatcacttttgaaactaggttatatatattcaaacaaacaaacaaacctgtggcttccattttgggtactttatctcacactctgatttcttgcttcgtgggaaacagactgtaatattgtaagcagtgctatggagaggtccatgtggtaaggaagtgata

SEQ ID NO: 588343 - DNA, 254 bp, Homo sapiens
taggcagcctgtaaaatggcttccagtgatccctgctctctggtatgtatgcctttgtataataccctcctcatgagtgtaggcagaggtaacatcacttttgaaactaggttatatatattcaaacaaacaaacaaacctgtggcttccattttgggtactttatctcacactctgatttcttgcttcgtgggaaacagactgtaatrttgtaagcagtgctatggagaggtccatgtggtaaggaagtgata

SEQ ID NO: 588344 - DNA, 254 bp, Homo sapiens
taggcagcctgtaaaatggcttccagtgatccctgctctctggtatgtatgcctttgtataataccctcctcatgagtgtaggcagaggtaacatcacttttgaaactaggttatatatattcaaacaaacaaacaaacctgtggcttccattttgggtactttatctcacactctgatttcttgcttcgtgggaaacagactgtaatattgtaagcartgctatggagaggtccatgtggtaaggaagtgata

SEQ ID NO: 588345 - DNA, 478 bp, Homo sapiens
tattttcatctcacatttcaattattagaatataaatgaaagaaaataaatttggataggctctcataaattcaatgataagaatttggaaaatgcaaccacatgawaaccaggaagtaaaaggaaaacataagagacatcttcccagatgagagtaaatatctggttccctgagaagtgtagtttgagaatggagaaatcagatgttactggaaagaggctaggactatattatttcttgcttcctgtcaagtcttttcaactcaagagaaagtaaattttcttgacaaaccattcaaaattaaaggataggtgggagtatatgtgtccctgaaggaacaagtgaccttcattgaaagcagcagcttggttgaataaatactgtacagaagtggaataaagagtagctgacaacaatgctcaaatagttacacatgaagttttaatgagctatttcatattaagatacatattgaga

SEQ ID NO: 588346 - DNA, 478 bp, Homo sapiens
tattttcatctcacatttcaattattagaatataaatgaaagaaaataaatttggataggctctcataaattcaatgataagaatttggaaaatgcaaccacatgaaaaccaggaagtaaaaggaaaacataagagrcatcttcccagatgagagtaaatatctggttccctgagaagtgtagtttgagaatggagaaatcagatgttactggaaagaggctaggactatattatttcttgcttcctgtcaagtcttttcaactcaagagaaagtaaattttcttgacaaaccattcaaaattaaaggataggtgggagtatatgtgtccctgaaggaacaagtgaccttcattgaaagcagcagcttggttgaataaatactgtacagaagtggaataaagagtagctgacaacaatgctcaaatagttacacatgaagttttaatgagctatttcatattaagatacatattgaga

SEQ ID NO: 588347 - DNA, 377 bp, Homo sapiens
agctatacttatgtagtatatttgcataaaaaggtatcttaaatttgaaataaaaacaccacataatacacagctagttatgaaatatgtgtagctttttggaagttcatgtcaactattctttaaaattaggacctatttccccctaagtaacaggcctcatattactattcccatatcactcattctttaaccactggaaatttggtataactagcagaacatctgcctccctcaggtgagagacttgtttcataacttttctttatttacttctacattgtcttcaatggtaatggaagatacaaggttaatttgtttgttcatscatgcaaccatttgttcattcaattaaacctgtatcattatataattag

SEQ ID NO: 588348 - DNA, 192 bp, Homo sapiens
agaattccagggctccatgcagcatttgctggacatgagagggaaaacttttagggcagggatctgccctgggtggggacagaggagtatcstggagtctgggtgtcaggagtgtgagccctgcccagctggccagcccctgtccccatgctgctcgatgcatgatgtttcctgcacaagcttcctttaaag

SEQ ID NO: 588349 - DNA, 583 bp, Homo sapiens
taatacctaatacaacacaaatgctatgtaaatagttgttataccatgttttttattcgaataatttttattgttatattttattgcttttctgaatacttttgacttgtggatgtagaasctgtggatgcagagggcctactatatctacgtatcaggacattttgaagtatatgtgcttgaaatctaacacaaggagtattaagataaaaaacagcatttattgtaagtaatcaatctgcacaaaagtttggaatacagttgagtctcaggagtgacttgacccttgagtctcaagagtgacttgacccagtagcttggttgatgaggacgatactcattttctctgctccttggagaatgaccttcatctctcagacagcgtctacatggcaatgcctaggcactcacctcatactaggccctgaggggaacagcaatgggtcctcataaggctcatgttaaaagataagataaccccagaaggtctctacctggtctaggttgggtcaaggacttgctgtggaaacaaatcaaacagaatatgcctatttttactccagctaccttgttagagtggtgg

SEQ ID NO: 588350 - DNA, 526 bp, Homo sapiens
ggggtgaggaacaaaaacagcctttgggttacagttcaggtgatgagtacactgtaggcctagamttcaccactctgcaatatatgcatggaagaatcctgtacttagactccctaaatatattaaaaatgaaatttaaaaattttatttaaaaaaggatttccaaattttcaaatgtgtattttaatgtcaattagatatacacttgacatcatctgatttttttttattgaccagtggttgcctgccatagaacatggctccatggcaggggcgcatcttcccccacactagatttagagaagttactgggtccaggtgctcctcagtgctctcaggtactgcttgacctgctggaaaccacaaagtagatgctagtattgtgtgctttgcagtctaacaaccctgaaatacaaatcctacccagccaccacttctagaaatacaactttgaataatatacataactttgcaaaattaagagaattcatctgtaaaatagtgattaaaaatagtgccttccagt

SEQ ID NO: 588351 - DNA, 591 bp, Homo sapiens
caaacaggaaacaacccacatgtccagcgaaagatacacaagtcaggaaaatgtgggacattttcgatggaatactgcccagtgacaaacaggaatgcgtgactgacaccagcctcacacgctgcgtgaaagcagccagaccctaaagaagatggatgccctagctcaaaatggcaaattcttccctcctccgactttctgttctatcaggggtcctcggcagattggatggcacccttccacaatgaggaggacgggtcttmttgacccagtcctctgattccaatgctgagaaacaacctcaacaacacacccagaaatgttttaccagctatctgggcatcccttagcccagtcaagttgacacagaaaattaaccattgcatggagtacacagctgcggtgcccagagcttcctggagacccaaggaggggacgtctgagtagaacaacacattattctactctcctaaggttcaagcaaaggcaaagctgatggaaatcacaggagcggttgcctttgggggccacagggggatggaaagggccctggagaacttcttagtgggggtcaccatgctctgtatcacg

SEQ ID NO: 588352 - DNA, 564 bp, Homo sapiens
ttgataaataaaatgaatggagcttcattgtttcataataaaagtggttgatttgataggcaaaatctttgaggaatagattccatagagtggaaggtaaataagaaaggcattccaaatgatgaaaagattagggactgtgccaaccacagatgccagccagagccctcagcccacctttggactgggagtgattttctctcagaggagagaagggttgatccaagtactcctggtggcaagtcttcctgtggggcacctctctgtgttatacctgcaggggctcatctgcctctccttgaatacttccagaaatgggagatcctcttataggctaaactcttgcaggttggatggcactgattgttagaaaacctttctgtagagcaagccagaaccagcctccctgggaccatgcctttggtctcactctggcctcggaggccacgtggtaagtcctggccaacagccctccgggttkttgcagacaagcattggtgtctccactagcaaaggctcctgtttgttttcagtacattgccctggcactcataactacccaac

SEQ ID NO: 588353 - DNA, 683 bp, Homo sapiens
tctcctagcaagatggaagttacaatcctatgtaatcacaggagtgacgccctttgttgcattctatgtgttagaagcaagtcgcaagttctaccgtcactcaagggaaaggatgccacaaagacaggcataccaggaaacaggagtcatgcaggccatttagagtctgtccccacaggggtcagccttctttttctgtacaagccagatagcatttattttaggcttatacatcagacggtttctaccgtaagacagttgcaaagactcagctttgcctttatcmcacaaaagcagctatagacaatatgtaaaccaatgactgtgtttcaataaaactttatttatggacatcaacatctgaaatttatataatttacacatgtcacaaaatattcttttgattttttgtccccaatcatttaaaaatgtaaaaaccatttttagcttgcaggccagataaaaacaggcagtgggctagattatgggccattgtttagtaatccctgccctaatttattagttggaaaaattaaatttttgcatatcaaatttttttaatgagttactccagaattggaggcctcgggacagcctctctacatgatcaacttctgctcattggaattgttcagtttagagactctgcgactcgttttgaaggagggagataatccctccat

SEQ ID NO: 588354 - DNA, 510 bp, Homo sapiens
gtccacagcatcattattgacaacagtcaaaaagtggaagcaacccaaatgttcattaacttatgaatggatatgcaaaatgtggcaaatccatacaatggaatattattaggtgataaaaaagaataaagtacttatacctgctacagcatggaggaaccttgaaaatactatgctaagkgaaagaagccatttactaaaggctacacgttggatgattccatttatgaaatgtccacagtaggcaaatccatagggacagaaagcttgctaggggattgggggagaagataaatgacagtgactgctagagggtgtgggatatccttacggggtgaagaaaatgttctaaatttagataatggtgatagtttcacaacctaggaagtatcctaaaaatcactgaattgtacactctaaaggagtagattgcattgtatatgaattatatgtctattcagataaagttattaaaattattaaaaatatataaagttgtaaaaaatgaag

SEQ ID NO: 588355 - DNA, 510 bp, Homo sapiens
gtccacagcatcattattgacaacagtcaaaaagtggaagcaacccaaatgttcattaacttatgaatggatatgcaaaatgtggcaaatccatacaatggaatattattaggtgataaaaaagaataaagtacttatacctgctacagcatggaggaaccttgaaaatactatgctaagggaaagaagccatttactaaaggctacacgttggatgattccatttatgaaatgtccacagtaggcaaatccatagggacagaaagcttgctaggggattgggggagaagataaatgacagtgactgctagagggtgtgggatatccttacggggtgaagaaaatgttctaaatttagataatggtgatagttkcacaacctaggaagtatcctaaaaatcactgaattgtacactctaaaggagtagattgcattgtatatgaattatatgtctattcagataaagttattaaaattattaaaaatatataaagttgtaaaaaatgaag

SEQ ID NO: 588356 - DNA, 430 bp, Homo sapiens
aacataatgttaacaagattgtagaccagtgtggtatcaagaggatcgagattgtctccagcatgtattatggcacagagcaaaactggtgaagccctgaggcaaatttgtgaaggtatgctgttggccctgtgggatagaagcaagctgcttctgatggtccttacaaattggtatagagagaaaagtattygctaggtcagtagctacatgccaggtaataggagctatattgatttttgtttctggtgaagtttctatatattaaaccacaacttggaataactgcctgataaagtttatgataatgtacagtcattctccaatatctatctgccttctgcatgggcaaacaggaaagttagatgtggcttcaccacctcagcatcttttaagtctttgatggtggtgataatctctgtaattctct

SEQ ID NO: 588357 - DNA, 617 bp, Homo sapiens
gtgttaatattttattataataaatattgtaaacacttgttgcagtagcaacaaaaatattttaaaaagctagaactgtgagcttcaattcctgcaatccccaaattccaaaagaaagactgyggtggtgtgtgtctgtgtgtgagaccctctctctgcggaacattggtggacaagcagctggcattgctctgggacttttacaagatgagctcagcatttgctggacatctattctgctttggccaaaacatgacggtggacttccatctctgaggatgactcctacaaagccagccatataaaatgaggctctttctttataaaacatgggtgtccttggccagttcaaacaccttaaggcctcagtttttaatctgtatgagaagttagagccaccctaaacttgaggcctttttcagctctgagactgaatttgggccttacaagcaaggctcatgtgtaactccaaggcccaattcctggtcccagtgcccctccactttccatcacaaccacagcccctatttcccacagtccttcaagccctcccctgcagcctctcacctcctcctatcctgccttgtttccagccatcttcccatctgcacagcacc

SEQ ID NO: 588358 - DNA, 617 bp, Homo sapiens
gtgttaatattttattataataaatattgtaaacacttgttgcagtagcaacaaaaatattttaaaaagctagaactgtgagcttcaattcctgcaatccccaaattccaaaagaaagactgtggtggtgtgtgtctgtgtgtgagaccctctctctgcggaacattggtggacaagcagctggcattgctctgggacttttacaagatgagctcagcatttgctggacatctattctrctttggccaaaacatgacggtggacttccatctctgaggatgactcctacaaagccagccatataaaatgaggctctttctttataaaacatgggtgtccttggccagttcaaacaccttaaggcctcagtttttaatctgtatgagaagttagagccaccctaaacttgaggcctttttcagctctgagactgaatttgggccttacaagcaaggctcatgtgtaactccaaggcccaattcctggtcccagtgcccctccactttccatcacaaccacagcccctatttcccacagtccttcaagccctcccctgcagcctctcacctcctcctatcctgccttgtttccagccatcttcccatctgcacagcacc

SEQ ID NO: 588359 - DNA, 468 bp, Homo sapiens
tggttccagcatgtcccctactggtgggctcccttgtctactcattgatttcctastgcacccccgccctctctcttctctgtcggtaccaaactgctgaacagggaacacctggatgaataagagagcatcactcctccctcttccacagagaacacctccagcttgactcatggcctagagaagaaacgtgtgttgttttgagttttcttggggaaagcagttttataagcagataattacaatgcagtatgatacggttataataaaaggcatgtaccaagttttctggaagttcaaggagagggaaattaactcttcctgggacgttgaacgaggtttcacagaggaactgggtcctgatgaagagtaggcgtttgaacgacaggaatgatagaaattcagacaataacttcagaatcaaagaccttgaagcaagaaagtgcagacaataattgaagaatggta

SEQ ID NO: 588360 - DNA, 609 bp, Homo sapiens
agactgatgatccagaaaatgtcttttctcagaaaaaaaaaaaaaaaatcaagatgaaatcatcccccactgccacacatacacacacagacacacacacacacatacacacatcattgatagagaattctgaaacagcaagaatgcrtgcctggagcaccatttgagaaacatcatccccccccaagcccttgcttcttacagatgagcaaactgaggctcagagaggagagttgctttagccaaggtcacacagctaatcagggtggagcagctggagaactcaagggcctctcactttgtacagcagtgcctcctttcagcaccctcaggcagcccaagacaggctgggccctgggaaaggagccctggggatgcttgtagagatgagttctcccagtttggggtcgagttttctgcaggtttcaagcagccatcttccaaagctcagaaaatgaaattgcgtagacacagccactgctgcagatgcgaagactttgtctcagatctccctggaaaccctaaatctcttctggactccaggtctggcaagaaggcccaaacaagggctctgtgtgtgttctcatttagtgattttttttttttttt

SEQ ID NO: 588361 - DNA, 617 bp, Homo sapiens
atggcccccccaaagacatcaaggtcagaggcatagatgcagaagttggggtgataagagcaatgaaccaagcaatacaaccatcctctagatgctggaaaagtcagggaaacagattctcctttagagcctccagaaaggaaagcagctctgccaacccattttggacttctgatggccagagctgtaagataattaacttgtgttgttttaactaagttcatggcaatttgttatagcagcaaaatagaaactaatacaatcatatacccagagacagcatttgcctccttataatacatgcttatgtatgaatgagttttccttagaacaatccagtcattttattttaacctacttcttctragtttggcttccctaccagactgttagaaagcaggctccttggctgtcgcatctactattgtgcctatctccagtgtccttgtccatctggttacccactacagcccaaaaacctgtcatggggcctggcacaaagtaggctcttgaaaaatatttgttgagggaatagtacatcttgacatattgttccacttatctattgctgtgtaataaactacttccaaaatgtagtggcttaatacaacaatatt

SEQ ID NO: 588362 - DNA, 653 bp, Homo sapiens
ttgagtgcttaccaccaggagctgcgaaaaacactctccaattattatttctattaatcctcttattaatcttaagagatgagcaactttattcttattttgtagatgatgaaacttgggttacaagggcttcagtaattgctcgagatcacatcaaaagcacgtggcaggccgggcatggtggctcacacctgtaatcccagcactttgggaggscgaggcaggtggatcacttgaggtcaggggtttgagaccagcctggccaacaaggtggagccctgtctctactaaaaatacaaaaattagccgagcatggtggcacgtgcctgtgatcccagctactcaggagcctgaagtttgagaatcgcttgaacctgggaggcagaggttgcagtgagccaagatcgcaccactgcactccagcctgggtgacagagtgagaccctgtctcaaagaaaaaaataaaataaaatgaaaaataaaagcatgtggcagagccaggtctcaagtctttttgacctcagagcatgtgttaactatcatgccattctgccttcaaaaaggactgattcactggatggacagtacctgtccttggggatgcgagcttatgtcttgctgtgaccacagttatatgtatataagatggatgc

SEQ ID NO: 588363 - DNA, 653 bp, Homo sapiens
ttgagtgcttaccaccaggagctgcgaaaaacactctccaattattatttctattaatcctcttattaatcttaagagatgagcaactttattcttattttgtagatgatgaaacttgggttacaagggcttcagtaattgctcgagatcacatcaaaagcacgtggcaggccgggcatggtggctcacacctgtaatcccagcactttgggagggcgaggcaggtggatcacttgaggtcaggggtttgagaccagcctggccaacaaggtggagccctgtctctactaaaaatacaaaaattagccgagcatggtggcacgtgcctgtgatcccagctactcaggagcctgaagtttgagaatcgcttgaacctgggaggcrgaggttgcagtgagccaagatcgcaccactgcactccagcctgggtgacagagtgagaccctgtctcaaagaaaaaaataaaataaaatgaaaaataaaagcatgtggcagagccaggtctcaagtctttttgacctcagagcatgtgttaactatcatgccattctgccttcaaaaaggactgattcactggatggacagtacctgtccttggggatgcgagcttatgtcttgctgtgaccacagttatatgtatataagatggatgc

SEQ ID NO: 588364 - DNA, 580 bp, Homo sapiens
ccaacttcaatgacactaatgttaataagttctgatagcccactaccatcaaaccagcctacttgaacattttaatagtgtttttgaatatatgtttttgcatagttttttaataatggtggttgctctaggtattacatatacatatgtaacattatagtctactggtgaaacattttatcacttaatgtgaaatgtgaaaatattacctccattgagcttccataccctcctccacttataattgtcttatgtatttcctctacattgagaaatacatcatacagtgtttcaattttaattcaaccatcaaacataatttagaaagctcaagaggagaagaaacatctattgtatttacctacattttaactttttccctatyattctttcttctttcttgatgttctaagatttcttctttcatcctctcctttctgcttagagaacttcctatagcttttctcatagagtaggtcttttggtgacaaattctcttagtttttgtccatctgacaatgccttgatttttgttccattccttgaggatatttttgctggccatagacttccgagttag

SEQ ID NO: 588365 - DNA, 611 bp, Homo sapiens
atttaggacccaggtctcctaattctaaattcttcatcttccccttttccaccagtgacagtttgggtaactgtttggaaatcctaaagtaacttaaatgtattcagattttcaggctctgatgcctgcacccattccctcctctagaggtgctgtggcctcccagccccagccaactccaagaggctaattagcactgcttttcaaaaactcaaggtggactaagagagaaaagcggctctgttggttgttgctcatttgcggatgttttccctgcaaaaccacatcaaagcagggaagcccaccgtggacttggccagaaaccaaagcttgctggccaatctgagaagcagcaagtttcatcaggtagaaaaccattttatcttctgggcccagattcctcactagagwggatggaggcggagcatctcccaagcagcaaagctcttcctaagctctgagctggcgtagggagcccccaacttggagagtcctatcgtgagcaggcaggactgagatgggaggtgagccgccaaacaaacctcacagatggtcactcggtgcctacgaggtgcagggcagggtcagtgtggctttggggagcaacccca

SEQ ID NO: 588366 - DNA, 533 bp, Homo sapiens
cacatcatatcagggattcatactatctaaatgacttatcattgttgatgttaatatttatcagctggccaaggtactgtttgccagtttctccaccacaaagctatgcttcccacccccattgccatattgtgctcttggaaggaaataattacttgcagcccacacctaaggagtgtgcagttatgctccacaaggtcaggagtttgagagcagcctgaccaacatgatgaaatcccatctctactaaaaatacaaaaagttagccaggcatggtggtgygcgcctataatcccaggtactcaggaggctgaagcaggagaattgcttgaacccagcaggcagaggttgcactgatccgagatcacaccactgcactccagatgttcctcgaggaaggaacatctacataaattacttggaattcttctgcacaggaaacgtacttattcttccacacttatttatttaatcatgtatttatattagtatgaaccaatggatgtttatgccgtggattataattcaattct

SEQ ID NO: 588367 - DNA, 515 bp, Homo sapiens
atcatgagaatagtgcagtgcaggaaagacctcccctcataattcaatcacctcccactgggtctctcccatgacacgtgggaattgtgggagttacarttcaagatgagatttgggtgggagcacagagccaaaccatatcactcccacatatgagtgagaacatgtgatatttgtttttctgtgcctggcttatttcacttaacaaacaaaattttttctaggtttatccatgttgctaccaatgacaaaatttccatcttgtttaaggctgactagtattccattgtgtatacataccacattttctttacccattcattcgttgatggacacttagtttgattctataacttcaccagtatgaatagtgctgcagtgagcatgggaataaaaacatctatctgcagcaaactgattttcattcccttggatatatacctggaagtggaattgctgggtcatatggtaattctataggaagttcttaagtaaaaagcagaatcacgtgctcc

SEQ ID NO: 588368 - DNA, 515 bp, Homo sapiens
atcatgagaatagtgcagtgcaggaaagacctcccctcataattcaatcacctcccactgggtctctcccatgacacgtgggaattgtgggagttacaattcaagatgagatttgggtgggagcacagagccaaaccatatcactcccacatatgagtgagaacatgtgatatttgtttttctgtgcctggcttatttcacttaacaaacaaaattttttctaggtttatccatgttgctaccaatgacaaaatttccatcttgtttaaggctgactagtattccattgtgtatacataccacattttctttacccattcattcgttgatggacacttagtttgattctataacttcaccagtatgaatagtgctgcagtgagcatgggaataaaaacatctatctgcagcaaactgattttcattcccttggatatatacctggaagtggaattgctggrtcatatggtaattctataggaagttcttaagtaaaaagcagaatcacgtgctcc

SEQ ID NO: 588369 - DNA, 430 bp, Homo sapiens
gagaggttagaggactaaaaaaccaataagaaaatcaaaacccagtttgcctgactggcaagtcctttctctctacctggaagcttttgcttgtttaaatccccctggcttgtcccagatggggctagggtgtgcatgggggtgagggggagaagcaagacgtagtgaagtggttctcaaagtgtggtccaactggcagcgtcagcatcacctggaacctcattggaaatgcagattcttataccgctccaggcctcctgagtcagaaatccaacaagtgctccaggtgattctggtatgtgctcaagtttgtgaaccactggcctaaaaagctatggctctctaggcatggcctcagggtgacctggctgaggatgtgggggctctagggttaaaagggctgagcayaggctcataccctaataaaata

SEQ ID NO: 588370 - DNA, 527 bp, Homo sapiens
cctcccatctttcctcttccgtttttcctcacctttgtgcgatagagattatgatcactcccgatcaactccacaggactgtcctgaggatcagataaagagaacacgctttagaaggctcaccacaaatgggctgtggccrtggaggtggtggtggtgacagtggaattggcatctgggttggcttgtagcctggcctgtaactgtagttgtggaagcttagagggctgtttgaagaggcccctcctagtctgacctcatgagccagagacactagtaatcttgggcagttctggggcattttgttgttatttatttatttatttaatttttttttttgagtcagggtcactctgtcacccatgctggagtgcactggcaggaatctcagcttatttcaacctcaacttctctggcttgagcaatcctcccacctcagtcccccgagtagctggaactacaggcacacaccaccatgcccagctaatttttacattttttatggagacagggttttgctgtgttgt

SEQ ID NO: 588371 - DNA, 527 bp, Homo sapiens
cctcccatctttcctcttccgtttttcctcacctttgtgcgatagagattatgatcactcccgatcaactccacaggactgtcctgaggatcagataaagagaacacgctttagaaggctcaccacaaatgggctgtggccatggakgtggtggtggtgacagtggaattggcatctgggttggcttgtagcctggcctgtaactgtagttgtggaagcttagagggctgtttgaagaggcccctcctagtctgacctcatgagccagagacactagtaatcttgggcagttctggggcattttgttgttatttatttatttatttaatttttttttttgagtcagggtcactctgtcacccatgctggagtgcactggcaggaatctcagcttatttcaacctcaacttctctggcttgagcaatcctcccacctcagtcccccgagtagctggaactacaggcacacaccaccatgcccagctaatttttacattttttatggagacagggttttgctgtgttgt

SEQ ID NO: 588372 - DNA, 527 bp, Homo sapiens
cctcccatctttcctcttccgtttttcctcacctttgtgcgatagagattatgatcactcccgatcaactccacaggactgtcctgaggatcagataaagagaacacgctttagaaggctcaccacaaatgggctgtggccatggaggtggtggtggtgacagtggaattggcatctgggttggcttgtagcctggcctgtaactgtagttgtggaagcttagmgggctgtttgaagaggcccctcctagtctgacctcatgagccagagacactagtaatcttgggcagttctggggcattttgttgttatttatttatttatttaatttttttttttgagtcagggtcactctgtcacccatgctggagtgcactggcaggaatctcagcttatttcaacctcaacttctctggcttgagcaatcctcccacctcagtcccccgagtagctggaactacaggcacacaccaccatgcccagctaatttttacattttttatggagacagggttttgctgtgttgt

SEQ ID NO: 588373 - DNA, 563 bp, Homo sapiens
gaggtggatggtggttttgataaaactaccgtgttgtaggacaaggcccttccatggtatttctcatctgaactttaaaatactaggagacatcatttgcaccttcagtggttttcagcttagctatccagcctcttgtcctaggcagtttcaaaatttgaaaacaatttgtgggtgtgcccaaccaygtaatgaagtacacactccctctctttagtgtgtgtgtgtgtgtgtgtgtgtgttttcccgatcattgaaagtttaaaggagttgtttttaggaatagttcagctgagctcttcatactatcccagtgcaccagaactcagcgaatatccctgaatttaagttttcccaagtgtcagatttaccatcccagtcttatggaagaacaaaaacttttctggttccacttttactctcagcagagtcctgcccaggttaaggctgatccttagtccacaccaagaatcagcaaatgttctgagagctaaaaccacctgcagtcatcagctcacctggagtgattctcttttctctgtaattatagctcacctagtagt

SEQ ID NO: 588374 - DNA, 357 bp, Homo sapiens
gtatcaaaaactgttacagattgtaaatttaaytgagggtctattggatgtagcaaaaagggtatgtggcagccatttgcaagtataaatataccacaggatactctagctcaacttactaaagatatgtctgagaagactgactgaacaaagggagagaaaaagtaaaattgctattttgtagttaattaaaaattagactttaaaattgccacctagtttttcagatttctcctgttgtaataaaaattaatgaacatttcagcatggagcttttgagaagcacaatatacggcaatggaatatttattgtgcacaaagaattctttgatcattagttggttaaaatgagtaaga

SEQ ID NO: 588375 - DNA, 357 bp, Homo sapiens
gtatcaaaaactgttacagattgtaaatttaattgagggtctattggatgtagcaaaaagggtatgtggcagccatttgcaagtataaatataccacaggatactctagctcaacttactaaagatatgtctgagaagactgactgaamaaagggagagaaaaagtaaaattgctattttgtagttaattaaaaattagactttaaaattgccacctagtttttcagatttctcctgttgtaataaaaattaatgaacatttcagcatggagcttttgagaagcacaatatacggcaatggaatatttattgtgcacaaagaattctttgatcattagttggttaaaatgagtaaga

SEQ ID NO: 588376 - DNA, 357 bp, Homo sapiens
gtatcaaaaactgttacagattgtaaatttaattgagggtctattggatgtagcaaaaagggtatgtggcagccatttgcaagtataaatataccacaggatactctagctcaacttactaaagatatgtctgagaagactgactgaacaaagggagagaaaaagtaaaattgctattttgtagttaattaaaaattagactttaaaattgccacctagtttttcagatttctcctgttgtaataaaaattaatgaacatttcrgcatggagcttttgagaagcacaatatacggcaatggaatatttattgtgcacaaagaattctttgatcattagttggttaaaatgagtaaga

SEQ ID NO: 588377 - DNA, 490 bp, Homo sapiens
caaaagtctttaaaatttagacatttggactctactagacaggtcagatattgaattaggcagcttggatgctttcagtttataaactgcttctgtgacttttgatagttgctcctcacttgcctcctttagagccttgagattgtaggtaaggcctggggacgtgtggggttatccatgccscctagccatgctggaaagagtcagacattacctgcagttctgtccagtgtcctaggctctacacttggtacataattaaaattgcttatactaaaaataaagttatgtgctattgatcaaagcatgaaaacgtgattttaaaaattggctggtttcaaggatttaaggattgctttaagtgaaaaaaaaggtttaaactaaagttttaaacaagttgtaaaaagtttgtaaaaattaatctataaatgaattctgtttatgaacaagttggctaaaaattaaagaaatttagttttttaatgcattg

SEQ ID NO: 588378 - DNA, 576 bp, Homo sapiens
agatttcaaattacagttgacctttcagtaacatgggtttagactgcatgggccaacttatgcacaaacttttttctataagtatattggaagtttttggagatttaagacaatctgaaaaaacakgcagacaaacagctttagcctaaaatatcagaaaaaactaaggaaaagctatgccatgaatatgtagaaaatatatagatactagtctatattatcatttactaccataaaatatatacaaatctatcatagaagttaaaatttattaaaacttatatacacaaatatttacagaatgtacaggtgccatttgcagtcaagagaaatgcaaaaaactgtaaagatgcagtattaaaccataacggtataatattaactataatccacactacaactctgaaataatttcaaagccacctcctattgctattgcagcaagctcaagtgttgcaaatatctgcttaaaatgccatgtgaccctagtcatctcagtatgagcagttcatctctccagcatattgcatatcacagtaaaaggtgatccctccggttcttacatatttttcatca

SEQ ID NO: 588379 - DNA, 478 bp, Homo sapiens
caataaattacaaattaatcttwaaaaaaagagagagagaaagtgtttcacgtgaattcttcctctgccctctgtgtgtatatttgatgactctgtgtttcctcagcaaaagtcaatgaaacaattaagtctctgcccatttttccttatcctgatctccaacagtgttaaaaagccttgcactacacttttcccacccgggcttgttaataattcatgcatttgccttctttagttcatctgtctttgctgcttaaacccagtggaaaaggggaggttctcgtttggctttctgaatgccccatccttacaaacattcaaatggccacatctttaatgcccatgatgtgggactggtaaaattctctttatcttccaccaaaactccaataaggaatattttttaacgatctctgctaattttgtcagctcattttctgacaagttttgtttcacatggatcattttgcccagaata

SEQ ID NO: 588380 - DNA, 663 bp, Homo sapiens
taaagttactcttatatacaactagtaaraatgtagtttgtattaagttttctggatgccagtttgtcaacctgtatcaaaagcttcagcaatcagtatgttctctggcaaagcatactaggaaaaaatcagccatgtgtaacaatttagctacaagttttttagaatgtcatatataacagtaaaacactgcaaagaacctaaggatcaactgaaggaagtgaattaagcaaagtacaatacatccatgtaatagaatactttttgatcattaaaattatgttggggattaactgataggtttattacataatattcgggaaaaaaaacactatttgtcagatctttttgtgtgaatgtgtacaccaactgaaaaacacaaatactaagatgtaaataaaaaactgtactttaaaatttattttgcttttattttcctgtttctctaaaattattttgtaatgctattacaataaaatatagttacttaattaatagacagcatggtgaaatatttgtagcaaatgtgagaaaagagggctcagcatctgccacatagcaagacttatgaaaagaagtatttggcaaataacatgaatacataaaactacagaaacaactaataataaaataatctatttcaatggtgaggaaatatatgca

SEQ ID NO: 588381 - DNA, 562 bp, Homo sapiens
agtgggcagatcacttgaggtcaggagttcgagaccagcctggccaacatggcaaaaccctgtctctaacaaaaatacaaaaactaactgggcatggtggcgtgcmcctgtaatccctgctacccagctactcgggaggctgaagcatgggaatagcttgaaccctggaggtggagactgcagtgagctgagattgtgccactgcactccagcctggctgacagagtgaaaccctgtcttaaaaaaaaaaaaaaaaaagaatgagatcatgtcctttgcaggaacatggatggatctggaggtcattatccttagcaaactaacgccacaacagaaaaccaaataccacatgttctcacttattagtgggagctaaatgataacacatggacacatggggggaacaatacacattggagcctaccagagggtgggggatggtaggagggagaggatcaggaaaaatcactaatgggtactaggcttaatacctgggtgactaaataatatgtataacaaacccctgtgacatgagtttacctatataacaaacctgcacaca

SEQ ID NO: 588382 - DNA, 480 bp, Homo sapiens
tgagactctgtctgaaaaaaacaaaacgaaacgaaacaaaacaaaaacctcttgtgctctcattgggagtgtaatcagcacaactactttgtaaatgaatgaattgctaccatacacaacaacattaatgaacctagcaaacctggtattgagcaaaaggaggyaggcacaaaagaacactgacttgtgcgattccctctatataaagttcacaacccagcaaaactgctttatggtgtacagtcaagatgtggctgtacaagatgtggcttccttcaggaaggaggggatttgtacctgggattggacatgagagggattcagtgatgctaataatgttctactttttgatctgggtggtggttacagaggaaagtatactttgtgctgtgcacttgtctgtatgtccatttatagttcagtggagagcttcgactcaaaaaacaaaaattgtagagaacaaccagagtcaagagacag

SEQ ID NO: 588383 - DNA, 480 bp, Homo sapiens
tgagactctgtctgaaaaaaacaaaacgaaacgaaacaaaacaaaaacctcttgtgctctcattgggagtgtaatcagcacaactactttgtaaatgaatgaattgctaccatacacaacaacattaatgaacctagcaaacctggtattgagcaaaaggaggtaggcacaaaagaacactgacttgtgcgattccctctatataaagttcacaacccagcaaaactgctttatggtgtacagtcaagatgtggctgtacaagatgtggcttccttcaggaaggaggggatttgtacctgggattggacatgaragggattcagtgatgctaataatgttctactttttgatctgggtggtggttacagaggaaagtatactttgtgctgtgcacttgtctgtatgtccatttatagttcagtggagagcttcgactcaaaaaacaaaaattgtagagaacaaccagagtcaagagacag

SEQ ID NO: 588384 - DNA, 585 bp, Homo sapiens
tggtgtgtaatatttgtatacaagtattttctttagtatatgtctgtccacaaagtaggctttcctatacccatacatcagaaagacagacatgtagatytatagaaggccactggagaatcaaaatatgccaaaccaaaatatgtcacaccagaatatgccactttggcataaggatttttaaaaaatttttttattttcataggtttttcggaactggtggtgtttggttacgtaagtaagttctttagtggtgatttgtgaaatttgggtgcacccgtcacccaagcagtagacactgcacccaatttgtagtcttttatccctcacccccttcccaccctttctccaagagtccccaaagtctattgcatcatttgtataaggattgttttgaggtgaaggcaattaagaagcagcaaatgcagaaaaaggaggacataaatttccctttgtgaaggtgtttctcctcccatcttccataccaagaggagaccaactcttgtcactggaaacagaaagtcagcaccaagacaggtctgcacaaacaaacctcaccaatatcacccttatctttcattaggt

SEQ ID NO: 588385 - DNA, 585 bp, Homo sapiens
tggtgtgtaatatttgtatacaagtattttctttagtatatgtctgtccacaaagtaggctttcctatacccatacatcagaaagacagacatgtagatctatagaaggccactggagaatcaaaatatgccaaaccaaaatatgtcacaccagaatatgccactttggcataaggatttttaaaaaatttttttattttcataggtttttcggaactggtggtgtttggttacgtaagtaagttctttagtggtgatttgtgaaatttgggtgcacccgtcacccaagcagtagacactgcacccaatttgtagtcttttatccctcacccccttcccaccctttctccaagagtccccaaagtctattgcatcatttgtataaggattgttttgaggtgaaggcaattaagaagcagcaaatgcagaaaaagsaggacataaatttccctttgtgaaggtgtttctcctcccatcttccataccaagaggagaccaactcttgtcactggaaacagaaagtcagcaccaagacaggtctgcacaaacaaacctcaccaatatcacccttatctttcattaggt

SEQ ID NO: 588386 - DNA, 414 bp, Homo sapiens
tggcactatttgtaggagacagaaatgtaaacaaatgtaaagatgtagcataaagtcataactgaagaaaattaactgtagtacatactgtagtagtgtaataatttcatagccaccttctattgctattgaggtgagctcaagtattgtcaagtaggtaaaatgctatgcaatgctaatcatctctgagtgagatgctcctctctccagtaaattggatatcacagtaaagatgatctcttgaagttcttgtgtatttttaattgtgttcastgcaatattgaacattaaataacatcatgggacccatataaaatgccatgagtgatgctggaagtgctcccaagaaacagagaaaccatttttctggattggttttatcaatgttttgttcctaaagtaaggaagcacctc

SEQ ID NO: 588387 - DNA, 414 bp, Homo sapiens
tggcactatttgtaggagacagaaatgtaaacaaatgtaaagatgtagcataaagtcataactgaagaaaattaactgtagtacatactgtagtagtgtaataatttcatagccaccttctattgctattgaggtgagctcaagtattgtcaagtaggtaaaatgctatgcaatgctaatcatctctgagtgagatgctcctctctccagtaaattggatatcacagtaaagatgatctcttgaagttcttgtgtatttttaattgtgttcactgcaatattgaacattaaataacatcatgggacccatataaaatgccatragtgatgctggaagtgctcccaagaaacagagaaaccatttttctggattggttttatcaatgttttgttcctaaagtaaggaagcacctc

SEQ ID NO: 588388 - DNA, 595 bp, Homo sapiens
tttctttttttaatcctctatccattttctattttacagactttcactctgtttcctgttatttccttcatttcatttgtatttaatttgctgtttttttcctggatttataatctgtgattcttcttaaagaatccaaatttataaacttacttctatgcattgccrtagctatatttcacagttttgatatgttgtttttattttgttttagtaaaaatattttctaattttacttataattcctaatttatcctattttttacttgccagtacatttttgttgtccaaatattttgagattttagatatattatattttaataatttggaaattaattgtattgagggctattaataataataaaacactctataattgtattttcttaaagctattaagatgacttctatagctcagattatgaactattatgatgaaagttcatgtgtatttggaaagaataggtaatgttctgtggctgggtaagatattctatgaatttcagttggtcaagtagtttcatagcattgttcaggattttcatacttctattaattttctgtgtacttattctttcaattactaaggagt

SEQ ID NO: 588389 - DNA, 595 bp, Homo sapiens
tttctttttttaatcctctatccattttctattttacagactttcactctgtttcctgttatttccttcatttcatttgtatttaatttgctgtttttttcctggatttataatctgtgattcttcttaaagaatccaaatttataaacttacttctatgcattgccatagctatatttcacagttttgatatgttgtttttattttgttttagtaaaaatattttctaattttacttataattcctaatttatcctattttttacttgccagtacatttttgttgtccaaatattttgagattttagatatattatattttaataatttggaaattaattgtattgagggctattaataataataaaacactctataattgtattttcttaaagctattaagatgacttctwtagctcagattatgaactattatgatgaaagttcatgtgtatttggaaagaataggtaatgttctgtggctgggtaagatattctatgaatttcagttggtcaagtagtttcatagcattgttcaggattttcatacttctattaattttctgtgtacttattctttcaattactaaggagt

SEQ ID NO: 588390 - DNA, 595 bp, Homo sapiens
tttctttttttaatcctctatccattttctattttacagactttcactctgtttcctgttatttccttcatttcatttgtatttaatttgctgtttttttcctggatttataatctgtgattcttcttaaagaatccaaatttataaacttacttctatgcattgccatagctatatttcacagttttgatatgttgtttttattttgttttagtaaaaatattttctaattttacttataattcctaatttatcctattttttacttgccagtacatttttgttgtccaaatattttgagattttagatatattatattttaataatttggaaattaattgtattgagggctattaataataataaaacactctataattgtattttcttaaagctattaagatgacttctatagctcagattatgaactattatgatgaaagttcatgtgtatttggaaagaataggtaatgttctgtggctgggtaagatattctatgaatttcagtyggtcaagtagtttcatagcattgttcaggattttcatacttctattaattttctgtgtacttattctttcaattactaaggagt

SEQ ID NO: 588391 - DNA, 433 bp, Homo sapiens
aagctgttctcacactcctctcctctcctgtttacctagtcctatgtatttcctatgaagttcttcgcgagcactcaggatcgagcccttcattttctccacctcaattcttttgtttccccactaatgtcagcactctgctaaattttctgatttcactaattaacctaatagttttactcctccaatacaataaatatttactatgcaaaactctaaaatgaaccaaaggagaaagagaaaaggacttcttagagaaatctgacacatccctagccatccatcccctttgtctcatgtaacttcagctcaggaattgtttttttcttctctaaataaartgcagttcaaaacatagtagttattccttcttagtttttttgatttggtgagttttttttgttttaaattttttctttgtttttgttttctt

SEQ ID NO: 588392 - DNA, 433 bp, Homo sapiens
aagctgttctcacactcctctcctctcctgtttacctagtcctatgtatttcctatgaagttcttcgcgagcactcaggatcgagcccttcattttctccacctcaattcttttgtttccccactaatgtcagcactctgctaaattttctgatttcactaattaacctaatagttttactcctccaatacaataaatatttactatgcaaaactctaaaatgaaccaaaggagaaagagaaaaggacttcttagagaaatctgacacatccctagccatccatcccctttgtctcatgtaacttcagctcaggaattgtttttttcttctctaaataaaatgcagttcaaaacatagtagttattccttcttagtttttttgatttggtgagttttttttgytttaaattttttctttgtttttgttttctt

SEQ ID NO: 588393 - DNA, 418 bp, Homo sapiens
tgggaagaagagaagcagtcatcatttcaagccttataatgcttgtgtgcagcagcttgaccagcttggrgcatatatttttttaatatcctcgtgtatttttatgtgacctgaaataaactgggtatttctctatttcttaaaacttgaagaacattaattaacagatttatgaaggaatatgtcttaaaattagaaaaaaaaagggttatgtgagaagagtgaggcaacagatgtgaaaataccaaaaggaagcaatatttaaatgatattttacatcttagagggaatccatctgaatttagaagagaaacatttgatattgctttgtaataaatcactgggtcatagctttaataggtaaagtgtaaagaatgtttggaaaaaaaatgaaaaatagatcttagaagaaaatagt

SEQ ID NO: 588394 - DNA, 418 bp, Homo sapiens
tgggaagaagagaagcagtcatcatttcaagccttataatgcttgtgtgcagcagcttgaccagcttggggcatatatttttttaatatcctcgtgtatttttatgtgacctgaaataaactgggtatttctctatttcttaaaacttgaagaacattaattaacagatttatgaaggaatatgtcttaaaattagaaaaaaaaagggttatgtgagaagagtgaggcaacagatgtgaaaataccaaaaggaagcaatatttaaatgatattttacatcttagagggaatccatctgaatttagaagagaaacatttgatattgctttgtaataaatcactgggtcatagctttaataggtaargtgtaaagaatgtttggaaaaaaaatgaaaaatagatcttagaagaaaatagt

SEQ ID NO: 588395 - DNA, 567 bp, Homo sapiens
agctctgattttggttatttcttgtcttctgctagctttgggcttgatttgcttttatttttctagttcctcgacgtgtgatgttagtttgttaatttgagatctttttaactttttgatgtgggtgtttagtgtyataatttttcttcttaatactgctttagctgtgtcccagagattctggtatattgtatctttgttctcattagtttcgaataatttgctggtttgtgccttaatttcatcatttacccagaggtcattcagaagcaggttgtgtaattttgatgtaatcatatggttttgagtaatcttcttcctattgatttctatttttattgcactgtggtctgagaatgtggttggtatgattttggtttttaaaaatttgctgagtattgttttacggctgattgtgtagtcaattttagagtatgtgccatatgcagatgagaagaatgtatattctgttgtttttgagtggagagttctgtggatgtctgttaggttcatttggtgattaaccttcttgagttcagattttcaccacatctgccctatattaat

SEQ ID NO: 588396 - DNA, 511 bp, Homo sapiens
gagggatgagactgtttcgcctcagagcaacctagatccctcccatgcatagttcacaacagggtttgcactcttatgaaaatctaaggatctaatgtcaccactgatctgacaggaggcagagctcaggtggtaatgcttgcttgcccaccactcacctcctgctgtgcagcctggttcctaacaggccacagaccagtaccagtcagtggcccaggggtttgggactcctgatctagagggtaagaccaagttacataacagatgacccagactctcctgacacatctgttgcaccaactacttttcctcagttaatacttatgtctacatgggggattccttattactaacaaataagggggaaaaaacctcagttctatttcatagatgtgtcatgtttatatgctggagctagcaaaaatcaatttctgcctcatcaaattcacatgcarggatggctcttgaaggacactagtgaaaggaaatccatctgatgggaagaacaggg

SEQ ID NO: 588397 - DNA, 595 bp, Homo sapiens
gcttccatttctgtcttatagttctggttgccaaaagtcctaagaggatctcactgggctaaagtcaaggtgctggcggggctatgtcccttctggaggctcaagggatgaatcgggtccctgccttttctagcttctaggggctccagcttctaggtttgtggcctccttcctccatcctcaaagccagcaacagcaggtgaagtcctcgcccatcatgcatcactctcccttcttcctccttcaactttttttttwatatttagggggaacgagtaccggattcttacatagtcaaaaagctccttatagagaagctcggaactttcaatacaactttgccttttctgccattttaattttccatttaatttaaatgtattctctcatttgaccttcatactctgtggagaaatattcctatttcggcttgtattgacaagctgttttcacacagcccccacatcacccaaccaaccagcaagaaacagataaagaaactgaggcccagggaggctaagagtcctgccaggatcattcacctttcaaggtaaggagccagttccagacctgggtttgtgcagctccaagctcc

SEQ ID NO: 588398 - DNA, 609 bp, Homo sapiens
tgcttgcttgcttgttggttgattggttggctgtttgcttgtatggtgacttggttggttggctgaaacagaatcagagtttacctaaggtacataaagttgagatgccacaacttccttggtttatgtgtacagaaaggtatgcaaaaactcagggagactggatttattatgtcagacctgctcactcacactgragggtctacggaacatactcctcacaacgatcatgagaaagaatattgtgagaggagcccagtatcctggaagagctttgagcttgtgctctcagtaggcaaaatgttacagcaggaactgcagccactggactgggatctttaagtaaaatgaggataattgaatcctggggtggcagggaacatgggctgtccttaatcaccaaagatgaggtgggtgtggtcaccacagtggaaagcagtgtcaaagcagcagtcagaatggtttgactcacagacacccacggcattgtgtagtccatggtatccacagggagagctaatgggctgtaccaaagtcttagttgttctttaaaaaatgaagaattctaggtcaactgaataaaagactaactcaaattaatgaaacaca

SEQ ID NO: 588399 - DNA, 609 bp, Homo sapiens
tgcttgcttgcttgttggttgattggttggctgtttgcttgtatggtgacttggttggttggctgaaacagaatcagagtttacctaaggtacataaagttgagatgccacaacttccttggtttatgtgtacagaaaggtatgcaaaaactcagggagactggatttattatgtcagacctgctcactcacactggagggtctacggaacatactcctcacaacgatcatgagaaagaatattgtgagakgagcccagtatcctggaagagctttgagcttgtgctctcagtaggcaaaatgttacagcaggaactgcagccactggactgggatctttaagtaaaatgaggataattgaatcctggggtggcagggaacatgggctgtccttaatcaccaaagatgaggtgggtgtggtcaccacagtggaaagcagtgtcaaagcagcagtcagaatggtttgactcacagacacccacggcattgtgtagtccatggtatccacagggagagctaatgggctgtaccaaagtcttagttgttctttaaaaaatgaagaattctaggtcaactgaataaaagactaactcaaattaatgaaacaca

SEQ ID NO: 588400 - DNA, 609 bp, Homo sapiens
tgcttgcttgcttgttggttgattggttggctgtttgcttgtatggtgacttggttggttggctgaaacagaatcagagtttacctaaggtacataaagttgagatgccacaacttccttggtttatgtgtacagaaaggtatgcaaaaactcagggagactggatttattatgtcagacctgctcactcacactggagggtctacggaacatactcctcacaacgatcatgagaaagaatattgtgagaggagcccagtatcctggaagagctttgagcttgtgctctcagtaggcaaaatgttacagcaggaactgcagccactggactgggatctttaagtaaaatgaggataattgaatcctggggtggcagggaacatgggctgtccttaatcaccaaagatgaggtgggtgtggtcaccacagtggaaagcagtgtcaaagcagcagtcagaatggtttgactcacagacacccayggcattgtgtagtccatggtatccacagggagagctaatgggctgtaccaaagtcttagttgttctttaaaaaatgaagaattctaggtcaactgaataaaagactaactcaaattaatgaaacaca

SEQ ID NO: 588401 - DNA, 609 bp, Homo sapiens
tgcttgcttgcttgttggttgattggttggctgtttgcttgtatggtgacttggttggttggctgaaacagaatcagagtttacctaaggtacataaagttgagatgccacaacttccttggtttatgtgtacagaaaggtatgcaaaaactcagggagactggatttattatgtcagacctgctcactcacactggagggtctacggaacatactcctcacaacgatcatgagaaagaatattgtgagaggagcccagtatcctggaagagctttgagcttgtgctctcagtaggcaaaatgttacagcaggaactgcagccactggactgggatctttaagtaaaatgaggataattgaatcctggggtggcagggaacatgggctgtccttaatcaccaaagatgaggtgggtgtggtcaccacagtggaaagcagtgtcaaagcagcagtcagaatggtttgactcacagacacccacggcattgtgtagtccatggtatccacagggagagctaatgggctgtaccaaagtcttagttgttstttaaaaaatgaagaattctaggtcaactgaataaaagactaactcaaattaatgaaacaca

SEQ ID NO: 588402 - DNA, 506 bp, Homo sapiens
aatccgggcattgtcattgaatatcttaagaatatgcaacaaaggtgcttttaaaaatacaagctagtgattgtaccaaatttgtaaatcacataggatagtgggtcattttaagaatattagttatttcaatctataaacgtggatgtctttccttttttgtgttttctttaatttctttcattaatatttgtcatttttgttgtcraaatcttttacttccttggttaaatttatttctaagtacatttttgtagctattgtaaaaggaattgctttcttaatttcttgtttcagctagtttactatcaatatatagaaatgctactgatttttgtatgttgatttatatcctgcaactttattaatttcatgtatcaccctaagaagcttttggtagagtcttatttttttccatgtataagatcacattgtctttaaacagggacaatttgactgtctcctttccaattcagatgtcctttatttctttctctcacctaatt

SEQ ID NO: 588403 - DNA, 570 bp, Homo sapiens
cacaaagctgcccgtggatcccctgaatctataataataataattaataataataataataataaataaaaagtgactttgtcattcgcagggaaatgtgaatgacattcactctgcctctcaggcccttggattcccaaagtttgttttcmtcacgcccaggggacactcagaatgtcgtttgcagaacacgggttgtttttcttagaaacgccttgcaaaacaaaataggaagcaaaatctttctcactccttccactccataatagacaaaataaaatgagggggcaggaatccagagactttgaccacagttggcagatttattgtggtacagacatgaaggcaagcagtgttctctctgattctacgaaccgtacagcccgggccagctgccttctgctttctggatggtgcaggcgtgacgtccaagcccaaatttcactggagctccaagaatcgagcctggcccaggcactcactgcacgggggccaagcgtgaaaccagtgatcgctccagcaaggtaacaggacagcttggtgatccttcttgccggccacaaaaggtta

SEQ ID NO: 588404 - DNA, 506 bp, Homo sapiens
aatccgggcattgtcattgaatatcttaagaatatgcaacaaaggtgcttttaaaaatacaagctagtgattgtaccaaatttgtaaatcacataggatagtgggtcattttaagaatattagttatttcaatctataaacgtggatgtctttccttttttgtgttttctttaatttctttcattaatatttgtcatttttgttgtcgaaatcttttacttccttggttaaatttatttctaagtacatttttgtagctattgtaaaaggaattrctttcttaatttcttgtttcagctagtttactatcaatatatagaaatgctactgatttttgtatgttgatttatatcctgcaactttattaatttcatgtatcaccctaagaagcttttggtagagtcttatttttttccatgtataagatcacattgtctttaaacagggacaatttgactgtctcctttccaattcagatgtcctttatttctttctctcacctaatt

SEQ ID NO: 588405 - DNA, 539 bp, Homo sapiens
actcatctcatttcaattgcagtgcaattgcattacatttcataatttcctttcattatttcatttcatctcattccattatttcatttcattatttcatttcatctcatttttcatctcatcatttttcatctcatttcatctcatcatgtcatctcatcgttcatctcatttcatctcattttatctcattatttcatctcatctcatctcatttcaatttcattatttcatatcatttcattatttcatttcatttcatctcatcatttcatctcgtttcatctcatcatttcatcatctcatcatttcatctcatttcatctcatctcatctcctttcaatttcttttcarctttgtcatttcgtctcatcatttcatctcatttccactctccatttcatctcatcatctcatctcatctcatcattttgtcatttcatctcatcatttcatctcatctcaagtcatcttatcatttcatctaagtgaaatgacataatggaatcatgaaatgaaatggataggatgccctcag

SEQ ID NO: 588406 - DNA, 446 bp, Homo sapiens
atctcctttcaatttcttttcagctttgtcatttygtctcatcatttcatctcatttccactctccatttcatctcatcatctcatctcatctcatcattttgtcatttcatctcatcatttcatctcatctcaagtcatcttatcatttcatctaagtgaaatgacataatggaatcatgaaatgaaatggataggatgccctcagtgatgttaaatttaaaaattgtttcttttcatgcatgcatttttatgtttatatgtatttatatttatatttactaatatttctttttacttatttttatttatatttttacttatgtctttattcatagacaaggtcctgttctgtggcctaggctggaatgcagtggtgcattcacagttcactgcagcctcgagaaaacctcccacattagcctcccaggtagctgggaccccagg

SEQ ID NO: 588407 - DNA, 461 bp, Homo sapiens
ttatatttactaatatttctttttacttatttttatttatatttttacttatktctttattcatagacaaggtcctgttctgtggcctaggctggaatgcagtggtgcattcacagttcactgcagcctcgagaaaacctcccacattagcctcccaggtagctgggaccccaggtgcgcaccaccacacctggttaatattttattatttgtagagatggagtcttgctattctgcccaggctggtctcaaattcctgggctcaagcaatcctcctgcactggcaacccaaaatgctgggatgacagatatgagccacagtgcccaacctatttatttatttgtttaataaggacaaggtctcactatgttgcccaggctggtcaactcctggactcaaatgattctccaaacttggcctctcaaaatgttgggattacaggtatgagccaccatgcctg

SEQ ID NO: 588408 - DNA, 461 bp, Homo sapiens
ttatatttactaatatttctttttacttatttttatttatatttttacttatgtctttattcatagacaaggtcctgttctgtggcctaggctggaatgcagtggtgcattcacagttcactgcagcctcgagaaaayctcccacattagcctcccaggtagctgggaccccaggtgcgcaccaccacacctggttaatattttattatttgtagagatggagtcttgctattctgcccaggctggtctcaaattcctgggctcaagcaatcctcctgcactggcaacccaaaatgctgggatgacagatatgagccacagtgcccaacctatttatttatttgtttaataaggacaaggtctcactatgttgcccaggctggtcaactcctggactcaaatgattctccaaacttggcctctcaaaatgttgggattacaggtatgagccaccatgcctg

SEQ ID NO: 588409 - DNA, 461 bp, Homo sapiens
ttatatttactaatatttctttttacttatttttatttatatttttacttatgtctttattcatagacaaggtcctgttctgtggcctaggctggaatgcagtggtgcattcacagttcactgcagcctcgagaaaacctcccacattagcctcccaggtagctgggaccccaggtgcgcaccaccacacctggttaatattttattatttgtagagatgragtcttgctattctgcccaggctggtctcaaattcctgggctcaagcaatcctcctgcactggcaacccaaaatgctgggatgacagatatgagccacagtgcccaacctatttatttatttgtttaataaggacaaggtctcactatgttgcccaggctggtcaactcctggactcaaatgattctccaaacttggcctctcaaaatgttgggattacaggtatgagccaccatgcctg

SEQ ID NO: 588410 - DNA, 461 bp, Homo sapiens
ttatatttactaatatttctttttacttatttttatttatatttttacttatgtctttattcatagacaaggtcctgttctgtggcctaggctggaatgcagtggtgcattcacagttcactgcagcctcgagaaaacctcccacattagcctcccaggtagctgggaccccaggtgcgcaccaccacacctggttaatattttattatttgtagagatggagtcttgctattctgcccaggctggtctcaaattcctgggctcaagcaatcctcctgcactggcaacccaaaatgctgggatgacagatatgagccacagtgcccaacctatttatttatttrtttaataaggacaaggtctcactatgttgcccaggctggtcaactcctggactcaaatgattctccaaacttggcctctcaaaatgttgggattacaggtatgagccaccatgcctg

SEQ ID NO: 588411 - DNA, 383 bp, Homo sapiens
agcagagtcagggcaggtccagagtagaggcagagctagggcccaagcagggccatggtagcaccagggcagaggagggcagggcaatgcaggactgggccatggcagtgcctggtcaactccggggcagggccagaagcaggacagggccagggccagtgctcaggccagggacagggcatgacaggaagtgccagagcagggctgggccaacgttggggcagggcaaatcagaccaggacacttccaagtccakctctggccctgccttggccctggccccttcctggcctgaccttgtccctggccctgccctatccatgccctgtgtgtttgaccagtgttttgtaaccagaatcctacaagaaacttaaattagttct

SEQ ID NO: 588412 - DNA, 506 bp, Homo sapiens
aatccgggcattgtcattgaatatcttaagaatatgcaacaaaggtgcttttaaaaatacaagctagtgattgtaccaaatttgtaaatcacataggatagtgggtcattttaagaatattagttatttcaatctataaacgtggatgtctttccttttttgtgttttctttaatttctttcattaatatttgtcatttttgttgtcgaaatcttttacttccttggttaaatttatttctaagtacatttttgtagctattgtaaaaggaattgctttcttaatttcttgtttcagctagtttactatcaatatrtagaaatgctactgatttttgtatgttgatttatatcctgcaactttattaatttcatgtatcaccctaagaagcttttggtagagtcttatttttttccatgtataagatcacattgtctttaaacagggacaatttgactgtctcctttccaattcagatgtcctttatttctttctctcacctaatt

SEQ ID NO: 588413 - DNA, 501 bp, Homo sapiens
cacaagcagggcaggctagggcagggcaatggcaagaccaggccatggcagggccagcccaggatagaacagggcacaggcagggcagggccagggccacggctggggcaggacaaggaccaggactggggtccaggccagggcaagggtatggccagggcagaggtagggccagagccagggtctgggcaggaccaaggcaggtctattgcagggccagggttcagaccagggccagagcagggctgggacagggccagggccagaaccaggaaagggcaatgtcaggacaagggccgtggcaggaccagcaatggggctgggggcaggacagggacagggacagggtcagggctagggccagaatagcatgccagggtagagccacgccaaattagggccaggacagggtcaggaccagggctgggccagggyatggccttaagtagcgaagggccagggccagggtccatgccagtgccagcgctggtccagggcaga

SEQ ID NO: 588414 - DNA, 501 bp, Homo sapiens
cgcagcgaggcgagccatggtgtcgcaggctctaggtgtctcctcctcttcctggcacagagcagctgggcgggcaaagccagaaaagcctagagaaagaygtgaggggtggaagggttagagcctcaacttgtcatgccggccactgggtggcaggggccagtttcagcaaaggcactcacacccaccctccaaagtccagcctctccttttggcccaagctgggcaggaactggggtctggggtgggtgctggagacaccacagcacccagctccccactccacaggaaccattgggcccactggggctgcactcctcggggagcaggagaagcagaaaaattcagacccagccagccctccacacccaggtgccaattcctgttccggacgcctccacgcacagggccctgtcccccgtggtgtccccaggggtgcctggcagcctctgaggcacagacccacagtacacaggcccaggaaccaggaaccacggtggg

SEQ ID NO: 588415 - DNA, 501 bp, Homo sapiens
cgcagcgaggcgagccatggtgtcgcaggctctaggtgtctcctcctcttcctggcacagagcagctgggcgggcaaagccagaaaagcctagagaaagacgtgaggggtggaagggttagagcctcaacttgtcatgccggccactgggtggcaggggccagtttcagcaaaggcactcacacccaccctccaaagtccagcctctccttttggcccaagctgggcaggaactggggtctggggtgggtgctggagacaccacagcayccagctccccactccacaggaaccattgggcccactggggctgcactcctcggggagcaggagaagcagaaaaattcagacccagccagccctccacacccaggtgccaattcctgttccggacgcctccacgcacagggccctgtcccccgtggtgtccccaggggtgcctggcagcctctgaggcacagacccacagtacacaggcccaggaaccaggaaccacggtggg

SEQ ID NO: 588416 - DNA, 558 bp, Homo sapiens
cgtctcagcctcccaaagtgctgggatataagcatgagtcatcgtgcctggcctaatcacattgttcaagcattgtgcaaatcaatggaagcctagctcacaacacttctggtttaaatgcaggcacacttcccctctgcctggccctgactcctgctgccctctcctactcagttctctggcagctcatccccctcacccactctactccattccctgcctgctttccagtctctcgacctggacaggttttctgtccctttccccattgtttctttgaagtatttattatgtaccttcctttatcctctcagctaaagggtttaccttttcttgccaaggtttgtgatccatctctctcttctcattctcctgattctgaatttatcataacatttcctgggcacaatttaaatatgcttatttgaccttcccaggctgtgctaacacaccaccaccactgctgytgccgaaaagagttagtgatatttatctacacctgtacctgtgccacctgtgtcccatgccagagaccccggagcactccatgggcaggtc

SEQ ID NO: 588417 - DNA, 524 bp, Homo sapiens
gtgtgtgtcttggggaagagataaggcctgaataaggagggacagctgtcctgtggagatctggagaagattattgtagtagaggaatggcaagttcaaaggcctggaagtggtagcagagtcattgtgtttcaggggcagaaaggaggccagcgtgcctgggtgccaagggaaggaggtgagggtgaggaggcggacaggcatctcaagtgcatggagagccacctcttcttgggtccccagtccagggcactttctttggacccaggatgtaggtactgacagctgccatgaatctcggagttgtyagcattcacagcaaagggcatttccaggctaaaatctaagtaaacaagctccagaacaaagaagacaccatgttcaaagtgtgtgaaaatggataacaaataggaaacatttaaaaacaagcactttgtggaaaaccatgtttccttgatgtgctttctgtcatggtatctgaaacactgcaaaaggacattgaagatctgggagggagagttgac

SEQ ID NO: 588418 - DNA, 506 bp, Homo sapiens
aatccgggcattgtcattgaatatcttaagaatatgcarcaaaggtgcttttaaaaatacaagctagtgattgtaccaaatttgtaaatcacataggatagtgggtcattttaagaatattagttatttcaatctataaacgtggatgtctttccttttttgtgttttctttaatttctttcattaatatttgtcatttttgttgtcgaaatcttttacttccttggttaaatttatttctaagtacatttttgtagctattgtaaaaggaattgctttcttaatttcttgtttcagctagtttactatcaatatatagaaatgctactgatttttgtatgttgatttatatcctgcaactttattaatttcatgtatcaccctaagaagcttttggtagagtcttatttttttccatgtataagatcacattgtctttaaacagggacaatttgactgtctcctttccaattcagatgtcctttatttctttctctcacctaatt

SEQ ID NO: 588419 - DNA, 613 bp, Homo sapiens
caggacttttatgtctattctactttggcttagtttacatgattcgtagtttattagcctagaaatggccaagaaaacttaaggttcaataattagttataaatatgaaatatccccgatttttaagataaaaacaacttataaatgtatttgtctgtaaaaattgtgtatatttttacagaacatctatttctttttttatttttttatatttatttattatgctttaaattctaggrtacacatgcacagtgtgcaggtttgttgcatatgtatccatgtgccatgttggtgtgctgcacccattaactcatcatttatattaggcatatctcctaatgctatccctcccccctccccccaccccacaacaggccctggtgtgtgatgttccccttcctgtgtccaagtgttctcattgttcaattcccacctatgagtgagaacatgtggtgtttggttttttgtccttgcgatagtttgctgagaatgatggtttccagcttcatccatgcccctacaaaggacatgaactcatcattttttatggatgcctagtattccatggtgtatatgtgccacatgttcttcatccagtctatcattgttggac

SEQ ID NO: 588420 - DNA, 613 bp, Homo sapiens
caggacttttatgtctattctactttggcttagtttacatgattcgtagtttattagcctagaaatggccaagaaaacttaaggttcaataattagttataaatatgaaatatccccgatttttaagataaaaacaacttataaatgtatttgtctgtaaaaattgtgtatatttttacagaacatctatttctttttttatttttttatatttatttattatgctttaaattctagggtacacatgcacagtgtgcaggtttgttgcatatgtatccatgtgccatgttggtgtgctgcacccattaactcatcatttatattaggcatatctcctaatgctatccctcccccctccccccaccccacaacaggccctggtgtgtgatgttccccttcctgtgtccaagtgttctcattgttcaattcccacctatgagtgagaacatgtggtgtttggttttttgtccttgcgatagtttgctgagaatgatggtttccagcttcatccrtgcccctacaaaggacatgaactcatcattttttatggatgcctagtattccatggtgtatatgtgccacatgttcttcatccagtctatcattgttggac

SEQ ID NO: 588421 - DNA, 613 bp, Homo sapiens
caggacttttatgtctattctactttggcttagtttacatgattcgtagtttattagcctagaaatggccaagaaaacttaaggttcaataattagttataaatatgaaatatccccgatttttaagataaaaacaacttataaatgtatttgtctgtaaaaattgtgtatatttttacagaacatctatttctttttttatttttttatatttatttattatgctttaaattctagggtacacatgcacagtgtgcaggtttgttgcatatgtatccatgtgccatgttggtgtgctgcacccattaactcatcatttatattaggcatatctcctaatgctatccctcccccctccccccaccccacaacaggccctggtgtgtgatgttccccttcctgtgtccaagtgttctcattgttcaattcccacctatgagtgagaacatgtggtgtttggttttttgtccttgcgatagtttgctgagaatgatggtttccagcttcatccatgcmcctacaaaggacatgaactcatcattttttatggatgcctagtattccatggtgtatatgtgccacatgttcttcatccagtctatcattgttggac

SEQ ID NO: 588422 - DNA, 467 bp, Homo sapiens
ccctgcctcccaggtgggtggaagatgcctgtcgccaaactagggcccagcttgccgggtgagatgggtgaactggtgatcccccgagagagtggacgtcagaactacatgttcctggacttcacctcggccagcgaaggagagagagggttaatgttaactgcacgaggcccactctagccttaaattctgtaattcaaacccttcccttggagacaaaacaaacatgacaaggaattctgaggtcaggggacaagaatcacaaagtgggagattgaggaggcagtgtccttcctgcccttggtctactggctaagaaccttcctcagcctgacctttscacattgcactttcagctctgtttgcaattttcctcctttagtgctgagggaatcccagtgttccatcctgaaatctataggttcctaatgggtggttaaaaaaaaacctcagcgagagaagcagaa

SEQ ID NO: 588423 - DNA, 591 bp, Homo sapiens
tataaaaccatcagatcttatgagtcttattcactatcatgagacttattcattattatgagaattattgtccatcatgagaacagcatgggaaagacccaccgggtccctcccatgacacatgggaattgtgggaactayagttcaagatgagatttgagtggggacatagccaaaccatatcagccccctaagtatcaggtcctaatccttggaacctataaatgttgcaaatgaaatgtgttataaaattttataatttttaataattgtaaaatatgttacaaatggtaaaagagtctttgcagataggataaagttaaggaggctgatgtggggatattattgtggattactgggtgggctaaatgccaacataagtgtcattataaaagagacagaagattaggcacagagacagagggagggaggaggtgaccacagaggcagaggttggaatgatttgctggggccagcctctataaggggcattgccttgctgacaccctgatttcagcccagtggtactgattttgtacttccagcctccagaactgtgtgagagtaaatttctgttgttttaagccacga

SEQ ID NO: 588424 - DNA, 591 bp, Homo sapiens
tataaaaccatcagatcttatgagtcttattcactatcatgagacttattcattattatgagaattattgtccatcatgagaacagcatgggaaagacccaccgggtccctcccatgacacatgggaattgtgggaactatagttcaagatgagatttgagtggggacatagccaaaccatatcagccccctaagtatcaggtcctaatccttggaacctataaatgttgcaaatgaaatgtgttataaaattttataatttttaataattgtaaaatatgttacaaatggtaaaagagtctttgcagataggataaagttaaggaggctgatgtggggatattattgtggattactgggtgggctaaatrccaacataagtgtcattataaaagagacagaagattaggcacagagacagagggagggaggaggtgaccacagaggcagaggttggaatgatttgctggggccagcctctataaggggcattgccttgctgacaccctgatttcagcccagtggtactgattttgtacttccagcctccagaactgtgtgagagtaaatttctgttgttttaagccacga

SEQ ID NO: 588425 - DNA, 568 bp, Homo sapiens
tctcaggtgatccacccacctcggactcctaaagtgctagattacaggtgtgagccaccatgctcggctatccttgctttttaaaaaaagtatgtgcatgtgtaaattaatatattaattatttccattacaattaatgagcatgttacagtttacgatgcattttttcatatctactagtctccctgtttgatttattcactatgtaactctaatrtcatcagaaattatatttataatgttcaataacttgtgtagaaaaataaattaatatataaagaaaaaatttagacctctgttcctattttgtctctagataaaccaaacaatatatctatacatatatgtatgtattttaaactggttaccaggtaatataagtcgtaacaaaaaatattgcttatttaataagataatttccactaatactataaactatgggttttatcttctgtttgtgaaactgccagtaactgacatttagcccttgtctgagtcataatttgacagacaatcacagtcaaactcttctaaattgatgatcatttgtagtcttaaaatgtgagct

SEQ ID NO: 588426 - DNA, 551 bp, Homo sapiens
cacctgtaatcctagcactttgggaggctcaagtgggaggatcacttgaggccaggagtccaagaccagcctggacaacatagmaagcccctgtatctaaaaaaatacaaaaattagctgggtgtggtgctatgttcctgtattcccagctattcaggaggctgagatgggaggattgcttcagcccaggagttttaggctgcagtgagctgtgatcacaccattgtactccagcctgggtgacaatggggtcctgtctcttaaaaaaaataaataaaatttattcagtggcggaaatctcctgtccccacttccttaggcttatggtttttctgactcctcttagataatataatagaaagttctcagatggcttaagttgcaaacaagacttgaacacagaaattagaatgtcaaggccaagatattgaacaatgaagatttaacatcaaattctctgtttcctttttagctggggcttgcagctcaaggctggcagctggcaggagggccggggcatggttgactgctttctgtgtttctgtcttcca

SEQ ID NO: 588427 - DNA, 537 bp, Homo sapiens
gctttttaccatcttaaacatgtgtgaatgaattttacagaatataagcttacagagaaaagctattataaataaaaaagaacaaatatgmattttaactagaagaaattaatacatctatttcaatctttctgaggttaaaaatgatcaatattaggatatctactaatagaaattatcaagttatataggtagaagtcaaacatgaagagggtaactttttgtctaccaagtgcttcataaataaggtgcccaaactgacactcatatttatgcatctttgactccaaacctatattcttaaactataatttatgttgaaaattggcaggtgggtggcaggacagaaatttttcagaatcctagagtataaaataaaactttattgcaaaagagtaagttgtttgacatacataatcaaaagaaatcggtttctattatatatataaatatatatataatacacatatttctcatatatatatatatatatatatatatatatatatatataaggatatacaacaataaggaaaa

SEQ ID NO: 588428 - DNA, 561 bp, Homo sapiens
aattcaaaagacagcaggtaagaggccaaaattgaccaaaaatagacaacacaaatagaaaactaaatagaatggtagatttaaatccaatcatgtcaattatcacattagatataaattatctaaacacaacaatttgtagacagagattgtcaaattgaatagaaaatcaagacccaaatatatgctgactacaagcacacatatacacacacatgtatagatactcacatttacatataaaaacagacacagattgcatgtactaggatggaaaaamacatgccttcacaaatgaaaggaaaactggagtgactatattaacatcagagagtaatttcagagtaaaaagataaaacagagagagggtcatttgagaattattgagagaacatagtaattctaaatatttatgtataacaatagaactttaaaagacataaaactgataaaactgaaaggaaaaatagggaaagccagcagccttccttcaacaattgatagaacagacaaaaaaaattagcaggtatctagaagtcttgaacaaaactgccagccaac

SEQ ID NO: 588429 - DNA, 485 bp, Homo sapiens
tgttcattcctccgggtgagttcgtggtctcactggcttcaggagtgaagctgcagaccctcgcagtgagtgttacagttcataaacgtggcgggtccagagttgctcttcctcccagtcggttggcagtcttgctgacttcacgagtgaagctgcagaccttcgtggtgagcgtsttacagctcttaaaggcggcgctccggagttgtttgttcctcccggtgggtttgtggtctcactgacttcaggaatgaagctgcagaactttgtggtgagtgttgcagctcatacaggcagcgcagacccagtgagcagcagtaagatttattgctaagagcgaaagaaaaaaagttccacgtgcggaaggggactctcggcaggtggcgaggctagctcgggtggactgcgtttattcccttaactggccccacccacatcctgctgattggtccattttacagacagctgattagtccatttcacag

SEQ ID NO: 588430 - DNA, 596 bp, Homo sapiens
gtgtctggcacatagtaaaagcatgataagtaacatctattagcaatttaacaaagtggaaaggtaggtcatatcttctgcagattagagtaaatgtgattctgactttaaaaaaaaatcctgtatttttacatgaaacacttcttgagatttctgttctcctctgcccagagcagaaagattaagctaccaaatggagtgcctgatttcagatcagaagtgaggtaagaacatccaaaacatcatccctcctcccctaccatttatttccctgacatggagtgggacttatctgggaaatgtaccaaagatagtggctaatgatatagggttttaaacaggaaaataaaagaataaggttttaggccaggtgtggtggttcatgtctataatcccaacactttgggagrccaaggtgggaggatcacttgaggccaggagttccagaccagccttggcaacataatgagactctgtatctactaacaaaacaaattaattagccaggcatggtggcgcatgtctgtattccaagctaccggggaggttgaaataggaggatccattgagcccaggagttcaaggctgcagtaagc

SEQ ID NO: 588431 - DNA, 596 bp, Homo sapiens
gtgtctggcacatagtaaaagcatgataagtaacatctattagcaatttaacaaagtggaaaggtaggtcatatcttctgcagattagagtaaatgtgattctgactttaaaaaaaaatcctgtatttttacatgaaacacttcttgagatttctgttctcctctgcccagagcagaaagattaagctaccaaatggagtgcctgatttcagatcagaagtgaggtaagaacatccaaaacatcatccctcctcccctaccatttatttccctgacatggagtgggacttatctgggaaatgtaccaaagatagtggctaatgatatagggttttaaacaggaaaataaaagaataaggttttaggccaggtgtggtggttcatgtctataatcccaacactttgggagaccaaggtgggaggatcacttgaggccaggagttccagaccagccttggcaacataatgagactctgtatctactaacaaaacaaattaattagccaggcatggtggcgcatgtctgtattccaagctacyggggaggttgaaataggaggatccattgagcccaggagttcaaggctgcagtaagc

SEQ ID NO: 588432 - DNA, 601 bp, Homo sapiens
tcaataataagaaaacaacctaataacagtcggcagaagattgaacagaatttctctgcagataacatatatgactagctaataagcacaatgaaaaaatcaataataattagaaaatgcaaatcaaaataattgtacaatagctaccactacatatatactcaaatgactaaaaaataaaattaaattaaaagctgaaaataccaactgctgggaagaaggtagagtagctggaagattgatatattggtggtaggattataaaagaatgcagccattttgaaaaatagtttggtaatttattataaagtaaaacatccacttaccacataacccagaaatcccatatttacccaaataaaataataacctatatttacacaaaatctgtatgtaaatatttatagagacttaatgcatagtaactccaaactggaaacaactcaaatgtgtgttacttgtgaaatgaatgaacaaagtgaggtatgtttataccatggattattactcagtaaycaaaaagggagaactacctaatactaacaataatatagatgaactacctaatactaacaataatatagatgaatctcaaatacat

SEQ ID NO: 588433 - DNA, 585 bp, Homo sapiens
tcttaactcctttccaactttactctagatttgaaggcagtgtgtaagacgtttccattttacctcaacgtacacatgaattatacttctgacatgaattatactctaccaactaaaaagtaaaattatactctaccatttataaagtaaaagcaagaacatttttaaataatccaacatgttatcattaactatagttaccatgctggaaaacagatctatttaactaattactcctgcctgtgattttgcatactttgtctaacatctccccaacctgatcccccaaatgccttagcttctggcaacaaacattctactctctatttctatgagatcatctcttttagattctacatgagtgagatatgtttacttgtctttctatgactggcttatttcacttaacataatgctaagagaagggatattaaatgttcccactacaaaaatggtaactatgtgaggtaatgcatatgtcaattacctaggtttaactattccacaatgtatgtatacttcaaaacatcatgttgtgcactataaagacatatmaatttatgtcaatttaaataaataatcccc

SEQ ID NO: 588434 - DNA, 533 bp, Homo sapiens
tacactaaagatcacattacagagcaaagaaatagaaaaaaaggaacccatgtcctcaatgatattgttaatctaccaaagtaaccgaactatatgtagttgtttttctgttactttacctatttgagtggacagcattaactagtggtaattcagagaagaaatccttataggtagtgactagaagatgggaaagacattgaatactagaaacagagttgtgcactcagtaattgagagggaggtttaacagactttgaaaatttatagagtaaaaaagaaagaaacaaaaaaatggcaaagggagcaagtagaaatgtggaacgtttttgcattgtgttgactttatgaataatatgagtcaaagagcgcaatgagagtcaaatcaatttgccttccatttccactaaagtattcactgcatataaaccactccaagtttccctgttgtattcccaggctaagcacattgtaatagaratataatttataactaaaagagacactaaccaaaagtaatactatgcatgaac

SEQ ID NO: 588435 - DNA, 573 bp, Homo sapiens
aggttctgagtgtcataatgatttaaaaaaaaatcactggccgcacttgttcccaattctctccctcccctcatgcgtccaagtgcagtatttctaagccagtcctccaatatgccatatatgggacagctccaccccatccctccatatatggtcatatcccacacccacccaccggctcatcacagacaaccaggaacccactcctgccctgacccaccatatacggacaaacacccatcctaatacgccaaacagaacttaagctcctccctctacactcacttcatttttaacaagtctgaaagtttttttaaaagttgagtgaataaattaacaggaacaaacaaacaaaaccagctgaaagtacttccaagcactaaccttcaattcttaatgactccaaacgtcacttacaggccctacctaacgctaacaaaaatactcctcctcctctgcagtaaagatgagacagtcctggtgggacacagcaccggcattaatgaagcgtgtctgaacaaccctaagcccattattaaagccaggcagccasgagctgtgggccaaacacaa

SEQ ID NO: 588436 - DNA, 442 bp, Homo sapiens
gggggtcttactttgttgcccaggctggtcttgaacacctcgcctcaaggaatcttcccaccttggcctctcaaagagctgggattacaggcatgagccactgtgcctggccccaaatagaactttttaaaatgaaaaacattttaaattaaaattatagtgaatggttttaacagcagaaaaggtgtgaaaaattatagaaatgcaatatagatgygaagaaatgatgcagcatgcagctcagggagagaagggtggaaagtataaatgtgagattaaaagggaatgggccaggctcggtggacgcctgtaatcccagcatgattttggaggccgaggtgggtggatcatttgaggtcaggagtttgagaccagcctggccaacatggtgaaaccccacctctactaaaaaaaatacaaaaattaggcaggcatggtggtg

SEQ ID NO: 588437 - DNA, 442 bp, Homo sapiens
gggggtcttactttgttgcccaggctggtcttgaacacctcgcctcaaggaatcttcccaccttggcctctcaaagagctgggattacaggcatgagccactgtgcctggccccaaatagaactttttaaaatgaaaaacattttaaattaaaattatagtgaatggttttaacagcagaaaaggtgtgaaaaattatagaaatgcaatatagatgtgaagaaatgatgcagcatgcagctcagggagagaagggtggaaagtataaatgtgagattaaaagggaatgggccaggctcggtggacgcctgtwatcccagcatgattttggaggccgaggtgggtggatcatttgaggtcaggagtttgagaccagcctggccaacatggtgaaaccccacctctactaaaaaaaatacaaaaattaggcaggcatggtggtg

SEQ ID NO: 588438 - DNA, 585 bp, Homo sapiens
gaattacttgagctcaggagtttgagaccagcctaggtgacaaagtgagaccctgtctcaacaaaaaatgctaggcttggtggcatgtgcctgcggtcctagccacacaggaggctgaggtgggaggatcacttgagcctgggaggtcaaggctctagtgagccatgatagctccactacactccagcctgggtgacagagtgagaacctgtcttcaaacaacaaacaaacaaacaaacaaacaaccccttatttttcagaagtacacactcaagaatttagaattgaaggaccataatgtttgcacttactctccaatgataagacaaatgcggtaaaatgttaacagtaagaaatctaagcaaagggtatcagagtattgtctgcactatttttattcttgtaacttttctgtagacttgaaattatttccaaataatttttttaaaaacagaaggcttatgaaaattttgcagaataagwgttcaagaggtatagttttaggatttagtcttagtcttagctacttcctgcttgctcagtattaactgctagtcagtacagggtagacagaaggagcccagg

SEQ ID NO: 588439 - DNA, 507 bp, Homo sapiens
tttgtacctcaattttcaaagccctttaaaataaaataggttcctgtgagacaatattatataggacactatgttgatatctcaggcattctagaaccactcgggtgacttccagaggaaaagacaaatccagatcaatgtatatattgattttggttaggaataatttctaccccctccaaagtccaaggcaatcaaccaatcactggaggttgtctttttttttttaatttttctttaaatttggggacacatgtgcaaaacgtgcagatttgttacgtaggtatatgtgtgccatggtggtttgctgaacctactgacccatcctctaagttccctaccctccctcccaatcccccaataggccctggcatatgttgttctgcttcctgtgtggagaagacatatgtgtgcaggtgtctttataatacaatgatttctattcctttgggtatataccacwtaatgggatagctgagtcaaatgatatttctggttctagatccc

SEQ ID NO: 588440 - DNA, 636 bp, Homo sapiens
ggctccagaagccactgaagtcaagacaaggagacctaaatgggctgtgatctgaagccctacaccactgcatttcttatttctatgtgtttgcttttttaaagaacaacaacaaaaaattcctaacagcataatkcactgacattcaataatgttaattttacagatgaaaaaattgaaatttagaaaaggcaaaagactcgcctccttgcctaggtacctacatgtgtagccatgtatatttgctttcccctttaacctttttgcctagcccagctgaattaccctagactcacattcattttattattgacaaggagtcacgttctgtaagagatcctgatggttgtcctctgtaaattttccttgaaatatagtcatgtgctgcgtaatgtttctgttactgacagaccacatatgtgatgatagtcctaaaatactataaaacccaccatactttaattgtaccttttctatgtgtagatgtgtttagataaataaattcttacattgtggtaaaattacctgcagtattcagtacagtaacatgctgtacaggtttgcaccctaggaacaataggctattccatctagcataagggtatagtaggccataccatgtaggtttgtgtaagt

SEQ ID NO: 588441 - DNA, 636 bp, Homo sapiens
ggctccagaagccactgaagtcaagacaaggagacctaaatgggctgtgatctgaagccctacaccactgcatttcttatttctatgtgtttgcttttttaaagaacaacaacaaaaaattcctaacagcataatgcactgacattcaataatgttaattttayagatgaaaaaattgaaatttagaaaaggcaaaagactcgcctccttgcctaggtacctacatgtgtagccatgtatatttgctttcccctttaacctttttgcctagcccagctgaattaccctagactcacattcattttattattgacaaggagtcacgttctgtaagagatcctgatggttgtcctctgtaaattttccttgaaatatagtcatgtgctgcgtaatgtttctgttactgacagaccacatatgtgatgatagtcctaaaatactataaaacccaccatactttaattgtaccttttctatgtgtagatgtgtttagataaataaattcttacattgtggtaaaattacctgcagtattcagtacagtaacatgctgtacaggtttgcaccctaggaacaataggctattccatctagcataagggtatagtaggccataccatgtaggtttgtgtaagt

SEQ ID NO: 588442 - DNA, 505 bp, Homo sapiens
aaattagaccgaatacaatagataagagagacagcagtaaaaatccagcaggaggatagcttgtgtctctggagtagaaaattcaatggatagaaaaaaaaaaaggtacttaaaaatatgagatttccctacagtgaaaaatttgagaatttaatgttgaaagtatatggtttaattaaggaaattgatacaaaacaattgatatcagtgtatattcttgttattatgaatgaatctctccgtcttctaggtaaaacktatgtataaacaagcaagggtagggaattaagctggttctagataacttcaccacagcattcagtggcagaatataccagagaagcatctatttagtttatggaaaataaaatatgatccaaaaagactatactcagaaaagatattcaaatacaaattcaaccaagaaacggcctcaaatataaactaactcaggaaataaagcacccatgctgcattcttgcaaaaaatcaggaagagaaaattc

SEQ ID NO: 588443 - DNA, 647 bp, Homo sapiens
tgtaaatcatgtaaataataaataatattttaaaagacagagtacatcagtgaaggtctctctgatgagatgaaatttaagaaaatatccaaaagaagcaaggaggcaagagcaaagactcaaagagtgaaatacactggacatatctgagggactttcaaaaagatggcgtgtctacagtaaattcagcaaggcatagagcagtagaaaatgagatcatgtaatattttgtagatccttgtaaggctgttggcttttgtcctgagtgatatgggaatcaactgcagattttgaacataggaattacctggtctgacttacatgtttaaagggttcctctgatttcttcatagaagatatactgcagggagaygtaccgggtagaaatgaggcaagatgagaagctattgcaataatccagggaagagatactctcccttgaactataggggtagatgtgatggagaagatagatggttagattttggacatattatttagggagatttaatgtgaaatgctgatggatttaatcttaaatttgagagaaaatgggtaaaataacagcaaggattttgactggagtaactggaagagtaatactgccatttgctgagatggggaaacctgtgagaggaatgaggaag

SEQ ID NO: 588444 - DNA, 673 bp, Homo sapiens
gttttaaaatctctatatcttataagttctaatttgtttttctttttgatctagctttggttcaaaaatggactctattattaatctgctgcttaatttctttaatgacttttaaaccttatttatttctccaagtttcctttaattttcaaatttgtcttaacatttagactccttctttagagcagcaaatcatttaaaatatatttattttaaaatcagttgctctctcattcaaacatattagcatgttaattctcctcttttatgttttcttcttttttgatcagctgcttctctttrtaccttgtaatgtttgagttcatgtttatttttacccagactttttttctgatggaatctcatgtggcttggaatgtgagactggcctctcgtgtatttgtgtttatattttctatatttgtttcttggttttgcattttgacaccaagaggttggtacaaattgaagtgttcaattttcccaaggtgtgatctattttaaaaaaattattattagagactttaaacaaaatctagattcaaagaagctaaaaataccttgttgcagacttttcctaatcggtggatcccttagaccctgaaagtgctacttgcaaaggataaacaaagccaaagccttatcccctatccttaaaacctcatcttctatc

SEQ ID NO: 588445 - DNA, 605 bp, Homo sapiens
aaaaattattattagagactttaaacaaaatctagattcaaagaagctaaaaataccttgttgcagacttttcctaatcggtggatcccttagaccctgaaagtgctacttgcaaaggataaacaaagccaaagccttatcccctatccttaaaacctcatcttctatcattgcaagggcattaatacatttgtgctagccataaccatgttccagaataagtaagacctcccccaccacatacttaaatgggatatatgcagcctctctccctctctctctgtctctctccgtctctctctctctctctctctctctctctctmtatatatatatatatatatatatatatatatacatacacataacctattttgtataagtcactaaatttttctattactttcctctatgatgaaccccccaatgaatgtaatggtagtataagggctttcagatacctaaaatttaaaaatcttttgagattgactcagaaatttagggatcatttttttttgattattataatttgtgctaatgtcaagaaccatatcatcaataagcaaaatgacctggcatgtaattattcttaaatagacttttat

SEQ ID NO: 588446 - DNA, 648 bp, Homo sapiens
cctcaaaaccttggtatttggattgtgagtatatatacacatatatatatctatatacatatatatctatgtacatatatmtatacatatatatgtagatatatatatctatacatatatatctatgtaggtatatatatctatacatatatatctatagacatatatctatgtgtatatatacatatatatacacatatatatatatatagtgtgtgtgtgtgtgtggtttttttttttttgagacacagtctcactctgtcgccaggctgaagtacaggggtgcgatcttggctcactgcagcctccacctgctgggctcaagggattctcctacctcagcctcccaagtagctgggattacaggtgtgcaccaccaccccagctaattttgtatttttaatagagaagggatttcactatgtgggccaggctggtctcgaactcctggcctcaagtgatccatctgcctcaacctcccaaagtgctgggattataggtgtgaaccactgcacctggccccagatagtgctttaaaggtgactaatgttcattgatgggacacagcagaagcaatgcagattaaaataagaatgaggcaaaaaaaaaacaaaactgatctatcagaattcaggtgggagcagtcaa

SEQ ID NO: 588447 - DNA, 455 bp, Homo sapiens
aaatgtagaagcatagtgtttatagatcagaagactcaatatagtcaattctactcagaataatataagatttaatgcagttgcaatcagtatctaagattttgtttttaaatatgaaaaacagattttacaatttatatggaaagacaaaatagtgaaaacaatactgaaaaggaggaataaagttgraggaatcacatctggctttaagacttactataaacctataataattcaaatgataatgataaagcaatgaatacctagattattgaacaaagtaaagggatcacagattgatttagaaatatggtcaactaatttttgacaaaggcacaaaagtagttcagtggagagagagtcatctttttaacaagtagtgttgaaaaaattgaatatccatatggaagaaaaaacactgacctacattttatagcttgtacaaaaattgacta

SEQ ID NO: 588448 - DNA, 411 bp, Homo sapiens
tgatacagttctgatatctgtgtcatcttggcattgacatctgtcattgtctttttctggttcttagcttaccaagtaattttagatggtctcctgaacattttgagtattatgttataaaacactaggtcagcccaggcatggtagctcacacttattacctcagcaatttgggaggccaagatgggaggatcactggagcctagtctgggcaatatagcaagaccgtatctccccaaagttttaaaaaaattagccaggcctgggggtctgtgcctgctgtcctagttactcaggaggctgagatgggagaattccttaagccaggagttcaaggctgtrgtgagctatgatcacatcactacacttcagccttggtgacagatcaagaccctgtctgagaaaagaaaa

SEQ ID NO: 588449 - DNA, 511 bp, Homo sapiens
agaagtgcttggtttgtgttaggctggcatgttctagacagctggctgtcagtacagtgtagtatgaacgcaatgttcagactsaagcctgggctgcacagcaggggcatcctgttggctgtgggtaggtgagggcagccacttggcagccactggacagaaagaagctagcagagtgcaagagctctgaggcacattaacatatattaattccataacacatttgttctaccaccagtttcatcaaagcatgcaggctggttattaggctattacctctcctctccaaatccaccctttttttttttttttttttttttttgagacagggtcttactctgtcactcaggctggagtgcagtggcatgatcatagctcactgtagcctcacactcctgggatcaagcaatcctcctggctcaacctcctcagtagctgggacttcaggtatgcatcatcatgcccacctaattttttatgttttgtagagatgggggtctcgctatattgc

SEQ ID NO: 588450 - DNA, 517 bp, Homo sapiens
tggtagaccttcattacatttcatctcatctcaagcattgatttttcaagttaagctagaaaagtgctttccttgcctcccagcagtccagagtttatgcctgtgcaaggttcaccaggcagatctaccaacatatcaattcagaagagactagtttgaggcagggtgtggtggctcacacctgtaatcccaacattttgggaggccgagatgggtgggtcacgagstcaggaggtgaagaccatctggctaacatggtgaaaccccgtctctactaaaaatacaaaaacaaacaaaaaaaagaaaaattagctaggtgtggtggcgggcgcccgtagtcccagggactcgggaggctgaggcaggagaaccacttgcaaccgggaggaggaggttgcagtgagctgagatcatgccactgtactccagcctggcaacagcagagcaagactctgtctaaaaaaaaaaaaaaaaaaaaaaaaaagctgaatggaatttaaccaggcaagggtgggaa

SEQ ID NO: 588451 - DNA, 556 bp, Homo sapiens
tgcttgttcagggcgaatgtggggaggttgcacggaagaagcgcaggtggttaaagaacactgaaagcagaggaaaactaagcaaaggtatgatgttttaatcactttcacattcagagaaaggtcgatagtttttttttgtagcaaggcataccacattggtcttaggtcacgttgttataatgaaacaccatatgctgagaacatgagcaacaaaaatttattttatggaggctaggaagtcaaagatccatgtgccaggtgattccccttttagtgagggtcttcctggcttgcaggtggcaccttttgcaatgtccttgmatgctggagctagcaatctctcttttcttccttttgtaaagccattaatcccaatgatggttgcagcggcccatttggagcagcctgcagggacgcagcttcagcaggggaggtcctgctggggcagcaggctccctggagtttgcagggttcagcacaggtgggagtcatgccccctagggagttggtggggcaggaggcctgtacttgtgggcacagctgcagctgccca

SEQ ID NO: 588452 - DNA, 576 bp, Homo sapiens
atctaagaaatttttgaggaacccgagagctcaccatcaaaacaatatacccatgtaacaaactgcacatgtctaaaatacwagctgaaattattttttagaaaagaagcttaccagttagttgcaagcagaaacacgaagaatggcatggcaaaaaaaggtaaattcgacttttctgattgaattatatgttggaaaatacaaaaattaaacttttctactattacatttttcacaaaaatatagatgagaaagccatttagggacagaatgaactctacatagaggaatggaatgggttgttgggtgattatacaactttaaacaatttaaccactgacaatattaaaattaatatttagcaaataactctctctgaatctagtggaatatgtgagaaatatgaggtacgccctccataagcttcataaaataaatattagtaacaaagtgaatgaaataattaaataattacagtatgggccagagggttctgtttagttggcctttcttgtgatgctgttcctaaatatcctaaaaagcttagcagctaattattcaccaaaaataacccca

SEQ ID NO: 588453 - DNA, 576 bp, Homo sapiens
atctaagaaatttttgaggaacccgagagctcaccatcaaaacaatatacccatgtaacaaactgcacatgtctaaaatacaagctgaaattattttttagaaaagaagcttaccagttagttgcaagcagaaacacgaagaatggcatggcaaaaaaaggtaaattcgacttttctgattgaattatatgttggaaaatacaaaaattaaacttttctactattacatttttcacaaaaatatagatgagaaarccatttagggacagaatgaactctacatagaggaatggaatgggttgttgggtgattatacaactttaaacaatttaaccactgacaatattaaaattaatatttagcaaataactctctctgaatctagtggaatatgtgagaaatatgaggtacgccctccataagcttcataaaataaatattagtaacaaagtgaatgaaataattaaataattacagtatgggccagagggttctgtttagttggcctttcttgtgatgctgttcctaaatatcctaaaaagcttagcagctaattattcaccaaaaataacccca

SEQ ID NO: 588454 - DNA, 452 bp, Homo sapiens
aacatatccagctttcattttctctctccttccttgccccatttaccttactcaccatattttactcccaccccaaatattatctttactatgttctgctccttcatccaccgtcagtcctaggacccacctcaccaccgtgtatatatgaatggcaagtccttcttcctatctccaagtctttgctcgtgcttccccttytgaaggctcttctccatttagcccagttcaattttccttcaaaggcaaatttactgtgcagttcacccaacaaaacatggaaggcaaaacttaaaatgtattcattctttcattcctttattcaacacactccttttaacactaggcaatgtgctagattctgagaaaatatgaagtgaaaaaatatataccatgaacatcatttgtaagagatattatgagaaactctgaaataggtgcttaatgaattc

SEQ ID NO: 588455 - DNA, 451 bp, Homo sapiens
acatatccagctttcattttctctctccttccttgccccatttaccttactcaccatattttactcccaccccaaatattatctttactatgttctgctccttcatccaccgtcagtcctaggacccacctcaccaccgtgtatatatgaatggcaagtccttcttcctatctccaagtctttgctcgtgcttccccttctgaaggctcttctccatttagcccagttcaattttccttcaaaggcaaatttactgtgcagttcacccaacaaaacatggaaggcaaaacttaaaatgtattcattctttcattcctttattcaacacactccttttaacastaggcaatgtgctagattctgagaaaatatgaagtgaaaaaatatataccatgaacatcatttgtaagagatattatgagaaactctgaaataggtgcttaatgaattc

SEQ ID NO: 588456 - DNA, 608 bp, Homo sapiens
tttcttgtgggcaaaaatcatgtcttatttcaaatatgtacctataacagttcatagtacagtgcctgatacataatatatgctcaataaattttggttgaattattgccaatttctatgtttcaccacagcaaaaattattataaacccatcagcggtcagtaatatatttgccttatgtggcaagctgtaagaaatatattygaagatttaacatatacacagaaatacactcacatatgcatattaactgcagaatatttggaagaatacagaaaaacagaagaatgaagatcacccaaggagaaagccttttgtcatatttatgtatttctttaggaattccctctatattatgtataggtcatatttatacatatgtagattatatatatataaacacttgcttacaaaatagaaaaacggtaatgtttctgtcaatttctacttgatataaaatctggtgctactcttatttaagtgcaactgtctatataatgaccttttctttgcaatgttgtttccagattcttgtggggcttccaaaataatataaaagtctcctcaccttctttcaagaagaatcacagaagcttagaagtgaagta

SEQ ID NO: 588457 - DNA, 608 bp, Homo sapiens
tttcttgtgggcaaaaatcatgtcttatttcaaatatgtacctataacagttcatagtacagtgcctgatacataatatatgctcaataaattttggttgaattattgccaatttctatgtttcaccacagcaaaaattattataaacccatcagcggtcagtaatatatttgccttatgtggcaagctgtaagaaatatatttgaagatttaacatatacacagaaatacactcacatatgcatattaactgcagaatatttggaagaatacagaaaaacagaakaatgaagatcacccaaggagaaagccttttgtcatatttatgtatttctttaggaattccctctatattatgtataggtcatatttatacatatgtagattatatatatataaacacttgcttacaaaatagaaaaacggtaatgtttctgtcaatttctacttgatataaaatctggtgctactcttatttaagtgcaactgtctatataatgaccttttctttgcaatgttgtttccagattcttgtggggcttccaaaataatataaaagtctcctcaccttctttcaagaagaatcacagaagcttagaagtgaagta

SEQ ID NO: 588458 - DNA, 612 bp, Homo sapiens
gattaataatgagtgatggcacctgaattaaggtagaagtagagaaagtcaagacatactagtggattagggagctatttaacaattaccagaacaactgcttggttatggatatggggaaaaggagattaaagtaactatagagtttctgggtagactgagcaattggacaaatggtgatgtcacactgagattaaaaacaacaggaggccggtcggtgtggctcacacctgtaatcccagcactttgggaggccgaggcgggtggatcacctgaggtcaggagttcgagaccagcctgaccaacaaggtgaaaccccatctctactaaaaatacaaaaattaggcaggcatggtggtaggctcctgtagtcccagctactcgggaagctgargcaggagaattgcttgcacccagggaggtggaggttgcagtgagccgagatcgtgccgtcgcactccagcctgggcaacggagcaagacttcatctcgaaataaataaataaacaaacaaacaaataaatacaaaataaaaataaaaccatcgtcagttcttgcttcacccaagacaccaggaaagacaatgagacatttcctgaggtttttacccca

SEQ ID NO: 588459 - DNA, 612 bp, Homo sapiens
gattaataatgagtgatggcacctgaattaaggtagaagtagagaaagtcaagacatactagtggattagggagctatttaacaattaccagaacaactgcttggttatggatatggggaaaaggagattaaagtaactatagagtttctgggtagactgagcaattggacaaatggtgatgtcacactgagattaaaaacaacaggaggccggtcggtgtggctcacacctgtaatcccagcactttgggaggccgaggcgggtggatcacctgaggtcaggagttcgagaccagcctgaccaacaaggtgaaaccccatctctactaaaaatacaaaaattaggcaggcatggtggtaggctcctgtagtcccagctactcgggaagctgagrcaggagaattgcttgcacccagggaggtggaggttgcagtgagccgagatcgtgccgtcgcactccagcctgggcaacggagcaagacttcatctcgaaataaataaataaacaaacaaacaaataaatacaaaataaaaataaaaccatcgtcagttcttgcttcacccaagacaccaggaaagacaatgagacatttcctgaggtttttacccca

SEQ ID NO: 588460 - DNA, 630 bp, Homo sapiens
cttagaatgaaatttagatatttttaacaatcccaagtgtgaaaaagcatcctgttagcaagaagaatctgttgaccttggcttcagtcctgtgagattttcctttgttagaaagtggtgataaagttgcagttccttcgttcaaattacatcagttttttctgggaaaactagaagaaacagtgaggaagagatatttttaaaaaatattagaatagagattgaaacaaatggagcatcatctacatttaactgtaccagtgttattcagagtgtgatacacattccacatgcttcagtcatcatcttgaagcctcttttcaaaatgatctcggctcactgcaacstccgcctcccgggttcacgccattctcctgcctcagcctcccaagtagctgggattacaggcgcccgccactacgcccggctaactttttgtatttttagtagagacgggggttcactatgttagccaggatggtctcgatctcctgacctcgtgatccgcccgcctcggcctcccaaagtgctgggattacaggcgtgagccacggcgcccggcctgagatcatatttaaagaactgtgattggaggatatacccactaggcactgagtacagataggactg

SEQ ID NO: 588461 - DNA, 640 bp, Homo sapiens
ggctgctgctcacatgactaaaatcctgcaaatggatttgaaacacctcattatttcagaaaccaaggacttgattaatatctctttcaaagataaatctccagaatcttcacatatagccagaactcaggcacgctgcatactagttggaaacatggaaaatattaagtatagacaactgctggttggaagactagagccaggatagctcttggagacacataagtgccatcccacactccaagtccctgaagtactgggatgatgcaatggaaatatccccagaatgggagatctagtcactttcacagtaacttctgtctgtagccccttttcattctcaaagttcccactagagaagttagttgaggcgtagacaaaacagacagggagagctcttatctgttaagaattatcacatttaggtcacaatatcactgaaagcccaaattttctaggaagggagtaaaataaactcttgctgctcattaaaactccccaratatttttccttaaaacaaaagtgaataaacagaggcagccagctgaactactttcttcaacggcagatgtagaaattttcttccagagcaactctttgtagagatgatctccacctctttctggtaagtctaaaaaa

SEQ ID NO: 588462 - DNA, 640 bp, Homo sapiens
ggctgctgctcacatgactaaaatcctgcaaatggatttgaaacacctcattatttcagaaaccaaggacttgattaatatctctttcaaagataaatctccagaatcttcacatatagccagaactcaggcacgctgcatactagttggaaacatggaaaatattaagtatagacaactgctggttggaagactagagccaggatagctcttggagacacataagtgccatcccacactccaagtccctgaagtactgggatgatgcaatggaaatatccccagaatgggagatctagtcactttcacagtaacttctgtctgtagccccttttcattctcaaagttcccactagagaagttagttgaggcgtagacaaaacagacagggagagctcttatctgttaagaattatcacatttaggtcacaatatcactgaaagcccaaattttctaggaagggagtaaaataaactcttgctgctcattaaaactccccagatatttttccttaaaacaaaagtgaataaacagaggcagscagctgaactactttcttcaacggcagatgtagaaattttcttccagagcaactctttgtagagatgatctccacctctttctggtaagtctaaaaaa

SEQ ID NO: 588463 - DNA, 640 bp, Homo sapiens
ggctgctgctcacatgactaaaatcctgcaaatggatttgaaacacctcattatttcagaaaccaaggacttgattaatatctctttcaaagataaatctccagaatcttcacatatagccagaactcaggcacgctgcatactagttggaaacatggaaaatattaagtatagacaactgctggttggaagactagagccaggatagctcttggagacacataagtgccatcccacactccaagtccctgaagtactgggatgatgcaatggaaatatccccagaatgggagatctagtcactttcacagtaacttctgtctgtagccccttttcattctcaaagttcccactagagaagttagttgaggcgtagacaaaacagacagggagagctcttatctgttaagaattatcacatttaggtcacaatatcactgaaagcccaaattttctaggaagggagtaaaataaactcttgctgctcattaaaactccccagatatttttccttaaaacaaaagtgaataaacagaggcagccagctgaactactktcttcaacggcagatgtagaaattttcttccagagcaactctttgtagagatgatctccacctctttctggtaagtctaaaaaa

SEQ ID NO: 588464 - DNA, 607 bp, Homo sapiens
tactatgttcaaaaatatcaagcagaaaaggagttaattgcatggactgaaccaatacaacattaaaataatcyttctatgactttttgcttgaaactttgctgatcctttggttttcagtcaagaaaacttgttttttcttttgagctatttacagcttttaacaatgaagtatactcctgtgagcaaaatttggagaatgtttctttctctctacctggtttctccagaatttggaaactatttgtgagtattcttaaattatggcaatatagtcatttgcataagtacaataagaatctgttttataggagcacagttggagacgctggttactttaccaaggctttgactgaaatggcattcttttaaatagaaacagactgctttaaggaatcagaggtgatttatagagccaataaaatcccttgaaaaaactggtcctcacataccttctctacccagtccctgtacaggagtcctaacctgtggtaagtaaagaatgccactttctaacaagcccaggagccccaagttaactttggacctccataggagaggaattcatccaattcatacaggtatttgcaggcacaaataaatccat

SEQ ID NO: 588465 - DNA, 371 bp, Homo sapiens
ggtctcaaactcctgggctcaagtgatcctcctgcctaggcttcccaaaatgccaggattacatgtgtaagccactacatccggcccactcttattcaaaataatactgtacgtcctagccagagcaatcaggcaagagaaacaaataaaaggcattcagattaaagaggatgtcaaactttcgctctttgcagatgacatgaacttatatatagaaaaacctaaggactccaccaaaaaactcttagaactgaccaacraagtcagtaaaattgcagtatacaaggtaaacctataaaaatcaacagcatttctatatgccaataatgaactagctgggaaaaaaaagcaaagaaagcaatcccacttac

SEQ ID NO: 588466 - DNA, 529 bp, Homo sapiens
tcaaattttcatcctattgcacaaaccaactacccaatccagcgtttgcatttggatacatttaatgaataaaaatatgaatcactgatactttcttaacatcttttggttatttattcaccrtgttagatgtgctagtgatgtgaaaagtttggaactgctaaaatattttataagctggaggaggttttttttttttatcagtttattttaagtcaacagattcgggggcaagggtggatgtattaatctgttcctacactgctataaagaactacctgaggctgggtaatttatgaagaaaagaggtttaattgacttatagttccataggctatacaggaagcatggctgggaggcctcaggaaacttataatcatggtggaaggggaagaggaaggaagtacatgttcacatggtgacaggagagagagagagaaaggagggaagtaatacacacttttaaacaatcaggtctcgtgagaactcactcactatcatgagaacagtgagagggaagtccaccccc

SEQ ID NO: 588467 - DNA, 428 bp, Homo sapiens
tctcccagtcaaactcaggagtttctacattattgtctttttattgttattcccatcatgtggaatgcactttcacttaactttttatgggaacatttgtattcctatcttaaaagcttcaggtaagaggcttttcttcctgggtggctcctctgcccctgctgccctcccacctggagacatagaaatgcttgccttgatgagtcctgacagccttgctgtactgtgtgcacttggtctgctcttgttaatttaacaaaagttctggaaggcaacattcgagtcttytttgttcacagatacatgtccctatcactctctactgagagcatgtcacatatttggtgctcaatgactgttaatacaatgaacgcatgaatgtctactgtgtacctagcgctagggagccagtgctaaataaggcggat

SEQ ID NO: 588468 - DNA, 428 bp, Homo sapiens
tctcccagtcaaactcaggagtttctacattattgtctttttattgttattcccatcatgtggaatgcactttcacttaactttttatgggaacatttgtattcctatcttaaaagcttcaggtaagaggcttttcttcctgggtggctcctctgcccctgctgccctcccacctggagacatagaaatgcttgccttgatgagtcctgacagccttgctgtactgtgtgcacttggtctgctcttgttaatttaacaaaagttctggaaggcaacattcgagtcttttttgttcacagatacatgtccctatcactctctactgagagcatgtcacatatttggtgctcaatgactgttaatacaatgaacgcatgaatgtctactgtgtrcctagcgctagggagccagtgctaaataaggcggat

SEQ ID NO: 588469 - DNA, 596 bp, Homo sapiens
aaaaattttaaatttttcttttcttatttcaaaggcatttaaatgtgctgttttctcagcttttttttctactcagatattcaaagttgatgtcatattgtattttctaagatttgatatatatttcactataatagtgctttaccatgacttaactattttaaaatactatttatattttgttgtatttaaattattatactgctattttatataatatttttattatcraagcataatttttaacggctgcaaaatagccaattgagtgaccttaaacagtaatttatcaaaccatttattatttttagatgcttaggttgtttttaatttaaggctactatatagattaattaatgaaagtttttatctgtatttcttgttatcttcttagattagatagtggtcaacaaatacaaacatttttaaaggtatttatgatacaatgacaaactctagaagagttgtagcactgtgtatgctacaagcaaactgtgagaatattcttctcaaatccttcttttgtaagttgatcacattatttctcaaaacttttgtaaatttaataattgaacattttaatttctaccaaaagt

SEQ ID NO: 588470 - DNA, 596 bp, Homo sapiens
aaaaattttaaatttttcttttcttatttcaaaggcatttaaatgtgctgttttctcagcttttttttctactcagatattcaaagttgatgtcatattgtattttctaagatttgatatatatttcactataatagtgctttaccatgacttaactattttaaaatactatttatattttgttgtatttaaattattatactgctattttatataatatttttattatcaaagcataatttttaayggctgcaaaatagccaattgagtgaccttaaacagtaatttatcaaaccatttattatttttagatgcttaggttgtttttaatttaaggctactatatagattaattaatgaaagtttttatctgtatttcttgttatcttcttagattagatagtggtcaacaaatacaaacatttttaaaggtatttatgatacaatgacaaactctagaagagttgtagcactgtgtatgctacaagcaaactgtgagaatattcttctcaaatccttcttttgtaagttgatcacattatttctcaaaacttttgtaaatttaataattgaacattttaatttctaccaaaagt

SEQ ID NO: 588471 - DNA, 610 bp, Homo sapiens
tctcggagcctcctcggcctcggtgcccactctggccgcgctggaggagcccttcagccagccactgcactgtgggagccccttcctgggtaggccaaagccagaaccggctccctcagcctgctgggagatgtggagggagaggcacgggcaggaaccggggctgcatgcagggcttgcaggccagctagagttctgggtgggcgtgggcttggcgggccctgcactcggagcggccggcaggcccccagccctgggcagtgaagtgcttagcacctgggccagcagctgcggagggtgcgccaggtcccccagcagtgccggcccaccggcactgagctcgatttctcgctgggccttagctgcctctctgtggggcagggctcgggacctgcagcccgccatgcctgagtctccccaccctgggctcctgcatggcccaagcctccccgacgagtgccaccccctgctccatggtgcctggtcccatcgaccgcccaagggcagagaagtgcgggcacacacgcaggactggcaggcagctccacctgctgcccccggggcrggatccactgggtgaagccagctgggctcctgagtctagtgggga

SEQ ID NO: 588472 - DNA, 304 bp, Homo sapiens
atcaatgtttgttttttatacatattttggytttgtgtgtaggtctctgggtttgtgtatatatacataatctaactaactaaagcaggtttgatcaaaactaacacttcagaaataaatgttatctttctcctatggcttcaagttaccaccagtgggtgcaaacattttcacttaaaaggtgtcgagcttattgttatttgaacatagggtattttaggtcctttctagatccctgtagctcttcaaggtactggagtaatgatggtgcatagggaggatggatttagcaggagaaaaatct

SEQ ID NO: 588473 - DNA, 575 bp, Homo sapiens
taaggacagcagcaagccatgagggatccgcccccatgacccaaacacctctcaccaggccccaattccaatcctggggattatgtttctttcttttgtttgttttgagatggagcctcgctctttcgcccatgctggagtgcaatggcaggatcttgactcactgcaacccctgcctcccaggttcaagcaattctcctgcctcagcctcctgagtagctgggactacaggcacacaccactccacctggataattttttttgtatttttagtagaggcagagtttcaatatgtttgccaagcctagaactcctgacctcagatgatccacctgccttggcctcccaaagtgctgagattacaggcatgagccaccatgcctggctaggattacatttcaacatgakattttggcaaagacaaatatcaagctatatcaacaccctattcagtaaatggttcttggaaaattgcctagccatatttagaagaataaaactgtacccctacttctcaccatatgcaaaaattaactcaagatggattaaagacttaaatgtaagacctcaaccta

SEQ ID NO: 588474 - DNA, 306 bp, Homo sapiens
ccaccatgcctggctaatttttgtatttttagtagagatggagtttcgccatgttggccaggctggtcttgaattcctgacctcaagtgatccacccaccctggcctcccaaagtgctgggattacaggcatgagccactgtgtcaggccgggagaaagactttcaactggtaattgaaaattacacaagtttaaggagttgcaraggaaaagtacaggttgctatcagagcacagaagagttgcgggggaatgtttgtgagggagaccttctttaggaagcaacacttaagacctaaggccagag

SEQ ID NO: 588475 - DNA, 643 bp, Homo sapiens
gtggttgaaaggggccagtgtagagcttgggctgtggcttcagagggtgcaaaccccaagtcttggcagcttctatgtgggtgttgagcctgagagtgtacagaagtcarggattggggtttgggaagctctgcctagatttcagaagatgtatggaaatgcctggatgcccaggcatagttgctgcagaggtggggctctcatggagaacctccactagggcagtgagaaagggaaaagtggggtcagagcccccacacagagtccctactgaggtacaacctagtggtgctgtgagaagagggccaccgtcctccagaccccagaatggtagatccaatgacagcttgcaccatgtgcctggaaaagctgcagacatgcagcaccagtccacaaagcagctaggagggaggctgtaccctgaagagccacggggcagagctgcccaagaccatggtaacccatctattccattagagtggcctggatatgagacatggagtcaaaggagatcattttgaagcattaagatttgactgccctgctggatttcggacttgcatgggcactataacccctttgttttggctattttctcccattttatatctaggaagaaactagcttgcttttgattttacag

SEQ ID NO: 588476 - DNA, 599 bp, Homo sapiens
gtaccaccatgctctgctaatgttttgtatttctgtagatatgaggtttttctatgtttcccaagctggtcttgaacccctgaacttaagtcatcagcccacatcagcctcctaaaatgctggaattacaggtgtgagccaccgcacccagttttccattacctcttgaagttaaatgcatttacagactatgagcgaggaatttcactcatacgaatatmtcctagagaaattctggtacctgtacgccataagatgaaatacatacataaatgtttatagtagcattatccataatagattaaaaacttaaagcagacctaatggccattaacaggatgaataaataaatagagtatattcatacaatggaatattgtaaagcaatagaaatacatgaagtacaatgagatggaacaagatgtatggacttaaaaggtttaatgctgaggaaatagtctctattccattcatataaaagataaaatacagacaataccaaataatatactgtttagactccatacatatgtcacaaaactataaagaaaagcaaggcaaatattaattaaatatgaaaaataatgagttattttagg

SEQ ID NO: 588477 - DNA, 599 bp, Homo sapiens
gtaccaccatgctctgctaatgttttgtatttctgtagatatgaggtttttctatgtttcccaagctggtcttgaacccctgaacttaagtcatcagcccacatcagcctcctaaaatgctggaattacaggtgtgagccaccgcacccagttttccattacctcttgaagttaaatgcatttacagactatgagcgaggaatttcactcatacgaatatatcctagagaaattctggtacctgtacgccataagatgaaatacatacataaatgtttatagtagcattatccataatagattaaaaacttaaagcagacctaatggccattaacaggatgaataaataaatagagtatattcatacaatggaatattgtaaagcaatagaaatacatgaaktacaatgagatggaacaagatgtatggacttaaaaggtttaatgctgaggaaatagtctctattccattcatataaaagataaaatacagacaataccaaataatatactgtttagactccatacatatgtcacaaaactataaagaaaagcaaggcaaatattaattaaatatgaaaaataatgagttattttagg

SEQ ID NO: 588478 - DNA, 528 bp, Homo sapiens
ttaagggatctatattttccatggaaactgatttctgtgaaagggggaaaaaagataggaatcaactgatcaatttgtgctcatmtaagataatgtatatttgtactggattattttcaaaattcccttggcacaaatagtctttatcacacaatgccaactgaatcacacttaacatacttaggatccttgcaggtttagcaaatcagtgcagcataatttgccagactcttcatggtattgctgggaacaggtgtggaagaaggagcacaagtttaagaatctgatagacagagattgaaatattaataatgcctcatgtaagcagtgtggatttggacaaattacttaatcttctgaagtctcagttctgtcatccataaagtggggataaataagatataattttcaaacctgatgtgaaaataaaataagataatgtaccgaaagtggttaataccatggctggacctgagcttaggtcttgtctctatagccttccctgactctacaactgggttagggcct

SEQ ID NO: 588479 - DNA, 498 bp, Homo sapiens
taataatatattcatatttgaaactagcatgttccataaacaatttggttaccttagtacaagatgtctaaggaagtttgtattaattatattgcacatctttggaggctaaagcaactgaagtctttgcctttacatataataccctttctttgttgtgtgataattataytctggttatgtagaaaatataatttgattctgtagttctctctgctttagaaagaaagttttaacaatctttttaatactttgaatcatgcaacacattcctggagcatcaacttagcatttgcagtcagcatccacagaaaaccttgctgtttatctgctttcagtccttctcattgccctgaagctgcatttgtttctacattattgttactctggctacacccagagatttcttctgtattcttgaacactacagacttgcctttcattagatttttctccttcttgatgctttttcttaacctggtatacatgtattgccct

SEQ ID NO: 588480 - DNA, 616 bp, Homo sapiens
gtggcatgatcttggctcactgcaacctccacttcccatgttcaagtgatcctcccacctcagcctctctagtagctgagactacaggcgtgtgccaccatgcccagctaatttttgtatttttagtagagacagggtttcatcacgttggccaggctggtcttgaactcctgacctcaggtgatccatccacctcggcagcatgagccactgcgcctggcctataattttattcttaattttatgtcatatgaggattggggcagaaagatccatatatattctataaaattaaattctaataaataaatgaatatccatggaggagattatttttcttgtgaaattcattcccagtacctacgtttatttacagaaaaagtgcattataactgttcagttttggtgaataactctatacttgttgcttatgatttcttatgtgtggagcataaataaaaaaattgtgttattataaattgtcaaattgccaatcatcttgcaaaagtagccattcagtctatrtaatcttaggaaagcctgcacatatttctggaaaaggaagtttaggaggtggaagttttttctaccatggttgaaagtcttcttgattgaa

SEQ ID NO: 588481 - DNA, 431 bp, Homo sapiens
gctttgaggagttatacccgttactcagccttgttaaaaatctgaaagagactcaggccatgtcagaggcaatcacttccaggggacttgttttgtgtccttggctgtggtagtcatatttgttcagcttgttcagcttttttcttcatttttcaccccttagtatcctatatgccttgattgtggcaaagtttcttataacaacttagtattgaggtttcttatttgaaagtgctgatgaattgatcctttttctttctttctttctttttttttttttttttgagacggagtctcgctctgtcgcccaggctggagtgcagtggcgcgatctcggctcactgcaagctccgcctcccgggttcaggccattctcctgcctcagcctcccragtagctgggactacaggcgcccgctaccacgcccggct

SEQ ID NO: 588482 - DNA, 624 bp, Homo sapiens
tgttatctgcaagcagagatttgcacaccatttgaaaaacaacttctgatctatagtagaaatggagtgcctggtggtgaggaatcaagcgactttgaggtcagagctgcccattatgagctgggttctgtcagaaccaccatttcgtaaggtagatgggtccagcagtaattcatcacragatggacatgaggaatctgggatcagcataaacgaggccagagagtacagataagctacatgaacaggtggcccagaacccatgtcacccactgtgctgcatcagtaactcttccttagtttatacctatcgataaatatgtgtgtggaggtagagaggagtctcttatgactagatgatagaggagaaaaaggtctgagcttggctcatggataggacatctccatatgctgaagatggactgctgctgcattatccaaagtcccattcaggggtgaacctaaaagagaagagttaggcaaaactctttcactgggtagagatttgagtggtacacttgacattttttaagaaaataaaactgtcctgagataaaaaatatattggaattcaaaggaagcactgaataccttacctgattggccgggggcctgccaggacaa

SEQ ID NO: 588483 - DNA, 624 bp, Homo sapiens
tgttatctgcaagcagagatttgcacaccatttgaaaaacaacttctgatctatagtagaaatggagtgcctggtggtgaggaatcaagcgactttgaggtcagagctgcccattatgagctgggttctgtcagaaccaccatttcgtaaggtagatgggtccagcagtaattcatcacgagatggacatgaggaatctgggatcagcataaacgaggccagagagtacagataagctacatgaacaggtggcccagaacccatgtcacccactgtgctgcatcagtaactcttccttagtttatacctatcgataartatgtgtgtggaggtagagaggagtctcttatgactagatgatagaggagaaaaaggtctgagcttggctcatggataggacatctccatatgctgaagatggactgctgctgcattatccaaagtcccattcaggggtgaacctaaaagagaagagttaggcaaaactctttcactgggtagagatttgagtggtacacttgacattttttaagaaaataaaactgtcctgagataaaaaatatattggaattcaaaggaagcactgaataccttacctgattggccgggggcctgccaggacaa

SEQ ID NO: 588484 - DNA, 622 bp, Homo sapiens
tttgtaaaagagagcaaatgatggctcctacttcccrgagcaatcatcgctatgaagagataaaacctataagccttttgcacaataacaattaaatttcaattaattctaccaataattgtaaaagattagaataccaaggaactaatactttcactcctcatgtcaaagaaaaggccataggtaggtattttctattcaaggaactccccagagaatatctccattttttaaaatccataaagtttcagtagagattaaaaagagttttcccagaatgctatgactttttctttatatttccttaaatggaatagtagtctaaaacaagtagagcatttcaaatctcagcctctaaattatttttagataagtttgctaaacaggaaatgttacccataaattaataattatcagttattagcctagagttgttagctccactttacacctagttgtagtcacaagataaatttaattaaattagcataaattaaggttgtgagtattctagctttcaatacctctataattccaaaaataaaaataaaaggaaagaaagagacagttactaacacaagagaatgggtaattaaatgaattatgacaataaaggacagct

SEQ ID NO: 588485 - DNA, 503 bp, Homo sapiens
gggcaagtgtatatattactcacgtctgcgtctctagtctctagcaggctgctcaatatttaggaggaattcggcaaatgtccaatgaatttaaaaatgtgtgaataaacagattaatgaggtgcacaccagggcactttgcgcctaggtttatgaaatggttatgtgcagaaaatattatatacccaaaagtcattagtttacagcatcctaataaaggagaagtaatttgcggcaataaataatcctgtacatatatgcagaaaagaaaaagcatcctttggacttargctaatctgcatctttcataaaactcaacttcagttgatttggtataagttctgatgcaaatgactgtcataagtactcgtgaatgcaatgaaagtaacaagtattaaggtgctgagtagtggaccctgttataatcaagctgatatgggaaagaaaaaaaaagctaaatgttaaggtttacatttgtctttaaggcttctgatgtatttgta

SEQ ID NO: 588486 - DNA, 474 bp, Homo sapiens
acagacatgcttcagatgaaatccttctttctatagctattatttgagattttacaatcaagacaccaaattacttaaatttatatttgatgggccaacataaagataactaaaatgaatttaggcttgggactttgcwttgatttgggatgcaggaaaaatatctaggcatgataaaaactaaattacccatttctttcctcaatgcataagaggaggctaaatacttgatgaaactgtatcaatgcctttagggtacgatattatcatttcttaaattgctactttggcaaatgtgaagaccagaattattaaattatactctgctatctggaacagaactcctacctatacagcaaattttgtactaatgtaacagtgaaacataatctcaagcttcttgaaacaaagaaaaatcaatatcctcctaaaacatgcgatataaagtttaaatttttcacaatggattggaaa

SEQ ID NO: 588487 - DNA, 633 bp, Homo sapiens
gcatgtaaaaaaacaattaacaaaaatcttcacaaaaacataaattttcagagtagaaaggaaaatgtcaccttgtagtcttgcccctagaatagtccctcttctaaatataactactctcatttcttatgttaataacacacaaaattaagaaacagattctatgtgttttctaaagtgttgcaatactaaatgtataccaccaagtggtagaaattctgtcaaatacataaccaaatcaacacagaaagagagagagagacataaacctgatcaagctctggatctatgtattaatttacaggaaatgcagaaaataaagaaaatgtcaatcaaaagtaaaattcagttcccaataataagctgttttgacaaatggcaagaagtaaaagaacggagggaaacatatttagattacaaaaaaattgagaaacatatcaaataaakgtgggatgtgcaatgtatttagatcctgatgtgaaaaaaaaaattttataaagacatttatgagagaagggagagactagctattccatgatgataatgaactattgtcttttgtgtgtattgtacattttttgagagcaattatatcttaaagttgcatgctgaagtgtttaaaataaaaccata

SEQ ID NO: 588488 - DNA, 369 bp, Homo sapiens
gaatggactaaaggtcttttaaaaacacacctcaccaagctcagccaccaacttaaaaaggactggacaatacttttaccacttttgcttctctcagaattcaggcctgtcctcggactgctacaaggtacagcccatttgagctcctttttattaggccccagtctcattccagacaccgggccaacttagactgtgccccaaaaaaacttgtcatccctactatyttctgtctagtcatactcctattctccgttctcaactactcatacatgccctgctcttgtttacactgccggtttacactgtttctccaagccatcacagctgatatctcctcgtgctatccccaaactgccattcttaact

SEQ ID NO: 588489 - DNA, 369 bp, Homo sapiens
gaatggactaaaggtcttttaaaaacacacctcaccaagctcagccaccaacttaaaaaggactggacaatacttttaccacttttgcttctctcagaattcaggcctgtcctcggactgctacaaggtacagcccatttgagctcctttttattaggccccagtctcattccagacaccgggccaacttagactgtgccccaaaaaaacttgtcatccctactattttytgtctagtcatactcctattctccgttctcaactactcatacatgccctgctcttgtttacactgccggtttacactgtttctccaagccatcacagctgatatctcctcgtgctatccccaaactgccattcttaact

SEQ ID NO: 588490 - DNA, 369 bp, Homo sapiens
gaatggactaaaggtcttttaaaaacacacctcaccaagctcagccaccaacttaaaaaggactggacaatacttttaccacttttgcttctctcagaattcaggcctgtcctcggactgctacaaggtacagcccatttgagctcctttttattaggccccagtctcattccagacaccgggccaacttagactgtgccccaaaaaaacttgtcatccctactattttctgtctagtcatactcctattcwccgttctcaactactcatacatgccctgctcttgtttacactgccggtttacactgtttctccaagccatcacagctgatatctcctcgtgctatccccaaactgccattcttaact

SEQ ID NO: 588491 - DNA, 369 bp, Homo sapiens
gaatggactaaaggtcttttaaaaacacacctcaccaagctcagccaccaacttaaaaaggactggacaatacttttaccacttttgcttctctcagaattcaggcctgtcctcggactgctacaaggtacagcccatttgagctcctttttattaggccccagtctcattccagacaccgggccaacttagactgtgccccaaaaaaacttgtcatccctactattttctgtctagtcatactcctattctycgttctcaactactcatacatgccctgctcttgtttacactgccggtttacactgtttctccaagccatcacagctgatatctcctcgtgctatccccaaactgccattcttaact

SEQ ID NO: 588492 - DNA, 616 bp, Homo sapiens
aaataaaaattaaatcaaatttaaaaagtcagctggatgtggtgacatgtgcctgtagtcttagctacttgggaggctgaggctggaggattacttcaaccaaggagatcgaggctttagtacgtcatgttcatacccctgcactccagccagagtgatagagtaagaccctgtcctctgccaagaataaaaattaacgaaaaatgaaaaacatgaaaaatgaaacctatacagtcatrtgttacttaacaatggggattcattctgagaaaggtgattttgtcattggtgcaaacatcagagtgtacttacacaaatgttgatgttataactggctgcacacctaggctatgtggtatagcttatggctcctaggctacaaacctatacagcatgttactttcctgaatactgaagacaattgtaacacaaagttaagtttttgtgtatctaaacatacctaaacatagaaaaagtacagtcaaaatgtggtattataatcttatgggaccacattgtataagcaatctgtcattgactgaaatgtcattatgcagagcatggctctgtttcatcaatagaaaacaggacgcagcagtccttcaacaacagcacc

SEQ ID NO: 588493 - DNA, 620 bp, Homo sapiens
tattatcaaaatagaatagttttagagaaatttaaaaatgaataaaagtttaaaaaaatgtaaatgttattgccatgtaagacaacagtgtatttcttgtgtttccttgcaggcacaaggaaacctttagtatttcaaacattggtttattgaacaataatgaaattatagaaattatagcagttttaactgtaagaacacacactgctgtactgtcctgagaacaaactaagttaatccctatatacacacaaatttatacctaaaatcaactaccttaaaaacttttaggaaacataaaaatacagatgcatacattctattagccatcagagtgatggtttctttaaaagtcttggcacctctgggaaactccattgcgcactgtgagagaatgaaagaaaaaaacggtaaataacatcttagtattactatgaaaataggtttgaytttgcagaatccctgaaagggtcttggggctctcggggttatcctgaccatattttgagaattgctggttgtctaatagttttgtaatatattgtacagacactgaatacgttgtagagattatggattctgttatattcctattaagaatattaactttgtgttttagc

SEQ ID NO: 588494 - DNA, 584 bp, Homo sapiens
cctaggcagaagaggtagaacctcaaattttctagagaacaatcttagacaatatccatttaaaccctgtattggcagctctgacaaaattgagctttgttattccatattcaaaacacaaagcytgatttctgttccacaatccattaaatattaaagtttgttgggaatactgccacagggactctgaatttcccagaattatgcagtctttcaatatgtattaaattttgtgtaaaaacttatagccataaactgtctatctctgggaatccctttccttcctcaattgcatagagctatccaaattaatagttaagtcttctgagaaaatcgtattctaaagtgaatctagctaaataactcccactttccacctatggcctcttttattgaattttttactatgcaattgggtatctcatattaaaagttcagtaagtataaaatacaacacttgtcattgttacaggtaatttaatttatggggaaatccctactgtattacaaaagatgtttaaagatgacttgggaacccgtaaaactgatatttattaatgtaactaaccaagcgtagatgtgac

SEQ ID NO: 588495 - DNA, 584 bp, Homo sapiens
cctaggcagaagaggtagaacctcaaattttctagagaacaatcttagacaatatccatttaaaccctgtattggcagctctgacaaaattgagctttgttattccatattcaaaacacaaagcctgatttctgttccacaatccattaaatattaaagtttgttgggaatactgccacagggactctgaatttcccagaattatgcagtctttcaatatgtattaaattttgtgtaaaaacttatagccataaactgtctatctctgggaatccctttccttcytcaattgcatagagctatccaaattaatagttaagtcttctgagaaaatcgtattctaaagtgaatctagctaaataactcccactttccacctatggcctcttttattgaattttttactatgcaattgggtatctcatattaaaagttcagtaagtataaaatacaacacttgtcattgttacaggtaatttaatttatggggaaatccctactgtattacaaaagatgtttaaagatgacttgggaacccgtaaaactgatatttattaatgtaactaaccaagcgtagatgtgac

SEQ ID NO: 588496 - DNA, 361 bp, Homo sapiens
catagccaaagaaatcacatgaagactacattactgcatgcacccacgatcaaagccaaagtgccctacctacccaaccgacaacatagatatatcttcagtaaaaactcttcccctatgaagtcaaccccccaaaattggaagaagtgactatagtaccagatgtgcagatatcartgtaagaatgcaagaaacatgaaaaatgatggaaagtaacacctccaataaacacaataattctctagcaacagattccaatgaaaaaggaatcaatgaaattcctgaaaatcaaaatgatattaaagatgtttagtgagttactaaaaaaactaaaaatagagctattatgtgatccagaaat

SEQ ID NO: 588497 - DNA, 459 bp, Homo sapiens
tcagaattctccagacactttccatctggagtcaacactatccttgcagctgctccgaaggccacgccctgtggccagccatggatgggatcaagtgtccatccttctggaggccgagcatagggcaggctttggaagaacaaattcaaaggcggctttttttcaaaggacaaactgaaagccagtagaggctgagggaacagagaagcacttgtggggtggaagggcagaaactctgagcccagagggagcagggagaggcctgccaagcccagggctaggccaggagtgctggggaagrgtgttgagggggaagccagagaccatggagagagagatgaatgcagataggagtctctctctctctctctctctctctctctctcatgcacacacgcacacatgtggactttcataacccatcccatcctctatgttctttgagttttgctctgccag

SEQ ID NO: 588498 - DNA, 581 bp, Homo sapiens
catgtgcccatgagagagagtrtgcatgtgtgtgcatacgaacacaagttgctgtgctggagaggaagctgggaaaggagaggagagcatgcacttttagtcatccacatacatacatatgtgtgcacacacacacatccacccagagcctgtctcccaaatcgatggctcaaagtcactttcttatcgtagaccagaccccacttagaccagcggcttcaaccttgcctgcacattaagatcacttgaggagcttgtaaaaatcccaatgaccaggcaacaccctagaccaatacatcagaatttctggagatgaaattgggcatcaatacttcatatcaatatttaatatttaataatctccttgggtgattccaatttcctgccagcgctgagtgctcctctgcatagaaagcccttttcctactcccctgctcagaaagcttttactcaccatttaagacgcaagtcccatggctactttccagggaaatccttcctgagaacctccccaagagttagttcttcctttcctgaagctcccgacaacaccttagtcatctgctataatcataattatt

SEQ ID NO: 588499 - DNA, 585 bp, Homo sapiens
ttactgtctccttagggtctgtaacagtgcttatgcaaagtaggtgctcaggaaatatttgttgaataaaacgctgacattaaattctttttatcttcaggaggccttccctgattcctgctgatatggtttggctctgtccccatccaagtctcatcttgcattgtagctcccctgatctccacatgtcatgggagggacccggtgggaggtaatagaatcttgggggcgggtctttcctgtgctgttctcatgatagtgaataagtctcaggagatctgatggttttataaagggcagttcccctgcacagsctgtcttgtctgctgccatgatgtgattgaggatgtgattttgctcctcatttgccttctgccatgattgtgagacgtggcagaagttccacagccatgtggaactgtgagtccattaaacctctttcctttataaattacccagtctttgatatgtcttaattagcagcgtgagaacagactaatacacctgcctaccagcacttaatggttaggtgcttccctactattctagtgctttcctatctcagctctttaatattgactgctt

SEQ ID NO: 588500 - DNA, 492 bp, Homo sapiens
tttgaatccaccgacgacttggaagctcccccggccccctcaacttcaaygtacatcatacatgtattgattgataactgtgtctccctaaaatgtacaaaaccaagttgtggcctgaccactttgggaacatggtctcaggatctcctgagggctgtgtcatgggccataggtgacttatatttggctcagaataaatctaatattttacagagttggactcttttcattaacaaacaaaaagcacacaaatgtgaaaaacaagacactaaatagactgcaaaaaatgaccctggcttccaggatgagggctgaaacaagatgggagactgtcgcctcattccccttcagctggaaacatgcacattgggtgatatggtttggctgtgtccccaaacgaatctcatcttgtagttctcataatccccacgtgtggtgggaggaacctggtgatgttctcatgatagtgagtgagttctcatgagatctgat

SEQ ID NO: 588501 - DNA, 589 bp, Homo sapiens
  misc_feature 8, 291: n = A,T,C or G
tttattgngtacatgagataaatattatgtgcaatgtgaaataagcacatcatggaaaatgaggtatccatcccctcaagcatttatccttaaagttacaaacaatccagtgacactccttattttcaaatgtacaatgaagttattattgactatagtcacctgttatactatcaaatagtagattttattctttctggctatttctttgcacccgttagccatcgtcacctccctgcattgagccccttgccacccttcccagcctttggtaaccatccttctactctntatgttcttgaattaggtgtgccttgagccaaacattgaaggactggctgggtgtggcgggtcatgcctgtaatctcagcactttgggaggccaaggtgggcggatcacctgaggtcaggagttcgagaccagcctggctaacatggcaaaaccccatctytactaaaaatacaaaaattaaccggtcgtggtggtgggtacctataattccagctactcgggaggctgaagcaggagaattgcttgaagccgggagacggaggctgcagtgagttgagatcatgccgctgcagtgag

SEQ ID NO: 588502 - DNA, 640 bp, Homo sapiens
aggtcagtaaggggacataaacaaggaagtttgtcataacattatagtagcagggagttagagcaagtccaggtattcatctctagagaaataggtaagtaaaatgttatgattatgaaataaactatttaatagcagtcagaagcaatgaactagaaatatgtccagaaacatgggtgaacctcatactggtattgactgaaataactaagagaatgaaatctatagcacaatatayttaatataaattaaatataaacagtttcataaaataacactatgtctgtttttaaggaaagctgcattcttaaccttttatgtagtttttaaaaaatagacatacacataaaatatgtatatatgttacatataacataaaattcaccatcgtaaccattttaaagtataaagtttaatagtagtttccatttgttgtatattaaatcagtctccagggaagtcttttcattttacaaaactgaaactctccacctttaaacaacttcctgtttctcccttcccttagcctctgggaaccaccattactttctgtctctgaatttgactactctaggtacctcatataaatggaatcatccagtacttgtctttttgtcatttgcttgtttcacttagcata

SEQ ID NO: 588503 - DNA, 640 bp, Homo sapiens
aggtcagtaaggggacataaacaaggaagtttgtcataacattatagtagcagggagttagagcaagtccaggtattcatctctagagaaataggtaagtaaaatgttatgattatgaaataaactatttaatagcagtcagaagcaatgaactagaaatatgtccagaaacatgggtgaacctcatactggtattgactgaaataactaagagaatgaaatctatagcacaatatacttaatataaattaaatataaacagtttcataaaataacactatgtctstttttaaggaaagctgcattcttaaccttttatgtagtttttaaaaaatagacatacacataaaatatgtatatatgttacatataacataaaattcaccatcgtaaccattttaaagtataaagtttaatagtagtttccatttgttgtatattaaatcagtctccagggaagtcttttcattttacaaaactgaaactctccacctttaaacaacttcctgtttctcccttcccttagcctctgggaaccaccattactttctgtctctgaatttgactactctaggtacctcatataaatggaatcatccagtacttgtctttttgtcatttgcttgtttcacttagcata

SEQ ID NO: 588504 - DNA, 640 bp, Homo sapiens
aggtcagtaaggggacataaacaaggaagtttgtcataacattatagtagcagggagttagagcaagtccaggtattcatctctagagaaataggtaagtaaaatgttatgattatgaaataaactatttaatagcagtcagaagcaatgaactagaaatatgtccagaaacatgggtgaacctcatactggtattgactgaaataactaagagaatgaaatctatagcacaatatacttaatataaattaaatataaacagtttcataaaataacactatgtctgtttttaaggaaagctgcattcttaaccttttatgtagtttttaaaaaatagacatacacataaaatatgtatatatgttacatataacataaaattcaccatcgtaaccattttaaagtataaagtttaatagtagtttccatttgttgtatattaaatcagtctccagggaagtcttttcattttacaaaactgaaactctccacctttaaacaacttcctrtttctcccttcccttagcctctgggaaccaccattactttctgtctctgaatttgactactctaggtacctcatataaatggaatcatccagtacttgtctttttgtcatttgcttgtttcacttagcata

SEQ ID NO: 588505 - DNA, 622 bp, Homo sapiens
caataatcagactttttttgcaaaaccaaaattctcttaataaatacctaacttttcatttctataataatttatgattaaaatgtatgtaataaagctaataaaacccattcattaataattttattttagaattaataataatatgcttggtattaaagtgtttgtaattttaaatggaagttgatatattagacatayggaaaacaaatagtgtgaatctagttgaaaaagtaaatttactgtaaacttttttaagtacaaatatatcaaaaaataaatttaaagaatgtctaaaaattgtagtaaattttctgtactgtatgtaagttaattaactgtattcgattcataataatattctcatcatattcagaaaagttgttaagtacttgtgtatggaggttgtcttatttgcctataagattgctcagttgaatatttatatcactaaccaataatgtgtataaaaattttgtgtacatttaacctgtttaaaggaattttattgactgagattgtgattagagttaagaattatttagtcttcatgatttaccttgcagaagtgttaataaaattccctgagaatatatttatattttatctaaaattatcaggt

SEQ ID NO: 588506 - DNA, 622 bp, Homo sapiens
attggttcatctttctcaaaggagagtgagatatggcaagagagctcacacagagtattcaccttttatcatatctctatagtccctattatatgcattaaatttatctatgatctcattataatgtcactctatataaatcataattgataaaatattatattcctggttccatacattgataagtgttttcaaaaatctgaaggagatacagtctggtaaaaatataagtgaccatgtaacatttaraaaagtaagtctgcataattttctaaatctcttttgaactctgcatctttttataatacaattacttgatgaaaggaaggtggcattttaagctccttttcataattctatgcaacattacagcaaaggtctgtgcagaagatcaaaagtgatcttcaatgtaggaaactattttgtcatgctagaaagcttgtttgtagttgtcgtgaaatgccaatagtgacttagaatgctatttcatgctcagcaattttaaagaaaatattaaatttgtcccagttaaaaaattggcctttagccaaaagttacagctagttcaaaataaggaaaaggtattcttgcaaacatttttgtgctgtatttcaaggcaggc

SEQ ID NO: 588507 - DNA, 576 bp, Homo sapiens
aatgtcattcactatatgaaataatttatttgagtgaaaggatttcagttcagccatttaatataaaagcttgttaatttgttaacaaaactatgtaattaaaattttatacataaattktagaaattaatgtataagatttacgtataaatatttctgattcaaataaaattatactgagaatatctgtttaactcattaacttgatatattgctatatttcctacagttttattgctcacttcttaaatacttaaaatattcagcaccaaatatgtcagtaatatgtgaagaggtttcattggaattcttcagataagattttgaccattttatatgttagagaattccaaggtccttagtcgtttacaaagaatttagtcaacttcagaggagaatagtttggtctaggcttgggtgtacttcacttatttattaagattcccaaaggatataaagaaggaaattcaatattgaataaacaatgcccccctacccacctacccacatttaataaaagcatggactttccattcatatccccagataattacaaggtcaaaaaattcctgaatg

SEQ ID NO: 588508 - DNA, 532 bp, Homo sapiens
cctgtctttggagagtttctgttctagcaagaagcttccttatcaaaattccaacccttgagcatcttagccgggtatgaggcaatttgattatcatgttacagtatgccagggcatggtgtaattgatttataaggagtctttgtttttttttttwaacaaacattaatttatatatccttctgattgaggtgtgagatctgaggatccatctcacatctcctcttgtgagatgtattcatttaacttacaaataatgaattctgggaaaagtttttaaaggaatatcgaaagctaaatgatcatattgtacattctaaaattaaagatcattttcaagaatgtttttcattttcctttttaaaatttgtgtatgtttcatgtggataccactgggataaagataattgctcgagttctcatagccaacaagtgagagaatagaaactcaaatccaacctaatttaattcttaaactggtgttcagttctctaaactctcgctgcctctccacacaactgtgcatagtttt

SEQ ID NO: 588509 - DNA, 532 bp, Homo sapiens
cctgtctttggagagtttctgttctagcaagaagcttccttatcaaaattccaacccttgagcatcttagccgggtatgaggcaatttgattatcatgttacagtatgccagggcatggtgtaattgatttataaggagtctttgtttttttttttaaacaaacattaatttatatatccttctgattgaggtgtgagatctgaggatccatctcacatctcctcttgtgagatgtattcatttaacttacaaataaygaattctgggaaaagtttttaaaggaatatcgaaagctaaatgatcatattgtacattctaaaattaaagatcattttcaagaatgtttttcattttcctttttaaaatttgtgtatgtttcatgtggataccactgggataaagataattgctcgagttctcatagccaacaagtgagagaatagaaactcaaatccaacctaatttaattcttaaactggtgttcagttctctaaactctcgctgcctctccacacaactgtgcatagtttt

SEQ ID NO: 588510 - DNA, 532 bp, Homo sapiens
cctgtctttggagagtttctgttctagcaagaagcttccttatcaaaattccaacccttgagcatcttagccgggtatgaggcaatttgattatcatgttacagtatgccagggcatggtgtaattgatttataaggagtctttgtttttttttttaaacaaacattaatttatatatccttctgattgaggtgtgagatctgaggatccatctcacatctcctcttgtgagatgtattcatttaacttacaaataatgaattctgggaaaagtttttaaaggaatatcgaaagctaaatgatcatattgtacattctaaaattaaagatcattttcaagaatgtttttcattttcctttytaaaatttgtgtatgtttcatgtggataccactgggataaagataattgctcgagttctcatagccaacaagtgagagaatagaaactcaaatccaacctaatttaattcttaaactggtgttcagttctctaaactctcgctgcctctccacacaactgtgcatagtttt

SEQ ID NO: 588511 - DNA, 623 bp, Homo sapiens
ggttgggaacaatgttcttctgttactccatgtggattatctcagtgtttcttttttacttttacagtaaaatgtacaagtactccaatacttgtttaatcaattgcttatattagtttccttctgaaaaataactgatgtagtttccatattcwtgacttgactctggtcactgcaacatattttaaatagtctgccctactgccatttttttcctaaggtctcttattttagtgaaagatactgttgaacacagattcttcagaaatgcacatattgcgttataacaaaaatgttcataatcatctaaatttttaatgactaaagcttcttctatcatatgtatgcaccataatttatttattcagtctgccattttggttattttgaacattttgctattacatataatcccatgataaacacccatagatgtaaatgtttgcccacaccacagcttcttccttagaatgaattcttagaagtgaaattatgaggctaaaagataaaagattttttttaagttttggatatcaaattttctttctgagaagtcataacaatttaaactccaccagccatgaatgaggatgtctattcctctatcctctatgctctcatca

SEQ ID NO: 588512 - DNA, 583 bp, Homo sapiens
tttaattgaataaacaaataaagcacttttaagaatattaagtgataaaatatatgtcaagtctttagcacagtgtctgacagaattcaacaaatatttagggagttcctattatgtttcaggtactcttctaggttatgggaacataaaaatcaataaagcatagactttctgcttgattactgccctcattgagcttaaattctaatcaaagagatgagcaattaacaaataaataataaaatatggaatgtatttaatgggggtaaataaaatggagaaaaataaagaggaggagtgggaagtgcagcccaatgcagtaggggaggaggagcgataattttacaaagggccatctggaaacacctaatctaaagggcacatatgaatagaaatctgcagatattagctagaaaagcagagagaaattggcaagtacagtgttygggtaggggagggcagagaagggcatactaaccttctgatacaaatgacagagaccacaacaaataagcaaataaacaagcaaacagaaaaagacaagacaaatagagactatgcaaggagaataaaatttcaaaga

SEQ ID NO: 588513 - DNA, 517 bp, Homo sapiens
cacatatgaatagaaatctgcagatattagctagaaaagcagagagaaattggcaagtacagtgttcgggtaggggagggcagagaagggcatactaaccttctgatacaaatgacagagaccacaacaaataagcaaataaacaagcaaacagaaaaagacaagacaaatagagactatgcaaggagaataaaatttcaaagacagaaacctaccattaatattctctgratgctaacaaaagagatatgataaaaggggtcattcagagattaaaaagagagctcttagataatgtaacatgatagacatttttaaaaattagtagaaggtttggaagctaaaactgaagcaatcttccagaaactggatgagaatgagaggtagaggagattgccagggtaaaaactatgcaccactccagaggtgatctgtcctcattgacttcaaaagacagaaatgttgagggctgccatccacaagacggcctcttgttgaaccttctttaagtggacaa

SEQ ID NO: 588514 - DNA, 593 bp, Homo sapiens
  misc_feature 575: n = A,T,C or G
ggagcacttttacactgctggtgggaatgtaaactggtacaaccactatggaaagcagtgcggagactcctcaaagaactaaaagaagatctaccattcaatccagcaatcctactactgggtatccacccagaagaagagaagtcattatatgaaaaaaacacatgcacacacatgtttatagcagcgcaattcacaattgcaaaagtatggaaccaacctaagtgcccatcaaccaacaagtgaataaagaaaatgtggtatatatacactatggaatactactcagccataaaaaggaatgaaataaagttttttgaagcagcttgamtggagctacaggccattattctaagtgaagtaattcaggaatggaaaacaaaatcccatatgttcgcatttataagtggaaactaagctatgaggatgcaaaggcataagagtgatataagggacttcagggacttgaggggaaagagaggtgagggataaaagactacatatttgggtatagtgtacactgctcaggtgttgagtgcaccaaaatcccagaaatcaccactaaaacacttttnccatgtaaccaaaaccaa

SEQ ID NO: 588515 - DNA, 504 bp, Homo sapiens
gtggactgccatatcacatacttaacgtggctttagggcagagtcgtctagaaaagtgactacgtgtaggagctttggggctattaggtcctggatttaaattctggctcaggctcttttactggttgcataaccttaggcaagtatctgtgagacattttcatctgcaaaaattgtgatagcaattattattactaaggcattgcttataatctaagattgtaatttatgtaattgmctaggaaaccatagaagatctactctagtctgtctggatttagatacccaggtctcatatggtccgctcccttaaaacacacacatgcacacacacacacacgggctgaagaaactcaagagaagtaaattttgaaatgactgaagttgataagtgctatgaagaaaaacagtgcagaaaaaggtataggaagtattggtggggggaaggagtttataatttttaatagtggcacttaagaacattcctaaaagagacaaaggatt

SEQ ID NO: 588516 - DNA, 504 bp, Homo sapiens
gtggactgccatatcacatacttaacgtggctttagggcagagtcgtctagaaaagtgactacgtgtaggagctttggggctattaggtcctggatttaaattctggctcaggctcttttactggttgcataaccttaggcaagtatctgtgagacattttcatctgcaaaaattgtgatagcaattattattactaaggcattgcttataatctaagattgtaatttatgtaattgcctaggaaaccatagaagatctactctagtctgtctggatttagatacccaggtctcatatggtccrctcccttaaaacacacacatgcacacacacacacacgggctgaagaaactcaagagaagtaaattttgaaatgactgaagttgataagtgctatgaagaaaaacagtgcagaaaaaggtataggaagtattggtggggggaaggagtttataatttttaatagtggcacttaagaacattcctaaaagagacaaaggatt

SEQ ID NO: 588517 - DNA, 477 bp, Homo sapiens
ttgatacgagaatagggatgacaagtgagtaatagtgagattgatggagttccagggttgagtgaaatctccctgaggactgctctactcaaggttgacattacatatctttgttatacctcatgcaaagtaaaacatacattatataactatataaatatttcacatatacctcagtaagcccctataaaagacaagatagtctgaatctgtggccaaaataaaaatagcaaaataatgtatttttactaaaagacaaatttctttctacttttcctaatccaataagctgaaagcccaacaacatggagtcatagggttggaaaagttgaattctcttctcaatgaaagattagtgcaagtattggtgagaacataggaaatacaataaaagacaacatagctttatctcgcyggtcctcctcggcacttcctgttcttacttactatccaacaaagggtgtggttgtgtttgtg

SEQ ID NO: 588518 - DNA, 576 bp, Homo sapiens
aaatgctatattcttgtatgctagtttaagaatgagaaaatgtctctcaggctttcttctactcctgagatttcgcttatgtctgtctcgttgtcccaaactgggttacatgcctgttactaagccacccattgtcaagataataggataaccacaattggtggagactaaccaggattaacctgtggtttgtggataggatttctttccctgaaggctagaaacctgaataaaattggtgttctggttgtaaggaagaaggggagaacaggtgttgagagggtaattaagagagtctaccagaccatggaatacaaggggtaaaatcatgtagcagattaagttactcaggttccagcttttgaattcccrcttgtcttcagtttcttctcagtgattcaaaatgtctttttgtataaaccttgttgtatatacaatccattcctgtcttaaaggaaaagatggctctcccatgttcctagcactaaatcctctatgctacccttaatcataacagcttttgcctgtgtttgatttggatattttatcctgtcattccttggatgtattccaaat

SEQ ID NO: 588519 - DNA, 613 bp, Homo sapiens
gagccgccatcttgaatatgtctagtccctagttcctgycagcatttacctgtgcaagctcccagcttgcttatcaatgtctgcagctcgactttacaggctgctctttgttagaaaatgatttaacgctgcttttcattaaagagaaaagccttaccaaggactcccatgcccttactatatgcccaagtgatttcttcttaacttctatatcattttgggtgtgaaatgtgatctcttttttattttaatcttatttctttgattacaagtcaggttgatttataggagctgtttacatagtctagatattaatcctttctgatttactgttacaaactgcatgtttttgtctcccgaaaatttatgtgctgaagccctagctgccactgggatggtgttaggaagtggggccgttgggaggtgattaggtgtaggtaagaccatgagagtcaagcctccatcatggattagtgtctttataggaagagaaagaggctagaacacattctcttcatcatgtgcagatacaagagtaagaataaggtgcctgtctgaaaaccaagatgggggccctcattggagactggatctgctggcaccttgctcttgg

SEQ ID NO: 588520 - DNA, 613 bp, Homo sapiens
gagccgccatcttgaatatgtctagtccctagttcctgccagcatttacctgtgcaagctcccagcttgcttatcaatgtctgcagctcgactttacaggctgctctttgttagaaaatgatttaacgctgcttttcattaaagagaaaagccttaccaaggactcccatgcccttactatatgcccaagtgatttcttcttaacttctatatcattttgggtgtgaaatgtgatctcttttttattttaatyttatttctttgattacaagtcaggttgatttataggagctgtttacatagtctagatattaatcctttctgatttactgttacaaactgcatgtttttgtctcccgaaaatttatgtgctgaagccctagctgccactgggatggtgttaggaagtggggccgttgggaggtgattaggtgtaggtaagaccatgagagtcaagcctccatcatggattagtgtctttataggaagagaaagaggctagaacacattctcttcatcatgtgcagatacaagagtaagaataaggtgcctgtctgaaaaccaagatgggggccctcattggagactggatctgctggcaccttgctcttgg

SEQ ID NO: 588521 - DNA, 587 bp, Homo sapiens
attcttttctctgtaataaccaattaatctagaacctttattgaatgttccatcctctctacactgatckgaagtgcatgatcttccataaattaagtatatttctctttatgggactgtttctgctttccatattcctttaatctgggctgtttgcctatccttgaactatcttaattattacagttttataacagaacttgatatctagcagggcaagtccacctaccttcttgttatttaacaagtgttttggcttttcctgttcctttactatttgagataaattttagaatcagcttgcttaacttcctggaaaactctctcgaggttttaatcagaatcacatgaaatctacagatgaatttaggtaaaatttactttattcgaatattgaatcttcttattaaaaaatgttgtattgctccctatatatttaggttttctttaatatctttcaacaacattttctaattttctttataatgggcatatctgtgctttgttaggtttgttttccggtacttaatattttttcttgtggttgtaaattatatcattaaaattatattttctaaccaattttt

SEQ ID NO: 588522 - DNA, 529 bp, Homo sapiens
aagccattaatttttgggggagtttatacagcaataaaaagctggcagagaatttggtaatgggaagggggtatccccataaaaagaagttaaagcatggcctttgcatctaggtagtaagtaaaagcaggaaaaagcttccatgaaactgtaaaaccagaaagccctcaaagagattattgtgaggactttaaggacagtgagaaaaatatgagaagctaggggtcttattttgtaatggtggaaagttgggtaacattgttacctgccacaggayggaagtagaaggagttcccaatgatctcctagatctttctggggagatttgcatgaaaaatataaaaagtgccaacttgggtttttatttgccactgatgaagtaggagaagagggaggtaaaccaaagaatgaactgttcatattctcaagttttttgggtgtatctcatagaccctctcggataaacaataggatttttaattgtcttgacagcattgacccaagatagagagtagcatgtctcaaaaag

SEQ ID NO: 588523 - DNA, 529 bp, Homo sapiens
aagccattaatttttgggggagtttatacagcaataaaaagctggcagagaatttggtaatgggaagggggtatccccataaaaagaagttaaagcatggcctttgcatctaggtagtaagtaaaagcaggaaaaagcttccatgaaactgtaaaaccagaaagccctcaaagagattattgtgaggactttaaggacagtgagaaaaatatgagaagctaggggtcttattttgtaatggtggaaagttgggtaacattgttacctgccacaggatggaagtagaaggagttcccaatgatctcctagatctttctggggagatttgcatgaaaaatataaaaagtgccaacttgggtttttatttgccactgatgaagtaggagaagagggaggtaaaccaaagaatgaactgttcatattctmaagttttttgggtgtatctcatagaccctctcggataaacaataggatttttaattgtcttgacagcattgacccaagatagagagtagcatgtctcaaaaag

SEQ ID NO: 588524 - DNA, 651 bp, Homo sapiens
aatgtcatggagacaaggacataggccagcccaaggttgcagtcacaaaagacccatakgacagacatgaaggttggttctaggttaacagattaccattaaaacagatgaaggaaaggttaggggtatacagtaagaacggttattccagagtcccaaggatgaacaagggtcccactgtttactctagtatctcttctgttctcaagtgggtaattgtgatgagatggaaccaaggtaatgggtacacggtaagactggttcattccagaaccctaaggatgaatgggagatgcttatctaggataacaggaaagtaagaggggatgcctttgttttcctttttccttttttttctcctctgttccctctttacagatgggtaaccatgtctctataccacaggatatactcctcagatgcatccccaaaaacagaaacatttgactcccccaaagcttaaaacaaaacaaaactagctttcctttgtaatatcgtttggcctaaaaatgaactgggagaaaatacaaaagtcagccttggaacccattgcccttatgcaggaaaccctcaaatcagcctcctcagtcttttataactgagagcataataaggaggatagagataaggagaaggaaaaatgcagaaaca

SEQ ID NO: 588525 - DNA, 598 bp, Homo sapiens
ctccttaaagcgtaaatctcacaggacctataaaacaataacataatttaaaaaacccccacaaagtattcaggcaacaaacagcgtgatgagtagagtagtacctcacatctcaatactaactttgaatgtaaatggcctaaatgatccacttaaaagatacagaactgcagaatgaatacgaatttaccaaccacatatctgctgtcttcaggagactcacctgacacatgaggactcatataaacttaaggtaaaggggtagaaaaaattattctatgcaaagggacaccaaaagcaagcaggaatagctattcttagacaaaacagactttagagcatcgaagttaaaaaagacaaacagggatattacataatgataaaaggactagttcaacaggaaaatatcacaattctaaatatatatgcacctaacactggaactttcaaatttataaaacaattgctaccaaacctaagaaatgagatagatagcaacaaaataatagtgggggacttaaatattccactagcagcastaaagaggttatcaagacagaaagtcaacaaagaaaaaatgagctttaaacaataccct

SEQ ID NO: 588526 - DNA, 595 bp, Homo sapiens
tatattaatactatgttttttcctatacatacatacctatgataaagcttaatctataaattaagaagagttaaaaattagcaacaataattaataataaaataaaaataattataacaacatattgtaataaaagttatgtgaatgtggtcccttgctctctctccctcccaaaatactacaatagctttctactgcagttgactgtggttaactgtgggtaactgacgccacrgtaagcaaaaccaaagataagtggggactactgtgcaaaactaagggaagcccagtagcctcatgtctactggtaatttctgttctagttgctctatctcaatcatattatgtaagactcttgacacatcttcagaaagataaaggaatattcttcatttaggcttacctccttcagtgccttttgggactaaatagaataggcccaagacctgaccacttggcaaagcccaaaagcccactagtaaaattattacacattaaactctttaatggttcaaggaagactttagagactctctttgattttcagaaacttttgagatcatatgctggctatgtgatcaagaggagttaatgg

SEQ ID NO: 588527 - DNA, 567 bp, Homo sapiens
acttgctgcttcactttgtacttttatgttatggagacagcttgtttccttaaatcacatgaaccaacttctgctagcttccaactttacttctgcaacttcctcacttctctcagccttcatagacttgaagagttagggacttgctctggattaggctttggcttaagagaatgttgtgctggcttgatctctcatgcagagccctgaactttttccatatcaacaagaagyctttcttattatttgtgtgttctctagaggtgcactcttaatttccttcaagaacgttttctatgcaatcacagcttggctaactgttggcacaagaggcccagctttcagcctatttcagcttttgaccttccttccccatttaatcatttctagcttttgatttaaagtgggagacatgcaactcttcctttcacttgaacacatagaggccattgcaggataattatttggtgtaatttcaataatgctgtgtctcgggcaatagggaggcctgagtacatggaaaaagttggcagaagggctacttggtggagcagtcagaacacacac

SEQ ID NO: 588528 - DNA, 542 bp, Homo sapiens
gggcaaggagccagtagttctgtagagcttagtcctggaaacattgagatggggatgaaactgacaactgatactttacagatcataggtatccgaaatggggtgggtggggtagttcttagagatggaacaagaatttttaagttggcatgatgggtaagaaagggccaggaaaagtttaaaatgaaattttgaattcaaaccataattagaaaataagaaatgttgaacatgggacacaaaagtgatgtcgagtgttgttgaaacttaactcttggaagactcaagaaaaaaagtctttgggttcattgtatttcctcaaaaaagttatataattttcttccagtttctaaaacttttatatgagttgagaggatatatttataaggtatatttattagtttttttgccttatctctgaaagtttatttatatgggaaataattttgaaaattattaatgtgcttaycttttttctggtctgaggacatgatttttgccataaatagctattttcctaagtggaaattaggatttgttat

SEQ ID NO: 588529 - DNA, 545 bp, Homo sapiens
ggatatatttataaggtatatttattagtttttttgccttatctctgaaagtttatttatatgggaaataattttgaaaattattaatgtgcttatcttttttctggtctgaggacatgatttttgccataaatagctattttcctaagtggaaattaggatttgttatggaacgaatgtaaacagaaagaatgtgaaatcattaagcttttgacatgcaaaatagcattctatagtaaggtaattttctttccaattagatcattttcttgagaaaattttctgaacttccttgtcttctccttttcaagaatcaacatccagtccttgaagaattactttatagagttctccagctgtgtagagaaaatacctctttgggctaagaggttagattcaagaagaggagaatgtaacaagtagaaagttcatctcttccaggccatgggcatgataaaaatagragggtaggagggaaggaataatatatagttttaaggtttgtgtgtcttgattttcctacccatgcttagcaatgttaacag

SEQ ID NO: 588530 - DNA, 548 bp, Homo sapiens
ggttttagggattatttagtggataactggttgagagagttaagctactatctactgtcttaagactagaaaacagyagaaaggaatgcttcagttaagataaggaagtcgtggaagctaaagtttttgttacataagatgaagccttataggtagcagtcctttgagagaatcgatggtaaaatggtaaatgtctctttcagaccttaaagatgtcaggttctcaattaacctctcccatatccaaggcctagaaagagaagttttggtgactttcatagagattttctacagatgcaaatttcccccacaaaagatgactttgtagagccatttcaatccatgggcctgcagcaattatttcaaaatatgtcaaggaaatacattttaaggaaaatattttgatttcctttagggtctgctatctatcatgtgatgctaaaccacagtcaggttagaaagtaagccacattatactgggttaaaacaacttgtttaatcagattttatggttcatagggtatgacttaacccttgccttgcatagc

SEQ ID NO: 588531 - DNA, 607 bp, Homo sapiens
caatgctaaaatcaaagaaagggaggcaatagtggactttcagccttttccagtcaatagaacaaagattttaggaagtggtttttctctcaaagttcagcacataacgcatatgctggaatggggaatacaaaattactgttatctatgccagaccacaggaatccccattatttgaaaagttttctctttccagaaaatggaaagtatttgtctaggcaattgcattcgggagtatatcagtgttagccaacwgtaggaacaggtgccaaatgtgaagcagggaaggaaaggatctgatcagaagggacagaactggccctgatcttcaccatggtggtttgcagtgcatcccagatggaatgtcagcaagattgtctattgctgcccccctgctgagaagcaaacatcaatgtcatcaatctggcagtgagtaaagggaggtgaggggattgaaatattttggggacacatctttagatgtctttagctattgcccaaataaagtctggagaaatttatgagggtatgaatcacagttcattctcatagtgtgtaaatctgtgtctaagataaatttgagcctaaattaatataatgaaattat

SEQ ID NO: 588532 - DNA, 572 bp, Homo sapiens
atttacatttagcataagcccaggaagttctcaatgctaaaatcaaagaaagggaggcaatagtggactttcagccttttccagtcaatagaacaaagattttaggaagtggtttttctctcaaagttcagcacataacgcatatgctggaatggggaatacaaaattactgttatctatgccagaccacaggaatccccattatttgaaaagttttctctttccagaaaatggaaagtatttgtctaggcaattgcattcgggagtatatcagtgttagccaactgtaggaacaggtgccaaatgtgaagcagggaaggaaaggatctgatcagaagggacagaactggccctgatcttcaccatggtggtttgcagtgcatcccagatggaatgtcakcaagattgtctattgctgcccccctgctgagaagcaaacatcaatgtcatcaatctggcagtgagtaaagggaggtgaggggattgaaatattttggggacacatctttagatgtctttagctattgcccaaataaagtctggagaaatttatgagggtatgaatcacagtt

SEQ ID NO: 588533 - DNA, 582 bp, Homo sapiens
aagaaaaatacttctgcttatttcctgacattgactataatcataaaatggctgcattttayaaaattatttatgttctaataaatatatatgattacactcaactgaccctcaagtccctggaaaaggctatttaccttttgtggaaaatgaaaaaaaaatgtcttcaggattacagtacactgtagcacactcaacaagccagtaaaatctgaaatgaactataccctttctgccaaacgtttgtctagcttatttgccttcatttctcatcacacttcatttgtgattttaaaaaagtaacttgtctggttggttggttttatcttttcctcaataatttccacatttatttctaaggataacatagaaagaaaaacaccatatgatacagaaattggaatacattcccttacttgcctcttatataaacacggaggaattggtggtgtgcacttgtaagatcaccttgtctggctaacatctgaaatggacagttctgaaatacaagaagttctctaacttccacaggaaacctcttcagaatggatgcacatttacgagagcaaagagagaatggca

SEQ ID NO: 588534 - DNA, 582 bp, Homo sapiens
aagaaaaatacttctgcttatttcctgacattgactataatcataaaatggctgcattttataaaattatttatgttctaataaatatatatgattacactcaactgaccctcaagtccctggaaaaggctatttaccttttgtggaaaatgaaaaaaaaatgtcttcaggattacagtacactgtagcacactcaacaagccagtaaaatctgaaatgaactataccctttctgccaaacgtttgtctagcttatttgccttcatttcycatcacacttcatttgtgattttaaaaaagtaacttgtctggttggttggttttatcttttcctcaataatttccacatttatttctaaggataacatagaaagaaaaacaccatatgatacagaaattggaatacattcccttacttgcctcttatataaacacggaggaattggtggtgtgcacttgtaagatcaccttgtctggctaacatctgaaatggacagttctgaaatacaagaagttctctaacttccacaggaaacctcttcagaatggatgcacatttacgagagcaaagagagaatggca

SEQ ID NO: 588535 - DNA, 582 bp, Homo sapiens
aagaaaaatacttctgcttatttcctgacattgactataatcataaaatggctgcattttataaaattatttatgttctaataaatatatatgattacactcaactgaccctcaagtccctggaaaaggctatttaccttttgtggaaaatgaaaaaaaaatgtcttcaggattacagtacactgtagcacactcaacaagccagtaaaatctgaaatgaactataccctttctgccaaacgtttgtctagcttatttgccttcatttctcatcacacttcatttgtgattttaaaaaagtaacttgtctggttggttggttttatcttttcctcaataatttccacatttatttctaaggataacatagaaagaaaaacaccatatgatacagaaattggaatacattcccttacttgcctcttatataaacacggaggaattggtggtgtgcacttgtaagatcaccttgtctggctaacatctgaaatggacagwtctgaaatacaagaagttctctaacttccacaggaaacctcttcagaatggatgcacatttacgagagcaaagagagaatggca

SEQ ID NO: 588536 - DNA, 600 bp, Homo sapiens
tgaattattttggataaggaccccctccaatcacctcattttagcttgattactctgtaaagagccacaatctccaattaaggtcacattctgaggtcccgggggttatgactccaatgtaactttttttttgagggagtagacacaattcaacccataagaatgtgatgctaacaattctgcgctgagtgccaaagtgagactctggtatttaaccattaactgctttatgttctactcatttgttcatgtgcctgtcacatctctgcttcctggaggcccaaaatggaaacatagtgtttcattagaatcttcatagcactcagaagagtatttgrtaagagtttatttgaatgaagaaatgctccttgctgaagaagaggtagtttgtcactttggccctaattgtcataaatgtacatcagtgaacctgtctagtttcctcttaaatcaaacaacactggactcctttggattattcaatatttttaaatttcattttctttttaatggaaaaaattaaatgtacaaatattcattaaataaatgaatagaacacattcaaatagaatgagtatataaaaaagaataatttttcca

SEQ ID NO: 588537 - DNA, 600 bp, Homo sapiens
tgaattattttggataaggaccccctccaatcacctcattttagcttgattactctgtaaagagccacaatctccaattaaggtcacattctgaggtcccgggggttatgactccaatgtaactttttttttgagggagtagacacaattcaacccataagaatgtgatgctaacaattctgcgctgagtgccaaagtgagactctggtatttaaccattaactgctttatgttctactcatttgttcatgtgcctgtcacatctctgcttcctggaggcccaaaatggaaacatagtgtttcattagaatcttcatagcactcagaagagtatttgayaagagtttatttgaatgaagaaatgctccttgctgaagaagaggtagtttgtcactttggccctaattgtcataaatgtacatcagtgaacctgtctagtttcctcttaaatcaaacaacactggactcctttggattattcaatatttttaaatttcattttctttttaatggaaaaaattaaatgtacaaatattcattaaataaatgaatagaacacattcaaatagaatgagtatataaaaaagaataatttttcca

SEQ ID NO: 588538 - DNA, 600 bp, Homo sapiens
gaaacatagtgtttcattagaatcttcatagcactcagaagagtatttgataagagtttatttgaatgaagaaatgctccttgctgaagaagaggtagtttgtcactttggccctaattgtcataaatgtacatcagtgaacctgtctagtttcctcttaaatcaaacaacactggactcctttkgattattcaatatttttaaatttcattttctttttaatggaaaaaattaaatgtacaaatattcattaaataaatgaatagaacacattcaaatagaatgagtatataaaaaagaataatttttccatctttaattctctggcgttcctctcgaaaggcaacaattatttgcagttttttaatatgctttcccagaatagttttatgcatagaaaaatatgcttatgttattttttatgtcctctgacattggatatggattacacatcccaagacagagattcagaatctgtgatttgtataggtatagaataaaagacatgtacttaggattagcacagaaccaaacaacaggagcaatctaaactcaactttgggatctgccaccatccaaagagctacagatataaaagaa

SEQ ID NO: 588539 - DNA, 540 bp, Homo sapiens
gctttgtctgctaccaagccttgatctccccagtattccacattatctacctgttagaaatataattcagaggccagatgtggtggattatgcctgtaatcccagcacttcgggaagccgagatgggtggatcacctaaggtcaggagttcaagaccagcttggccaacatggtgaaaccccatctctactaaaaatgcaaaaattagctgggcatggtggcgggcacctgcaatcctagctacgtgggaggctgaggtaggagaattgcttgaayccaggagacagagattgcagtgagctgagatagctccactgcactccagcctgggtggcagagaaagagtctgtctcaaaaaaaaaaaaaaagaaatataattcagaaatatattacaccaccacattatcctaggagaatgttaacttaagaatctaagtatgaaattctgaggtatgacctacactttagctctgatttatggtgaggagcgtgtgtatattttttctaatggattggttaatttttccctgatcttgttga

SEQ ID NO: 588540 - DNA, 493 bp, Homo sapiens
tttcttttggtctatggatttaaaaaaaaagtttcagaaacctgaagcctggttctagatctactagagattcatcatagctaagaattgtatttccaaactttataatttaaaactgtaactatcatagaatattatttaataagttatcattagtaatttttattctaagtaacagatataagatacatgtcttacctgaagcatatttacatggagactcaagaatctgttagactgttagaaaatacactgtaagaggagaacaccacaaagatactccttgagaagagcaatcccaagacacataatcctcagattcaccaaggttgaaatgaaggaaaaaatgttaagggcaccagagagaaagrtcgggttacccacaaagggaagcccatcagactaacagcgcatctctcagcagaaaccctacatgccagaagagagtgggggccaatattcaacattcttaaaggaaagaatttcaaaccag

SEQ ID NO: 588541 - DNA, 493 bp, Homo sapiens
tttcttttggtctatggatttaaaaaaaaagtttcagaaacctgaagcctggttctagatctactagagattcatcatagctaagaattgtatttccaaactttataatttaaaactgtaactatcatagaatattatttaataagttatcattagtaatttttattctaagtaacagatataagatacatgtcttacctgaagcatatttacatggagactcaagaatctgttagactgttagaaaatacactgtaagaggagaacaccacaaagatactccttgagaagagcaatcccaagacacataatcctcagattcaccaaggttgaaatgaaggaaaaaatgttaagggcaccagagagaaagatygggttacccacaaagggaagcccatcagactaacagcgcatctctcagcagaaaccctacatgccagaagagagtgggggccaatattcaacattcttaaaggaaagaatttcaaaccag

SEQ ID NO: 588542 - DNA, 493 bp, Homo sapiens
tttcttttggtctatggatttaaaaaaaaagtttcagaaacctgaagcctggttctagatctactagagattcatcatagctaagaattgtatttccaaactttataatttaaaactgtaactatcatagaatattatttaataagttatcattagtaatttttattctaagtaacagatataagatacatgtcttacctgaagcatatttacatggagactcaagaatctgttagactgttagaaaatacactgtaagaggagaacaccacaaagatactccttgagaagagcaatcccaagacacataatcctcagattcaccaaggttgaaatgaaggaaaaaatgttaagggcaccagagagaaagatcgggttacccacaaagggaagcccatcagactaacagcgcatctctcagcagaaaccctacawgccagaagagagtgggggccaatattcaacattcttaaaggaaagaatttcaaaccag

SEQ ID NO: 588543 - DNA, 635 bp, Homo sapiens
atatctctatgtaaatgctttgaacaagtgaaaatattaatgattaaaaattataaatactaatgattaaaattaaatagttgtacttcaacactcagtttctttttaytttcagtttttactctgaaataatcatgtctgcattcactgtcctatattccaagtctaaattagaatggtgtaattctgaactatttgtaaagggaatttaaaacttaagtgaggataaaaggctaggttgatattcattctaccagaaaatttataactcaaattgtgggtattattaaactttgggatgtaatttctgcttttggaaattctttatctcctttgttttctagtttttatagctgtgtgacataaattctaatttccaaacaacttaatagcaaaatttattctgatgttctaaagtccttcaaaagtatttaataatggagaccactcaattatattccaaaacctagtgtttagcttatattgtttttataatatgtgtggagtaaagaggagggtgaaactattttcaaactacatgtaaaataggacaaaaattctaccattttaacacacgttaataactattgctcataccttcaaaatttttcatagaatggaatactattgattat

SEQ ID NO: 588544 - DNA, 580 bp, Homo sapiens
tgctactgcctcacctttcattttggaattgatcactgtcccgaagtttgtgtctatccttctctcatatttcttttaattttattataatacatataggatatgttaggtatttatgaatttagaaagatcatacttctttatgtaatgacgcatttttgtcataaccacaactttaaggattctgtacagctaaacgagcttaagtttaatctaggtatttccccttatttaatttatttttcatctctttttgtccttatgttttatgtgtaccttgcatatgacatatgactgaattttgttttaataagttctgatatattttaaattgaaaattttagtttatttactttgattacagatacagggtttgttctacrctatgtgttttttttttttcttttttaggttcagcttttttgtcgtttttttttttttttttttacattcattttctttctactgtcttgtcttcttttgggctgatggctaagttatattttcttttctttttctgcccattcaagagtttggaatttgtatacttgtcttagtctgtttgggctgctataacaaa

SEQ ID NO: 588545 - DNA, 566 bp, Homo sapiens
cgttcatggaatcaaaacgtctcatttaataaaagtagaaataccagtttcttgacccttatcaagcctttttgttgccccctgtggctgttgcctttagaacttgataaggctttgacatttaaaatgatcatattaaacattttcccctttatccctcaaatgtacccagctattagtttttcatgagattccggtaatgtagctagtaaagtagtagttgcattaagagacattagttttggagagraaaaaatactctaattttatttaaactaattaacttttaaagaatcattttatttgtttaggtaattttccttgtggtacaatctgttgcatattggctaagtgcactttatttcataaattttgcacatacgtatgcactaaattgagtggctgtctcagagacaggtgtgaagatgttccactgtctgttcggttgttccctggggatttttgtaatattgccataattctgtagcctctaatctttttatttatctcctcttctttttgtaaatatataaataactcaatcacaatatttttaataaatgtta

SEQ ID NO: 588546 - DNA, 573 bp, Homo sapiens
tcctttgtggtgtttctgatacttttccccraaaaattaactatttgtactgaaataaatattacaactagaaaaatccgaactgagacagaacctatgtggagagcattgtaaatatttttgtaatgatagggaaataaaatgaagagagactaaatagcttcttcaaattttcatagctaaaaactatgaagcttactttaaggtatttacttcatgtgcataccattctgttgtttattattaatataatagttggagcaatagcttcaataataatagtaatagtaatgatactactactaattatgattattaacaaacacaataggtattatccttccctctaagtccctaaagtccattgtatcattcttctgcctttgtgtcctcatagcttagctcccacatatcagtgagaacatgcagtgtttggttttcccttcttgagttacttcacttagaataatagtctccaatctcatccaggtcactgcaaacgctgctaattcattccttttgatggctgagtagtattccatcatatatatagatatatatgtgatgtatata

SEQ ID NO: 588547 - DNA, 460 bp, Homo sapiens
cccctgtagaccctttagggtcaatgtacaaagttaatccatgttgtgtgtgtgtgtgtatgtgtgtgcgtgcgtgcatgtgtgcctttgtatcagacatatgaagccaagttttctgtggttctgagtaaacaacttctggcttcaagaagctaactctatagccactctgcagagtactaaaagatagcatttcagcaattgaagttataatgcttcaatcaagggagagatgctgataggatagggatatttactgataagctactgaaatagactgtctataagataaattttctaatatattcataaatacttcatgtggtttgctttagacacttttttatwtctttccattttcccctgcccatttcaactaatatatttgtgaatgcatatgtgtatacttgcatgatgtattgttttttttttttttgaagttaaatattaggtcaatttc

SEQ ID NO: 588548 - DNA, 558 bp, Homo sapiens
tccaaattttttcctactttttrttgctgttgataagaagtcagtgttggtattttgacatttaagttatgtgtcattttgttgtggtagttctgaagatcttccctctgttttatattctccttcacctttcataaatgtactttatatttatttggtaataaattttgaacatatactatgctataaagataatctaggccctttggttacatcttgtaaataaaatcaacaaaatctgttttgagattatattgtaatataagatacccaaagtaactaggatgtgtaccatatgtttgaaggtggtaaatacgatgagaaaaatagatcaggtcaggaagaatgaagatgattgaaggtacagtttatgatgaaaacttaggtgtgccgaggaatgattcatcttatgtatcttgagtgtaatgtcttatttctcctgaatctgagaatttgatgtctttcattagggatgtcagtaaatctcactaatgaatatattagactccagtttaatatatgatagtcattttcattctgtctttcatatcactgaat

SEQ ID NO: 588549 - DNA, 273 bp, Homo sapiens
aatagcatttatttaggttctttattctcttttgcttcctttctcctttccttcttttctgtcatagatgagccaggcaagtaacccaaatgcrtgatatggactaggtgtaataaaactaagcagtggagaaattgtggtaaaatgaagcatctgaactttcttgtgaagatcagcttcttaagtctattcagtgtaaactgcctccaccttatttgatgtttatcaagataaaccaaaaatacaagattggagaattaaatattgaaatag

SEQ ID NO: 588550 - DNA, 622 bp, Homo sapiens
actgcctccaccttatttgatgtttatcaagataaaccaaaaatacaagattggagaattaaatattgaaatagtcaactatgggaatgttctcaattwaaaaacaaggaagcaagcaaacaaacaaacaaaaaacacattgtgctggccaacactgtgaaagctaaagtaactctggaaatgtatttggatcagttactgtaaatttataattttcctttaggaagtagacagtaggataaaccattgaaatgtttctttcttgttttgatgtagttccaatacttactaaatatgtggcttggacatgttagcttctttatttttaaaacagaacaaaaatagacatcatattgatttgaatactaaataggatagaagtaataaaccatatatggcaatgcttagtacattagtaaacacttgataaataagtggtagctattattattgcttgccaaataactttacagaggtgtccaaaaattcaaaatcccacatgtcctcagagttatttctgcttgccaggtgtccctgcttagaaattaataggaagtacacaccaaaatttgacatttagatgtttcattccacttatttgtcttctagtttaaaaatactt

SEQ ID NO: 588551 - DNA, 504 bp, Homo sapiens
ttttaagaaatttattgagctataattaacatattaaaagccaaaaatatgtaagataaattattagatatgctctgacatatttatacatccgtgagatcatcattattgtcaagatagtgaacatataaatccacaaaatgtttcctcatgactacttttaataatccccttttgcaattattgtctctcctaataagcatcttagctagacaactgctgaccatctttcagtattgtatattactgtatattgtatattggtgcatccagaagttttatataaatggaatcatataaggtgcactattttttggctggcatttttgctttacagcaaaattcttttgaaattcattcatgttgttgcatgtgtcagtagtcgaacctttttattgctgagcagaattttgctgtacgtatatatcaccaattacttgttaatgaatatgtgggtcatgaccacrttttagctattaaagagaaaatgcctatgaatattta

SEQ ID NO: 588552 - DNA, 534 bp, Homo sapiens
taagatcttagattctgataagtctaatgtcacaatccaatcagtttttcctatctcaaggaatcatgtccatataatggaattaatcctgaaactctgaaaagttttaatattctggggtmagggtagatgagaaggagtctccatatgacttataaacatgtaaggagaaatagtaaaattgttgtaaaattaaaagaagaacagaaattcataaaataagctataacaatcaggttaaacaacaaaaacaaaaagcaaagcgtctatcagtaacatgattgaatagaagagccgagagagagttgtcagtggtaaaggaataaatattatctcatttgatagagtgattgtattagtccattttaacactgctgataaagacatacccacgactggacaacttacaaaagaaaaaggtttattggacatacagttccacatggctggggaggactcacaatcatggcaaaaaggagcaagacacatcttatgtgggtggcagcaggcaaaaaaagagcttgtgcagagaaa

SEQ ID NO: 588553 - DNA, 534 bp, Homo sapiens
taagatcttagattctgataagtctaatgtcacaatccaatcagtttttcctatctcaaggaatcatgtccatataatggaattaatcctgaaactctgaaaagttttaatattctggggtcagggtagatgagaagkagtctccatatgacttataaacatgtaaggagaaatagtaaaattgttgtaaaattaaaagaagaacagaaattcataaaataagctataacaatcaggttaaacaacaaaaacaaaaagcaaagcgtctatcagtaacatgattgaatagaagagccgagagagagttgtcagtggtaaaggaataaatattatctcatttgatagagtgattgtattagtccattttaacactgctgataaagacatacccacgactggacaacttacaaaagaaaaaggtttattggacatacagttccacatggctggggaggactcacaatcatggcaaaaaggagcaagacacatcttatgtgggtggcagcaggcaaaaaaagagcttgtgcagagaaa

SEQ ID NO: 588554 - DNA, 493 bp, Homo sapiens
gagtctccatatgacttataaacatgtaaggagaaatagtaaaattgttgtaaaattaaaagaagaacagaaattcataaaataagctataacaatcaggttaaacaacaaaaacaaaaagcaaagcgtctatcagtaacatgattgaatagaagagccgagagagagttgtcagtggtaaaggaataaatattatctcatttgatagagtgattgtattagtccattttaacactgctgataaagacatacccaygactggacaacttacaaaagaaaaaggtttattggacatacagttccacatggctggggaggactcacaatcatggcaaaaaggagcaagacacatcttatgtgggtggcagcaggcaaaaaaagagcttgtgcagagaaaatcctgtttttaacaccactagatcttgtgagacccattcactattatgagaacagcatgggaaagacctgcccccatgattcagtcttctcccat

SEQ ID NO: 588555 - DNA, 644 bp, Homo sapiens
ttaatattctggggtcagggtagatgagaaggagtctccatatgacttataaacatgtaaggagaaatagtaaaattgttgtaaaattaaaagaagaacagaaattcataaaataagctataacaatcaggttaaacaacaaaaacaaaaagcaaagcgtctatcagtaacatgattgaatagaagagccgagagagagttgtcagtggtaaaggaataaatattatctcatttgatagagtgattgtattagtccattttaacactgctgataaagacatacccacgactggacaacttacaaaagaaaaaggtttattggacatacagttccacatggctggggaggactcacaatcatggcaaaaaggagcaagacacatcttatgtgggtggcagcaggcaaaaaaagagcttgtgcagagaaaatcctgtttttaacaccactagatcttgtgagacccattcactattatgagaacagcatgggaaagacctgcccccatgattcagtcttctcccatcaggtccctcccactacatayagaaattatgggagctagaagatgagatttggatggggacacagagccaaaccatgtcatttcactccagcccctcccaaatctcatatctgcatgttt

SEQ ID NO: 588556 - DNA, 644 bp, Homo sapiens
ttaatattctggggtcagggtagatgagaaggagtctccatatgacttataaacatgtaaggagaaatagtaaaattgttgtaaaattaaaagaagaacagaaattcataaaataagctataacaatcaggttaaacaacaaaaacaaaaagcaaagcgtctatcagtaacatgattgaatagaagagccgagagagagttgtcagtggtaaaggaataaatattatctcatttgatagagtgattgtattagtccattttaacactgctgataaagacatacccacgactggacaacttacaaaagaaaaaggtttattggacatacagttccacatggctggggaggactcacaatcatggcaaaaaggagcaagacacatcttatgtgggtggcagcaggcaaaaaaagagcttgtgcagagaaaatcctgtttttaacaccactagatcttgtgagacccattcactattatgagaacagcatgggaaagacctgcccccatgattcagtcttctcccatcaggtccctcccactacatacagaaattatgggagctagaagatgagatttggatggggacacagagccaaaccatrtcatttcactccagcccctcccaaatctcatatctgcatgttt

SEQ ID NO: 588557 - DNA, 411 bp, Homo sapiens
ctgtctgttcttgtttccttccttgaaatgtgtaaaagtgaaaaacatactaatcataaatcargtattcatcataagcctaaaaaaagataaaataatcagtagtatcattgactaaaattattactcaccaaaagaaactcactccaaagttagcgcaatactaacagagaatacaagttttgccaggaatcactgaggcttagtacctcacatgggaaacatgggaagtaaaaccacctgaggagccacttgatggtgagtcaggctgttcctcaaagagtaggctgtgactgccaaactttgtaggttaaggagtatttataatgatctttgaggaaactgcaactgacaattgagggaaaaaatgttagttcatgactgcaaaatacatgacagagtcacaaaaac

SEQ ID NO: 588558 - DNA, 411 bp, Homo sapiens
ctgtctgttcttgtttccttccttgaaatgtgtaaaagtgaaaaacatactaatcataaatcaggyattcatcataagcctaaaaaaagataaaataatcagtagtatcattgactaaaattattactcaccaaaagaaactcactccaaagttagcgcaatactaacagagaatacaagttttgccaggaatcactgaggcttagtacctcacatgggaaacatgggaagtaaaaccacctgaggagccacttgatggtgagtcaggctgttcctcaaagagtaggctgtgactgccaaactttgtaggttaaggagtatttataatgatctttgaggaaactgcaactgacaattgagggaaaaaatgttagttcatgactgcaaaatacatgacagagtcacaaaaac

SEQ ID NO: 588559 - DNA, 429 bp, Homo sapiens
tgattggttttacatacacacacacacacacatgcacatatatttacacacatataaatatgtatattttatatatatatatgcacacacatttgtttctatttaaaatgaawaaagtacgttagtcatgtgtgcccaattttctgatacactaaaaaatggaaatatcttggcagacactattgataggctatgcaaatgtaaacttctcttgcctagttttttatttggaaagtaaaatatccatgtttcttggtgtggccatgtgaattttgtgacattgaaatggatatcataagataggttcctaagaaagcctttaaaaaagcacaaacttggcctgcatggctttggccttttgcccctttgccctttgctgcttcagcctttcctatttttcttggctgcaatatgagcaatcatgtctca

SEQ ID NO: 588560 - DNA, 633 bp, Homo sapiens
aacattattctttttatattctttaatctccattgaaataaacacaatttgtagaattattaactaatasaaattaattgaaaagaagcatctttcttttatatgaacaatgacatagttcaaatttatcttgaaaacagttttaagcacaagtaattacgctgaatatgtaaataacccatttataagtaggtcaataggaaaacatttcaacaaatttcaaacttgatatcatttctagatcttatgaaataatggaacatgttttggaaggtaagagaagtttacttagccaataataacaggtctcaatcaattattttttaacagctagtttatccctggatataccttactatatcctgtttttagatatggcatttgaaaacctccaagaatatagatataattttaattgagctattatggttagtatttatttttaaagttctgaatttttttaaaaaattcaatttctatggtatattaacaagattgattggaataatgcatttttttaatgtggtgggttggtgatatgtttttcttctgagaaagaaggctgttcataatcttaaattatattaggttttagaaacaacaaaaattgtgggattcccttaatggctttct

SEQ ID NO: 588561 - DNA, 419 bp, Homo sapiens
attgtccaaatttacaaggaaagagaaaatgaattgtgtgttcatcttacagtttctaataaaatccccaacattgaacttaaatgactctccagttgttcattaggagcatatgctgttggttgactgccagcatacattatctcaccttttctttctaaratagaacatattcaatatatccaaggcttccaaggcttcagtacttctctaagtttactgtctcgtcttcagattcaggtatgatgtgattactctaagtatagcctgattctttgccaaaaataagaacaaaaatacgcatatggcccaattcagtacaaaggcaaatcagggcaaattaccttaagagtttttaagataaatgtttctcttggtgtctctttcttggtcttctgggtaaggttgtatctgaatat

SEQ ID NO: 588562 - DNA, 419 bp, Homo sapiens
attgtccaaatttacaaggaaagagaaaatgaattgtgtgttcatcttacagtttctaataaaatccccaacattgaacttaaatgactctccagttgttcattaggagcatatgctgttggttgactgccagcatacattatctcaccttttctttctaaaatagaacatattcaatayatccaaggcttccaaggcttcagtacttctctaagtttactgtctcgtcttcagattcaggtatgatgtgattactctaagtatagcctgattctttgccaaaaataagaacaaaaatacgcatatggcccaattcagtacaaaggcaaatcagggcaaattaccttaagagtttttaagataaatgtttctcttggtgtctctttcttggtcttctgggtaaggttgtatctgaatat

SEQ ID NO: 588563 - DNA, 550 bp, Homo sapiens
caccttttctttctaaaatagaacatattcaatatatccaaggcttccaaggcttcagtacttctctaagtttactgtctcgtcttcagattcaggtatgatgtgattactctaagtatagcctgattctttgccaaaartaagaacaaaaatacgcatatggcccaattcagtacaaaggcaaatcagggcaaattaccttaagagtttttaagataaatgtttctcttggtgtctctttcttggtcttctgggtaaggttgtatctgaatatgatgaccctaaatgtctgcagacatttttgcagaaatgttaagggtaaaagtgacacagccaatagcaaagaagtgccagaaaatacgtaagcaaactgtgacctctttttacctcttgattgacttttatgttaaataatgaatttaccttatgcttgaaagaatttgaaatagtatttggcagtgaagaatttactcctcccatattttcattcaagagaaatttccatgaggagggttgttggtgggttacctccaactcaaccacttcagag

SEQ ID NO: 588564 - DNA, 419 bp, Homo sapiens
attgtccaaatttacaaggaaagagaaaatgaattgtgtgttcatcttacagtttctaataaaatccccaacattgaacttaaatgactctccagttgttcattaggagcatatgctgttggttgactgccagcatacattatctcaccttttctttctaaaatagaacatattcaatatatccaaggcttccaaggcttcagtacttctctaagtttactgtctcgtcttcagattcaggtatgatgtgattactctaagtatagcctgattctttgccaaaaataagaacaaaaatacgcatatgrcccaattcagtacaaaggcaaatcagggcaaattaccttaagagtttttaagataaatgtttctcttggtgtctctttcttggtcttctgggtaaggttgtatctgaatat

SEQ ID NO: 588565 - DNA, 419 bp, Homo sapiens
attgtccaaatttacaaggaaagagaaaatgaattgtgtgttcatcttacagtttctaataaaatccccaacattgaacttaaatgactctccagttgttcattaggagcatatgctgttggttgactgccagcatacattatctcaccttttctttctaaaatagaacatattcaatatatccaaggcttccaaggcttcagtacttctctaagtttactgtctcgtcttcagattcaggtatgatgtgattactctaagtatagcctgattctttgccaaaaataagaacaaaaatacgcatatggcccaattcagtacaaaggcaaatcagggcaaattaccttaagagtttttaarataaatgtttctcttggtgtctctttcttggtcttctgggtaaggttgtatctgaatat

SEQ ID NO: 588566 - DNA, 550 bp, Homo sapiens
caccttttctttctaaaatagaacatattcaatatatccaaggcttccaaggcttcagtacttctctaagtttactgtctcgtcttcagattcaggtatgatgtgattactctaagtatagcctgattctttgccaaaaataagaacaaaaatacgcatatggcccaattcagtacaaaggcaaatcagggcaaattaccttaagagtttttaagataaatgtttctcttggtgtctctttcttggtcttctgggtaaggttgtatctgaatatgwtgaccctaaatgtctgcagacatttttgcagaaatgttaagggtaaaagtgacacagccaatagcaaagaagtgccagaaaatacgtaagcaaactgtgacctctttttacctcttgattgacttttatgttaaataatgaatttaccttatgcttgaaagaatttgaaatagtatttggcagtgaagaatttactcctcccatattttcattcaagagaaatttccatgaggagggttgttggtgggttacctccaactcaaccacttcagag

SEQ ID NO: 588567 - DNA, 468 bp, Homo sapiens
tgatgaccctaaatgtctgcagacatttttgcagmaatgttaagggtaaaagtgacacagccaatagcaaagaagtgccagaaaatacgtaagcaaactgtgacctctttttacctcttgattgacttttatgttaaataatgaatttaccttatgcttgaaagaatttgaaatagtatttggcagtgaagaatttactcctcccatattttcattcaagagaaatttccatgaggagggttgttggtgggttacctccaactcaaccacttcagagctactacagtggtaatgcatgttgaagaaaagagtcaaactctgtgaaatatttgaagagatttattctgaggcaaatatgagtgacctcggcctgtcacacagcccaggagatcctaagaacatgtgccaaggttgttgggctacagcttggatttatacatgtgagggagacataagacatcaatcagt

SEQ ID NO: 588568 - DNA, 562 bp, Homo sapiens
catacattatctcaccttttctttctaaaatagaacatattcaatatatccaaggcttccaaggcttcagtacttctctaagtttactgtctcgtcttcagattcaggtatgatgtgattactctaagtatagcctgattctttgccaaaaataagaacaaaaatacgcatatggcccaattcagtacaaaggcaaatcagggcaaattaccttaagagtttttaagataaatgtttctcttggtgtctctttcttggtcttctgggtaaggttgtatctgaatatgatgaccctaaatgtctgcagacatttttgcagaaatgttaagggtaaaagtgacacagccaatagcaaagaagtgccagaaaatacgtaagcaaactgtgacctctttttacctcttgattgayttttatgttaaataatgaatttaccttatgcttgaaagaatttgaaatagtatttggcagtgaagaatttactcctcccatattttcattcaagagaaatttccatgaggagggttgttggtgggttacctccaactcaaccacttcagag

SEQ ID NO: 588569 - DNA, 468 bp, Homo sapiens
tgatgaccctaaatgtctgcagacatttttgcagaaatgttaagggtaaaagtgacacagccaatagcaaagaagtgccagaaaatacgtaagcaaactgtgacctctttttacctcttgattgacttttatgttaaataatgaatttaccttatgcttgaaagaatttgaaatagyatttggcagtgaagaatttactcctcccatattttcattcaagagaaatttccatgaggagggttgttggtgggttacctccaactcaaccacttcagagctactacagtggtaatgcatgttgaagaaaagagtcaaactctgtgaaatatttgaagagatttattctgaggcaaatatgagtgacctcggcctgtcacacagcccaggagatcctaagaacatgtgccaaggttgttgggctacagcttggatttatacatgtgagggagacataagacatcaatcagt

SEQ ID NO: 588570 - DNA, 641 bp, Homo sapiens
ttcagtacttctctaagtttactgtctcgtcttcagattcaggtatgatgtgattactctaagtatagcctgattctttgccaaaaataagaacaaaaatacgcatatggcccaattcagtacaaaggcaaatcagggcaaattaccttaagagtttttaagataaatgtttctcttggtgtctctttcttggtcttctgggtaaggttgtatctgaatatgatgaccctaaatgtctgcagacatttttgcagaaatgttaagggtaaaagtgacacagccaatagcaaagaagtgccagaaaatacgtaagcaaactgtgacctctttttacctcttgattgacttttatgttaaataatgaatttaccttatgcttgaaagaatttgaaatagtatttggcagtgaagaatttactcctcccatattttcattcaagagaaatttccakgaggagggttgttggtgggttacctccaactcaaccacttcagagctactacagtggtaatgcatgttgaagaaaagagtcaaactctgtgaaatatttgaagagatttattctgaggcaaatatgagtgacctcggcctgtcacacagcccaggagatcctaagaacatgtgccaaggttgttgggct

SEQ ID NO: 588571 - DNA, 426 bp, Homo sapiens
gaattcgaagattttctgaytggcatttgacaactggctaaaataatttatctaaagaccggaatcaatagacaggagtgtatgggttaagataaggtgttttagagaccaaggttcttatgcagatgaagcttgcaggtagcaggcttcactgagaatagattgtaaatgatttttatcagacataaaaaggaaaaaggacttggaatcaggaaaaatcaggaaaaagacttggaaagagaaggggattctctacaaaatggagattttccccacagaaacagccttgtagggccatttcaaaatatgtcaaagaaatgtatttttgtggtgaaatactttgatttctttcaaggcctgctatctgtcatgttgatatcttattgctacgaagagtctgttttgtcattcttaagtctctacttt

SEQ ID NO: 588572 - DNA, 438 bp, Homo sapiens
gaattcgaagattttctgattggcatttgacaactggctaaaataatttatctaaagaccggaatcaatagacaggagtgtatgggttaagataaggtgttttagagaccraggttcttatgcagatgaagcttgcaggtagcaggcttcactgagaatagattgtaaatgatttttatcagacataaaaaggaaaaaggacttggaatcaggaaaaatcaggaaaaagacttggaaagagaaggggattctctacaaaatggagattttccccacagaaacagccttgtagggccatttcaaaatatgtcaaagaaatgtatttttgtggtgaaatactttgatttctttcaaggcctgctatctgtcatgttgatatcttattgctacgaagagtctgttttgtcattcttaagtctctactttaatgttaacact

SEQ ID NO: 588573 - DNA, 509 bp, Homo sapiens
gaaacagccttgtagggccatttcaaaatatgtcaaagaaatgtatttttgtggtgaaatactttgatttctttcaaggcctgctatctgtcatgttgayatcttattgctacgaagagtctgttttgtcattcttaagtctctactttaatgttaacactgttcagctatgcatgaattccgaaaggatgaaagtaaataacgaagcatgttcaaccacccatttccatcatggccattactgtttcaggtttagtttaaaatgcccttggccaagataaagggcccatttagttggttaacggacattgaattttatttttggcttacatgcaggtgccatgctctccttaggttgctccctgccaatgctgagcaaggaagatattatagggcttttcattcttgtcccacatggactcatctaaaggtcaaagttcactttggtgctctttcagtgtggctgacaatttctcagatctgcactcttctctgaggctcctcctttc

SEQ ID NO: 588574 - DNA, 509 bp, Homo sapiens
gaaacagccttgtagggccatttcaaaatatgtcaaagaaatgtatttttgtggtgaaatactttgatttctttcaaggcctgctatctgtcatgttgatatcttattgctacgaagagtctgttttgtcattcttaagtctctactttamtgttaacactgttcagctatgcatgaattccgaaaggatgaaagtaaataacgaagcatgttcaaccacccatttccatcatggccattactgtttcaggtttagtttaaaatgcccttggccaagataaagggcccatttagttggttaacggacattgaattttatttttggcttacatgcaggtgccatgctctccttaggttgctccctgccaatgctgagcaaggaagatattatagggcttttcattcttgtcccacatggactcatctaaaggtcaaagttcactttggtgctctttcagtgtggctgacaatttctcagatctgcactcttctctgaggctcctcctttc

SEQ ID NO: 588575 - DNA, 509 bp, Homo sapiens
gaaacagccttgtagggccatttcaaaatatgtcaaagaaatgtatttttgtggtgaaatactttgatttctttcaaggcctgctatctgtcatgttgatatcttattgctacgaagagtctgttttgtcattcttaagtctctactttaatgttaacactgttcagctatgcatgaattccraaaggatgaaagtaaataacgaagcatgttcaaccacccatttccatcatggccattactgtttcaggtttagtttaaaatgcccttggccaagataaagggcccatttagttggttaacggacattgaattttatttttggcttacatgcaggtgccatgctctccttaggttgctccctgccaatgctgagcaaggaagatattatagggcttttcattcttgtcccacatggactcatctaaaggtcaaagttcactttggtgctctttcagtgtggctgacaatttctcagatctgcactcttctctgaggctcctcctttc

SEQ ID NO: 588576 - DNA, 586 bp, Homo sapiens
caggtttagtttaaaatgcccttggccaagataaagggcccatttagttggttaacggacattgaattttatttttggcttacatgcaggtgccatgctctccttaggttgctccctgccaatgctgagcaaggaagatattatagggcttttcattcttgtcccacatggactcatctaaaggtcaaagttcactttggtgctctttcagtgtggctgacaatttctcagatctgcactcttctctgaggctcctcctttccaattatctttcatgctctctcttcttttgaggtgccggcttgcatcatgatctggaggctcttgcagcctcttgctctatcttctctttattcttcaaaggcgttttctctggttactctcttatacgtgtaattccatcttggtgtctgattcttgggaaacccaaactggcttataatttttcttactttcagtaaaaccttctttgctgatgcatcattcattaattcattaaatgtattgtgttttgtatgggaaaacaatgatgccaaagtgtctatagctatatagtctgatatrtgctataataagaatttggaaa

SEQ ID NO: 588577 - DNA, 470 bp, Homo sapiens
actatcaataatacagagatctgcaagaattcccacacaggtgaaatatgcatggtggaaagaggcaattcttaaggcaaagagccaagcatgtaccaaacaccaatgcccttgcataccaaagctaaagattctacaatttgccaaagataagaatgtacctttcacaacagcaaggacctcatatattgtcttattatatatccctaaaatctagcacagtgttgaataagaggaagtagaaataattttgagaaggaattaaacatgtatttgtagaagtcaagtcttacccattgaaaaartatctcccccatatttgtaattcattaaattgtttggaagggaaaagaaactaaagggaatactccatagagaaagttgtttcagaaattatgtaaatttattctaataactaagaaatagtgaaaatgtattagaaaggttaggtagaggcacatttcagattt

SEQ ID NO: 588578 - DNA, 470 bp, Homo sapiens
actatcaataatacagagatctgcaagaattcccacacaggtgaaatatgcatggtggaaagaggcaattcttaaggcaaagagccaagcatgtaccaaacaccaatgcccttgcataccaaagctaaagattctacaatttgccaaagataagaatgtacctttcacaacagcaaggacctcatatattgtcttattatatatccctaaaatctagcacagtgttgaataagaggaagtagaaataattttgagaaggaattaaacatgtatttgtagaagtcaagtcttacccattgaaaaaatatctcccccatatttgtaattcattaaattgtttggaagggaaaagaaactaaagggaatactccatagagaaagttgtttcagaaattatgyaaatttattctaataactaagaaatagtgaaaatgtattagaaaggttaggtagaggcacatttcagattt

SEQ ID NO: 588579 - DNA, 625 bp, Homo sapiens
ttaggtagaggcacatttcagatttagactaaggtgcaaatggctttctacttaatgatagagaaaagcataaataaaagtacattgtatacatgaaatggttttgtttgaattgggtatagaatatcaaatgagaaatatatagtaaggaattgaatatatggaaatacagatatagacggccagagcacctacttgtagctcttgatagcagaattatcagtcaactgaaaagatattttaagacctccaagaataagtagataatttctattctgtattttgttaatgaaagaaaacyagggtaataactgcttgaattttcatcactagcatgtttcctacatacataaacatagtgagtagtgagtatattcacatataaagtaacaaagaattatagtaaaccccaacatccaatcgggaaaaatgttgtaactctatatattcattaaattgttcacaaactgacatcttttagcatataatatggtttcctttagcttgttaaagagcatggactcatgactaaaacataagaacacccaatgaagttcaactaaatcaattcaactatgaaaaataaactgactagtgatcatctctttattattattgaaagaat

SEQ ID NO: 588580 - DNA, 625 bp, Homo sapiens
ttaggtagaggcacatttcagatttagactaaggtgcaaatggctttctacttaatgatagagaaaagcataaataaaagtacattgtatacatgaaatggttttgtttgaattgggtatagaatatcaaatgagaaatatatagtaaggaattgaatatatggaaatacagatatagacggccagagcacctacttgtagctcttgatagcagaattatcagtcaactgaaaagatattttaagacctccaagaataagtagataatttctattctgtattttgttaatgaaagaaaactagggtaataactgcttgaattttcatcactagcatgtttcctacatacataaacatagtgagtagtgagtatattcacatataaagtaacaaagaattatagtaaaccccaacatccaatcgggaaaaatgttgtaactctatatattcattaaattgttcacaaactgacatcttttagcatataatatggtttcctttagcttgttaaagagcatggactcatgactaaaacataagaacacccaatgaagytcaactaaatcaattcaactatgaaaaataaactgactagtgatcatctctttattattattgaaagaat

SEQ ID NO: 588581 - DNA, 561 bp, Homo sapiens
cactagcatgtttcctacatacataaacatagtgagtagtgagtatattcacatataaagtaacaaagaattatagtaaaccccaacatccaatcgggaaaaatgttgtaactctatatattcattaaattgttcacaaactgacatcttttagcatataatatggtttcctttagcttgttaaagagcatggactcatgactaaaacataagaacacccaatgaagttcaactaaatcaattcaactatgaaaaataaactgactagtgatcatctctttattattattgaaagaataacttacaagtaaaaacattcaatttttgaaaacagctttatatttattgaatttatgcatataacgttagttgygtttcaaaataaaatggcttgccttaaaagtcatgcaaaattacatatttatacattctctgaattaagcaggattaattgaaaagtggttatgaaggcatgactgcaagctacaaattgagcctatttttagtaacttgctctagctgagatgttatatgttcagatttgttgacacgaagctttat

SEQ ID NO: 588582 - DNA, 522 bp, Homo sapiens
aggaactaaactaaattctttacaaaacaaacaaacaaaaaacaaaaacacacacacacaaataaaaactaactgcagacaaaatataatcaacagtgattttttaaccattgacaagaagctgaggatgctgatccctgacaaaagaaaaaataaaatctgacttatcccaagctttctctcagtttccagaaaacacagtgaaaggataatccaaagaaaggataactctccctgtatattgagaaattgaagattggggcttagaaaggaaaatttagctagaattgcagagstaaatagaagagagagagcatttgcacagagatggtgatatggtatggctttgtccccacccacatctcatcttgaattcccatgtgttgtgggagggaccaggtgggagataattgaatcatggtggcaggccatcccatcctcatgatagtgaataagtcccacaagatcttatggttaaagaagagggagtttttctgaacaagctctctctttgcctgccgc

SEQ ID NO: 588583 - DNA, 522 bp, Homo sapiens
aggaactaaactaaattctttacaaaacaaacaaacaaaaaacaaaaacacacacacacaaataaaaactaactgcagacaaaatataatcaacagtgattttttaaccattgacaagaagctgaggatgctgatccctgacaaaagaaaaaataaaatctgacttatcccaagctttctctcagtttccagaaaacacagtgaaaggataatccaaagaaaggataactctccctgtatattgagaaattgaagattggggcttagaaaggaaaatttagctagaattgcagaggtaaatagaagagagagagcatttgcacagagatggtgatatggtatggctttrtccccacccacatctcatcttgaattcccatgtgttgtgggagggaccaggtgggagataattgaatcatggtggcaggccatcccatcctcatgatagtgaataagtcccacaagatcttatggttaaagaagagggagtttttctgaacaagctctctctttgcctgccgc

SEQ ID NO: 588584 - DNA, 522 bp, Homo sapiens
aggaactaaactaaattctttacaaaacaaacaaacaaaaaacaaaaacacacacacacaaataaaaactaactgcagacaaaatataatcaacagtgattttttaaccattgacaagaagctgaggatgctgatccctgacaaaagaaaaaataaaatctgacttatcccaagctttctctcagtttccagaaaacacagtgaaaggataatccaaagaaaggataactctccctgtatattgagaaattgaagattggggcttagaaaggaaaatttagctagaattgcagaggtaaatagaagagagagagcatttgcacagagatggtgatatggtatggctttgtccccaccyacatctcatcttgaattcccatgtgttgtgggagggaccaggtgggagataattgaatcatggtggcaggccatcccatcctcatgatagtgaataagtcccacaagatcttatggttaaagaagagggagtttttctgaacaagctctctctttgcctgccgc

SEQ ID NO: 588585 - DNA, 522 bp, Homo sapiens
aggaactaaactaaattctttacaaaacaaacaaacaaaaaacaaaaacacacacacacaaataaaaactaactgcagacaaaatataatcaacagtgattttttaaccattgacaagaagctgaggatgctgatccctgacaaaagaaaaaataaaatctgacttatcccaagctttctctcagtttccagaaaacacagtgaaaggataatccaaagaaaggataactctccctgtatattgagaaattgaagattggggcttagaaaggaaaatttagctagaattgcagaggtaaatagaagagagagagcatttgcacagagatggtgatatggtatggctttgtccccacccacatctcatcttgaattcccatgtgttgtgggagggaccaggtgggagataattgaatcatggtggcaggccatcccatcctcatgatagtgaataagtyccacaagatcttatggttaaagaagagggagtttttctgaacaagctctctctttgcctgccgc

SEQ ID NO: 588586 - DNA, 531 bp, Homo sapiens
catatataattcaaagttcattttattagttaatttagatatggttcaatgagagtttcaaactgagggcatagagtcatataacatactctagaagaacaactcacaaaaactaaaataaattgctttaccatgtttgcctttgtatttcactttttstgttctgaagaataagcatggtaaaatttacatatatctaatgcatataatgggcaatgtatgaattattttacaaattactcataaccagaagagttctgttggattttaccatatggccagattcatcttgcctttcaaacttatgtaagtaatttttccaaatctctttttttcccataacatacatgctgctgagtccactcctccaaactaagtaaacataggaatgctcatggccaaatcataagtatagaaagtgactttggaactgatgaagactttcttcttgtctacgctttagtcaggcttctaggaacactctttttgactctactttgtccttgggccctgtctttacactgcctagtc

SEQ ID NO: 588587 - DNA, 491 bp, Homo sapiens
ttttagttggaagtgttattctctttatgaagatgtaaatggctctgtttactggccaatatttacatacacatacagtcaatgaatgttaatttgcacacagtggcatatataattcaaagttcattttattagttaatttagatatggttcaatgagagtttcaaactgagggcatagagtcatataacatactctagaagaacaactcacaaaaactaaaataaattgctttaccatgtttgcctttgtatttcactttttctgttctgaagaataagcatggtaaaatttacatatatctaaygcatataatgggcaatgtatgaattattttacaaattactcataaccagaagagttctgttggattttaccatatggccagattcatcttgcctttcaaacttatgtaagtaatttttccaaatctctttttttcccataacatacatgctgctgagtccactcctccaaactaagtaaacata

SEQ ID NO: 588588 - DNA, 531 bp, Homo sapiens
catatataattcaaagttcattttattagttaatttagatatggttcaatgagagtttcaaactgagggcatagagtcatataacatactctagaagaacaactcacaaaaactaaaataaattgctttaccatgtttgcctttgtatttcactttttctgttctgaagaataagcatggtaaaatttacatatatctaatgcatataatgggcaatgtatgaattattttacaaattactcataaccagaagagttctgttggattttaccatatggccagattcatcttgcctttcaaacttatgtaagtaatttttccaaatctctttttttcccataacatacatgctgctgagtccactcctccaaactaagtaaasataggaatgctcatggccaaatcataagtatagaaagtgactttggaactgatgaagactttcttcttgtctacgctttagtcaggcttctaggaacactctttttgactctactttgtccttgggccctgtctttacactgcctagtc

SEQ ID NO: 588589 - DNA, 531 bp, Homo sapiens
catatataattcaaagttcattttattagttaatttagatatggttcaatgagagtttcaaactgagggcatagagtcatataacatactctagaagaacaactcacaaaaactaaaataaattgctttaccatgtttgcctttgtatttcactttttctgttctgaagaataagcatggtaaaatttacatatatctaatgcatataatgggcaatgtatgaattattttacaaattactcataaccagaagagttctgttggattttaccatatggccagattcatcttgcctttcaaacttatgtaagtaatttttccaaatctctttttttcccataacatacatgctgctgagtccactcctccaaactaagtaaacataggaatgctcatggccaaatcataagtatagaaagtgactttkgaactgatgaagactttcttcttgtctacgctttagtcaggcttctaggaacactctttttgactctactttgtccttgggccctgtctttacactgcctagtc

SEQ ID NO: 588590 - DNA, 415 bp, Homo sapiens
ctgtgttcagagttgaaccttatctctcttgcctrttagaatcatcttgacacctatcattttaatcttaaataaagtgatccttaaccattttaacaagtgttggaaatttttttatttagcagaactaacaaattgtttgcgaactattgaaatagaactattctattatggcctgcagatatttttctcaattataattcactttcatactgtaaaagtatctttgctttgtgtatatctttttcatataaaaacttttaatttggcagggaatagtggctcatgcctgtaatcccagaactttgggaggcccagatgagtggatcatgtaggtcaggaattgagaccagcctggccaacatggcaaaaccccatctctactaaaagtacaaaaattatctgggcatggttg

SEQ ID NO: 588591 - DNA, 415 bp, Homo sapiens
ctgtgttcagagttgaaccttatctctcttgcctattagaatcatcttgacacctatcattttaatcttaaataaagtgatccttaaccattttaacaagtgttggaaatttttttatttagcagaactaacaaattgtttgcgaactattgaaatagaactattctattatggcctgcagatatttttctcaattataattcactttcatactgtaaaagtatctttgctttgtgtatatctttttcatataaaaacttttaatttggcagggaatagtggctcatgcctgtaatcccagaactttgggaggcccagaygagtggatcatgtaggtcaggaattgagaccagcctggccaacatggcaaaaccccatctctactaaaagtacaaaaattatctgggcatggttg

SEQ ID NO: 588592 - DNA, 415 bp, Homo sapiens
ctgtgttcagagttgaaccttatctctcttgcctattagaatcatcttgacacctatcattttaatcttaaataaagtgatccttaaccattttaacaagtgttggaaatttttttatttagcagaactaacaaattgtttgcgaactattgaaatagaactattctattatggcctgcagatatttttctcaattataattcactttcatactgtaaaagtatctttgctttgtgtatatctttttcatataaaaacttttaatttggcagggaatagtggctcatgcctgtaatcccagaactttgggaggcccagatgagtggatcatgtaggtcaggarttgagaccagcctggccaacatggcaaaaccccatctctactaaaagtacaaaaattatctgggcatggttg

SEQ ID NO: 588593 - DNA, 456 bp, Homo sapiens
  misc_feature 418: n = A,T,C or G
tgtccctgcttttatttatttatttatttttgtaaacaaaatgagcaagaggttattacacttcattcactgcgaaaaggtaacactacatcaaagataactcacatacttgcagaaatatggaaggtakttctttcttttttttgttaagaaatagggtctcactatgttgcccaggttgtagtgcagtgactattcaaaggggtcatcccactactgataagcagaggagttttattctgctcaatttttgagttgaccactccttaggcaacctggtggtcctctgctccctggaagctaacatattgatgccaaacttagtgcagacacttcctcagcatagtgcatacaacccagaaatcctgggctcaagtgttcctcccgcctcagcatcctgagtagctgggacaacagnaggtgtgtgtcacctggctgaaaggtatttttaaatac

SEQ ID NO: 588594 - DNA, 456 bp, Homo sapiens
  misc_feature 418: n = A,T,C or G
tgtccctgcttttatttatttatttatttttgtaaacaaaatgagcaagaggttattacacttcattcactgcgaaaaggtaacactacatcaaagataactcacatacttgcagaaatatggaaggtagttctttcttttttttgttaagaaatagggtctcactatgtkgcccaggttgtagtgcagtgactattcaaaggggtcatcccactactgataagcagaggagttttattctgctcaatttttgagttgaccactccttaggcaacctggtggtcctctgctccctggaagctaacatattgatgccaaacttagtgcagacacttcctcagcatagtgcatacaacccagaaatcctgggctcaagtgttcctcccgcctcagcatcctgagtagctgggacaacagnaggtgtgtgtcacctggctgaaaggtatttttaaatac

SEQ ID NO: 588595 - DNA, 604 bp, Homo sapiens
acaacaatgtaacaagactctagtaagttcaaaacttgccctcatcttcctgtcttcttctgatctctccaaacccttccaatctctgcccactatccagtttcaaagccactttcacattttccggtatgtttacaacaatatcatattcctctaccaattttctatattagtcctttcttacattgctctaaagaaatacctgagactgggtaatttataaagaaaagcagtttaattggctcatggttctgcacgttatacagaaagcatgatgcatctgctgggcttctgcrggggcctcagtaagctaacaatcatggcagaaggtgaagggggagccagcacttcacatggctggaagcaggaagaagagtgagaggtggggaggtgctatacacttttaacaaccagactcacaataactcactcactgtcacaagaacagcaccaaggagatggtgctaaaccatttaagagaaaccgcccgatgatccaattgcctcccaacaggccccacctccaacagtgggacttacagtttgacatgagatttgggtggggacacagatccaaatgatatcaatgtgttaaaaggaaaagg

SEQ ID NO: 588596 - DNA, 604 bp, Homo sapiens
acaacaatgtaacaagactctagtaagttcaaaacttgccctcatcttcctgtcttcttctgatctctccaaacccttccaatctctgcccactatccagtttcaaagccactttcacattttccggtatgtttacaacaatatcatattcctctaccaattttctatattagtcctttcttacattgctctaaagaaatacctgagactgggtaatttataaagaaaagcagtttaattggctcatggttctgcacgttatacagaaagcatgatgcatctgctgggcttctgcgggggcctcagtaagctaacaatcatggcagaaggtgaagggggagccagcacttcacatggctggaagcaggaagaagagtgagaggtggggaggtgctatacacttttaacaaccagactcacaataactcactcactgtcacaagaacagcaccaaggagatggtgctaaaccatttaagagaaacygcccgatgatccaattgcctcccaacaggccccacctccaacagtgggacttacagtttgacatgagatttgggtggggacacagatccaaatgatatcaatgtgttaaaaggaaaagg

SEQ ID NO: 588597 - DNA, 576 bp, Homo sapiens
attttttaaaatattgcaactgtcttgcatttctggaataaacatggcttggtcatgtgtcacttttttacatagtgtcgtattcaagttgtcgaggattttgcatctagggtatatttgtagatttgcatctaggttatgttggtctaaagttttgtttgtttgttttccttttctttttttttatcatctttgtcttcttctgtttaagtgtcatgcttgcttcataaaatgaattgagaagcatttcttcctcttctgtttctcgaaaattgtagagaactcttgttttttgttgttgtttgtttgttgttttgttttttcttatttttatcctcatactgagaaccaaacagtctggagtgtaaaacatggttcctcattccagttaaatctagtatacaatgacaacaaccctcttgggttaagcattggcctacaaacagaaaaaaaccttcagggagatagatgctgatctaggcattgtgagaaaagctgaattcatttttaatcatgaatggcttttamggaaagaagatttattaactaaaataaatagattagagggaattctca

SEQ ID NO: 588598 - DNA, 544 bp, Homo sapiens
acaacagaaaacatctccaaacattgccaattggctccttgcagagtgaaatctctccttaaagaaaaccactgccagaaatgaaatgtttatacacctacctcaagcttacgcctttacttgttcatcaactctttctgactacacaggctatagacagatacttttcaatacttacccctcttatacataatcaaattttcctcwttattgggtcatttcatgatcatacaaataagctattacttctgtcatactagaaaataaaagcaaataagcaaccagtattcttcattttccccattttcattgtcagataccaccagggaatttgatccctttttcaccaaaactctttaaaaggataatttatagtcaccgtgtcatttgctccttgcattttctctttaatcatttcatttccatacagatttttgccccccactactctaattaaacctgtcctccactttgttaatcttatagttatttttctcaccttacttgatttatcagcagcatttgaagtagattattctcataa

SEQ ID NO: 588599 - DNA, 229 bp, Homo sapiens
tgcattttttacacttccacctgaatgtcgtgatgataatgggtctatttttcctgaracccattcctcactctgcccagttcagttcataagacagaggggatgaacactgtggattatgtagctcagattttctgaaagctggcttccagttaggctcaaacaataggagacacatgtagaaagatgaaaggcaggaacaaggagaaatctagatattgtctcattt

SEQ ID NO: 588600 - DNA, 397 bp, Homo sapiens
ctctgcccagttcagttcataagacagaggggatgaacactgtggattatgtagctcagattttctgaaagctggcttccagttaggctcaaacaataggaracacatgtagaaagatgaaaggcaggaacaaggagaaatctagatattgtctcattttctccctgtcatccctaataacagttacattttttacaggctcctgctcctttacataggcccactgtggttccagcttcccccaaatatccctccctgcagctccagtagtacagcctcctatccctgttctccaagggaaggtgatagtagcctcccattgttgctaaattgtaggttgcctcactgtcccctggttggctttaatttttttaaagttatttctaccatcaattac

SEQ ID NO: 588601 - DNA, 414 bp, Homo sapiens
tcattttctccctgtcatccctaataacagttrcattttttacaggctcctgctcctttacataggcccactgtggttccagcttcccccaaatatccctccctgcagctccagtagtacagcctcctatccctgttctccaagggaaggtgatagtagcctcccattgttgctaaattgtaggttgcctcactgtcccctggttggctttaatttttttaaagttatttctaccatcaattacctgtatcaattccctttgttttaaattctcaatgatttcagttttcctggctagtttctgattacttcagatacctaatggaaatctcaaagaaagtatgactcaagagaaattgttgatttccatctcccagctactaccaaacctgtttatgcttatccatttcattt

SEQ ID NO: 588602 - DNA, 414 bp, Homo sapiens
tcattttctccctgtcatccctaataacagttacattttttacaggctcctgctcctttacataggcccactgtggttccagcttcccccaaatatccctccctgcagctccagtagtacagcctcctatccctgttctccaagggaaggtgatagtagcctcccattgttgctaaattgtaggttgcctcactgtcccctggttggctttaatttttttaaagttatttctaccatcaattacctgtatcaattccctttgttttaaattctcaatgatttcarttttcctggctagtttctgattacttcagatacctaatggaaatctcaaagaaagtatgactcaagagaaattgttgatttccatctcccagctactaccaaacctgtttatgcttatccatttcattt

SEQ ID NO: 588603 - DNA, 409 bp, Homo sapiens
ttctccctgtcatccctaataacagttacattttttacaggctcctgctcctttacataggcccactgtggttccagcttcccccaaatatccctccctgcagctccagtagtacagcctcctatccctgttctccaagggaaggtgatagtagcctcccattgttgctaaattgtaggttgcctcactgtcccctggttggctttaatttttttaaagttatttctaccatcaattacctgtatcaattccctttgttttaaattctcaatgatttcagttttcctggctagtttctgattacttcagatacctaatggaaatctcaaagaaagtatgactcaagagaaattgytgatttccatctcccagctactaccaaacctgtttatgcttatccatttcattt

SEQ ID NO: 588604 - DNA, 463 bp, Homo sapiens
attaaactctgccttttttttttctgggaagaacacatagattaatcactttgtataaycccaacctctcccttcttgggagtggggataggggaaacagttttcatcatctatgatcttaagtttcctcatgctctttctcattgttaagacaataccacttattttagcttattgttacaatagtatttcatttttttctaacaacttggtattagtcaagatgggatataataacaaatgactcttgaaatcttcatgggtgccatgggaagtttcaagaacacaacttgaaagtgaattgcatgactttgttctgtgtttcattgaccactactcattcagtgagcctgaaagtaactgtgtatatcactgttagtatactatgcatgccagatacccaagactcaaacttttcctttcctttagataccacctacttagtcatcaattttggttcaac

SEQ ID NO: 588605 - DNA, 463 bp, Homo sapiens
attaaactctgccttttttttttctgggaagaacacatagattaatcactttgtataatcccaacctctcccttcttgggagtggggataggggaaacagttttcatcatctatgatcttaagtttcctcatgctctttctcattgttaagacaataccacttattttagcttattgttacaatagtatttcatttttttctaacaacttggtattagtcaagatgggatataataacaaatgactcttgaaatcttcatgggtgccatgggaagtttcaagaacacaacttgaaagtgaattgcatgactttgttctgtrtttcattgaccactactcattcagtgagcctgaaagtaactgtgtatatcactgttagtatactatgcatgccagatacccaagactcaaacttttcctttcctttagataccacctacttagtcatcaattttggttcaac

SEQ ID NO: 588606 - DNA, 404 bp, Homo sapiens
ccaatggtgggaagaagcccaagccttgaccaaggcatctgtgggagctcttagtgaaatgcacygaggtcttttcacggggaagggagggagccacttcagctcccttgccaggcccccaggaaagcaggtcacactcctaaatacagttctagctattcagattagcaggccctttttattgcaggaattctcatgttccaagtagagagagattgtgattctatgccttatgcaaatctgaatctggaggggactcctcctctggggacgcagttaacttgaagtgttccagaaaggctatctacaggtccactcatgctaaattcccataagagaagcaccagctgtgtctgcagtggtgaatgaggggggaaatctttttcttcaagaccgttctgtag

SEQ ID NO: 588607 - DNA, 404 bp, Homo sapiens
ccaatggtgggaagaagcccaagccttgaccaaggcatctgtgggagctcttagtgaaatgcactgaggtcttttcacggggaagggagggagccacttcagctcccttgccaggcccccaggaaagcaggtcacactcctaaatacagttctagctattcagattagcaggccctttttattgcaggaattctcatgttccaagtagagagagattgtgattctatgccttatgcaaatctgaatctggaggggactcctcctctggggaygcagttaacttgaagtgttccagaaaggctatctacaggtccactcatgctaaattcccataagagaagcaccagctgtgtctgcagtggtgaatgaggggggaaatctttttcttcaagaccgttctgtag

SEQ ID NO: 588608 - DNA, 404 bp, Homo sapiens
ccaatggtgggaagaagcccaagccttgaccaaggcatctgtgggagctcttagtgaaatgcactgaggtcttttcacggggaagggagggagccacttcagctcccttgccaggcccccaggaaagcaggtcacactcctaaatacagttctagctattcagattagcaggccctttttattgcaggaattctcatgttccaagtagagagagattgtgattctatgccttatgcaaatctgaatctggaggggactcctcctctggggacgcagttaacttgaagtgttccagaaaggctatctacaggtccactcatgctaaattcccataagagaagcaccagctgtgtctgcagyggtgaatgaggggggaaatctttttcttcaagaccgttctgtag

SEQ ID NO: 588609 - DNA, 531 bp, Homo sapiens
ttcttgattataagtagtcttggtgcattggtttttctgtaatgccacctgtagtagtratgaactggtcgcatggacagactcaggacctcctagtaagccaaggttatataggcaaaggtgacagcttaggtcacacacaagttttctctttcctgtgcactgttagtgtgcctgcagatgctgtaatggattgtgtcagtaggcctccagccacaaggtggcacttgaaaaagagcaccagctggtagcagtgggatttgtgcttgccttatgttacgcaggggaggtaagctgatgactcaggcaatgggcagggccattgagctctcaaaattttctattctttgtgttaagctaccagggcagatggaggggcaaagccagctgggggctgaatcaggcaagttcacattctagctctcttttgtctgccatgtgtgggcaaaagcactgtccccagtggggatcagatagtggtcctctggctgtaggagtaatgttgcagggagtaccacagctgcctctgct

SEQ ID NO: 588610 - DNA, 531 bp, Homo sapiens
ttcttgattataagtagtcttggtgcattggtttttctgtaatgccacctgtagtagtgatgaactggtcgcatggacagactcaggacctcctagtwagccaaggttatataggcaaaggtgacagcttaggtcacacacaagttttctctttcctgtgcactgttagtgtgcctgcagatgctgtaatggattgtgtcagtaggcctccagccacaaggtggcacttgaaaaagagcaccagctggtagcagtgggatttgtgcttgccttatgttacgcaggggaggtaagctgatgactcaggcaatgggcagggccattgagctctcaaaattttctattctttgtgttaagctaccagggcagatggaggggcaaagccagctgggggctgaatcaggcaagttcacattctagctctcttttgtctgccatgtgtgggcaaaagcactgtccccagtggggatcagatagtggtcctctggctgtaggagtaatgttgcagggagtaccacagctgcctctgct

SEQ ID NO: 588611 - DNA, 531 bp, Homo sapiens
ttcttgattataagtagtcttggtgcattggtttttctgtaatgccacctgtagtagtgatgaactggtcgcatggacagactcaggacctcctagtaagccaaggttatataggcaaaggtgayagcttaggtcacacacaagttttctctttcctgtgcactgttagtgtgcctgcagatgctgtaatggattgtgtcagtaggcctccagccacaaggtggcacttgaaaaagagcaccagctggtagcagtgggatttgtgcttgccttatgttacgcaggggaggtaagctgatgactcaggcaatgggcagggccattgagctctcaaaattttctattctttgtgttaagctaccagggcagatggaggggcaaagccagctgggggctgaatcaggcaagttcacattctagctctcttttgtctgccatgtgtgggcaaaagcactgtccccagtggggatcagatagtggtcctctggctgtaggagtaatgttgcagggagtaccacagctgcctctgct

SEQ ID NO: 588612 - DNA, 635 bp, Homo sapiens
acttttataaccctttacaaattgttgttaaagagcaggtcagcgcctttagaaaaccttgttgtgcttttatttcaatgctcaatttacaaaaacaaaatacttttttgaaattagccaatatgttcacacaatttcttttgcaagattaagttttacaaacttttcaccatttgtttaaaccttcagctttatcttatctaattcaaaacaatcctttaacccaaggcaaaaatttacattttcatgcattcttataatcttttactaaaaacatattttactttccttayttaccttatatgtaaatctattttcattgtctcgattacagattattatggtaactcctagcaatttttaactttaatgtaaaacctggcaagttgctttaattatgtagtaggcataaataaagtctgattccttcctgcataattaagggtgtggttaattccatatgtccctggacttattaattgtgaagcaggcaaattgaatagtgtattagtcaattttcatgctgcagataaagacaatcttgagactgggcaatttacaaaagaaagaggtttaattggacttacagttccacatggctgaggaggcctcacaatcatagcagaaggcaaggg

SEQ ID NO: 588613 - DNA, 635 bp, Homo sapiens
acttttataaccctttacaaattgttgttaaagagcaggtcagcgcctttagaaaaccttgttgtgcttttatttcaatgctcaatttacaaaaacaaaatacttttttgaaattagccaatatgttcacacaatttcttttgcaagattaagttttacaaacttttcaccatttgtttaaaccttcagctttatcttatctaattcaaaacaatcctttaacccaaggcaaaaatttacattttcatgcattcttataatcttttactaaaaacatattttactttccttacttaccttatatgtaaatctawtttcattgtctcgattacagattattatggtaactcctagcaatttttaactttaatgtaaaacctggcaagttgctttaattatgtagtaggcataaataaagtctgattccttcctgcataattaagggtgtggttaattccatatgtccctggacttattaattgtgaagcaggcaaattgaatagtgtattagtcaattttcatgctgcagataaagacaatcttgagactgggcaatttacaaaagaaagaggtttaattggacttacagttccacatggctgaggaggcctcacaatcatagcagaaggcaaggg

SEQ ID NO: 588614 - DNA, 635 bp, Homo sapiens
acttttataaccctttacaaattgttgttaaagagcaggtcagcgcctttagaaaaccttgttgtgcttttatttcaatgctcaatttacaaaaacaaaatacttttttgaaattagccaatatgttcacacaatttcttttgcaagattaagttttacaaacttttcaccatttgtttaaaccttcagctttatcttatctaattcaaaacaatcctttaacccaaggcaaaaatttacattttcatgcattcttataatcttttactaaaaacatattttactttccttacttaccttatatgtaaatctattttcattgtctcgattacagattattatggtaactcctagcaatttttaactttaatgtaaaacctggcaagttgctttaattatgtagtaggcataaataaagtctgattccttcctgcataattaagggtgtggttaattccatatgtccctggacttattaattgtgaagcaggcaaattgaatagtgtattagtcaattttcatgctgcwgataaagacaatcttgagactgggcaatttacaaaagaaagaggtttaattggacttacagttccacatggctgaggaggcctcacaatcatagcagaaggcaaggg

SEQ ID NO: 588615 - DNA, 345 bp, Homo sapiens
gtgaactgaaaaggtattacagcttttatttttcttcaaaaaatatttgatctaagtgcttattttcctagagcttttttatataaacatcacgcccataagaaatataaaattacacagatgaacaaaagcaaattcagtacttgtaagatttttcatttgccaatcttctgaatagattattggcctctgggtgaagcccttcaagagcagggyctaggacagcatacagtttctagggcctaataaacaggcatagctggaagacagagacagattttgagaaggatctatccacttttaattcctggagtttcgtgaggaaaacagagggtgttttttccc

SEQ ID NO: 588616 - DNA, 345 bp, Homo sapiens
gtgaactgaaaaggtattacagcttttatttttcttcaaaaaatatttgatctaagtgcttattttcctagagcttttttatataaacatcacgcccataagaaatataaaattacacagatgaacaaaagcaaattcagtacttgtaagatttttcatttgccaatcttctgaatagattattggcctctgggtgaagcccttcaagagcagggtctaggacagcatacagtttctagggcctaataaacaggcatagctggaagacagagayagattttgagaaggatctatccacttttaattcctggagtttcgtgaggaaaacagagggtgttttttccc

SEQ ID NO: 588617 - DNA, 265 bp, Homo sapiens
gcttttgttgcatttacttttggagtcttagtcataaagttttggcttaggtaaatatccagatgtgtttttcttagtttttttcyagaatttttatggttttgggttttatatttaagtctgatccatcttctaatttttgtagatggtgagaaagagtgatccagtttcattcttctacatgtggctgtcttgttttccctgcatcatttattgaatagggtgtcctttcctatttatgtttttgaatgctttgtggaggatc

SEQ ID NO: 588618 - DNA, 265 bp, Homo sapiens
gcttttgttgcatttacttttggagtcttagtcataaagttttggcttaggtaaatatccagatgtgtttttcttagtttttttccagaatttttatggttttgggttttatatttaagtctgatccatcttctaatttttgtagatggtgagaaagagtgatccagtttcattcttctacatgtggctgtcttgttttccctgcatcatttattgaatagggtgtcctttmctatttatgtttttgaatgctttgtggaggatc

SEQ ID NO: 588619 - DNA, 575 bp, Homo sapiens
aaagtcaatattgtgggacaaattaaatgacattaaaaaatcaccttttttcatttgatataatgtaatggttataaaatatctcctcagagttcttcaactgtcatttcattgagatgtggggactggggtctctgaccttgaatctgggaggacttttaacttctttgactaagagaatacaaaaaaaakcaatgctgtgtaacttttgagacctggcctaaatcgacaatctgacttctgctcactttttttcagactcctccatctcaggagggccccagtattgccaggctgggagaaacccaaaccatgaggatagaccacgaataggagttctggttgacaatcccagttcattcctagcttcaaatacacaaggccaagtgccagatatgggcataaaaagcaattttggaagtggacactccagtccaagctgtcctagccctcagctatttgagttgcatccagacatgtaaatcttcccagctgaggcctcatcattgaggtgcagaaaaggggcatgcccactgtgcctgtttctaaattcctgacccacagaacctgtgagc

SEQ ID NO: 588620 - DNA, 575 bp, Homo sapiens
aaagtcaatattgtgggacaaattaaatgacattaaaaaatcaccttttttcatttgatataatgtaatggttataaaatatctcctcagagttcttcaactgtcatttcattgagatgtggggactggggtctctgaccttgaatctgggaggacttttaacttctttgactaagagaatacaaaaaaaatcaatgctgtgtaacttttgagacctggcctaaatcgacaatctgacttctgctcactttttttcagamtcctccatctcaggagggccccagtattgccaggctgggagaaacccaaaccatgaggatagaccacgaataggagttctggttgacaatcccagttcattcctagcttcaaatacacaaggccaagtgccagatatgggcataaaaagcaattttggaagtggacactccagtccaagctgtcctagccctcagctatttgagttgcatccagacatgtaaatcttcccagctgaggcctcatcattgaggtgcagaaaaggggcatgcccactgtgcctgtttctaaattcctgacccacagaacctgtgagc

SEQ ID NO: 588621 - DNA, 352 bp, Homo sapiens
agatacagatacagatatagacatagatacaagtacagttacatagaaaaataatattataagatatcctgaaatatatataatgttagtttctaacattgttttaaaagttagttgtttaaccaatcaaagmagaaacaacttaaacagactttacaaaaattcatcagatttaataaagttgtctattcgaagatagggacttctttcttttttaaaaattaaatgagaaagcaactattggcaaattcaaattcctttcttatcaaaacacgtattttgaatttttattgtttaaaacaatatagaatttgaattaatagctatcttagtaaggaaatatctttcctca

SEQ ID NO: 588622 - DNA, 421 bp, Homo sapiens
gactgaaaatccttggattaggacctaactcccacctacttgttcttgtagatactctgtctaaatacagatatagatagatacagatacagatacagatacagatatagacatagatacaagtacagttacatagaaaaataatattataagatatcctgaaatatatataatgttagtttctaacattgttttaaaagttagttgtttaaccaatcaaagcagaaacaacttaaacagactttacaaaaattcatcagatttaataaagttgtctattcgaagatagggacttytttcttttttaaaaattaaatgagaaagcaactattggcaaattcaaattcctttcttatcaaaacacgtattttgaatttttattgtttaaaacaatatagaatttgaattaatagctatctta

SEQ ID NO: 588623 - DNA, 615 bp, Homo sapiens
gaattcacgagcaagaccctagactgtggtgtttgcaggaagaaaccaagcagggtaaacaagcttaggaccggctcgtttgaataatttcagtgggctctggggcataagagctgtccctggttctctggtttttggccctagcgtgattaggacagaagcacagtggcctggagtgtgacagccctatagagtatttgtttgggaattggttagtttgtatttgtaaagcccatcttcrtgaggagttcaggggagacttcgtagccagaagctgaggcaaggtgactccagcatactatccatcttcaagaacaagatgtgtctgaattgctgtatgttataaagtttcgatgtctaatagagcaaatctttcatcctgttggttctctttgatttaatttgcttttttttctctctaagtactgttctcggaataagccaatctgatatgtgtgtcactattccaatgaatgagtagatcacactttatttttctgcttcttgtgaacattaattagttcagttttctgaaattttcaatgctattgtgattttttaaaattaacaatgctactttgcttattgtgtacttgtcaccagaaatgcaagagc

SEQ ID NO: 588624 - DNA, 615 bp, Homo sapiens
gaattcacgagcaagaccctagactgtggtgtttgcaggaagaaaccaagcagggtaaacaagcttaggaccggctcgtttgaataatttcagtgggctctggggcataagagctgtccctggttctctggtttttggccctagcgtgattaggacagaagcacagtggcctggagtgtgacagccctatagagtatttgtttgggaattggttagtttgtatttgtaaagcccatcttcgtgmggagttcaggggagacttcgtagccagaagctgaggcaaggtgactccagcatactatccatcttcaagaacaagatgtgtctgaattgctgtatgttataaagtttcgatgtctaatagagcaaatctttcatcctgttggttctctttgatttaatttgcttttttttctctctaagtactgttctcggaataagccaatctgatatgtgtgtcactattccaatgaatgagtagatcacactttatttttctgcttcttgtgaacattaattagttcagttttctgaaattttcaatgctattgtgattttttaaaattaacaatgctactttgcttattgtgtacttgtcaccagaaatgcaagagc

SEQ ID NO: 588625 - DNA, 597 bp, Homo sapiens
tgtccctggttctctggtttttggccctagcgtgattaggacagaagcacagtggcctggagtgtgacagccctatagagtatttgtttgggaattggttagtttgtatttgtaaagcccatcttcgtgaggagttcaggggagacttcgtagccagaagctgaggcaaggtgactccagcatactatccatcttcaagaacaagatgtgtctgaattgctgtatgttataaagtttcgatgtctaatagagcaaatctttcatcctgttggttctctttgatttaatttgcttttttttctctctaagtactgttctcggaataagccaatctgatatgtgtgtcactattccaakgaatgagtagatcacactttatttttctgcttcttgtgaacattaattagttcagttttctgaaattttcaatgctattgtgattttttaaaattaacaatgctactttgcttattgtgtacttgtcaccagaaatgcaagagctaagatgtctctggaaatggaattcctgggtcacagggttggcacatgatcaacattattagataatgttaaattgttgtacaatgtaatcacatt

SEQ ID NO: 588626 - DNA, 551 bp, Homo sapiens
atgctgtttatgatgatttttcattttwccaatggtgatttagaaggaacagatactcttgatatgagtgggaccaaacttacaaatcatcttgctccagtcagtttttgtgctggtttgaaaatttttttcatactctgagattcaggctaaattgcttttaaaattttaaagctttgtgtttcaaatttatattcttgatgagatgtatagagtgagaatgagatacattgtctttttattataaaaaatcttgctttagtagctactgaagtttacttttgaaattgtatttcttaaatatttccgttaattatagaaaattgattttgtattctattttatatccattaactttgctcatttagtaattctaataatcctaggcattcttcacaatgcattgtaagataatgtatacatttcataggatgacaatttttaggtacacttaatggtatgggactatagattattgggattttctttggtttaaaattggcaaactatttttaaggggaagttgttaacaatcactttctacaatatgt

SEQ ID NO: 588627 - DNA, 622 bp, Homo sapiens
ctgtttatgatgatttttcatttttccaatggtgatttagaaggaacagatactcttgatatgagtgggaccaaacttacaaatcatcttgctccagtcagtttttgtgctggtttgaaaatttttttcatactctgagattcaggctaaattgcttttaaaattttaaagctttgtgtttcaaatttatattcttgatgagatgtatagagtgagaatgagatacattgtctttttattataaamaatcttgctttagtagctactgaagtttacttttgaaattgtatttcttaaatatttccgttaattatagaaaattgattttgtattctattttatatccattaactttgctcatttagtaattctaataatcctaggcattcttcacaatgcattgtaagataatgtatacatttcataggatgacaatttttaggtacacttaatggtatgggactatagattattgggattttctttggtttaaaattggcaaactatttttaaggggaagttgttaacaatcactttctacaatatgtgactctctcttcaaagagtaaatcagagacaaatcttttttttcaaatttctttttttgaaaatcaataataat

SEQ ID NO: 588628 - DNA, 614 bp, Homo sapiens
tgtttcaaatttatattcttgatgagatgtatagagtgagaatgagatacattgtctttttattataaaaaatcttgctttagtagctactgaagtttacttttgaaattgtatttcttaaatatttcygttaattatagaaaattgattttgtattctattttatatccattaactttgctcatttagtaattctaataatcctaggcattcttcacaatgcattgtaagataatgtatacatttcataggatgacaatttttaggtacacttaatggtatgggactatagattattgggattttctttggtttaaaattggcaaactatttttaaggggaagttgttaacaatcactttctacaatatgtgactctctcttcaaagagtaaatcagagacaaatcttttttttcaaatttctttttttgaaaatcaataataatgaccctattttttagtttgaatggattctcattaatttaaaatgcaaatattttggactaaatgtttgtgtccctcccaccccaaatttaaattttgaagccctaatccccagtattatggttttggagatgtgggcctttggaggtcaaaaggttgagatgaaacca

SEQ ID NO: 588629 - DNA, 590 bp, Homo sapiens
tattcttgatgagatgtatagagtgagaatgagatacattgtctttttattataaaaaatcttgctttagtagctactgaagtttacttttgaaattgtatttcttaaatatttccgttaattatagaaaattgattttgtattctattttatatccattaactttgctcatttagtaattctaataatcctaggcattcttcacaatgcattgtaagataatgtatacatttcataggatgacaatttttaggtacacttaatggtatgggactatagattattggrattttctttggtttaaaattggcaaactatttttaaggggaagttgttaacaatcactttctacaatatgtgactctctcttcaaagagtaaatcagagacaaatcttttttttcaaatttctttttttgaaaatcaataataatgaccctattttttagtttgaatggattctcattaatttaaaatgcaaatattttggactaaatgtttgtgtccctcccaccccaaatttaaattttgaagccctaatccccagtattatggttttggagatgtgggcctttggaggtcaaaaggttg

SEQ ID NO: 588630 - DNA, 575 bp, Homo sapiens
gtgggcctttggaggtcaaaaggttgagatgaaaccatgaggatggagtcctcatgatggaattagtgaatttattataaaagacacagaagagcactttcttgtayacttcctttgtctctgtctctctgtgtgtttctctatctctcttccctttgggaacacaacaaaaggtatctgtgtgacaagcatgaagaataccctcagcagaaactgactatgtgtatgctgatcgtgtacttcttagcctccaaactatgcggaaaacattttgttgtataagacaccaagtttattgcattttattacggcagcctgagcagtctaacaagaaagcaataaaaagtataagtaattaagatgaaactaaatttatcatccaaattctcaccataaagaaataaccattttcaaaatatgtagaacaagattttacatattttcctaaagtttatagacagagataattgataaagattttatacaaactgactattaagaaatgattgtatttaattataacagaagataaaaataattttgtatagagaaactgattaacgtttatgcatatt

SEQ ID NO: 588631 - DNA, 566 bp, Homo sapiens
aacaatcactttctacaatatgtgactctctcttcaaagagtaaatcagagacaaatcttttttttcaaatttctttttttgaaaatcaataataatgaccctattttttagtttgaatggattctcattaatttaaaatgcaaatattttggactaaatgtttgtgtccctcccaccccaaatttaaattttgaagccctaatccccagtattatggttttggagatgtgggcctttggaggtcaaaaggttgagatgaaaccatgaggatggagtcctcatgatggaattagtgaatttattataaaagacacagaagagcactttcttgtacacttcctttgtctctgtctctctgtgtgtttctctatctctcttccctktgggaacacaacaaaaggtatctgtgtgacaagcatgaagaataccctcagcagaaactgactatgtgtatgctgatcgtgtacttcttagcctccaaactatgcggaaaacattttgttgtataagacaccaagtttattgcattttattacggcagcctgagcagtctaacaagaaagca

SEQ ID NO: 588632 - DNA, 566 bp, Homo sapiens
aacaatcactttctacaatatgtgactctctcttcaaagagtaaatcagagacaaatcttttttttcaaatttctttttttgaaaatcaataataatgaccctattttttagtttgaatggattctcattaatttaaaatgcaaatattttggactaaatgtttgtgtccctcccaccccaaatttaaattttgaagccctaatccccagtattatggttttggagatgtgggcctttggaggtcaaaaggttgagatgaaaccatgaggatggagtcctcatgatggaattagtgaatttattataaaagacacagaagagcactttcttgtacacttcctttgtctctgtctctctgtgtgtttctctatctctcttccctttgggaacacaacaaaaggtatctgtgtgacaagcatgaagaataccctcagcagaaactgactatgtgtatgctgatcgtgtacttcttagcctccaaactatgyggaaaacattttgttgtataagacaccaagtttattgcattttattacggcagcctgagcagtctaacaagaaagca

SEQ ID NO: 588633 - DNA, 575 bp, Homo sapiens
gtgggcctttggaggtcaaaaggttgagatgaaaccatgaggatggagtcctcatgatggaattagtgaatttattataaaagacacagaagagcactttcttgtacacttcctttgtctctgtctctctgtgtgtttctctatctctcttccctttgggaacacaacaaaaggtatctgtgtgacaagcatgaagaataccctcagcagaaactgactatgtgtatgctgatcgtgtacttcttagcctccaaactatgcggaaaamattttgttgtataagacaccaagtttattgcattttattacggcagcctgagcagtctaacaagaaagcaataaaaagtataagtaattaagatgaaactaaatttatcatccaaattctcaccataaagaaataaccattttcaaaatatgtagaacaagattttacatattttcctaaagtttatagacagagataattgataaagattttatacaaactgactattaagaaatgattgtatttaattataacagaagataaaaataattttgtatagagaaactgattaacgtttatgcatatt

SEQ ID NO: 588634 - DNA, 575 bp, Homo sapiens
gtgggcctttggaggtcaaaaggttgagatgaaaccatgaggatggagtcctcatgatggaattagtgaatttattataaaagacacagaagagcactttcttgtacacttcctttgtctctgtctctctgtgtgtttctctatctctcttccctttgggaacacaacaaaaggtatctgtgtgacaagcatgaagaataccctcagcagaaactgactatgtgtatgctgatcgtgtacttcttagcctccaaactatgcggaaaacattttgttgtayaagacaccaagtttattgcattttattacggcagcctgagcagtctaacaagaaagcaataaaaagtataagtaattaagatgaaactaaatttatcatccaaattctcaccataaagaaataaccattttcaaaatatgtagaacaagattttacatattttcctaaagtttatagacagagataattgataaagattttatacaaactgactattaagaaatgattgtatttaattataacagaagataaaaataattttgtatagagaaactgattaacgtttatgcatatt

SEQ ID NO: 588635 - DNA, 575 bp, Homo sapiens
gtgggcctttggaggtcaaaaggttgagatgaaaccatgaggatggagtcctcatgatggaattagtgaatttattataaaagacacagaagagcactttcttgtacacttcctttgtctctgtctctctgtgtgtttctctatctctcttccctttgggaacacaacaaaaggtatctgtgtgacaagcatgaagaataccctcagcagaaactgactatgtgtatgctgatcgtgtacttcttagcctccaaactatgcggaaaacattttgttgtataagacaccaagtttattgcattttrttacggcagcctgagcagtctaacaagaaagcaataaaaagtataagtaattaagatgaaactaaatttatcatccaaattctcaccataaagaaataaccattttcaaaatatgtagaacaagattttacatattttcctaaagtttatagacagagataattgataaagattttatacaaactgactattaagaaatgattgtatttaattataacagaagataaaaataattttgtatagagaaactgattaacgtttatgcatatt

SEQ ID NO: 588636 - DNA, 368 bp, Homo sapiens
tttttttttttacagcccagaggtcttttatttattttttgttttaacacctattatgccatgaattcatagggaataggttccagcagctcaaactccttcccattggttytcacaaagtgtgcttctctgggtggagcaggctggcgctttagttgaacccaggtacctttctctttggcttctttctttttctgatcattttccttcatgtgtttcaggaagctatctcggctcacagtgtttaatgtgctcaatacgcacattaattctcttggcaagaatcttgcccttaacttgtttgtttacaacaatgccaacagcatgctgggtaacattgtagactcttccagttttgccatgctaac

SEQ ID NO: 588637 - DNA, 368 bp, Homo sapiens
tttttttttttacagcccagaggtcttttatttattttttgttttaacacctattatgccatgaattcatagggaataggttccagcagctcaaactccttcccattggttttcacaaagtgtgcytctctgggtggagcaggctggcgctttagttgaacccaggtacctttctctttggcttctttctttttctgatcattttccttcatgtgtttcaggaagctatctcggctcacagtgtttaatgtgctcaatacgcacattaattctcttggcaagaatcttgcccttaacttgtttgtttacaacaatgccaacagcatgctgggtaacattgtagactcttccagttttgccatgctaac

SEQ ID NO: 588638 - DNA, 368 bp, Homo sapiens
tttttttttttacagcccagaggtcttttatttattttttgttttaacacctattatgccatgaattcatagggaataggttccagcagctcaaactccttcccattggttttcacaaagtgtgcttctctgggtggagcaggctggcgctttagttgaacccaggtacctttctctttggcttctttctttttctgatcattttccttcatgtgtttcaggaagctatctcrgctcacagtgtttaatgtgctcaatacgcacattaattctcttggcaagaatcttgcccttaacttgtttgtttacaacaatgccaacagcatgctgggtaacattgtagactcttccagttttgccatgctaac

SEQ ID NO: 588639 - DNA, 368 bp, Homo sapiens
tttttttttttacagcccagaggtcttttatttattttttgttttaacacctattatgccatgaattcatagggaataggttccagcagctcaaactccttcccattggttttcacaaagtgtgcttctctgggtggagcaggctggcgctttagttgaacccaggtacctttctctttggcttctttctttttctgatcattttccttcatgtgtttcaggaagctatctcggctcacagtgtttaatgtgctcaatacrcacattaattctcttggcaagaatcttgcccttaacttgtttgtttacaacaatgccaacagcatgctgggtaacattgtagactcttccagttttgccatgctaac

SEQ ID NO: 588640 - DNA, 576 bp, Homo sapiens
ggttcaagcaattctcctgcctcagcctccctagtagctaggattacaggtgcttgccaccgcaactggctaagttttgtatttttagtagagatggggtttcaccattttggtcaggctggtcttgaactcctcacctcaggtcatctgccctcctcagcctcccaaagtgctgggattatgtgtgagccaccgcccccagcctagaaaaaartctttctaatcaccactacaagttcaggaggtcctcaagaccacactcaggttcaataattcactataaaagctcacaaaattcagcaaagctgatatatcatgatttagtctgctttggctaccataacaaaacaccatcattgggtgacctaaaaaatagaaatttatttctccacactgtggacactgggaagtccaagatcaaagtgccagcaagacaggtttcattctgatgccttttctctcttgtgtgcacagaaagagcttggttctctcttcctcttctgataaggccactaatcccatcatggggaccccaccctcatgaactcatctaaacctaatgactttcccaaaggc

SEQ ID NO: 588641 - DNA, 576 bp, Homo sapiens
ggttcaagcaattctcctgcctcagcctccctagtagctaggattacaggtgcttgccaccgcaactggctaagttttgtatttttagtagagatggggtttcaccattttggtcaggctggtcttgaactcctcacctcaggtcatctgccctcctcagcctcccaaagtgctgggattatgtgtgagccaccgcccccagcctagaaaaaaatctttctaatcaccactacaagttcaggaggtcctcaagaccacactcaggttcamtaattcactataaaagctcacaaaattcagcaaagctgatatatcatgatttagtctgctttggctaccataacaaaacaccatcattgggtgacctaaaaaatagaaatttatttctccacactgtggacactgggaagtccaagatcaaagtgccagcaagacaggtttcattctgatgccttttctctcttgtgtgcacagaaagagcttggttctctcttcctcttctgataaggccactaatcccatcatggggaccccaccctcatgaactcatctaaacctaatgactttcccaaaggc

SEQ ID NO: 588642 - DNA, 595 bp, Homo sapiens
acagtcctagaggtcagaattccaaaatctatatataaggctgcatttcttcttyttggagactccaggggagaacctatttcttcaccttgttaagtttacaaggtgctgcacacattcccctggccccttcctccaacttcaaaaccagcagtgtagtatcttttctcctctctgacctctgcctctgttcttacatcttctccctatcttctgaccctcttgcctgctcttatgagaatcctatgattacattagtccacctgataacgcaagataatctccacatctcaagacctttagtttaatcacatctacaaaatcctttttactttggaaggtaacatatttgcaggttccaggcattaggacataaacatcctcagggccatttattcattctaccacaagaatgaagaaaaaaaaaaagcaaaaaaaagaaaagaaagaaaggtggggacggggagaggggagggagggagggaaggaaggtagagagagagggagggagggaaggaaggcagagagggagggaggagggaaggaaggaaggaaggaagggaaggaaaaatgtctctctgctccagtttttatt

SEQ ID NO: 588643 - DNA, 595 bp, Homo sapiens
acagtcctagaggtcagaattccaaaatctatatataaggctgcatttcttctttttggagactccaggggagaacctatttcttcaccttgttaagtttacaaggtgctgcacacattcccctggccccttcctccaacttcaaaaccagcagtgtagtatcttttctcctctctgacctctgcctctgttcttacatcttctccctatcttctgaccctcttgcctgctcttatgagaatcctatgattacattagtccacctgataacgcaagataatctccacatctcaagacctttagtttaatcacatctacaaaatcctttttactttggaaggtaacatatttgcaggttccaggcattaggacataaacatcctcagggccatttattcattctaccacaagaawgaagaaaaaaaaaaagcaaaaaaaagaaaagaaagaaaggtggggacggggagaggggagggagggagggaaggaaggtagagagagagggagggagggaaggaaggcagagagggagggaggagggaaggaaggaaggaaggaagggaaggaaaaatgtctctctgctccagtttttatt

SEQ ID NO: 588644 - DNA, 595 bp, Homo sapiens
acagtcctagaggtcagaattccaaaatctatatataaggctgcatttcttctttttggagactccaggggagaacctatttcttcaccttgttaagtttacaaggtgctgcacacattcccctggccccttcctccaacttcaaaaccagcagtgtagtatcttttctcctctctgacctctgcctctgttcttacatcttctccctatcttctgaccctcttgcctgctcttatgagaatcctatgattacattagtccacctgataacgcaagataatctccacatctcaagacctttagtttaatcacatctacaaaatcctttttactttggaaggtaacatatttgcaggttccaggcattaggacataaacatcctcagggccatttattcattctaccacaagaatgaagaaaaaaaaaaagcaaaaaaaagaaaagaaagaaaggtggggacrgggagaggggagggagggagggaaggaaggtagagagagagggagggagggaaggaaggcagagagggagggaggagggaaggaaggaaggaaggaagggaaggaaaaatgtctctctgctccagtttttatt

SEQ ID NO: 588645 - DNA, 462 bp, Homo sapiens
tgaattcatagtcttttcaaacaagtaagtaagtatggtgaaaggactcatgggatgtttagaagcacagaaagcctaggaaaaaaagtgcctgaatctagactgtaccactgttgacatcatttgatgctgaagttaggtcatgtcattagaatgaagaccagagccaagtttacgactggcctggtatctattattaacagawcacacttcaagtgctaatgagacttttaaaataaatagacaacctcggccgggtgcggtggctcacgcctgtaaacccagcactttgggaggccaaggtgggtggatcacaaggtcaagagatcgagaccatcctggccaatatggtaacaccccatctctactaaaaatacaaaaattaactgggcattgaggcacacgcctgtagtcccagctattcaggaggctgaggcaagagaattgcttgaacccaggagg

SEQ ID NO: 588646 - DNA, 462 bp, Homo sapiens
tgaattcatagtcttttcaaacaagtaagtaagtatggtgaaaggactcatgggatgtttagaagcacagaaagcctaggaaaaaaagtgcctgaatctagactgtaccactgttgacatcatttgatgctgaagttaggtcatgtcattagaatgaagaccagagccaagtttacgactggcctggtatctattattaacagaacacacttcaagtgctaatgagayttttaaaataaatagacaacctcggccgggtgcggtggctcacgcctgtaaacccagcactttgggaggccaaggtgggtggatcacaaggtcaagagatcgagaccatcctggccaatatggtaacaccccatctctactaaaaatacaaaaattaactgggcattgaggcacacgcctgtagtcccagctattcaggaggctgaggcaagagaattgcttgaacccaggagg

SEQ ID NO: 588647 - DNA, 598 bp, Homo sapiens
ttattatataaataaacctgaattttttccatttattctttcaacaacaaaaatttcatgggtaaaatgagataaatacatgaatgcaacttgaaaagcagaaatgctttatagaaacaaygtataatgatctattttctatcacaaaaattgtctttctacattgtcacgtggagtgttacttagtcaggtgtgtagttgaaaatgatttacagttgttcatatttttaaatttgttagccctcttagtttaatcaatacctagttgcagagatttttttgaagaactttgtaacctaggattcctggtccttctgcctcctagcatagaaaaaaaagtcttcaccagaagtgaagcaggccacccaagatattagaggaaagcaaccatttgactgaagtttaagcaatattctacacatgattaattacactttgtcttggagtctatcagacctagatgtcaaggagatcttctctcttcccattattcctattcccacagaccttttggagaaatatcattctatactattcactaggaatgagcctatcctaaggcatgttcacttttaccctactctttttatttattttt

SEQ ID NO: 588648 - DNA, 598 bp, Homo sapiens
ttattatataaataaacctgaattttttccatttattctttcaacaacaaaaatttcatgggtaaaatgagataaatacatgaatgcaacttgaaaagcagaaatgctttatagaaacaatgtataatgatctattttctatcacaaaaattgtctttctacattgtcacgtggagtgttacttagtcaggtgtgtagttgaaaatgatttacagttgttcatatttttaaatttgttagccctcttagtttaatcaatacctagttgcagagatttttttgaagaactttgtaacctargattcctggtccttctgcctcctagcatagaaaaaaaagtcttcaccagaagtgaagcaggccacccaagatattagaggaaagcaaccatttgactgaagtttaagcaatattctacacatgattaattacactttgtcttggagtctatcagacctagatgtcaaggagatcttctctcttcccattattcctattcccacagaccttttggagaaatatcattctatactattcactaggaatgagcctatcctaaggcatgttcacttttaccctactctttttatttattttt

SEQ ID NO: 588649 - DNA, 454 bp, Homo sapiens
atagcattcagaactatccaaagawggcataagttgtttcaggaggtagttagttctccactcttgagatgttcaatgctacagaggttaatctcttggtggggatgttacaaaggagaactatgtgtgaggaaagagaagaacacgtggctaatgaatgacatttaaagctctttccaatccaaaatcttgcacaatgaataaatgctatcttaatctaattttatgacataaatagatattgaactttcttaaaaacagagacaaaaaaagttatgtactgcagactggccatatagattcagctttgtcataagaaagaagcagcctcctaccaagtcacaagacacttttgttgagcctgttgcacttgatagctactgacttcggtggaaaataatctctgggaagcttattatcatgttagtatactatcactctttacaagtctaga

SEQ ID NO: 588650 - DNA, 447 bp, Homo sapiens
tgctctaggtgacagaatactagagcttatctagtgtaggtcagacagctgcctctggggtcaggagagtggggtctgtgatcatagaagggagttgaggaagaaaaggggacatggaggtgtagaagatttaaattttgtggctgggtgcagtggctcacacctgtaatcccaacactttgggaggccgaggtgggaggattgcttgagcccaggagtttgagaccagcctgggcaacgaagtgagacttggcctccacacaaaaaaattaaaaattagctgggtatagcagcacacgcctgtagtcccagctactagggaatccaaggcaggaggatcaattgagcccaggagtccgaggctgcagtgagctargtttgtagcattgcactctattgggagactgtgcaagaccatttcaaacaaacaaaattagctggctgtgg

SEQ ID NO: 588651 - DNA, 412 bp, Homo sapiens
ggcatgaggactttggttatctattgatgacaaaaaaaggatatgtgcaattcaggtacattttctaaaatgttgataaattgatggagaaagacgatttcttctatgccacagttttcttggaatagcctaatccaatgggatatcaagaatgtaataaacctaggtgtgaaaataattagaacagaggttgagttgtatggcataagaccaactggtaagcacagatcatggaatctctatgattgaggtgagtctatttgatgtacagtgtatattttcctaaagatgtccccacatggattttaaagatcaatgctaattcatgtcaccaaaaatactccagaaaccagattgcaaatatgtacactagtatgtttgaytggtatattctgttataacaatcttccag

SEQ ID NO: 588652 - DNA, 202 bp, Homo sapiens
tattcctacaacagctttaccaaatatttcaccactgcataasatagattaccatctttccaaccctcagtaacggttctcttgctgactgccatctggctctagagccacatattttagggtttgtgttttggccactgcccactcctggtaccataacaccatctatcaaatctacctgtaggtcatgagattacatagg

SEQ ID NO: 588653 - DNA, 202 bp, Homo sapiens
tattcctacaacagctttaccaaatatttcaccactgcataagatagattaccatctttccaaccctcagtaacggttctcttgctgactgccatctggcyctagagccacatattttagggtttgtgttttggccactgcccactcctggtaccataacaccatctatcaaatctacctgtaggtcatgagattacatagg

SEQ ID NO: 588654 - DNA, 303 bp, Homo sapiens
ctgaaaactctttggcacagtgcccagcacaaattcagcagtcactcagtgttggctatcatctttggtgatgttggtcccaaacccagacctctgctctkgtcctcggctcatacacccacgtgggtagcccatatgcactttaaacgtgagtccaaaatggaatccaaagtatcagatcccctcgttgccaccaccaggtttgctttcttctcaagctgctgagggatcctcagaagcagagaccatgatgagaacccatctttaactctgggtcactagcacaggggcagagtaggcagt

SEQ ID NO: 588655 - DNA, 303 bp, Homo sapiens
ctgaaaactctttggcacagtgcccagcacaaattcagcagtcactcagtgttggctatcatctttggtgatgttggtcccaaacccagacctctgctctggtcctcggctcatacacccacgtgggtagcccatatgcactttaaacrtgagtccaaaatggaatccaaagtatcagatcccctcgttgccaccaccaggtttgctttcttctcaagctgctgagggatcctcagaagcagagaccatgatgagaacccatctttaactctgggtcactagcacaggggcagagtaggcagt

SEQ ID NO: 588656 - DNA, 303 bp, Homo sapiens
ctgaaaactctttggcacagtgcccagcacaaattcagcagtcactcagtgttggctatcatctttggtgatgttggtcccaaacccagacctctgctctggtcctcggctcatacacccacgtgggtagcccatatgcactttaaacgtgagtccaaaatggaatccaaagtatcagatcccctcgttgccaccaccaggtttgctttcttctcaagcygctgagggatcctcagaagcagagaccatgatgagaacccatctttaactctgggtcactagcacaggggcagagtaggcagt

SEQ ID NO: 588657 - DNA, 303 bp, Homo sapiens
ctgaaaactctttggcacagtgcccagcacaaattcagcagtcactcagtgttggctatcatctttggtgatgttggtcccaaacccagacctctgctctggtcctcggctcatacacccacgtgggtagcccatatgcactttaaacgtgagtccaaaatggaatccaaagtatcagatcccctcgttgccaccaccaggtttgctttcttctcaagctgctgagggatcctcagaagcagagaccatgatgagaacccatctttaactctgggtcrctagcacaggggcagagtaggcagt

SEQ ID NO: 588658 - DNA, 566 bp, Homo sapiens
tatgctttaccaccttctctggttgkgaagatcaagggagataatgggagtgaacacacctgtgtacagtggagctgtgcaggctcctcatggttgcttagggcttggtctgaaggcctagtgaaagagaggatctgatatcaatgtaccatgaattccctggcatcctaattatttgttctttcatcaatcctgcaaacacttacagagcacctggtatgtgttcagcactgtgctaggatcaggagtcttaaccaataaacaagtcatggcctcaagccctgaagaaacaaagagatgtaccaggaggcaatttgtcagtgttctactgcattgtacattgatgtaccgcattccattgtaccagcctcagaagtactgagttatccacaggtgcttccaaaaacacacctaggaaagacacagaaagtgaaacatcatcacctaaccctgttcaggcttcagaattgctgtgaactgattcccagtggtgttagctgcaggaccaactgagtgtgtgacacaaacactttctgacaatgaaatattttgcagaaccaaaggct

SEQ ID NO: 588659 - DNA, 524 bp, Homo sapiens
catgatgggccacctgcccaagggagtttatgggaacagctgcctgccctgccacagtggactagtgaaggcaccaggctgcactgccaggcgactctgaggtcagaacactcctgagcccctcctctgggcatggccccatcagagatgagtggcgctctggtaagggagacagatggaacttgactaatgcccaccagaacagaccgctttctccagcaggaacatagcagagggcttggaggacaacagaggagggcatgggastatcccgggtcaggcgcaaatccaccacttggggatctttcagctccaaggctgacagaggctaaagacacgcctggtggagaagtcagcatgggcagaattgccgaggtgtgactgtgcaaggcacgttctcagaggcctgtaattgagtgtgtctgggcagtgcattccagggcctcgggtggggggggcacgcatgtgagttgcatgtgtgaattcactcccaccagttcacagaatgggatcagcatgcagag

SEQ ID NO: 588660 - DNA, 205 bp, Homo sapiens
atggtaataatatgctctcaactggtgtgggtctggaataaaacactccccttggctgtgcacactgcagagaggaaaaacaaaatgattggagtcagcygggcttttctattgagcacctcgacctacagattttccaatttcaagttcattcacatttcatctctggcttctacattttacttaaaaagcatttccctatttg

SEQ ID NO: 588661 - DNA, 205 bp, Homo sapiens
atggtaataatatgctctcaactggtgtgggtctggaataaaacactccccttggctgtgcacactgcagagaggaaaaacaaaatgattggagtcagccgggcttttctattgagcacctcgacctacagattttccaatttcaagttcattcacatttcatctctggcttctacattttasttaaaaagcatttccctatttg

SEQ ID NO: 588662 - DNA, 586 bp, Homo sapiens
ctaattaactaaataacagaaaaatgcccatgtaaaaaatgagagtattaaaatatctaaattttacagcactattatgaattttaatttttatattaagcacatgttcaactcttatacgatgaaaatacacacaaagaaaacataaaccaatgaaaaattttcatttgcttctgaagattctaaggccatgttattaatatayacatagtgaagacataatgaattttattgtaaaggaagactagtagaatgtcctgtgtagcataaaaatcgtaaagcaaaaactttcccacattattttaagcagaaaactcaaccaaatttctgaaatctagataagacttccaattcaacaaaagccatggaacaaatggctgctgaataaattccacgaaaaaaagtatttttccccattcaacaagatagtattagaaaatctacagcctacaattattcaagagattttataattaagtttctagaaaattactagcaatgtggtttaaccaatttctcactaacattaaaaaataattccccaatcatatgagcaggaacacaaaagacaaccacctatctctcc

SEQ ID NO: 588663 - DNA, 566 bp, Homo sapiens
aggtgggaggattgcttgagcacagggggttgaggctgcagtgagctgtgattatgccactgcactccagcctaagtgacaaggcaagatcctgtctcaaaaatatataaaaatttcaaattaagggcatgaggctgacacatggtggatgctgcacggttcgagtttctacacatggagatggaagcagagctgtgggatcacaaacccaaccctgtccatggcgggacagaagataagcctgttgatcctggagagcatggatttctgtgtgagccaggttctaggcgagagactgcccctgaagatgctcgtctcagggaggagctgggtgtcctcaagttcatatgcaaaaatctgtgggtggctgtgttccaatagatggasagcttgtgcaccaatcaccaagggacctactttttgcaggacaacagcttccactcctcatcccgatgatctggggcctggattcacttgtggcctcctgcatggcaccctcagtaccctgggcatggagagtttggtcactgcctctgtggcatccctgaccacctgtaagttcccag

SEQ ID NO: 588664 - DNA, 562 bp, Homo sapiens
  misc_feature 109, 110, 111, 112: n = A,T,C or G
agatgggggtttcatcatgttggccaggctggtctagagctcctgacctcaagtgatccacccacctcggcctcccaaagttctgggatcacatacrtgaaccacagcnnnnagcctaaagcaagttctgataggctttgccacagcttctaagacagcatcaacattggaccctataacctgagacactgcacacactacaacagccgtgtgcccccagatgtgaagctgacctcttccgaggaacgtgttaacattcacgtctgtgttcctggttaggtctcctccctctgaatgcgcagtcacctcaggtgcccatgtgttcctcctagtcggcactccacaccaccaacctagcggggctccaggtactatttggcagccacaaataaaactcctaatcaaaacatcacctcaaaaatgagcatggttactaatgtaagagaagcaatgtatacaacttccttcaccaatcttgaagcaaaaactcaaaggagaaggaacttgaaagcatcataaatagacaggcagccaatcaaccaggatagaaagcaagagctgt

SEQ ID NO: 588665 - DNA, 612 bp, Homo sapiens
cctataaccacctgatcttctacaaacttgacaataacaaacaataaggaaaggactctgttcaataaatgatgctgagataactggctatccatacagggaagactgaaactaggcccattcttttcaccatatagaaaaattaattcaagattgattaatgacttaaacgtaaaactgaaaactatcaaaactctagaagaaaacctaggaaacaccattcaggatatcagccttggcaaaaatttatgactaagtcccgaaaagcaattgcaacaaaaacagaaattggtcgggcacggtggctcacgcctgtaatcccaccactttgggaagcagaggcgggcagatcacgaggtcaggagatcgagaccatcctggctaacacggtgaaactccatctctactaaaaacacaaaaaaattagccaggcgtggtggtgggcgcctatagaccttgctactcgggaggctgaggcaggagaatggcgtgaacccaggaggcagagcttgcagtgagccgagattgctccactgtactccagcctgggcgacagagcgagactctgactcaaaaacaacaacaacaacaamaaaaaaacagaaattgaca

SEQ ID NO: 588666 - DNA, 541 bp, Homo sapiens
ttttgtttatgtgtattatcttgtgtcctgtgacatttctgaacatacttactagttttaagaggtttttgtgagttagctgggattttctgtgtagmcaaccatgttttctacaaataaggacaattttatttcttctgttttaatctaggcattcttgttttcttttcttgacttattgtgccaggtagaacttccagcattttgttgaataagagtggtgagtgtggatatacttgtttttctctcagtcttaggggaaaaggattcaatctttcacacctttcactaagcatgatattgtctgttggctttttgtaggtgctacttattaagttgaggaatttctcctctattcttattttcttagagtttttatcatgaatgggtgttggattttgtccaatgttttcctgcataaatatgatcatatgatttttattttttaacctgtggatagtgatggattcataaagctctaacattttctcaatcttattgtattcttaaaaagaagaaataactgtattttaattatttg

SEQ ID NO: 588667 - DNA, 575 bp, Homo sapiens
gtaaaatctttcaactggaaacccaggaactcattgtctgtcttccattgcaacagttctccagaatatactaggctaaaagatagtaaagatagtcgtgtatgtagaattcacaatattttcaaaggaaattggttatttttaggattcacttttcataacaccccaacatctagtacatgtcatcttaccttaatattcatttaccccatggaatttgtttgcattatatatgatgttcataatcttggttagattttcaaaagtagacataaatttttgagragttagtctcactttttccagacattataaattccaaaatttatttatggccttcttctgggcatttcatattttcttttcaatttggattccctagtttggtatttataccagaggtgctactttccatttaaattatttctgtaagcactaggactccatgtggatctattatatttcaccaacatttcaaacctcatgtgagccccatgggtagagggtgctgtgttatttactgatgaaaaccctaggcccagaacaatgccagacatgtcatagatggctaaaaa

SEQ ID NO: 588668 - DNA, 312 bp, Homo sapiens
tcaggctttgcgatatctcctattagtggagtttcaagtttttccacatcttgttccacatctgcaacaacatttgatattataacacttttttttatttgagatattcttgagtgttttattatctattttttacctargttttctcctgtgcttgataagtctgtaggaattacagagagagagactgtgtaaaatataaactgcttctgagtctgaaataggatgcattagaaaatgtaacaacttgtttgacagacgcttgttctccccaaacaaccagatttgtccgaattcctacctggttattag

SEQ ID NO: 588669 - DNA, 344 bp, Homo sapiens
gaattcactgctggattctcaaagagtgcaatgttattttagtaatagctgaatattcatgtttctgaagataaatatgcragaacgtatttttcttagaaaatataagaaccaaatttctaaatacaaatcaaaattatatcactccatggttcccattataatagatggctgtgaattggcactagcagacttttaaatttcataatttcagatactacatttgttttactcttcatttattactagggcctaatctagtgcctgtcattgaataaaaatgtttgatctagtgaaagttaaagtgaaagatatgaaatagaatcaggtaagtttagtaaaag

SEQ ID NO: 588670 - DNA, 574 bp, Homo sapiens
cagtgacctgtggggcaataaaaatagtcatcctacacgaaattcaagttcaagaaagtttgagtttgaaacatattttaaaaatatgtacaatttttttttcaattttgataaaaatgtaaggaatctttaaaaaacccaagcaggaaaaatgtataaaattgtatgacacctgataatttagttgctggaaattattgttaacttgaattaaatttgacctaaagctgcctccatacacctccatacatagtgaactgtaacctaacttaatgtgtaaacaacttgtaatcttacctaagagtatactcgtgaaacaagtagccaaggcccagccaattataacaagtgaacctcaagccaattactgaagtctgtcaaaagatgtccaaataagacaaacactaaacagcaaccaataagattatttytgaatatcattactatttctgtggctataaacatagcctgcacacttaggggaaggagctctctgtatcatttttgatactgagtactacttggtctatgaacctgtcttttttttttactcaactcccctccgctaaattta

SEQ ID NO: 588671 - DNA, 552 bp, Homo sapiens
tcttctttactgcaggctctgtctgataagtaggctattaactacaagctgtgggcttatgactacagttaataagccaagtcttaagaatgtgactggtagtgatggaccatggaaaaagtaaataacactgttggccatgccacagcctcagtccccatactcagggttctacctaacaaaactgccagtataggaaaagcacccagaatatctgtacatgtatatgataaaggatcaaacacatcaactcctaatacttgtgttttactaamatttctgaatctcatacataaaatatgtgttttcctttcttccttttctacctcctcctttctttcttttgcaaaaggctaatcattttgtaaagcaaagccatcgacataggacgtaagtatgaaacaatatgttggcctgatactatgaggtgttagaagagcgaagtagtaattattgtagtacttgatcacattcatgcttctgatactttcaagattttcactttactattagtttccttttctaaacttcaaaatccaagtgtattgagaa

SEQ ID NO: 588672 - DNA, 609 bp, Homo sapiens
actcttgggcaccagagacattttgagcacgttgatagtgtttaaaatcttaattttgtgctcatagtttagaaaagtgaaacgtaaaaaaagtcatgtggttttcctccccacgtatgccagttgggtgatacttcacgttataagcctgatagtagcagctagaagaagtatagtgttaataaaatgctgattatttcagaggcctggactttataaactattttcttctctggttctgctttgatgtctaatttaactttgcaaaaaaatacattagtgagtattagagtcacttctaagataatggaggaggggttatttaatatgttccatatagtaaatgagttatatattacaataaagtcacagtttcttacttcaactctgcatttattttaagtgacatagaatatgctgaaaaaatgcatgcggttatcactgatagcaatacaaatgtcattctgaatactcccaggacacttcaacagcctccatagaaaagtaatccagtgataatggtgagagtcaacacttactgaacacttaacaccatgttaagcacagcaagtatgttwtatcatttcaccttcacaaccatttggagaa

SEQ ID NO: 588673 - DNA, 598 bp, Homo sapiens
tcattattccaatgataaattaaaaaacaatgaaaaattaaggaaaaatgggttaagttgttttttgtttcttttgcttgcctcagcatttgcagaaattcatttctgctgaacaaagctagacccatcatatcaaattctacaggagaattgcaaataattattttaaagaaaaccctcatgaaacatcttaagtaaaaaaagtaattttcacaagggtcttacaattttctttaaaaactcttatctctgtaacaagaccaattgataattgaggtaccatacgaagaaaatggagtgccctttctctacaacttattaagaacttcacaacagcagctgcagaatattttatcaagaactactcttctaaggactgaccgtgtcctttgcaaggacgtggatggwggtggaggccaatatgctaagcaaactaacccaggaacagaaaaccaaatagcacaagttatcatctataagtaagatctaaatgatgagagctcatgaacacactgggggaacaacacacactggggccttttggaggatggaatattggaagaaagaggggatcaggaaaataatgggtactaggctt

SEQ ID NO: 588674 - DNA, 598 bp, Homo sapiens
tcattattccaatgataaattaaaaaacaatgaaaaattaaggaaaaatgggttaagttgttttttgtttcttttgcttgcctcagcatttgcagaaattcatttctgctgaacaaagctagacccatcatatcaaattctacaggagaattgcaaataattattttaaagaaaaccctcatgaaacatcttaagtaaaaaaagtaattttcacaagggtcttacaattttctttaaaaactcttatctctgtaacaagaccaattgataattgaggtaccatacgaagaaaatggagtgccctttctctacaacttattaagaacttcacaacagcagctgcagaatattttatcaagaactactcttctaaggactgaccgtgtcctttgcaaggacgtggatggtggtggaggccaatatgctaagcaaactaacccaggaacagaaaaccaaatagcacaagttatcatstataagtaagatctaaatgatgagagctcatgaacacactgggggaacaacacacactggggccttttggaggatggaatattggaagaaagaggggatcaggaaaataatgggtactaggctt

SEQ ID NO: 588675 - DNA, 592 bp, Homo sapiens
agagaggaaagctggtgctcaggcagtgcccatgtgccaggtgaagccacaggcgtttgcctacttcttacccgcggctttatgatcatcagccccattttacagaggagagaacaggcacagagaagttagtgcagccaaggtcttcagagtcctcagatgtcctctctgggtggctccaggactggcatagggtcatgcctaagaggacccctagctttcattccctgctattcacttgtccatggcattcatagtgtttacggcttctgggctaagcgcaaagggagtgccctctaacagccatgaagtgaaagccacgacccaccattgcagcctccaaacaagtgcagggcgaagacccttgaactgtcctggtgttccgtagrgagcaccccatcctccctcaggtcgagcagacttgggggctgggggttggggcgggcaagagtgctctgactctgagattcagcactgggttcaagaaattactctggcccagcccagcccctgtggcctgaactccctcagggtctgggaataagcctcagggcacgtgcactgggaaatgagaagcattcaatctcaactt

SEQ ID NO: 588676 - DNA, 592 bp, Homo sapiens
agagaggaaagctggtgctcaggcagtgcccatgtgccaggtgaagccacaggcgtttgcctacttcttacccgcggctttatgatcatcagccccattttacagaggagagaacaggcacagagaagttagtgcagccaaggtcttcagagtcctcagatgtcctctctgggtggctccaggactggcatagggtcatgcctaagaggacccctagctttcattccctgctattcacttgtccatggcattcatagtgtttacggcttctgggctaagcgcaaagggagtgccctctaacagccatgaagtgaaagccacgacccaccattgcagcctccaaacaagtgcagggcgaagacccttgaactgtcctggtgttccgtagggagcaccccatcctccctcaggtcgagcagacttgggkgctgggggttggggcgggcaagagtgctctgactctgagattcagcactgggttcaagaaattactctggcccagcccagcccctgtggcctgaactccctcagggtctgggaataagcctcagggcacgtgcactgggaaatgagaagcattcaatctcaactt

SEQ ID NO: 588677 - DNA, 592 bp, Homo sapiens
agagaggaaagctggtgctcaggcagtgcccatgtgccaggtgaagccacaggcgtttgcctacttcttacccgcggctttatgatcatcagccccattttacagaggagagaacaggcacagagaagttagtgcagccaaggtcttcagagtcctcagatgtcctctctgggtggctccaggactggcatagggtcatgcctaagaggacccctagctttcattccctgctattcacttgtccatggcattcatagtgtttacggcttctgggctaagcgcaaagggagtgccctctaacagccatgaagtgaaagccacgacccaccattgcagcctccaaacaagtgcagggcgaagacccttgaactgtcctggtgttccgtagggagcaccccatcctccctcaggtcgagcagacttgggggctgggggttggggcgggcaagagtgctctgactctgagattcagcactgggttcaagaaattactctggcccagcccagcccctgtggcctgaactccctcagggtctgggrataagcctcagggcacgtgcactgggaaatgagaagcattcaatctcaactt

SEQ ID NO: 588678 - DNA, 507 bp, Homo sapiens
ctgcattctgacccagggccctttgcggcattagtacagccaggacagcgcacctggagactctacgataagcatttgttgagcaccaactggggccagggcctcatgcctaccagtcagcgccatgggaatggcccggagggcttgagtgaagacagatgctaccgtgttttggccccagttggccttgatcctgctactggggtcccaggagggccccagagtcagaaaggaggtccccaccaaaccaagccacctccagggtcccckggtcaccccaagtccaacccaagggagctcccactgggaagccttcatgaccccctaggccctggcacccaagcccctgctccacattctgccatgcacggcaccatcacccaggaatgactcaggcaggggattcttatccggggttgtctggaatcatcatcgaaatcctgcagaaagagggtgccctgagtcctttgctgatgcagaggagtggagaactctccactcacatag

SEQ ID NO: 588679 - DNA, 598 bp, Homo sapiens
tggctacactgaacaacacattttcaatttagatgaaacagtcttctattgaaacaagatgctacctaggactttcatagctagaaaggacaagtcaatgcctggcttccaagtttcaaaggacaagctgactctcttgttaggggctaatgcagctggtgactttatgttgaagccagtgctcatttaccattrtgaaaatcctagggcccttaagaattaagctaaattaactctgcctgtgctttatgaatgcgacagggcctggatgacagctcatctgtttacagtatggtttactgaacactttaagcctgtgattgagacctattgctcagaaaaaaaagattcttttcaaaatattgctgcttattgacaatgcacgtagtcactcagaagctctgatggagatatagaaggagattaatgttgttttcatgcctgctaacacacatccattctgcagcccgtggatcaaggggtagttttagattttcaggccttatcatttaagaaatatatttcataaggctatagctgctatagatagtgattcctctaatggatccaggcaaagtaaattgaaaacctactggaa

SEQ ID NO: 588680 - DNA, 570 bp, Homo sapiens
ataaaggtggctacactgaacaacacattttcaatttagatgaaacagtcttctattgaaacaagatgctacctaggactttcatagctagaaaggacaagtcaatgcctggcttccaagtttcaaaggacaagctgactctcttgttaggggctaatgcagctggtgactttatgttgaagccagtgctcatttaccattgtgaaaatcctagggcccttaagaattaagctaaattaactctgcctgtgctttatgaatgcracagggcctggatgacagctcatctgtttacagtatggtttactgaacactttaagcctgtgattgagacctattgctcagaaaaaaaagattcttttcaaaatattgctgcttattgacaatgcacgtagtcactcagaagctctgatggagatatagaaggagattaatgttgttttcatgcctgctaacacacatccattctgcagcccgtggatcaaggggtagttttagattttcaggccttatcatttaagaaatatatttcataaggctatagctgctatagatagtgattcctctaat

SEQ ID NO: 588681 - DNA, 598 bp, Homo sapiens
tggctacactgaacaacacattttcaatttagatgaaacagtcttctattgaaacaagatgctacctaggactttcatagctagaaaggacaagtcaatgcctggcttccaagtttcaaaggacaagctgactctcttgttaggggctaatgcagctggtgactttatgttgaagccagtgctcatttaccattgtgaaaatcctagggcccttaagaattaagctaaattaactctgcctgtgctttatgaatgcgacagggcctggatgacagctcatctgtttacagtatggtttactgaacactttaagcctgtgattgagacctattgctcagaaaaaaaagattcttttcaaaatattgctgcttattgacaatgcacrtagtcactcagaagctctgatggagatatagaaggagattaatgttgttttcatgcctgctaacacacatccattctgcagcccgtggatcaaggggtagttttagattttcaggccttatcatttaagaaatatatttcataaggctatagctgctatagatagtgattcctctaatggatccaggcaaagtaaattgaaaacctactggaa

SEQ ID NO: 588682 - DNA, 598 bp, Homo sapiens
tggctacactgaacaacacattttcaatttagatgaaacagtcttctattgaaacaagatgctacctaggactttcatagctagaaaggacaagtcaatgcctggcttccaagtttcaaaggacaagctgactctcttgttaggggctaatgcagctggtgactttatgttgaagccagtgctcatttaccattgtgaaaatcctagggcccttaagaattaagctaaattaactctgcctgtgctttatgaatgcgacagggcctggatgacagctcatctgtttacagtatggtttactgaacactttaagcctgtgattgagacctattgctcagaaaaaaaagattcttttcaaaatattgctgcttattgacaatgcacgtagtcactcagaagctctgatggagatatasaaggagattaatgttgttttcatgcctgctaacacacatccattctgcagcccgtggatcaaggggtagttttagattttcaggccttatcatttaagaaatatatttcataaggctatagctgctatagatagtgattcctctaatggatccaggcaaagtaaattgaaaacctactggaa

SEQ ID NO: 588683 - DNA, 262 bp, Homo sapiens
gtatgtatacaccacatttgatgcactccycactccttcatctgttgctggacacttgggttgtttaccccttttggctgttatgaataatactgctattaacactggcatgcaagtatctgtttgagtccctattttcaatgctttcgggattatacctaggcatggaaatgcagggccatatggtaattctatgtttaactttttgaggaaactccatgccgtttgccacagcggctgcaccattttccattcccaccag

SEQ ID NO: 588684 - DNA, 262 bp, Homo sapiens
gtatgtatacaccacatttgatgcactccccactccttcatctgttgctggacacttgggttgtttaccccttttggctgttatgaataatactgctattaacactggcatgcaagtatctgtttgagtccctattttcaatgctttygggattatacctaggcatggaaatgcagggccatatggtaattctatgtttaactttttgaggaaactccatgccgtttgccacagcggctgcaccattttccattcccaccag

SEQ ID NO: 588685 - DNA, 591 bp, Homo sapiens
tctgtttgagtccctattttcaatgctttcgggattatacctaggcatggaaatgcagggccatatggtaattctatgtttaactttttgaggaaactccatgccgtttgccacagcggctgcaccattttccattcccaccagcaatatacaagagttccaatttctccacatccttgccaacacttgttattttccattaaaaacattacaggcatcctagtaggtgtgaagtgctatctcattatggttttgagtttcatttccccagtgacaaatgatgtgagaatctggtggcccagtgggcttggagattcactgggctggatggtgggragggttcacctgcctccttcgtgccctcccagagctcaggatgctttgtgatgtgggcctaaactctagtcaggagagcacattctttgctcaggtgcctgaggtggctgtgagcttcagatgatgaagaattttgtttggtttcttctgcattttagtgagccctggaactttggttccattttttcatttgtatggagttgggatcatctttctgccatctgactgcattctgtggtgtccacatttgccagt

SEQ ID NO: 588686 - DNA, 564 bp, Homo sapiens
gcagtatagacagggaggtggatggtggagacaggtggaaggcctgaaggtgggtgtgggcagcacggtcggggcaaccttgatggtgtgcctgcaggcataggccatatagctgtgtctgaatttcataggcagggcaggtggggtgtgtgtggagatgcacagatggtgagggttagggaggctagggcaggaagatgtggatagtgtccctgggtctgggaacaggatgggcccctaacttctgccccttctttccgagtcccctactctctggggaggggccgaggctgttcccaggccagcgctggaattttaagtccatgtgcctccctgcacggccgtaccrgctctcccttgccctcccctgccctcccctactggaaaggacgtttgtcagaagcttgtgctgcttaggagttttgggtgctgcctcatcgctttctgtgcttgtccccattttacagatggggacgctgaggctcagaggtggagggaattttctgggacccatggtgcttttttgagccacagtagaggggtctggctctggcggatggggca

SEQ ID NO: 588687 - DNA, 577 bp, Homo sapiens
tctttttacgtctattgccttcccggcagccccttgaggctgttagaaatttcctaaattaacaaaggggtggttttggcttacaataaaaagcccatgggtggatctaaggggctcaaaagaccagcccagaaccttgtttctctcaatatctcagctttgctttctctgggtgggtctcatttcatgcaggctcaccctacctgggggcaaaggtgtccccggggcccctggccagccccaaagccctgggaaatacagctcctgctttcctgcagacccagcaaaagtcctagggctgattctcattggctggcttcaatcatgtgtccatctctgtaccattgctgtgatgctcacagccagacctgggtcgctcacccacccctgggccctgggggtgccccaggcccacaggaaacatatggtggagggtatggtataggagtagggagaccccaagaacaaggctctcagaagagcagcttggacatgggaggacttggaccagtgtccagcatgcctctaagtctytcagccagacagaaaccctgacacctaggtctgcccaggagat

SEQ ID NO: 588688 - DNA, 469 bp, Homo sapiens
cagctacatttggccccagaggaatgagatgggggagccacgcgcccacagtccttcatactacactggcagctggtggcaccatccacagggaagacaatgtgggcaggagggcagctggcatgattcaccagagacgaggggagccctttccagctggccccatggttcccagggcctgtgctccagacaagggcagtggcgcagaggccagccctgcagatgcaggccttgctgcctcagcctggggcctgcaggtaaaactggtgacctaatctgaactggctcacaggaagctggggccgcatggtgagatagtggatggaaagtgctagccacagggtaggtgctggggaarggatgagagggtggggagggcaaattttaaataagatttccagaaaaggcatctccctgagaagagacatttgaacagagacctgagggtggtggaagagtgagccatgca

SEQ ID NO: 588689 - DNA, 471 bp, Homo sapiens
cagctacatttggccccagaggaatgagatgggggagccacgcgcccacagtccttcatactacactggcagctggtggcaccatccacagggaagacaatgtgggcaggagggcagctggcatgattcaccagagacgaggggagccctttccagctggccccatggttcccagggcctgtgctccagacaagggcagtggcgcagaggccagccctgcagatgcaggccttgctgcctcagcctggggcctgcaggtaaaactggtgacctaatctgaactggctcacaggaagctggggccgcatggtgagatagtggatggaaagtgctagccacagggtaggtgctggggaaaggatgagagggtggggagggcaaattttaaataagatttccagaaaagrcatctccctgagaagagacatttgaacagagacctgagggtggtggaagagtgagccatgcaga

SEQ ID NO: 588690 - DNA, 582 bp, Homo sapiens
taagagaaaagttaggtatctagggctaggtaaagatctttgaaggcttgaccgcaaaagcacgatctgtaaagagaagtggataaattggaagtcatcaaaataactcatgctctatgaaagaccctcttaagaggatgaaatgactaaacacagactgggagtctgatccaggtctcacatccagaacatataaagaaccctcaaaactcttcaataacttgattgggccatgatcagcctcctggcctcccctccctgcctagaagttcccaggctcctgggcgccctcttggaattagagaatctttcggggtccccggagtgactttccttcctgcatgtatgacaggaaggggaacccgggcaggaatttacagacactgtactcgtcctaatggaatgggcatctattgcatgagacacatcacaagccactgcccaacaacagagagactatggcaaggacaagagggacatgctgcatggggcaggttgcaggccagagtgcagccatgctccrgggcctcctggggagatggggtgcgcgtccaggtgggagaagtgggctttcaggacaag

SEQ ID NO: 588691 - DNA, 590 bp, Homo sapiens
aattctatgaaaacctgggtgtagagaaggcttttatcattatgcttcaaagaatctgatgcactcacagaatgaactagcaaattaatacataaatattaaatgaaacctttctacatggccaaaaacaccataaatgacagcaaaatacaagtaaaatattgggagacaatgtttgcagcagatagaaggttaatctagctaatatttaaaaagtcttgaaattgacagaaaaaaagaaaaatgtgaatacaaatggtccttaaagcatctttgaatatttgcagctcagatgcagagaccctagggaatcctgctgttggccacctgcaggaggaaacgaaaatgagactgctcaggactgcggggtgagccctacagttctccctggacrtggcctgttcagactcaaacccaaccacaccccaggtgtgtagaagcctggtgagggcaggagggggcagcgagggtccacagaaccttcaagtccaccagatgtggcccaccctgagggccgggatcccaacctaggcacttggtggctgaggaaaccatggtgggtgtttggatgactctgcctgggcctgtgt

SEQ ID NO: 588692 - DNA, 458 bp, Homo sapiens
caaatggtccttaaagcatctttgaatatttgcagctcagatgcagagaccctagggaatcctgctgttggccacctgcaggaggaaacgaaaatgagactgctcaggactgcggggtgagccctacagttctccctggacgtggcctgttcagactcaaacccaaccacaccccaggtgtrtagaagcctggtgagggcaggagggggcagcgagggtccacagaaccttcaagtccaccagatgtggcccaccctgagggccgggatcccaacctaggcacttggtggctgaggaaaccatggtgggtgtttggatgactctgcctgggcctgtgtccaaggatgcaaatgaccaccctcagtgattccaccaaggccagggaggcctcgcctcggtcggggagcagcaggtggcaaattggagccctggctgggcaaacaggagccttggctgag

SEQ ID NO: 588693 - DNA, 458 bp, Homo sapiens
caaatggtccttaaagcatctttgaatatttgcagctcagatgcagagaccctagggaatcctgctgttggccacctgcaggaggaaacgaaaatgagactgctcaggactgcggggtgagccctacagttctccctggacgtggcctgttcagactcaaacccaaccacaccccaggtgtgtagaagcctggtgagggcaggagggggcagcgagggtccacagaacsttcaagtccaccagatgtggcccaccctgagggccgggatcccaacctaggcacttggtggctgaggaaaccatggtgggtgtttggatgactctgcctgggcctgtgtccaaggatgcaaatgaccaccctcagtgattccaccaaggccagggaggcctcgcctcggtcggggagcagcaggtggcaaattggagccctggctgggcaaacaggagccttggctgag

SEQ ID NO: 588694 - DNA, 458 bp, Homo sapiens
caaatggtccttaaagcatctttgaatatttgcagctcagatgcagagaccctagggaatcctgctgttggccacctgcaggaggaaacgaaaatgagactgctcaggactgcggggtgagccctacagttctccctggacgtggcctgttcagactcaaacccaaccacaccccaggtgtgtagaagcctggtgagggcaggagggggcagcgagggtccacagaaccttcaagtccaccagatgtggcccaccctgagggccgggatcccaacctaggcacttggtggctgaggaaaccatggtgggtrtttggatgactctgcctgggcctgtgtccaaggatgcaaatgaccaccctcagtgattccaccaaggccagggaggcctcgcctcggtcggggagcagcaggtggcaaattggagccctggctgggcaaacaggagccttggctgag

SEQ ID NO: 588695 - DNA, 606 bp, Homo sapiens
actcctgtttaggttaagtgtgtgtacatagatcttctatttacttagaactcttcaggaaatttgcatgagaaatggccaatgactatctcttggaatgagagccagaggtgatgaatggcattttattttgattttacacactcttcactgtatgatcattttatactaaatatgcataataaarataaaatcttctgataattagtcacataaatatgagattcacaatatgagagacaaatacaactaaaaacaaaacagacccaggcaattgcatcatatgtgatccaatcctatcactttaaaattatccaaaggaattatgcacatttgctaagattttaaataatgtgattcttctcagttctctgtaagtgtgacaaattggaagtataacattgatctcacactgaatcttgtataaaaacaatgaactctaatgcaatgatttttatattaaatttacttacataattaaacatatcaaggaattaaagggaggagtattgtcatctggaatcagaagagctcacagccatctccactgttgattgaagatttgagtgaggggtcttagagactgagtcagtgggctggggtcta

SEQ ID NO: 588696 - DNA, 575 bp, Homo sapiens
gaattctgaagattttacaaaacaatgcaggttccagctgctctggaaaaatctgaggagctggcaactttgggccgtagcctcatgagccaggtgggcaggtcccaggtggtcacagccaatccccttcytaacatctgaccatctcagacttcagcatctgctgtcattaatttgggctgttttcacagaggaggcacatgggaaatgctacacacacacacacacacacacacacacacacacacacacacacacacacagctgtctccaaggccgcggacagagtgtgagaccatgaggctgcttcgcctctgcacccgtgagcctgcagcctcatcttctgcagggccccagcagtttccctcctagacaagtggcctgtgtggccacatgtgccctgctggatccagatttcctgtgggtgacatcgggccggtgggtctctgtcctcgctccaagctcccagccctgtggttggcaggaagtcatcatggaagggacggactagctagcttacaaccaactctgggctccaatcatgatgactggatggaaaaaacaagttatgtcag

SEQ ID NO: 588697 - DNA, 167 bp, Homo sapiens
ccaccccctcactaaacatggatttgttttctgycactagagttttaccttttccagaatgccgtataaatggaacataatgcttttgagattgagccaaaagtccattcctttttattgctgagtcgtatttcatggtatggatgtgccatggtttgtttattgcc

SEQ ID NO: 588698 - DNA, 167 bp, Homo sapiens
ccaccccctcactaaacatggatttgttttctgccactagagttttaccttttmcagaatgccgtataaatggaacataatgcttttgagattgagccaaaagtccattcctttttattgctgagtcgtatttcatggtatggatgtgccatggtttgtttattgcc

SEQ ID NO: 588699 - DNA, 545 bp, Homo sapiens
accaggaggcggaggttgcagtgagcagagatcatgccactgcactccagcctgggtgacagagcaagactccatctcagaaaaaaaaaagaaaaatgaacatggctacagaagggatagcaaatragatatagaggggatgagactggaaatggagctgccagcgagggcacctgatggagtggtgaaggtggcattaaagaaaagtgaacagatctagaagataaagatcatgcagtgcatctcaattgggggtgactgaaccctccagattctggagaaatttttggttgtcacaaccagagagaagtgctgctggcacttggtaggtagaggccaggggagccgttcaacacacctgcaatgcacagaccatccccaccaattatcaggaccaaaatcacaatagtgttgcccgtgaggatccttggaggtggaaactggatgccaggacagtcccatttcctggcatgtgtagagggtcaatgatgatgccagtcactgccagagaagatcaagtgtgcaaggaaggccacggggtatga

SEQ ID NO: 588700 - DNA, 568 bp, Homo sapiens
agtcgttcaaatttgaagtttgggttttgctaaactgccctttggggcgacagagtgggatggtgtgtgagtgcaggcataggactgccaacgcaagccatgggcccctatttggaaatgaacatgctttcttgccttgaatgccagtggcttgcctgagatcctggagtgcataacagggcgcataaaccaaggctccaaactccacaaactggagcaaagttggtgcatcagtctgagtcctctgagaagcagaactcaagattggaatgagatgcacatgagatttattggacaagatgtcagtggaggatagagggggcagacaggaggaggcagagagcgccttcagatcttgagacaagtctgactcctttggcaggtgagagggaaggaaggagtgggtagaaagagccttagaccacagtcttggatggtcrgggtttcccaggcaaaggctgctcatcagaagagtcatgcattgcatggaatgaacagtggactgttcagtaaaaactgctcagtattggctgggcacggtggctcacgcctgtaatcccagcacttt

SEQ ID NO: 588701 - DNA, 638 bp, Homo sapiens
accacgcccagctaatttttgtatttttttttttttttgagacagagtctcgctctgttgtccaggctggagtgcagtggcacgatctcggctcactgcaagctctgcctcctgggttcatgccattctcctgcctcagcctcctgagtagctgagactacaggtgcccgccaccacgcccagctaatttttttatatttttagtagagatggggtttcaccgtgttagccaggatggtcwcgatctcctgacctcttaatctgcccaccttggccccccaaagtgttgggattacaggcgtgagccactgggcgcctggcctaatttttgtatttttagtggagacggggtttcaccatgttggccaggctggtctcgaacccctgacctcaggcgatccacccacctcagcctcccaaagtgctgggattacaggcgtgagccactgtgcctgaccaaggcttgccttattctttttccagatgcagagtcctccattgtgtggatgtatcactgtttattcaaccgcacaggtctaaggttgtgggcaattttcagttccagagcaaagctctatccttgcctcctccccagtagtctagccttccagccataggaaaactccttctcccaccaa

SEQ ID NO: 588702 - DNA, 638 bp, Homo sapiens
accacgcccagctaatttttgtatttttttttttttttgagacagagtctcgctctgttgtccaggctggagtgcagtggcacgatctcggctcactgcaagctctgcctcctgggttcatgccattctcctgcctcagcctcctgagtagctgagactacaggtgcccgccaccacgcccagctaatttttttatatttttagtagagatggggtttcaccgtgttagccaggatggtctcgatctcctgacctcttaatcygcccaccttggccccccaaagtgttgggattacaggcgtgagccactgggcgcctggcctaatttttgtatttttagtggagacggggtttcaccatgttggccaggctggtctcgaacccctgacctcaggcgatccacccacctcagcctcccaaagtgctgggattacaggcgtgagccactgtgcctgaccaaggcttgccttattctttttccagatgcagagtcctccattgtgtggatgtatcactgtttattcaaccgcacaggtctaaggttgtgggcaattttcagttccagagcaaagctctatccttgcctcctccccagtagtctagccttccagccataggaaaactccttctcccaccaa

SEQ ID NO: 588703 - DNA, 638 bp, Homo sapiens
accacgcccagctaatttttgtatttttttttttttttgagacagagtctcgctctgttgtccaggctggagtgcagtggcacgatctcggctcactgcaagctctgcctcctgggttcatgccattctcctgcctcagcctcctgagtagctgagactacaggtgcccgccaccacgcccagctaatttttttatatttttagtagagatggggtttcaccgtgttagccaggatggtctcgatctcctgacctcttaatctgcccaccttggccccccaaagtgttgggattacaggcrtgagccactgggcgcctggcctaatttttgtatttttagtggagacggggtttcaccatgttggccaggctggtctcgaacccctgacctcaggcgatccacccacctcagcctcccaaagtgctgggattacaggcgtgagccactgtgcctgaccaaggcttgccttattctttttccagatgcagagtcctccattgtgtggatgtatcactgtttattcaaccgcacaggtctaaggttgtgggcaattttcagttccagagcaaagctctatccttgcctcctccccagtagtctagccttccagccataggaaaactccttctcccaccaa

SEQ ID NO: 588704 - DNA, 546 bp, Homo sapiens
agatggagtctcactctgttgtgcaggctggaatgcagtggcacaatctcggctcactgcagcctccacctcctgggttcaagtgattctctagcctcagcctcccaagtagctgggattataggtgtgtgccaccatatcttgctaatttttgtatttttagtagagatggggtttctccatattggccaggctgatcttgaactcctgacctcaggtgatccaccaacctctgcctccaaaagtgctgggattaccagtgtgagccactgtgcctggccagatctgatggttttaaaaaggggagttaccctgtacaagctctcttctcttgtctgccaccatgtgagacatgcctttcaccttccaacataattgtgaggcctccccagccatggggaactgtaagtccaataaacctctttcttttgtaaattgctcagtctcaggtatgtctttatcagtagtgtgagaacagackaatacagtaaggtggtaccagtagagtggggtgctgctgaaaagatactcaaaaatgtggaagca

SEQ ID NO: 588705 - DNA, 557 bp, Homo sapiens
acaaatggaaacacatcccatgctcatggatgggtagaatcaatattgtagaaatgaccatactgccaaaagcaatctacaaattcaatgcaattcccataaaaataccatcatcattcttcacagaactagaaaaaataatcctaaaattcacatgaagccaaaaaagagcccacatagccaaaacaagactaagcaaaaagaacaaatctggaggcatcacattaccygacttcaaactatgctacaagcctatcaccatcaagagagcatgatattggtataaaaataggtacatagaccaatggaacagaatagagaatccagaaataaagccaaatatttacaaccaactgatcttcaaccaagcaaatacataaagtggggaaagaatatcctattcaagaaatggtggtggtataattggcaagccacatgtagaagaatgaaactgggtcctcatctctcaccttatacaaaaatcaactcaagatggatcaaataattaaatctaaaacctgaaatcataaaaattctagaagataacatagataaaa

SEQ ID NO: 588706 - DNA, 451 bp, Homo sapiens
ggatctcacctccctgagaggctsagggaaaacttccagcaaacacaactgggcaagatctgaaagatgagctgaggagcaaagaaggctgggaaaggattgcaggtggagggcatggcatggacaaaggccctgtggctgggaggtgcatggtgaacatgaggctctggaaggtggtgctagggctctggacacaccaccccaaaatgtgactataggagaccagaatatgccacccccaaatatacctctttggcataataattattttgagctggctattttgaaaaactgcagacacagaaggaactcaaaagttgcccttttataagagaaatttacatctgtaaagaaaatctccagttgtaatagtctcttcctgactgcaccagggagaaaaagctgacttaatcactagaaactcttaaatgatgaagaaagcagcgaattc

SEQ ID NO: 588707 - DNA, 577 bp, Homo sapiens
atatacaaaaatgaactcaaaatggattaaagactcaaatataagacctgtaactacaaaactattacaaaaaagcataggggaaacacttcacaaaattgattcaagaagaatttttcagatagatcctgaaaagcacaggcaataaaagaaaaatgggcagatgaaattatgtaaaactaagaaacttctgcaaagcaaacagtcaacatactgaagttacagcctacataatgagagacaatatttgcaaactatgcatctgacaaggggttaacatccagaatatatgaagaactcacacaattcaatagcaaaaaagaaatcccatccaaaaatgggcaaagggcatgaatagacatttatcaaaagaagacatgcaaatgaccagtagatataggataaaaacgcttaacaacactcatcatcaaaagaaatgcaaataaaaaccataataagatatcaccttatcccagttagaatagctattatcaaaaatacaaaarataacaaatgttggcaagggtgtggagaaagaagaactcttatacactgttagttagaatataaaatagta

SEQ ID NO: 588708 - DNA, 612 bp, Homo sapiens
aaattaaacataaaataaatgttttaattaaaatgaactgagagttcaattttatttattaaataggcaaatcaaaggcgttgattttatgcattttaaacaagttatcaatatgtgggttttacattaaatacaaaaaagctgaaaacayggaaagtatttaatatagatatgcaaatgtttataactaaactatattagatgagatctaatctaattaattgtttcttagttgtattatttcttagatgaaatcatctaagaaagcttaaatctttaataaaatggtgatatatatttctcaataagataaaaaatattgtcatggatattcttacattagtatagacacttaaattatttgcatatacagaaattgttgatcaactctaaaatagtttagttataggatctaactaaactaaaaagcttctgcacagcaaaagaaactaccatcggagtgaacaggcaacctacagaatgggagaaaatttttgcaatctactcatctgaaaaaaagctagtatccagaatctatgaagaactcaaacaaatttacaagaaaaaaacaaaacaaccccatcaacaagtgggcgaaggatatgaacagac

SEQ ID NO: 588709 - DNA, 612 bp, Homo sapiens
aaattaaacataaaataaatgttttaattaaaatgaactgagagttcaattttatttattaaataggcaaatcaaaggcgttgattttatgcattttaaacaagttatcaatatgtgggttttacattaaatacaaaaaagctgaaaacacggaaagtatttaatatagatatgcaaatgtttataactaaackatattagatgagatctaatctaattaattgtttcttagttgtattatttcttagatgaaatcatctaagaaagcttaaatctttaataaaatggtgatatatatttctcaataagataaaaaatattgtcatggatattcttacattagtatagacacttaaattatttgcatatacagaaattgttgatcaactctaaaatagtttagttataggatctaactaaactaaaaagcttctgcacagcaaaagaaactaccatcggagtgaacaggcaacctacagaatgggagaaaatttttgcaatctactcatctgaaaaaaagctagtatccagaatctatgaagaactcaaacaaatttacaagaaaaaaacaaaacaaccccatcaacaagtgggcgaaggatatgaacagac

SEQ ID NO: 588710 - DNA, 355 bp, Homo sapiens
cagcagctctgctgttggagcatttctgtcagggcacttcgaagggtggttgctccaaaagaattggaaagccaccatattaagtctaattctctaattttacagaaaaagaagccaaatagaagttaagaaaattracccaaggcccaaaggaacaccagggattaagccctgcttttatttattttatattttagtatttccgcctgaagctgagtcttctaactcagcttcaacacattgttactaagttatcactgtgatggttatttaaagaaattagcaaattaagaggcttggaatagaaattcaccttctgaattttagcccaattaattgctatataatacatgtc

SEQ ID NO: 588711 - DNA, 584 bp, Homo sapiens
ttcatttctgtctctggtttattttacttagcataatgtcctccaggttcatctatgttgtcacaaactgcaatatttctttctttgttaaggttgagtaatatttcattgtatatatagatcacattttctttatccattcatctgtcaataacacttagtttgtttccatatgttggttttgagaataatgccacaatgaacatggaaattcagatgtctttgttaggtagtgattttatttcctttggtatatacccagaaatgagattactggattatatagtagttctattttyaagtttttgaggaatcaccatactgttttccataatggctatatcaatttacattccagaaaggaattcttaaataaaattcaaggagaggtgttataatttggatatgatctgcttgtccctgtcaaaactcaggttgaaattttgttcccgatgtggtggtgttgggaggtggagtctcgtgggaggtattttgcttatggatcaaatctgctatgaataacttggtgctgtttacatgataatgagttgagttcttgttgtagtgagactggattatttatc

SEQ ID NO: 588712 - DNA, 603 bp, Homo sapiens
tatgattgttttctgacctttgcagtatgattgttttctgaccttaaatacgagaatattattttcatttgctatatattagattagactcgtggggcaggctgttctctttgtcagctaatagcaagcctctgttggacagaagtaaggagagaattttcattaagtgttatctatacatgtctcatataatttcccacttgaacactgtttcatttccattttaagctgcaaccattctgttcaatcaaaaccaccttaggagggcttctttttcatawacagattaaaccagttcaagaaaattcagagaggaggagtgcccatgcgcagggtctgctaggctttacggacacccctgctgcagatgagctgcagctgcacgctaggagcagctctaatgtccagagtgagaaaaccaaaacatcccctggaatttggcgggactttaggaaaattggataaaaatatggaaattataggaaaatcattagtagctgtttggttatttttctgtgtcagtagacttttgtttaatatattagatatttgagcagcactgtaagggcttttgtttagtttctttcaaattaaaaatagcca

SEQ ID NO: 588713 - DNA, 603 bp, Homo sapiens
tatgattgttttctgacctttgcagtatgattgttttctgaccttaaatacgagaatattattttcatttgctatatattagattagactcgtggggcaggctgttctctttgtcagctaatagcaagcctctgttggacagaagtaaggagagaattttcattaagtgttatctatacatgtctcatataatttcccacttgaacactgtttcatttccattttaagctgcaaccattctgttcaatcaaaaccaccttaggagggcttctttttcatatacagattaaaccagttcaagaaaattcagagaggaggagtgcccatgcgcagggtctgctaggctttacggacacccctgctgcagatgagctgcagctgcacgctaggagcagctctaatgtccagagtgagaaaaccaaaacatcccctggaatttggcgrgactttaggaaaattggataaaaatatggaaattataggaaaatcattagtagctgtttggttatttttctgtgtcagtagacttttgtttaatatattagatatttgagcagcactgtaagggcttttgtttagtttctttcaaattaaaaatagcca

SEQ ID NO: 588714 - DNA, 569 bp, Homo sapiens
gatttgttataagggttcctgcttttgaagaattattccagggtttatgtgtcagggtagtgagttcacatgccataatagcactggtrgcaggtccatctatggggagatatttgatgaggacttcaacttgacgcatacaggtctagcatcttgtccacagcaaattctgtacccaacacaaatgattcccagttcttcatctgcactgccaagacagagtggttggatggcaagcatgtggtcgttagcaaggtgaaagattgcatgaatattgtggaggccatggagcgctctgagtctaggaatggcaagaccagcaagaagatcgccattgctgactgtggacaactctaataaatttgacttgtgttttatcttaaccaccaaatcattatttctacaactcaggagagcgcccctccacctcatttgctcgcagggtcctagaatctttgtgctctcactgcagtccctttggcttccatattttccttattcccttccatgcttagctggattgcagaattaagtttataattctgaaacaaaaactaaataacaaaaaa

SEQ ID NO: 588715 - DNA, 496 bp, Homo sapiens
cttgctcttggactcccagcctccagaattgtgagaaaataaatttctgtcatttgaaccactcaatctttagtactttgttacagcagccctagcaaactcacgcaaaggacaatcaagtgtcctaaggaaaggcagggggcaggggaaggatggttagattcatccttttgaaagattactggctggtgggcagaatggataggagaaggtagagttgggggcaggaagttcaaaagccctttaagtgctagacaatggttgcagctgctatggaggtctgtgcaggctgaatttgcacaactctggggggtgccttctaaatacagacatrcctcagagatgtaatgggtttgttccagaccactgcaataaagcgaagattgcaataaagtgagtcacacaaagtttttggtttcccagtgcatataaaagctatatttacactatattgtagtctattaaatgtgcagtagtgttatgtctaaaaaaacaa

SEQ ID NO: 588716 - DNA, 557 bp, Homo sapiens
ctgcttcaccttctgtcatgattgtaagcttgcagagaccaccccagaagcagatgtcagtgctctacttcctgtacagcctgcataaccgtgagcaaattaaaccttttttcyttaaaagttcccagtctcaggtgtttctttatagaaatgccaaaacaggctaatacaataggattatcttatcaattgatctttgtgtgataacccatcttttcatgctagggataaatccaatttaatcatggtgtacgatccctttattgtgatgttggatttggtttgctagtgttttgttgagggcttttgcatctatattcatcagaaatattaacctgtggctttcttatagtgtctttgactgccttttgtatcagggtaatgctggcctcataaaatgaatttagaagtatttcttcctcttggatgttttgtaagagtttgagaaaaattggcattaattggcattaattcctttttaaaagtttagtagaattcaccagtgaaacaatctgatcctggacttttctttattgggaggttcttgattactgatt

SEQ ID NO: 588717 - DNA, 562 bp, Homo sapiens
taaaattatattatgatgattatttgtccatccagttaatatactaaaagaatttgaagtttgtactttaaatgagtgaattacacaatgtataaattatatctcaataaagctgtggaaagttaaaagtatatgtaggatgcatacaaaaatactacttatctttataaatgaatgaaaatctgtcatttgcaaaaacatggatgaatttagaggacattatgctaagtaaaataagccagacacagaaagacaaatatctcatggtatcacttatatgtgaaatccaaaactgtgcactcatagaagttaagaatagaatggtggtttatcagaggctgagcagagtggggggcaggggtggaaaaaggggaaatattsaatgggataatgcttcagttaggagaaagacattctggtgatatggtgcacagcaaagtgactgcagttactcataatgtagtgcatatcttaaaagtgctaaaatagtacattttaaatgtttcaccataatgtaatacatatctgaggtgaaggatacgttatttagcctaattagacc

SEQ ID NO: 588718 - DNA, 562 bp, Homo sapiens
taaaattatattatgatgattatttgtccatccagttaatatactaaaagaatttgaagtttgtactttaaatgagtgaattacacaatgtataaattatatctcaataaagctgtggaaagttaaaagtatatgtaggatgcatacaaaaatactacttatctttataaatgaatgaaaatctgtcatttgcaaaaacatggatgaatttagaggacattatgctaagtaaaataagccagacacagaaagacaaatatctcatggtatcacttatatgtgaaatccaaaactgtgcactcatagaagttaagaatagaatggtggtttatcagaggctgagcagagtggggggcaggggtggaaaaaggggaaatattgaatgggataatgcttcagttaggagaaagacattctggtgatatggtgcacagcaaagtgactgcagtyactcataatgtagtgcatatcttaaaagtgctaaaatagtacattttaaatgtttcaccataatgtaatacatatctgaggtgaaggatacgttatttagcctaattagacc

SEQ ID NO: 588719 - DNA, 562 bp, Homo sapiens
taaaattatattatgatgattatttgtccatccagttaatatactaaaagaatttgaagtttgtactttaaatgagtgaattacacaatgtataaattatatctcaataaagctgtggaaagttaaaagtatatgtaggatgcatacaaaaatactacttatctttataaatgaatgaaaatctgtcatttgcaaaaacatggatgaatttagaggacattatgctaagtaaaataagccagacacagaaagacaaatatctcatggtatcacttatatgtgaaatccaaaactgtgcactcatagaagttaagaatagaatggtggtttatcagaggctgagcagagtggggggcaggggtggaaaaaggggaaatattgaatgggataatgcttcagttaggagaaagacattctggtgatatggtgcacagcaaagtgactgcagttactyataatgtagtgcatatcttaaaagtgctaaaatagtacattttaaatgtttcaccataatgtaatacatatctgaggtgaaggatacgttatttagcctaattagacc

SEQ ID NO: 588720 - DNA, 562 bp, Homo sapiens
taaaattatattatgatgattatttgtccatccagttaatatactaaaagaatttgaagtttgtactttaaatgagtgaattacacaatgtataaattatatctcaataaagctgtggaaagttaaaagtatatgtaggatgcatacaaaaatactacttatctttataaatgaatgaaaatctgtcatttgcaaaaacatggatgaatttagaggacattatgctaagtaaaataagccagacacagaaagacaaatatctcatggtatcacttatatgtgaaatccaaaactgtgcactcatagaagttaagaatagaatggtggtttatcagaggctgagcagagtggggggcaggggtggaaaaaggggaaatattgaatgggataatgcttcagttaggagaaagacattctggtgatatggtgcacagcaaagtgactgcagttactcataatgtagtgcatatcttaaaagtgctaaaatagtacattttaaatgtttcaccataatgtaatamatatctgaggtgaaggatacgttatttagcctaattagacc

SEQ ID NO: 588721 - DNA, 466 bp, Homo sapiens
attaagtgaaataagccaggcgcagaaagacaaatgttacatgttcttacttatttgtgggatctaaaatcaaaacaaactcatggacatagagagtataaggatggttatcagaggctgggaaaggtagttgggggggggattttgtgggaaggtggggatggttaatgggtataaaaatagagagttaataagacctactattttatagcacaatagggtgactatatccaataataatttcrttgtacattttgaaataactaagactgtaattgaattttttataacttgaaggataaatgcttgaggggagggataccccattccccaagatgtgcttatttcaccttgcatgcctgtatcaaaacatctcagggaccccacagatacatacacatactatgtacccacaacatttttaaacaatctaatacaattttttaaatggctcttattttttgtt

SEQ ID NO: 588722 - DNA, 466 bp, Homo sapiens
attaagtgaaataagccaggcgcagaaagacaaatgttacatgttcttacttatttgtgggatctaaaatcaaaacaaactcatggacatagagagtataaggatggttatcagaggctgggaaaggtagttgggggggggattttgtgggaaggtggggatggttaatgggtataaaaatagagagttaataagacctactattttatagcacaatagggtgactatatccaataataatttcgttgtacattttgaaataactaagactgtaattgaattttttataacttgaaggataaatgcttgaggggagggataccccattccccaagatgtgcttatttcaccttgcatgyctgtatcaaaacatctcagggaccccacagatacatacacatactatgtacccacaacatttttaaacaatctaatacaattttttaaatggctcttattttttgtt

SEQ ID NO: 588723 - DNA, 617 bp, Homo sapiens
agaaatgatttttttaacttttttatttttattttttacataagtggttgcatcttttgctagccaaggccaaactgagggagtagtggtggcgacccaaagttaagattctgccctgttcactacagaaacctgagtttggttcctaagtctagttctttctgtttgatatttgtgttacttttaaaatatcagcagtttgtcccagctatgatgtggtagtaaaagattcagaagtattttctttacaagttctatgttgaaaagcttaattaaaagcaaatttctttttttttaaattatactttaagttctggggtacatgtgcagaacatgcaggtttgttacatacgtatacacatgcyatggtggcttgctgcatgcaccaacccatgatctaatgccatcccttttctagccccccaccctgacaggcccttgtgtgtgatgtttcccttcctgtgtccatgtgttctcattgttcaggtcctacttatgagtgagatcatgtggtgtttggttttctgttcttgtgttagtttgctgagaatgacagtttccagcttcatccatgtccctgcaaaggatatgaactcatccttttttatgactgcata

SEQ ID NO: 588724 - DNA, 617 bp, Homo sapiens
agaaatgatttttttaacttttttatttttattttttacataagtggttgcatcttttgctagccaaggccaaactgagggagtagtggtggcgacccaaagttaagattctgccctgttcactacagaaacctgagtttggttcctaagtctagttctttctgtttgatatttgtgttacttttaaaatatcagcagtttgtcccagctatgatgtggtagtaaaagattcagaagtattttctttacaagttctatgttgaaaagcttaattaaaagcaaatttmtttttttttaaattatactttaagttctggggtacatgtgcagaacatgcaggtttgttacatacgtatacacatgccatggtggcttgctgcatgcaccaacccatgatctaatgccatcccttttctagccccccaccctgacaggcccttgtgtgtgatgtttcccttcctgtgtccatgtgttctcattgttcaggtcctacttatgagtgagatcatgtggtgtttggttttctgttcttgtgttagtttgctgagaatgacagtttccagcttcatccatgtccctgcaaaggatatgaactcatccttttttatgactgcata

SEQ ID NO: 588725 - DNA, 395 bp, Homo sapiens
tgctgtgcagaggaaaagggaccttcttataccctgagtgaccactgttgcttgggggggatcagagaaggcaccttcactggccagccacccaccccaaaccagaactacctccagtgcaacagcacacacagtcagcaggggccccctggcccacaccccagctgttttgcctccaccactaggtgaatgcccacagggaggcagggacttttgcatctgctagcattctgccacagctgccacactttggtcccctcagtgcrgtggactccaaacctcgatgagccagagaacaaagttgtggcccaatacaagttccccagagttaaagcacacagtccaagaattgggagctgcatgttggccccttaaaatcctccaaagacaaaacc

SEQ ID NO: 588726 - DNA, 623 bp, Homo sapiens
taaattaaggaattatctatttctatttttctaagagttttctttattataaacaggattttatcaaacatcttttctgcagtatttgagatgagtatgatgtttctcatttttcttagtgaattacattgattatttttcagattttaaaccttccttatattcctggacactcacttactcctaaatctattcstattccaacctgtctttcgttcttccatgtcctttcagatggctcatgtctttgtcaccagtggccttcacagtctgtcctgtgattatttctcagtccttatcttattcgacctgtgaatatttcggttgaacagtctttccttcttgaaatgctttcttgcattgtgttttgccatggtttgctttgtttttctcttacttattctctctcattagttctccttcatctttataaactctgatgactcttctttcccagtgattaatcctggaaagcatttcacttttccatctacacagtaccttactctaattgagattatccacttctacagctcccgtgatcctgtaaatactaattaccctcaattgtttctcctatttttagttccacttggatttctagtaatcttcttgactaaatt

SEQ ID NO: 588727 - DNA, 534 bp, Homo sapiens
caccgtgccaggccccagcttttagtttttaaggtagttrttgtgttattacatgtgaagtaaggttattcttaaatatccatgttttgagaattaatgataaagacaagttaatttatctcaatctaaatgacattttaatattaaatatttaaatatttttattacttttcctttttaacagaagtcattctaactggtgtgagatggtatttcactgatgttttgttttgcatttctctgatgattagtgatggtatgcatgtgttaatatgtttgttggccacatatgtgttcttctgaaaactgttcacgttctttgcccattttttaatggggttatttattttttgctcgttgatttgcctaagtctcttatggcttctggataataggcctttgctgtatgcatagtgtgtgaatattttcttccattcggtaggctgtctgttcaatcccttgagagtttctcatgctgtgcagaagaagctctttagtttaattaaatcatacttgtcaatttttatttttctg

SEQ ID NO: 588728 - DNA, 534 bp, Homo sapiens
caccgtgccaggccccagcttttagtttttaaggtagttgttgtgttattacatgtgaagtaaggttattcttaaatatccatgttttgagaattaatgataawgacaagttaatttatctcaatctaaatgacattttaatattaaatatttaaatatttttattacttttcctttttaacagaagtcattctaactggtgtgagatggtatttcactgatgttttgttttgcatttctctgatgattagtgatggtatgcatgtgttaatatgtttgttggccacatatgtgttcttctgaaaactgttcacgttctttgcccattttttaatggggttatttattttttgctcgttgatttgcctaagtctcttatggcttctggataataggcctttgctgtatgcatagtgtgtgaatattttcttccattcggtaggctgtctgttcaatcccttgagagtttctcatgctgtgcagaagaagctctttagtttaattaaatcatacttgtcaatttttatttttctg

SEQ ID NO: 588729 - DNA, 534 bp, Homo sapiens
caccgtgccaggccccagcttttagtttttaaggtagttgttgtgttattacatgtgaagtaaggttattcttaaatatccatgttttgagaattaatgataaagacaarttaatttatctcaatctaaatgacattttaatattaaatatttaaatatttttattacttttcctttttaacagaagtcattctaactggtgtgagatggtatttcactgatgttttgttttgcatttctctgatgattagtgatggtatgcatgtgttaatatgtttgttggccacatatgtgttcttctgaaaactgttcacgttctttgcccattttttaatggggttatttattttttgctcgttgatttgcctaagtctcttatggcttctggataataggcctttgctgtatgcatagtgtgtgaatattttcttccattcggtaggctgtctgttcaatcccttgagagtttctcatgctgtgcagaagaagctctttagtttaattaaatcatacttgtcaatttttatttttctg

SEQ ID NO: 588730 - DNA, 251 bp, Homo sapiens
actgcagcctactttcacatgttatcttacttcatgtgtggtgtaagaaccttccagtaacatgctttcatttttcctttcctggcctttcgctattgttgtcctgcatttcacttacacataaattacaaactacacaaaacactgttgttatttctgtataaaattcaattattatttcaagattttttaatggaggggtcttatacatcttcctayacagttactttccagagctcttcatcctttat

SEQ ID NO: 588731 - DNA, 561 bp, Homo sapiens
tatatctttatttccccttcattttggaaagttatttacactggttacagaattcagagttaacagtatgtcctcttttagaatttaaaatattttttctatatcctcccagattctggtatctgtgatgagaactctggcagcatcctttgttaatctttakgtatggtgtgtcccatccctctatgtctgtatcactagggttcaatactttgattactatgaacctttgtggagttcttcatatttcttataggtgggctttactgagtttcttggataagagatttatagtttatatcaaatttgaaaacattttggccatttttttgtattattttttctgtccctcctcttttcagtccttctaggactcaaattacatgtattattggctgcttgaaggtgttctacagtttagtttcttaaaatccttttactctatttccttttggatagtttttattgctatgtcttgtatttggcaatgtttaatctgctattaatcatgttccgtgtatttttcatctcaaatttataagagtttttgggtgggcatgg

SEQ ID NO: 588732 - DNA, 561 bp, Homo sapiens
tatatctttatttccccttcattttggaaagttatttacactggttacagaattcagagttaacagtatgtcctcttttagaatttaaaatattttttctatatcctcccagattctggtatctgtgatgagaactctggcagcatcctttgttaatctttatgtatggtgtgtcccatccctctatgtctgtatcactagggttcaatactttgattactatgaacctttgtggagttcttcatatttcttataggtgggctttactgagtttcttggataagagatttatagtttatatcaaatttgaaaacattttggccatttttttgtattattttttctgtccctcctcttttcagtccttctaggactcaaattacatgtattattggctgcttgaaggtgttcyacagtttagtttcttaaaatccttttactctatttccttttggatagtttttattgctatgtcttgtatttggcaatgtttaatctgctattaatcatgttccgtgtatttttcatctcaaatttataagagtttttgggtgggcatgg

SEQ ID NO: 588733 - DNA, 561 bp, Homo sapiens
tatatctttatttccccttcattttggaaagttatttacactggttacagaattcagagttaacagtatgtcctcttttagaatttaaaatattttttctatatcctcccagattctggtatctgtgatgagaactctggcagcatcctttgttaatctttatgtatggtgtgtcccatccctctatgtctgtatcactagggttcaatactttgattactatgaacctttgtggagttcttcatatttcttataggtgggctttactgagtttcttggataagagatttatagtttatatcaaatttgaaaacattttggccatttttttgtattattttttctgtccctcctcttttcagtccttctaggactcaaattacatgtattattggctgcttgaaggtgttctacagtttagtttcttaaaatccttttactctatttccttttggatagtttttattgctatktcttgtatttggcaatgtttaatctgctattaatcatgttccgtgtatttttcatctcaaatttataagagtttttgggtgggcatgg

SEQ ID NO: 588734 - DNA, 561 bp, Homo sapiens
tatatctttatttccccttcattttggaaagttatttacactggttacagaattcagagttaacagtatgtcctcttttagaatttaaaatattttttctatatcctcccagattctggtatctgtgatgagaactctggcagcatcctttgttaatctttatgtatggtgtgtcccatccctctatgtctgtatcactagggttcaatactttgattactatgaacctttgtggagttcttcatatttcttataggtgggctttactgagtttcttggataagagatttatagtttatatcaaatttgaaaacattttggccatttttttgtattattttttctgtccctcctcttttcagtccttctaggactcaaattacatgtattattggctgcttgaaggtgttctacagtttagtttcttaaaatccttttactctatttccttttggatagtttttattgctatgtcttgtatttggcaatgtttaatctgctattaatcatgttcygtgtatttttcatctcaaatttataagagtttttgggtgggcatgg

SEQ ID NO: 588735 - DNA, 573 bp, Homo sapiens
acgccactgcactccagcctggacgacatagccagaccctgtcaaaaaaaaaacaaaaactttcataaccaattatataaccattctactacttagaggaacaaaaaagtcaataattcacgatttaaaagctactaaaaacataaaatataaaactatgcactaaggagttttatatataaatttacccattaaataaatatgtgtatgtacttctttaatttaaaaaattctaatgacttacagtttataccacaagattatttatacaaacagattattctcattccagagtgggctttttgggggatgaagtttactaagcaatttacaatgttctgtgaaaatcatcagctttttcaggttctgtagtaaagttataaaagttctaggcaccatatctttttaaaccataagaaaatacgagggcacatgtgtgtatgtatgtatgcatgaatgcttttatggcagttttattygtaattaccaaaaactggaaacaacccaaatgaactggggaatgaatacagaacctgttgtacatccatacaacgcaatgctactaagcaacag

SEQ ID NO: 588736 - DNA, 350 bp, Homo sapiens
taataaatatttatgtggccrtgtgtgggaggtgttgcctggagtgtttcccccacatccctgactatggagtgaaaaaggaaacttaggaaaaaatatacccaaagagggagatttaaatagcacagtgggcagtgggggaagtgatgactaatattgctgttagtagtggtttaggaacaaaagagacaagtcagctggaaaccttctggtgtcttctgctagggctccttgctaaagctgatgctggaaaggaggaaggaaggaaagaaggaaggaaaagagggagagagggagcgaggaaggaaggaagggaagtcattagaatgtaagctgaacacccatttggt

SEQ ID NO: 588737 - DNA, 598 bp, Homo sapiens
actgctgttaatgatgattctaatagctaccatttgtcgagtacttattgcatgccagacattgcacaaagcaggttacacatacggtctcatttaaaacttgtgaggtaggcacctgttgttatccctattttccaggtgaagaaatctaggcactgacataaataacttgggatcacactgctaggaagtactggggaagggaattcaaaccatggtttatctgaactatataactgttacatctatttagaagtctgcctttgataaatttgcccaacctttttttagaattcacttacastttatacctgtgtgaaccctttcattcttttttggtatatgcataatacaagttcattccaaaaaaaaaaaaaaaaaaaaaagccctgccgggcgcggtggctcacgcctgtaattccagcactttggcaggccgaggcgggcggatcacagggtctggagttctagaccagcctgaccaacatggtgaaatcccgtctctactaaaaatacaaaaaattacgcgggtgtggtggcaggcacctgtaatcccagctactccggaggctgaggcagtagaatcgcttgaaccctg

SEQ ID NO: 588738 - DNA, 455 bp, Homo sapiens
gataataataataaccttttatttaagcaagtcattatagctgaatttctatatttacaatgaaaaacaatgttacctaatatactttgttctaatcatgcaacttaattattacctgatgttgaaaaaatttctataaaagtgagggaattggaatatgttacttaatagtatcccctcagttctgaaattctactaaccatacaaatattgtgactctaaagacttttgaatctttcagggcaatattagagaatatactgatgaataaaaactcctagtaacttgtctgtgtctttcgagaaccttgcaaagtttttgatatttttcaagtagacacttttcatctgctgatatctacstataatgtcagagccattagaaatctaaatatgtgtttaacttaattgttttgtatttatcattcccattacctgctgacttcattaacttcc

SEQ ID NO: 588739 - DNA, 494 bp, Homo sapiens
gaatagactgacacaaagaaataaaatggtcattgtccatacactgaaagcaaacaccagtggaagaaactgaatatacacaaatattgcctaaaagaaagcagtaatttggggaagtggaatataataatatgatagtaaaaacaatatgcatctatctgttttacatttgtatattagtttttattctagggacattacagacattaactttttattttttcayaacactgtgagttaggcaaaattattatctttattttacattatagaaaactgagccacagagaattcacccgcctatgatgaaggatgggaccaggcacataccccagcaagcagagggccagagcctatacaactgattatctggttatattgtatttggaatttgaatggaggaggatagtctctgaaaataacaactctctggctttcagagtcttcttaaaaggtttttacatgggtgaatttacacaatgccgaagcagttt

SEQ ID NO: 588740 - DNA, 494 bp, Homo sapiens
gaatagactgacacaaagaaataaaatggtcattgtccatacactgaaagcaaacaccagtggaagaaactgaatatacacaaatattgcctaaaagaaagcagtaatttggggaagtggaatataataatatgatagtaaaaacaatatgcatctatctgttttacatttgtatattagtttttattctagggacattacagacattaactttttattttttcataacactgtgagttaggcaaaattattatctttattttacattatagaaaactgagccacagagaattcacscgcctatgatgaaggatgggaccaggcacataccccagcaagcagagggccagagcctatacaactgattatctggttatattgtatttggaatttgaatggaggaggatagtctctgaaaataacaactctctggctttcagagtcttcttaaaaggtttttacatgggtgaatttacacaatgccgaagcagttt

SEQ ID NO: 588741 - DNA, 494 bp, Homo sapiens
gaatagactgacacaaagaaataaaatggtcattgtccatacactgaaagcaaacaccagtggaagaaactgaatatacacaaatattgcctaaaagaaagcagtaatttggggaagtggaatataataatatgatagtaaaaacaatatgcatctatctgttttacatttgtatattagtttttattctagggacattacagacattaactttttattttttcataacactgtgagttaggcaaaattattatctttattttacattatagaaaactgagccacagagaattcaccygcctatgatgaaggatgggaccaggcacataccccagcaagcagagggccagagcctatacaactgattatctggttatattgtatttggaatttgaatggaggaggatagtctctgaaaataacaactctctggctttcagagtcttcttaaaaggtttttacatgggtgaatttacacaatgccgaagcagttt

SEQ ID NO: 588742 - DNA, 611 bp, Homo sapiens
taaaacatatatactagaagtaaacaagtacatggatggcagatagtgggagccaagtttctcacaattggaatggaagagtataagtaagcaagagtagtagaataaaatgattcatatagcaacggatttgagttgcaaaatttcagtgtgaattctcctaaaatcagtatatcaagtttctacagctgccacagcaaagtttcacaaaactcggtggcttgaaataaaataaatcagtatcttagagttctgtaggtgagaattcaaaatagggtttgttcttcaaaatcaaagtgtagcaggattgcattccttctacaggttctaggggagaattcaccctcttgtttttccagcttctaggggctgcctatattccatggccctggtcctgtcgaccaccttcaaagccagcaattgcatcacttaggcctctccttccatcttcctgtcttttcctctgacactgactctccagcctccctcttacaaggaccttaatctcattttaagattcctaacttaatcacatcttcaaagttctggstaatacacacacacacatgcacacgcacacacacacacacacacacacacacacacacata

SEQ ID NO: 588743 - DNA, 556 bp, Homo sapiens
atgcccacataaaaaattagaaagatatcaggttaagaacctaacatcacaactagaagaacaagagaatcaaaagcaaacaaattccaaagttagcagaagagaaataaccaaaattagagctgaactgaaggatagagacatgaaaaatcattcaaaaattcaatatatccagagaatcaaaagcaaacaaatcccaaagttagcagaagagaaataaccaaaattagagctgaactgaaggatagagatatgaaaaatcattcaaaaattcaatatatccaaaagctggtttattgaaaaaaattaatgaaatagactgttagctagactaataaagaataaaagagaggagtttcaaataaacacaatcaaaaaagacaagcaggatattaccaccaaacctacagaaatacaagaaaccatcagaggatattatgagcagatccatgcatgtaaactagaaaatctagaagaaatatacaattcctggacmcattcatcctcccaagactgaaccagaaatatattaaatacctgaacagatcaataatga

SEQ ID NO: 588744 - DNA, 467 bp, Homo sapiens
ggctcacacacccccttgcaccctgcctgctcgccgcgccaggtccgggcaccaagcgggcgcaccgcgcgcgggtccaccaggctgagagccgcgctccaggcctctggccaccccgccacggggagcaggggctaacacccacgcccccaatcccggctgtgagggcagccggggagagcagtgcgcgtagctcaactgaggcgaggcaggggccaggggcgcgaaagagccacaggcgagagcggcgcccacgtctccctagccccgccgcccccaactttgcgagctgagggccgggagtgggccggggcggctcacgactcggcaggaagttcccagggccgcactgagcatgctctcsgggagtgtgtgcgcgggtgtgggctctgcgctccctgcagcctcccagacccggcagcagggctgagcgcgccggcgggatcacggacccgcgggccgtcccc

SEQ ID NO: 588745 - DNA, 611 bp, Homo sapiens
acgtacgtacaacagggtggggaggtgtggktgcacatcacactgcttgaggggctcacagggagatttctgagaaagagtccttaacctgaggcctgaaaaatcaatagaagtttaccagaggaaggttctggggaagggtgtgggaacaagggtgtcccagccttagcctaggccaaagcacaataaaataaaataacattccatgcttacagaacttcagataatttcagttggttgagcgtggaatgaataagaggtgcagaggtgagaagggagctagatcattgcggaccttgttctctcaaaataattcaagcaatagtttttctcaagggtggttggagattggattttggaaggacaaagtgtctcctgaggtcctaaagtgaattttaactgtgtcaaccaggtctcaacaggaaacagcacatttgcattaggatatttcaaggatgtgtttatttacaaagggactatgaatagaggcataggaaaaccacaagggaaagtgcagaggttagcgccagaggcagaggaggtaccaccactctgaaggctgaagggatgaggggagggaatcattatgggaactcaaaaggggaaagtag

SEQ ID NO: 588746 - DNA, 574 bp, Homo sapiens
tgctatgcagaacatgcctttgtcasgatgctgataacagttaccactagaagcgttctataatcaagttggtttggcaactgactcagtaatgaaggttaaatagctttctttatagccggcatcttagtttttcaatatgctggtacgcattgagtatttctgagaggagaaggtagtataccatctttcccacatccctttggcagggacccctttcacgagatgttatcttacaacactagtgaggaacaccagtcaatgccttagatgtatgaagccatagcaggagagaatttggaacctggattgggacaggccaatggaaagctttggattcattttattccatcctagcagcatggatgaacctgtgctgggagtggctaaccagagcctgtgagttctgctgcaagggaagaagctggatttctgaagaaatgacaaaagcattcaggaaagaaagaggcagcacctcagcattatgctgccaaaggccccgggccagatggtacctgtgcccaccaagtaaaggcttctctgtcttttatctctctccttctgcgtgctgaac

SEQ ID NO: 588747 - DNA, 490 bp, Homo sapiens
tatttcacctttcctttcaggaagaaacaaattccatatcgcttgcaaaagagtaggagatgaaggattagagactgttttttctaaacttcaagaagcatattgattggaaggaagaaatactgtagaggtcaaggcttagagatgtagttcattaatgtatttctcccataactgtttattgagttttgacaaggtgataagcaatatatcagatayacacggaaaaatcctgtgagaccattctttgacggctaattgtccacacttgtgatcttaagaacactggactggcgatcttgaggaaccttgcccaagctcctccctcactgcctcagtgacttaaaaagtaagcctttgttaagcacgtgctaagtcaagaacttgaaattctgattaaaatattttctgtttgataggctaggtgtgttaggaagaggaacagaagagaccggcacctcaggaagcacattcactaacaggcccagtg

SEQ ID NO: 588748 - DNA, 618 bp, Homo sapiens
gtgtttttaaaagagttatatgkttgaaatctgtatcatggttatgaaagcattccttccaaggtctcacatttatagtgtgggtctctcaaagttctttgcatattctaatgtggtataattctgtagttctttaaaagtaaaagaaaaaataagaaaacaacaacaaaaaactgttctagttagtcccatttcttttgtcatcctatttctttcttggccattgctgtcaatcaagtataattgtgaaattgcctagtagatggatataaattgagactagtttgaaactcattttctcttttagcccagttggacaatttagctccatgccattttttggacatacaatggataacaaccctttatttaaaggacatctggtcatcaatataatttgattctcatctacaggagactatgtgtgtgtgtgtatgtgtgtatgtgttcagattaatattgaagacctaaaatatgaatgatcataagcaggaagagtaaaagaagtttaatgagaagattataatcagaaaatgcaataatgggaaacttgcttaatgaggacattggtgccaaactacattattcatagggcattctgattagagacaaatgcaa

SEQ ID NO: 588749 - DNA, 575 bp, Homo sapiens
  misc_feature 116, 117, 119: n = A,T,C or G
actttttaatttatgtacatatatatatatatgtattttaagttctaatgagccttttgaggtatcataatgatgatttataatacaattaaaattgtgtttgactagcagtatanntnacactttctcactacatctcaatgaaaaaccagatggctcataacaacacaagctatgctggaaatcatcctaactttagaaacggaaagaaatccacactgattctaaagcaatgggtgggaactacattgaaagaaaattatgcttttatctgtcttacagtattctcagactttctgtaactcaagaaatagataagatataacaaaaaaataaagaagtataatactttttatcttcctctactgtttgtacactgaaaacaatttttcttcaatgtgttttaaagtttggggtcctcttacacaaagactactctcttcagttggaatgcagacatgtaagcttctatacttagtttcctactgttattatttttcatacatttttagctgcttcatacttgacctacactaatctcaaaggtggtttyatataaggatttttctgttgtc

SEQ ID NO: 588750 - DNA, 576 bp, Homo sapiens
tgtgtttttaaactataatctctcttcatatagctacagttcactgatatttgtttcacttattgaagacactataatatgttagattttaaatttatgtaatttattgtagcaagtttataacttattgtagcaagatccytatagaagctatttttgtcaatttttgtacatctatttagtgacttagaaacaacaccaaagccatgatttatgaaaaacatatttaaaaagttggatctcactatctgttctgtaaaattttcagggaaaagaaactattctgtataatactataatgatggctacatgtcattatgaattcatcatacctataaaatatacaatgctgagagcaaatcttcatgtaaattatggactggatggtaataatggatcagtgttggttaatctatggtaaaaatgtactcctctgttgcatgatactgtcattgaagaagcgtgtaagtgtgtaatacagttttaaaaaaataaaactaactttgaagaaaaccaacaggtatatatgatagtgattttcaggattatatgtaattgactgaagtagatattcag

SEQ ID NO: 588751 - DNA, 539 bp, Homo sapiens
aggcttgagccaccacatctggccttggcttgagtattatacacctcaggcatttcatgcctttaaagctaatgtgcgtttacatacaatgttatcctacctggaatgccattctgaaattttccacctggtaagcccctattcattcttcaagagccaaataaatcctgacccccaagatttctcttctttactctaatttgacatttatctttttatctcgaaagtgtcgttgttgcattagctacgtgggggaatttttgttgtctctaaattgctattagttagaccagtcctcaatactgcgrcattgctttgataacaactgtgtaatttttttttctccacttgtggctgtatatctatatattctaatgttggtaaaaagagaaaggaggaagggatgaaggaggagcagcagaaggagaagcagaaaaggtctttgtggctggggagagatttgtaagggtggtagagaactgtgctaagatattgccaggatataatacctcagctggcccacttaattttgcttcaga

SEQ ID NO: 588752 - DNA, 501 bp, Homo sapiens
aacagtatgtgctagagaaagaaaacaaatgaagtaagtcctgtgatttcctgagcttattgacttaagagaatttccagtctcatcacagaggatggtcccaaatagagcccagcagacactctgatttgaagagatagagctgagtgtcagaggagaccaacaaagctaaggttcacaggacagaaaaaaactatgaagcaagaacccttcataccagcagaggatcaccccgaagtattcagcagaatacagatcaatacatgattgtgaggaaactatctgaggcagtggaaagaaccatatgaaaaatcaagaggtgagagtattcagccctgacacagggctgaaaatattgccattcccacaagtcaraatggaaaactttgtaagtcatagacaattgggtagaatattcagaaaggccttgatttagtagtagagaataattatccctaaatgaactgctgctctgtctcacctaataaatcttaaaagtaa

SEQ ID NO: 588753 - DNA, 475 bp, Homo sapiens
tttctttctggtaaggaagataactacaaagcttaaggttttattgacctatagcatattaacaaaacattaagttttgtctttaacttaacaaatttgcttcatgtgaaataagttttttcctacaaaaacacacacacagaggaggtaatattgttagatgctattacctcctctgtgtgatatacatatatatataattatatgtattattatatatgtaaacaatctctctatatatagtttctctctmtatatatttctatatatattctctatagaaactatatatagtttctctctatatatttttctctatattttatttatatttatatataaaaataaaaataataaatatataaatatatatttacatatttctctatatatatatttttctctatatatattttgtatatatagaaaaacaaatatatatatttgtttatataatttatattattatataata

SEQ ID NO: 588754 - DNA, 547 bp, Homo sapiens
caggcatgtccaaggaatatctcattctctagaggatgttttctctggcttactattcactttgattaggcccagactctggagttgcatgttaatttgtaggtttctgccaagttatgtaagtgatttctttctggtaaggaagataactacaaagcttaaggttttattgacctatagcatattaacaaaacattaagttttgtctttaacttaacaaatttgcttcatgtgaaataagttttttcctacaaaaacacacacacagaggaggtaatattgttagatgctattacctcctctgtgtgatatacatatatatataattatatgtattattatatatgtaaacaatctctctatatatagtttctctctatatatatttctatatatattctctayagaaactatatatagtttctctctatatatttttctctatattttatttatatttatatataaaaataaaaataataaatatataaatatatatttacatatttctctatatatatatttttctctatatatattttgtata

SEQ ID NO: 588755 - DNA, 547 bp, Homo sapiens
caggcatgtccaaggaatatctcattctctagaggatgttttctctggcttactattcactttgattaggcccagactctggagttgcatgttaatttgtaggtttctgccaagttatgtaagtgatttctttctggtaaggaagataactacaaagcttaaggttttattgacctatagcatattaacaaaacattaagttttgtctttaacttaacaaatttgcttcatgtgaaataagttttttcctacaaaaacacacacacagaggaggtaatattgttagatgctattacctcctctgtgtgatatacatatatatataattatatgtattattatatatgtaaacaatctctctatatatagtttctctctatatatatttctatatatattctctatrgaaactatatatagtttctctctatatatttttctctatattttatttatatttatatataaaaataaaaataataaatatataaatatatatttacatatttctctatatatatatttttctctatatatattttgtata

SEQ ID NO: 588756 - DNA, 547 bp, Homo sapiens
caggcatgtccaaggaatatctcattctctagaggatgttttctctggcttactattcactttgattaggcccagactctggagttgcatgttaatttgtaggtttctgccaagttatgtaagtgatttctttctggtaaggaagataactacaaagcttaaggttttattgacctatagcatattaacaaaacattaagttttgtctttaacttaacaaatttgcttcatgtgaaataagttttttcctacaaaaacacacacacagaggaggtaatattgttagatgctattacctcctctgtgtgatatacatatatatataattatatgtattattatatatgtaaacaatctctctatatatagtttctctctatatatatttctatatatattctctatagaaactatatatagtttctctctatatatttttctctatattttatttatatttatatataaaaataaaaataataaatatataaatatatatttacatatttctctmtatatatatttttctctatatatattttgtata

SEQ ID NO: 588757 - DNA, 547 bp, Homo sapiens
caggcatgtccaaggaatatctcattctctagaggatgttttctctggcttactattcactttgattaggcccagactctggagttgcatgttaatttgtaggtttctgccaagttatgtaagtgatttctttctggtaaggaagataactacaaagcttaaggttttattgacctatagcatattaacaaaacattaagttttgtctttaacttaacaaatttgcttcatgtgaaataagttttttcctacaaaaacacacacacagaggaggtaatattgttagatgctattacctcctctgtgtgatatacatatatatataattatatgtattattatatatgtaaacaatctctctatatatagtttctctctatatatatttctatatatattctctatagaaactatatatagtttctctctatatatttttctctatattttatttatatttatatataaaaataaaaataataaatatataaatatatatttacatatttctctatmtatatatttttctctatatatattttgtata

SEQ ID NO: 588758 - DNA, 556 bp, Homo sapiens
cacctgccttgcacccacgcatgtctattttgcagataagttaacttgctatggtgcaaatctttgaccagagggcaatggaacaatggataatacatgatttcccctttcctttttcctggaaatggcatcytgagatacatttcttactgcttttcaggaactgttgtatggtaactgtgaaagtatgcaacaatacctacagagacagccacctggcaacacttgcatcagcaatctctccttccatgatttgcttcctgactctctctcctgctccctgggatcacatctcccaaaactgcatgtgcagaagcctttgttgggctgtgatttctgggcaatctaagctaggatggacattgtctaatacatcagagatgctcagtcagtgaaactatcaagcctcttctctgtatggttgagtgacccggaccgtattccttttaatttgaaagttttataattccctatatttttattttgttcttatagcctctttcttatcttcatgagagaagataacaaaatggaagacacaaagcagttcagtgaa

SEQ ID NO: 588759 - DNA, 556 bp, Homo sapiens
gggaccagccactgccccaccactgccctgctgaagcatgcttgccagcattgcccatgacagtattgttaccaatggactggggacaccttggctcctccaacacagcaggtgcttaacctcgagaggccagagagaaaaaatatgcaggcctggtcccagactaccacagttagtgcacacagcccaagagtgctgagctaagccttggacccctgaaatcaatgagaaattaagccaattaactaagcccaaactataccacagtcaaaagcatcaaagaatcccacccaaaatacagtaattttaaacattaaaggaacatcaacccattcacatgagaaaaaataagcataagaactctggtgacactaaaagccagtcttcttacctccaaaggagtgccctaacttcccagcaatggttcttaaccatgctaaaatggctaaaatgrcagacgtcaaattcagaatctggatgataatgattatcatcaagtttcaggagaaagttgaaacccaatccaaggaatctaaaaaatccaataaaatttata

SEQ ID NO: 588760 - DNA, 549 bp, Homo sapiens
tacctggctttggaatcagagtaatactccttcttagaatgagctagagaggattccttcctccttgatcttttttggaaaagtttcagtgataatgatatagttctttgcatgtctggaagcattcagctataagtccatttggtcctgggatttttagtgtcaggaaatgttttattactgattcagtttcattacttgctattggtctgttcaagatttctayttcttccttgttaaattttgggaggttgtatgttttcaagaatttatccattcttctaggtttcctagttcgtgtaggtaaatatgctcgtagtggtatataataatcttttgtatttctgtggtattagtcataatgtcactcttattctttctgcttgtgcttatttgaatctcttttttttcttggttaatctagctagtagtctgtcatttttatcttttcaaaaaaccatctttttattttattgattcttagtattgtttttggtcccagtttcatttagttcagctttgatctttgttataatttttcttctgcta

SEQ ID NO: 588761 - DNA, 575 bp, Homo sapiens
tgcaaaactatggaacctgcccaaatgcccattaattgacaagcagataaagaaaatgttatatatatatatatatatatatatatatatatatatatctccaaraagtacgtgtgtgtacatatatatatgcatatatgtatatataatatatattatataatgttaacatctcaacatgaataccaagctaagaatgggtaacaaactcttattaatcatatgaccaccagaaggtagctaattaatccaactaatatacaaagcctagcacaaacattaaaattcttagtcataacttgagccagtgcaactagatatttctctgttgcatgtttttttgacaaggaatcacttctatgcatttacttttttgtgggaattaatttctcacacctcaaaatgaatattctagatctcaaatggatatagagatgtaatagaactactttataaaattatttatttatttatttataatttatctttgccttcctcaccctttctcccgagtccccaaagtactatgtatcattagggctggagtgcagtaaggcgatctctgctcactgcaa

SEQ ID NO: 588762 - DNA, 575 bp, Homo sapiens
tgcaaaactatggaacctgcccaaatgcccattaattgacaagcagataaagaaaatgttatatatatatatatatatatatatatatatatatatatctccaaaaagtacgtgtgtgtacatatatatatgcatatatgtatatataatatatattatataatgttaacatctcaacatgaataccaagctaagaatgggtaacaaactcttattaatcatatgaccaccagaaggtagctaattaatccaactaatatacaaagcytagcacaaacattaaaattcttagtcataacttgagccagtgcaactagatatttctctgttgcatgtttttttgacaaggaatcacttctatgcatttacttttttgtgggaattaatttctcacacctcaaaatgaatattctagatctcaaatggatatagagatgtaatagaactactttataaaattatttatttatttatttataatttatctttgccttcctcaccctttctcccgagtccccaaagtactatgtatcattagggctggagtgcagtaaggcgatctctgctcactgcaa

SEQ ID NO: 588763 - DNA, 576 bp, Homo sapiens
gaaggaagttaatatatatctacctctgaagtatcaataactttcttttttttttttttttttttttttgagacagagtctcactctgttgcccaggatggttgacgcaatctcggctcactgcaagctccacctcccgagtccacgccattctcctgcctcagcctcccgagtggctgggactacaggccctcgccaccacgcctggctaattttttgtatttttagtagagacggggtttcaccttgttagccaggagggtctggatctcctgacctcgtgatttgcccaccttggcctcccaaagtgctgggattataggcgtgagccaccacgcccagccaataactttcttaaatacaaattaccttattattgaattcccttaccaactttttttttttaacacagaatatttaccacataaagatgaggaacaactgccttctctcccaccatctagtgggagacctgaaccatttctccttatctccttatctagtatcaccacaaattctctgacatrggggaaattgtcttggaaaacttaatttccataccagggaaatggcaga

SEQ ID NO: 588764 - DNA, 568 bp, Homo sapiens
tatttttagtacagacagggtttcaccatgttggacagcctggtatcaaactcctgacctcaggtgacctgccttcctccgcctcctaaagtgctaggattacaggcgtgagccaccgcacccagccagaatatcttaacatatcaatatgacttggttgccaaagttataataaaaagcatgataattgcatttgttggagtatgtgtcaattaactttaaaaaaaatcaacttcttgaaagtatttacagaagtattggtttattacctttcctccactagacttttctgatatgagaacaaagactcaaatcaaattttaaaattcggaagtttaatgcacactragaatatacaggactcttaaaaaaagcctgtacacccaaccaaatgatgtggtttaaatatgaaaatatctttttgttaatatattaccaaaatgcagttgttctttggacagcttttaaagacttatataaacaaaatatctgaatcaaatgacattttaggagcatgacaaaggaggatttagacagtgatcaataatacggatgtgttaatggcaat

SEQ ID NO: 588765 - DNA, 550 bp, Homo sapiens
tgatattgattcttccagtccatgagtatcgaatgtttttccatttgtttctgtcatctatgatttcttccatcagtgttttgtagtgctcctggcagtccatccattaactccttggttagattcctaggtatttcatttttttgtgtatggcaattgtgaatgggattgcactcaatttgactctcaagcttaaacattattggtgtatagaaatactactgatttttgtaacktgattttatatcctgaaagtttactgaagtcatttatcagttccaggaaccctttggtggaatctgtaggattttctaggtataaaatcatatcagtgaagagagatagtttgacttcatttattcctatatacatgatctttgtttctttctcttgcctgattgccttggccaggagatctagtactctgttgaataggagtggtgagagtaagcatccttgtcttgttccagttctctaggggaatgatccaagcttttgcctgttcagtataatgttggctgtgggcttgtcatagattggttttattatt

SEQ ID NO: 588766 - DNA, 550 bp, Homo sapiens
tgatattgattcttccagtccatgagtatcgaatgtttttccatttgtttctgtcatctatgatttcttccatcagtgttttgtagtgctcctggcagtccatccattaactccttggttagattcctaggtatttcatttttttgtgtatggcaattgtgaatgggattgcactcaatttgactctcaagcttaaacattattggtgtatagaaatactactgatttttgtaacgtgattttatatcctgaaagtttactgaagtcatttatcagttccaggaaccctttggtggaatctgtaggattttctaggtataaaatcatatcagtgaagagagatagtttgacttcatttattcctatatacatgatctttgtttctttctcttgcctgattgccttggccaggasatctagtactctgttgaataggagtggtgagagtaagcatccttgtcttgttccagttctctaggggaatgatccaagcttttgcctgttcagtataatgttggctgtgggcttgtcatagattggttttattatt

SEQ ID NO: 588767 - DNA, 550 bp, Homo sapiens
tgatattgattcttccagtccatgagtatcgaatgtttttccatttgtttctgtcatctatgatttcttccatcagtgttttgtagtgctcctggcagtccatccattaactccttggttagattcctaggtatttcatttttttgtgtatggcaattgtgaatgggattgcactcaatttgactctcaagcttaaacattattggtgtatagaaatactactgatttttgtaacgtgattttatatcctgaaagtttactgaagtcatttatcagttccaggaaccctttggtggaatctgtaggattttctaggtataaaatcatatcagtgaagagagatagtttgacttcatttattcctatatacatgatctttgtttctttctcttgcctgattgccttggccaggagwtctagtactctgttgaataggagtggtgagagtaagcatccttgtcttgttccagttctctaggggaatgatccaagcttttgcctgttcagtataatgttggctgtgggcttgtcatagattggttttattatt

SEQ ID NO: 588768 - DNA, 599 bp, Homo sapiens
gcttaggaaacttctgaggctyccagcaccctgtagctgagccagaagcaatgcattcccagtcagaaaaccaaaatctgtgactgaaacaccagggatttggtttaggtcctgctgcttgccacacagaaagtcaacaatggagatgacaagtatggccaaggaagaaggctttagttgggtgatgcagctaaggaaatgggaaatcagtctcaaaccaatctccctgactgactaaaattaggagtttatatagcagggaagaagtggaaccatgcatggaaaaacaggagttaggaaggagaaaggaagaggagttggtcaacagaaagcaggttgtcagttagtcatgatgggtgaaggttctggctaaatgcagtgatgtggtgagtttcagcttcttgatactatctgggaggcctgatggttggtttcctgaggaaagaactcagataaaaacagaagtaactttctcaagttttaagactgggacgaccaatttctatgtttattcaaagacatcagctctatgggacaattgggtcagtttcattattattattatagatacgtattttgagatggcgtctcactgttgc

SEQ ID NO: 588769 - DNA, 421 bp, Homo sapiens
ctaaaagtgcattaagaatttttgcatctatgtccatagtattattagcctgtacttttcttttcttgtaatgtcttagactagttttgggatgagaataaaaaagaaaacaacaacaaaaaaaatgcagtatttcctcttgttcaatattctgaaaaagtttgtgtagaattaacatattcattcttatgtaaatgttccattcaattcaccagcgaaggcacctgggcagagagctttccttgtgggatagtttttaactatagatacaattctttaataaatatgaggctattcatgttgcctccttcttgagcaaactttcgggkttgtgtctttcaaggaatttatccattttatccaaggaatttatccattttatctaagttgttgaatttattggcataaaagttgtttatac

SEQ ID NO: 588770 - DNA, 620 bp, Homo sapiens
gggaagtgcctagtcccctagcaaaaagggaaaaagccccttataaaaccatcagatctcctgagaattcactcactatcatgagaacagcagcactcactatcatgagaacataaccacctcatgattcaattacctccctcagggcccctcccatgacatgtggggattatggaaactacaattcaagatgagatttgggtagggacacagccaaaccatatcactatcccaccttaagcaatggatgattgtatactgtatatatcaaagagtatataaaacatatttacattttcaataataatattaaaatgagtatttgtgtaactaccatctaggttaagaaaacattgacagaagttccctctgaccctccaagatggtttctttttcatcctcttccccacagataactactgttctgactttttgatagtcattcgtttgatttttttttaaagacgcttttactacatawgtattccttcctcatatatgtaatttatcctcgtgcttatacaatttatgcaaatagaatgaccttgaatatgtcttttcattccttttttctttcatttaatattgcttgtgatttattcatgtttatatatataact

SEQ ID NO: 588771 - DNA, 419 bp, Homo sapiens
ccttgaagaattagaaaaaaaagagcaaactaaacccagagcaagtcaaaaggaaataatgaagattagaatggaaataaataaaatgaagaatagaaaatcgatagaaaaaaaggttggttacttgaaaaaatcaacaaatttgataaacttttagatagactaaccacggaaaagagasagggctcaaattactaaaatcaggaatgaaaggggacagcaccatcaactttccagtaatagaaaggattgtacaaaatgcaatgaacaatcatattccaacaaacgaaataacgtagatgaaattgacaaactctaggaagatacaaactaatgaatctgacttaagaagaaacagaaatcagaatagatgtaaataccaaaagaagaggttgaaaaatttacacactcatacacac

SEQ ID NO: 588772 - DNA, 620 bp, Homo sapiens
ctaataaaaatacaaaaattagccaggtgtggtggtgcatgtctgtaatcccagctactcagaaggctgaggcaggagaatygcttgaacctgggaggcagaggttgcagtgaggcaggattgcaccattgcactccagcctgggtgacaagaatgaaactccgtctcaaaaaaaaatattcaattatgaataaatgttttcagtcatacaccagtctttccattggctgcaaatattttgtgaaggaatgttctctctctagtctctgagtaaggtataggttttaaaagaacttaagttcaagaaatcatggttctcaagccctgtcactaatgtgccatgaatacagatgttttgtttaaaaagcatttgatcctctctaggaaaatctgcccctgcaaagtttccatgtcatttttagtttgtattgccacaaaatcactcccagtaactattcaatcaaaaaaaaatttgcaaaagcaattattccaaactagacagtttagagctcccaagattctgtgccccttgtcttcagctaccagggtggatatggaagacccagaaggtggaggcagggttaggcgtgtctgagctcagactgtccttgtgtgggtct

SEQ ID NO: 588773 - DNA, 552 bp, Homo sapiens
tacaggcatgagctaccatacccaggcaactaataatttgttaacgcattagtcacttacatagaaaacaaaatgtagaattacaaacctgaattataataatgctaacttatataattgctttccagattttgcctttggctggaattgacccaaattaactgcaatttaccttctaagcctttcccagtattgctgtctgagtagagaaaaggatttctggtgctctctactctgttatattcccagaattctctggcttcttatatttaaaaagaacattattaattacagagaaactgaagttctccttaaccaccatccatgattccttttctctccctgcaatagtggatgttctcccagcctatcctttgtatttttccatrcaaatatatggaatcatgaacagcatgtagtattgctttttgtggttaaagtacacacaatgctggctgtggtggctcatgcctataatcccagtactttgggaggcagaggcaggtggatcacctgaggtcaggagttcaagaccagcctggccaacatgac

SEQ ID NO: 588774 - DNA, 565 bp, Homo sapiens
gtttggaaatgccatttaatggaacattaaggagtaaaagataatgtatacccaggatttgtaataacatggaaaattgctgatgagtgagtaaaaaaatcataactagggaaaagttgctttttataatgaaaaattatataagttatataaactacatatttaagaaggtaaaaatacaagcaagtggaaacaaagcttttcctcccccctcttgatgagatttgattataaatgttcttttctgtggggaaatcagatcaaccttgggttacttaataacagacccagacctagttcaagtgtttgtacagggactcagagcctcttggcaaacaccaatcctgcaatgccaagttcagccacttttgactggtgggwgctattatacctgtttgtgcccagtactctctgggaatggaaaagagaggatgatgggtagaaagaaagtaaagcctcctagagacaaaaagcacactgtcatccctttgtctcacttagtgtaagagcaggttgtaccaagccatagtggggttggaagacaaagctttgacacctctccttg

SEQ ID NO: 588775 - DNA, 565 bp, Homo sapiens
gtttggaaatgccatttaatggaacattaaggagtaaaagataatgtatacccaggatttgtaataacatggaaaattgctgatgagtgagtaaaaaaatcataactagggaaaagttgctttttataatgaaaaattatataagttatataaactacatatttaagaaggtaaaaatacaagcaagtggaaacaaagcttttcctcccccctcttgatgagatttgattataaatgttcttttctgtggggaaatcagatcaaccttgggttacttaataacagacccagacctagttcaagtgtttgtacagggactcagagcctcttggcaaacaccaatcctgcaatgccaagttcagccacttttgactggtgggagctattatacctgtttgtgcccagtactctctgggaatggaaaagagaggatgatgggtagaaagaaagtaaagcctcctagagacaaaaagcacactgtcatccctttgtctcacttagkgtaagagcaggttgtaccaagccatagtggggttggaagacaaagctttgacacctctccttg

SEQ ID NO: 588776 - DNA, 626 bp, Homo sapiens
ggcaaggatacatttacatgtgtataatgtatatatacatatacatgcatatacatgtacacaagtaactacaatatgtagtgacaatgtgctaagcttaagtgtcaggtaagggtgtgcttattcctagttgtctttatatatctgggaccaaacaataacacctgctatgtgcttttattattkggaggcagaggatgcaacattttctatagatatggtatatttagctacagtacacatcaaatgctttaatatggtttacgctttaatcttatttggcaaaggttttgcaaataatattagcagtatagttcttctcactttggaatggatttaaaatactgtatgagaactgatattttgctacttactgtctcttcaattgtggcacaataaatgcttgatatttaaattaaaggttgacccctcatgcccagggaagagagtcacacacagttactatgttattagaaatggttttttttaaacccacagttcctttttaagagtagcatagagtaggagaaaaacaaattgtaaaaaattaagtaatttacaatgtgagtctcaaaaggaattttctacaagttgttgttttttcatggcacagaaatgcctcatta

SEQ ID NO: 588777 - DNA, 632 bp, Homo sapiens
tatctggcagaagaaatttctaagcagcaaagcattcaagatgtagcctggctgtttctaataacctatgcttatttgcatgaacaaagaaatgatctgaaattggaacttacatttaaaagggaagcagagcatagaagtttggaaacttgcagcctggccatgtggtagaaaagaaaaacccattttcagggggaggaattcatgcaggttgcagaaatttacataactaaaaagaaggcaagtactaatagccaagacaatgggaaaaaggccctgaagtcatttcagagagcttcatggcagcccgtcccatcataggcccagaggcccaggagggaagaatagtttcaggggccagaaccagggtctctactcccctgcacagctttgggacactgtttcctgcatcccagctgctacagctccagctgtggccaagagrgcccaaggtacagctctggatgctgttccagtgggtgcaagccataagccttgatgactttcacgaggtgttaagcctgtgggtgcacatagtttaaaagttgaggcttagaagcctccacctagatttcagagaatgtatggaaaaacctggatgtccaggcagaagcatgctacagggttggagc

SEQ ID NO: 588778 - DNA, 632 bp, Homo sapiens
tatctggcagaagaaatttctaagcagcaaagcattcaagatgtagcctggctgtttctaataacctatgcttatttgcatgaacaaagaaatgatctgaaattggaacttacatttaaaagggaagcagagcatagaagtttggaaacttgcagcctggccatgtggtagaaaagaaaaacccattttcagggggaggaattcatgcaggttgcagaaatttacataactaaaaagaaggcaagtactaatagccaagacaatgggaaaaaggccctgaagtcatttcagagagcttcatggcagcccgtcccatcataggcccagaggcccaggagggaagaatagtttcaggggccagaaccagggtctctactcccctgcacagctttgggacactgtttcctgcatcccagctgctacagctccagctgtggccaagagggcccaaggtacagctctggatgctgttccagtgggtgcaagccataagccttgatgactttcaygaggtgttaagcctgtgggtgcacatagtttaaaagttgaggcttagaagcctccacctagatttcagagaatgtatggaaaaacctggatgtccaggcagaagcatgctacagggttggagc

SEQ ID NO: 588779 - DNA, 604 bp, Homo sapiens
aagcttggtttctgatgagaacctgactgtccagacagtagagagttcacaatcacccttttctgctgggtgatgtcccagaggaaagcctgggtcctcaccctagtgaggccattcaccagactcagatcagtttccttatccaccaaacatggtcagagcactgggctgctcagcatctcggtgtgcctgagaagtaataagaggatgaacccagtcagcacatagttgttgatgaggctcggatctcaaacgccggggacagaccgggaaataagacagaccacagtctgccttttgggagtggagtgagagacagacagatgataattgaacattcaggataagtgctgataatgataagtctatgaataaaataaaataaaatcacaagatagagagaaatggtggggaggaaggagggttctctcacgacatggtgctcagggaattctcctygagaaggggacattgggttgagacctggatatgcattgcaatgaacactgtgcatgtacatagggggttttgtgatcaccatcatggcctattggtaaacgaattccaacaagtacaaaagagtaaacatggtcatttaaaatca

SEQ ID NO: 588780 - DNA, 580 bp, Homo sapiens
aagcttggtttctgatgagaacctgactgtccagacagtagagagttcacaatcacccttttctgctgggtgatgtcccagaggaaagcctgggtcctcaccctagtgaggccattcaccagactcagatcagtttccttatccaccaaacatggtcagagcactgggctgctcagcatctcggtgtgcctgagaagtaataagaggatgaacccagtcagcacatagttgttgatgaggctcggatctcaaacgccggggacagaccgggaaataagacagaccacagtctgccttttgggagtggagtgagagacagacagatgataattgaacattcaggataagtgctgataatgataagtctatgaataaaataaaataaaatcacaagatagagagaaatggtggggaggaaggagggttctctcacgacatggtgctcagggaattctcctcgagaargggacattgggttgagacctggatatgcattgcaatgaacactgtgcatgtacatagggggttttgtgatcaccatcatggcctattggtaaacgaattccaacaagtacaaaag

SEQ ID NO: 588781 - DNA, 517 bp, Homo sapiens
gctggagataaactgaaactttgagcaacctctggactgactctgattaccctccacaccctacctgcgcagggaggagagaccacaaagccagcagcaaacagtaaacttttccaagaatcagagaggaaggagttcctgacaccctgcagcaaaaacaacctcaaaattcccctgaagacagacccatgggagctggggtcaaggtggccttgcgcttcaccgaggaggtgtcattaccaaacgtgctggacattggctacctacggaagaaagattaaggactgaaagaaaatagtggagmacatgcttatgacatgggggtaggacagggaaggccttgagcaagacacaaatcacaaaagcaaatagagaaagagtgatgtctaccttcaacgaaatgtgaaacttctgattcaaaatcggaaacctctataagctgagataaaagacaagcaacagagttggagaagatatttctaacatttgtatgtgtgcaaatgtatgtgtgtaatgt

SEQ ID NO: 588782 - DNA, 322 bp, Homo sapiens
gctgggctacagagcaaaaccctgtctcaaaaaataaataaataagcaatgtatatggcaatcacagtcctcggtaccaaagaccaaactccaagcctatatgaagacatctgatgttatagtcattggaaaatgaaaagggaaggagkgggctaaggggagcaacaaaaggttgactgtgttttcttctggcagtctgctttcacagccagtactatgcctgtggccatctcccaggctcaggagagcctatcttactctagcccatcagattcactttcccgggaactggaaatagaaccttgatatggtttgcatttgt

SEQ ID NO: 588783 - DNA, 640 bp, Homo sapiens
cttatttaatgtggccttctttacaaatggtaccttccccaaaccaggcagggccgctcagctcctgttctgcgatcctctctgggaatcatggaagtcagtagagaaaccctgggagaggcacctgttcactggggtgctggcccctctgctgaggctgggccacttgagggccaggatrggggtgcctccatgcagaggggagggactgaccacagtgcagagtcagggctggagactcctggtccaaggcagctcagtactgaccaccaaggaatttgggccatcagggtccctcccacctctgagaattctaattaattcaattccaccagcatccactgagcatctacttagccctagaaaagctatgccttctaacctccagccttgtcagaaaaggaggactgtcttccttctgagtggcctccaggagcttggaagtttcctcagatccagatccaatgcccccctgagccctgagcctccccacgaggggagcaaggcaataaagtgtggcccagggtgttctgttaggctaaggccgggggtgatactctcagcctcttcttgctccatcctgataagggctttttggatctacccttcccttctgctttctcttgggtgcactaatgaa

SEQ ID NO: 588784 - DNA, 527 bp, Homo sapiens
tcatgccccttgtagagtggatgatacgcaaagagtagagaatctccaagtgctttcctgagtccgcgcttttcctgggagtcccagacgcagaccagtcagggtgagagtggactgggaatccragaatcttcagaaattattcttcggcttgaaagtctgatgaatgaactgattacggctggtgcagaaagtgccccgtggacactctatcactgggtggcagcctgggtatggatttggactgggcttcaaagattttatttggacccaagagggagaaaaatggctttctgcatcccacggagtgcttcctggcaaagggcagtgggcacttgtgcatatgtctcccaagccaccttctctcctttgaccacttagatctggatcttccttctagccttaagcagcgtcctaagagtggtgtcttctcttcctctctgtcatccccatgctgccctggttcccattagtccttaccttccccaggccctaaaagtagctctttcccagggctggagttgccc

SEQ ID NO: 588785 - DNA, 404 bp, Homo sapiens
gcttgaattaaaattctaagtgcactctcagagggctgaaggcctgagccaggaaagacactgtccactttggcttcttcagggtgaggggaggctgagcagagtcctaaattcaccatgtatgctcatcttggttacattttacagcactttacatttgtaatcacttaatagctacactggggaagtcttttargactcagtaagagctgtcaattttccctttaaagaatggtgattatacttccacagagtctaggggtagcactgtcaaatagaaagataatgtgagccttataggtagtctaaaatttctcagcagccacattaaaaaagtgaaaagaaacaggtgaaattaatcttagtaacagttcatttaactcaacatatcgaaaattatcttt

SEQ ID NO: 588786 - DNA, 614 bp, Homo sapiens
tctgtttttaattttttgaggaaactccacactgttttccataatggctgtaccaatttacatttctaccaacagtgtacaacagtttccacttccatgtcaacatttgttattttttgcctttttgctaatgttcattctagttgggatgaggcgatatctcattgcagttttgatttgtatttccttgatgattgtgatgtcaagcatattttcatgtatctattggccgtctatctatataccttttttataaatatctgttcaggtcctttggccactgaataaataaataaatatataaatatatatccatatatcttctttataaatatctattcaagtcctttggccccagaagcaaataaataaatcaatttatttgcttctttgagttcatttatattctggatattaactccttgcaagatgcatagtttgcaaatattttctccattctgwgggttgtctctttactctggtgactatttcctttgttgtgcaaaagctttttatttaaatgtcatcccttttgtctatttttgcttttgttgcctgtggttttgaactcttatccaaaaatctccttgcctggatcagtgtaatgaaagatt

SEQ ID NO: 588787 - DNA, 621 bp, Homo sapiens
tgtcacccaggctagagtgtagtggcatgatcacagctcattgcagcctccatctcctgggctcaggtgatccttccacctcagcctcccaagttagttgggactacaggtgcatgccaccatacctggttactttttttgaagttttgtagagacaaggtctgactatgttgcctaggctggtcttgaactcctgggctcaagtgatcctcctgcctcagcctcccagactgttgggaatatgggtgtgagccactgtgcctggccccagatatttctgaagaataactcttaacatgtaaaaaggaaatcttttaaattaaaatctttcaacttagttacaagttttaaaggagaggtgctcaatctgtctaattctactgtggcttttatcgtactccagtgttttgttatgttcctgtctatatccaaagagggacagaaaattttatcattgkcttatatcaggtaaaagtaaaacatgggtcaaatattttcctaagtatacatctcttcatacatcatggatagcatatctctgaagtgagcttgggcctagttgcctagaaaaatattatgaagtcacataataatgagtcaagtaagacaggtttaaaaatc

SEQ ID NO: 588788 - DNA, 514 bp, Homo sapiens
ggaaaagggaagtcaattgttcctcttttctgatgatatgatcttgtatctagaaaaacctaaagaccccaccaagaaaagttataactgataaatgaactcagtaaagttgcaggatataaaatcaacatacaaaaatcagtagtatttctatacatcaataatgaactaactgagaaggaaatcaagaaggcaatcccatttgcaataacaacagaggaaaacacctaggaataaatttaatcaaggaggtaaaatatcttaatgaagaaatctacaaaacactgaaagaaattgaagaagacacaaatggaaagatatctcatgctcatggattagaaaaaattaatataatttaaatgaccatactacccaaagaaattcacaaattcaatgacatytctatcaaaacaccaatgtcatttttcacagaattacaaaaaagaatcttaaaatttgtttggaaacaaaaaagaaccagaatagtgaaagcaatcctgcgcaagaaaaacaa

SEQ ID NO: 588789 - DNA, 522 bp, Homo sapiens
ctggtcaacatggtgaaaccccgtctctactaaaaatacaaaaattagccaggcatggtggtgcgtgcctgtaatcccagctacacaagagaccaaggcaggagaattgcttgaacctgggtggcagaggtttcagtgagccaagatcatgccactgcactccagcctgggcaacagagygagactccatctcaaaaaataaatgaataaaaatgtattttgtaaaaagtatattgattctgcacttgatgttttgtataattaaaatttttcttaaccctagataattccttcagggatgaaatctcttattttaaaagaggcttatttgctttctagaaattccttcagtttcacacccaatttatagctctattgaatttaaataaaaattttacactttcgattcatgcagcaagttcaggatgatcgtattgtgtctttaagtgtttacactgttagctatatatattcatgttaatattctttattgtaattatctaaatagtagaatgtatcata

SEQ ID NO: 588790 - DNA, 522 bp, Homo sapiens
ctggtcaacatggtgaaaccccgtctctactaaaaatacaaaaattagccaggcatggtggtgcgtgcctgtaatcccagctacacaagagaccaaggcaggagaattgcttgaacctgggtggcagaggtttcagtgagccaagatcatgccactgcactccagcctgggcaacagagcgagactccatctcaaaaaataaatgaataaaaatgtattttgtaaaaagtatattgattctgcacttgatgttttgtataattaaaatttttcttaaccctagataattccttcagggatgaaatctcttattttaaaagaggcttatttgctttctagaaattccttcagtttcacacccaatttatagctytattgaatttaaataaaaattttacactttcgattcatgcagcaagttcaggatgatcgtattgtgtctttaagtgtttacactgttagctatatatattcatgttaatattctttattgtaattatctaaatagtagaatgtatcata

SEQ ID NO: 588791 - DNA, 500 bp, Homo sapiens
ataattatctatattttgtgtatacatctatatatacagaaaatatgtatatattgtatatatatctatatgtatatattgtgtatatatctctatatatgcacaatattgtgtatatctctctctatatgtatatattgtgtatatatacacaaaatattttgtgtacatatctgtatatacataaaataygtatatattgtatatatctatatgtatatattgtgtgtatatctatatacacaaaatatataatacaatgtataataaataaatatacacaaaagtgaatattaaaaagtatatatatacttttttgtgtgtgggaaggattaatcagcttcccaccactatagctgtaagtccctaattgcctgttttaaagatagcaatacgctttaataaaaagctttttttaaagctttaaacgaaattttattttatttttttacagttaggaatacattgtctttggggaataattctataactatcactgt

SEQ ID NO: 588792 - DNA, 592 bp, Homo sapiens
agaaagaatcaattcaaaccctctgaaaactcaaaaggccagagtgccttttctcctccaaatgatcacaacacctctttatctagggcacagaactggactgaggctgagatggatgaactgacagaagtaggtttcagaaggtgggtaataatgaacttcgctgggtgaaaggagcttgttctaacccaatccaaaraagctaagaaccacaataaaacattacaggagctcttaatcagaataatcagtttagagagaaacataaatgacctgatggagctgaaaaacacaacacagtaacatcacagtgcaaccacaagtatcaatagctggacagaccaagtggaggaaagaatctcagccttgaagacaatcttgctgaaataagacaggcagacaagcttatagtaaaaagaatgagaaggaacaaacaaaacccccaagaactatgggattatgtaaaaagactgaacctatgacttattggggtacctgaaagagacagggagaacagaaccaagttggaaaacatacttcaggatattatccagaacttccccaatctagcaagacaggccaacattcaaat

SEQ ID NO: 588793 - DNA, 493 bp, Homo sapiens
acaactccttctccctttccttcttcttcttcttcttttttattttactttcaattctgtgacacatgtgcagaacatgcaggattgttacatargtaaatgtgtgccatggtggtacagatacaccatagaataccttcccttctttgagaatactctactatgctctgtctgaaagggctagagatggcattgaaacttgctgggttttactcattctttgtggggtggcataaaggtccactcttttagagaaaaaagaacatggccaggcgtggtggctcacgcctgtaatcctagcactttgtgaggctgaggtgggtggatcccttgagtccaggaatttgagaccagcctgggcaacattgcaaaacctcactctacaaaaaatacaaaaattagccaggcttggtggtgcatacttgtagtcccagatactcaggaggctgaggtgggaggatagcttgagcccaggagatgaaggttatagtga

SEQ ID NO: 588794 - DNA, 510 bp, Homo sapiens
gctggggaagcctcagaaaacttacagtcatggcagaagggaaagcaaacatgtccttcttcacatggcagcaggaaggcaaagaatgaatgaagcccggtggaaaagcaccttataaaaccatcagatctcctgagaactgactcagtatcaccagaacagcctgaggataactgcctctgtaattcaattacctcccaccgggtccctcccatgacacatggcgattatgggagctacaattcaagatgagatttgggtggggacacagccaaaccatatcgcccctcctctaggtttttttttttttttttttttttgtattagtttgagtaggaaggtttggtagaattcagcagtgaagccatcaggtcgtgggcttttccttgttgggacactttttattatggatttgatcttgttacttgatcttgttaccygttggtctgttaaggttttgtatttctttgtggttcagtcttgatagtttgtatgtgtctaggaatttgt

SEQ ID NO: 588795 - DNA, 585 bp, Homo sapiens
gcttttcgttttctgtatgtctgttgtatgtttattgatttgaggttaccataaattttgcaaataatatcttataatttattattttaaattgttgacaacactgattgcataaacaaataagcaagaaaaaagaaaattaatttaaaaatcttatgttttgactgtatccccctgctttttaacattttgttgtttctgcttatatcttactgtactatctgtctggaaaagttgtagttattttttaccagttcatctttctgcctttctacttaacatatatatatagtttacacaccacaattacagtgttataatagtctgtgtttttctgtttatttaccataattgatgagttttgtaccttcagattatttattattgttcattattgtcctttgctttcagattgaagaactccctttaatattccctgtaggacaggtctggtgttgatgaaatccctcagcttttgtttgtctgggaaagttcttctttcccctttatgtttgaaggatattttcaccagatttgctattctargatacaagttctttttccttcagcactttaaatatgtca

SEQ ID NO: 588796 - DNA, 614 bp, Homo sapiens
tgtgactgtctttggagacagggcctttaaaaaggtgattaagttaaaatgaggtcattaaagtgggccaattaggacacagacacacacagaggaaagactatgtgaacacactaggagaaggcagccatctacaagccaagagggcaggcctcakaagaaaccaaccccgcagacaccctgatcccagatttctagcctccagaatcgttgagaaaatatacttctgttaagtcgcctgatctgcggcaacacagttatttaaaaagaaaacaaaatatataatatttcaaatgtaagataaggaacactatatacaaacatttactttccaatcttattacttggtcatatttcatttaaattaaaaataaaacatattagacatagccccttctttccacccccagtttacactcccactagcactggatgggacggtttatcactactttgacaatacttgcccaattcagacttttaagtttggctattctagtgtgatgaaggtgaaatggaattttgttgtgatttacttcgcattcccttttactggtgaagaaagcttcgattttgctgcctctaaagtatggatgataaaagaattgatcttc

SEQ ID NO: 588797 - DNA, 614 bp, Homo sapiens
tgtgactgtctttggagacagggcctttaaaaaggtgattaagttaaaatgaggtcattaaagtgggccaattaggacacagacacacacagaggaaagactatgtgaacacactaggagaaggcagccatctacaagccaagagggcaggcctcagaagaaaccaaccccgcagacaccctgatcccagatttctagcctccagaatcgttgagaaaatatacttstgttaagtcgcctgatctgcggcaacacagttatttaaaaagaaaacaaaatatataatatttcaaatgtaagataaggaacactatatacaaacatttactttccaatcttattacttggtcatatttcatttaaattaaaaataaaacatattagacatagccccttctttccacccccagtttacactcccactagcactggatgggacggtttatcactactttgacaatacttgcccaattcagacttttaagtttggctattctagtgtgatgaaggtgaaatggaattttgttgtgatttacttcgcattcccttttactggtgaagaaagcttcgattttgctgcctctaaagtatggatgataaaagaattgatcttc

SEQ ID NO: 588798 - DNA, 614 bp, Homo sapiens
tgtgactgtctttggagacagggcctttaaaaaggtgattaagttaaaatgaggtcattaaagtgggccaattaggacacagacacacacagaggaaagactatgtgaacacactaggagaaggcagccatctacaagccaagagggcaggcctcagaagaaaccaaccccgcagacaccctgatcccagatttctagcctccagaatcgttgagaaaatatacttctgttaagtcgcctgatctgcggcaacacagttatttaaaaagaaaacaaaatatataatatttcaaatgtaagataaggaacactatatacaaacatttactttccaatcttattacttggtcatatttcatttaaattaaaaataaaacatattagacatagccccttctttccacccccagtttacactcccactagcactggatgggacggtttaycactactttgacaatacttgcccaattcagacttttaagtttggctattctagtgtgatgaaggtgaaatggaattttgttgtgatttacttcgcattcccttttactggtgaagaaagcttcgattttgctgcctctaaagtatggatgataaaagaattgatcttc

SEQ ID NO: 588799 - DNA, 544 bp, Homo sapiens
gttttaaaacactgttcccaagcagtaactgaaaacgtcccacaagatgaacacgaactttctctagacgaaaggcagctgggagcaggacgcgtccacgagtcccgatgggaacgcgcccacgccgcagctgggactcgggagaggctagggggaccgcgtggccttgctgtggaagggacccgcgcgggcccgccgcgaagggggccctgcctggcgcgacctggggagagccggggccggccgggtggagggcgcacggggacacacggacacgcacagacacagacacgcgccccgggctgaggagggtggtgggaggaccgccggccgccccccgcgcggarccccagggaacccggactccagccgcaaagcggagaggcgccagcagcaatcagccacctcaggggcggcggagtccaagcccctctcagccggaccgtaccgcctaaaccctcctcgggtcctccttcctcacgtatgaggtctctgtaccgaggcggctggttccatcgcagccccgagccaacccgccaatccc

SEQ ID NO: 588800 - DNA, 381 bp, Homo sapiens
cctcccgggttcatgccattttcccacctcagcctcctgagtagctcggactacaggtgcccaccaccacacccggctaattttgtttttgtatttttagtagaaacggggtttcacggtgttagctgagatggtcttgatctcctgaccttgtgatctgyctgccttggcctcccaaagtgctgggattacaggcgtgagccactgcacccagcccttttttttttttttttttttttgacacaaggcctcatgctgttgcccaggcaggactgctgtggcatgaacatggctcactgcatcctcttgacctcctgggcccaagccatcctcccacctcagcctcctgtgtagctgggaacacaggcgcatgtcaccatg

SEQ ID NO: 588801 - DNA, 607 bp, Homo sapiens
taatttttagtagagacagggtttcaccatattggtcaggctggtctccaactcctgacctcaggtgatctgcccgccttagccttccaaagtgctgggattacaggtgtgagccgttgcacccggccaacattttcttttagaatgtatttttttttctataatagaatatccttacgagatcattatactaaaaaatccccagagaagtcctttatgtacccttttgggaaataatattttcttgtgcatatcagtggaattttatggtagttccatgcctaccctaaacattaggaattgagatttattttgaattgaaattgataggttggtgcatgatgtggaaatagttggccgccccrgttagcctgctgttttctaatggtgaaaatacagattttactgagctctaagattctatggagaacagtatctatagaggatctataaatatgaaaacattgaactatttcatagttaattcatccactgggcattttacatggaatattttatcttaggattgataaattatgctataagaatggatctaagaatgaataaattgtggtagcttagaatggataaattatgggtaaaagtc

SEQ ID NO: 588802 - DNA, 607 bp, Homo sapiens
taatttttagtagagacagggtttcaccatattggtcaggctggtctccaactcctgacctcaggtgatctgcccgccttagccttccaaagtgctgggattacaggtgtgagccgttgcacccggccaacattttcttttagaatgtatttttttttctataatagaatatccttacgagatcattatactaaaaaatccccagagaagtcctttatgtacccttttgggaaataatattttcttgtgcatatcagtggaattttatggtagttccatgcctaccctaaacattaggaattgagatttattttgaattgaaattgataggttggtgcatgatgtggaaatagttggccgccccggttagcctgctsttttctaatggtgaaaatacagattttactgagctctaagattctatggagaacagtatctatagaggatctataaatatgaaaacattgaactatttcatagttaattcatccactgggcattttacatggaatattttatcttaggattgataaattatgctataagaatggatctaagaatgaataaattgtggtagcttagaatggataaattatgggtaaaagtc

SEQ ID NO: 588803 - DNA, 566 bp, Homo sapiens
aaataatagtatgatgatgataatgatgataatctcaagaacattttattttgtatgttgtacttttttctttttactttggacattatccaaagccaggtcatctttgtggcctttacttagagactttttgtttggttgccttgtcagttttggttatcaattggttgtgataatgtataatagcacttcttccaaaagtttccaggtcagtgttcaatgtcaatgtatgttactgatttaacaacatatakaatcctgttacagtcaattaaaaagtactctccaagaatatttttgggtctttaccgcaaatacaaactgtgatgattaattttatgggtcaacttgactgaaccacaggctgtccagatatttggtcaaacattattctgggtatttccatgaagttgtttttgaatgtggttaacatttaaattgatagactgagtaaagcagattgtcctccctagggtgcgtgggccccatccaatcagatcaaggcctaaggagagcaaaaaagctgattctccaccatgcaagagagaattcctcctgcctgttgc

SEQ ID NO: 588804 - DNA, 655 bp, Homo sapiens
tggtactggggcacttgagtctttggactagtggtctgcaggcatgtgaggaagcagctgacaccttgctctgccagtcattagctttagcaattatataacactgagcagggactttgcactctgagataaacaccccgcaccccaatcactttgtgtagtaccagtcctggaacaagattaaacctgaattccttcttgtaaattacactytctccttgactttcatggtgctgatgactacagatgtgggatagcctttgtggatacaatcctggggggaaaaacactgtgtttactttttgtttcatcgtcacctaggctggagtgctgtggtgtgatcttggctcactacatcctcgacctcctgggctcaagtgatcttcctgcctcagcctcccaagtagctgggactataggcctgagacactgtgcttggccaaaaccactgtttttcaccatgatcagacctttgtaaccttgtgtgtgtgtgtttctttccatatattatttcatgagccaaactttctgaagtcttaattcctttgcaagcgatctcattttctcagtgttttgaactcagttttcctttgtcacgttttgctttattttgactctaaagtcaaaatgtaacatagctttgcaagtcaatttg

SEQ ID NO: 588805 - DNA, 629 bp, Homo sapiens
ggtgatctcattgtcccaagttggaaggcgacagggttaggctgatgaccattgtgtataggtggctagcaaagccactctggtcactgctgctcaagccatcagaaacagagaacaagggtgttgaggtagcatgccagctcttttgaggcccagcctggtcatggcacaagtcacttgcattcatgttccatgggagaggacatagccacatggccatgcttcagggggtgctgggaaacctggcataaccagccagcrcctgccaggccagaactctgctgttacagagaggggatagctgcttgcatcctccaccactgagagttgctatctgtcttagcttaggtagcttaaaaaatcagaaatttggctgggctcggtggctcacgcctgtaatcccagcactctgggaggctgaggtgggcagatcatgaggtcaggagttcaagacaaacctggccaacatgacgaaaccccatctctgctaaaaatacaaaaattagctgggcgtggtggtgggtgcctgtaatcccagctacttgtggggctgaggcaggagaattgcttgaacccgggagatggaggttgcagggagctgagatcgtgccattgcactccagcctggg

SEQ ID NO: 588806 - DNA, 629 bp, Homo sapiens
ggtgatctcattgtcccaagttggaaggcgacagggttaggctgatgaccattgtgtataggtggctagcaaagccactctggtcactgctgctcaagccatcagaaacagagaacaagggtgttgaggtagcatgccagctcttttgaggcccagcctggtcatggcacaagtcacttgcattcatgttccatgggagaggacatagccacatggccatgcttcagggggtgctgggaaacctggcataaccagccagcgcctgccaggccagaactctgctgttacagagaggggatagctgcttgcatcctccaccactgagagttgctatctgtcttagcttaggtagcttaaaaaatcagaaatttggctgggckcggtggctcacgcctgtaatcccagcactctgggaggctgaggtgggcagatcatgaggtcaggagttcaagacaaacctggccaacatgacgaaaccccatctctgctaaaaatacaaaaattagctgggcgtggtggtgggtgcctgtaatcccagctacttgtggggctgaggcaggagaattgcttgaacccgggagatggaggttgcagggagctgagatcgtgccattgcactccagcctggg

SEQ ID NO: 588807 - DNA, 363 bp, Homo sapiens
ggctgggtaataaattttttaaagtttatttagcttatagttttgtaggctgtacaagaagcatggcagtggaatctgcttctgacgagggcctcaggctgtcttcaatcacagtggaagatgaaatggagctgttgtttgcggagatcacatggtgagagaggaagaataaaagcatggagatgccaggcccttttccacaactggccctcatgggaactaatagagtgagaacttattaactactgcaagaatggcagcaagcagttcataaaggatttacccccatgtctcaaacayttgccaaaatgctccacctccaacaatggggaccaaatgtcaacatgaggtttggagaggtga

SEQ ID NO: 588808 - DNA, 531 bp, Homo sapiens
aataatttttattttctcttcagatatatagtagcagyttagcaaaaattcatggagatatctttttccattgctgtaatgaacacaatttattacaaatatattttaattggctaattttccaagtgaaggagttgtacttaatttatttaatttgtatgactaagaagtgacatttttccttaggcatttgtctaattcttccttttgcaaattgcccatttacactttgtcccttttttttttttttttttggtcagaggagactttttgcctcattaatttgtaggaaatccttacttagtaagtaatagtaagcttcttatcccttttttgctctcatcatcatcctcccacttttaaatcttttgttattttttaaactttaatcaaagttattagtccttggggagagatttctagcttttgatattatatttgcttttcttaatccaaattcagatatttattaattcatttactttctaactttcctgtcacttcatatgtatatttcccatacttatgagt

SEQ ID NO: 588809 - DNA, 643 bp, Homo sapiens
ttccaaccttctggctctgccatgggctttgccttctgagttctgttatgggttcatctcatctttctccttttcttttctatacatctggtttcctcttactctttacctgggctccccattgtgcagtatctattcatcatgacttagggcagacatgatgacagatgcatggacaacccaagctggaagtaaaatctgagcagacaaaaaaaacgaaaacaagcctgctttgtatagaggccaagaggaaattatttggaagagaaaatatgatttgtgttaagaatgggaatataattgaataggcaggtacattagataatagaccttctaaaaaagcagacatgggcatgtagatggtagtatagcaaatagagcaccagcatgcaggactgaaaaaagaaactgcatgttcaaagctgtttatatataataaaaattcaatcttgaatagctctgacagaagagggaagggaaaagtagagtaaggrtaccaaataggatggtgatgctgatttatccagacataagacagtaacagcttgcaccagtgttgagaagttgtgtaaatagaaaaaaggggatgaggtagagccagtattaatattttaaagaaaaagttgttaggacttagaagacg

SEQ ID NO: 588810 - DNA, 617 bp, Homo sapiens
ttttgcctgcttccagcagtgtttcagacaagggaatgccttgtgctttcctttccccggcttcctcctctgggtgtgctctcaattctaaccccgttaccagcatcgccacctgttaattatcactgttggttatgctcttcaacttcagtctttccctgtcctctgagaacttctcctttggcttcatggcaccaaagtacatcccattctgaaatcaaaagaatagtaaacacaaaaacctactaactccccacaatttccttctcaaactactgctggatctttcttttctttctttatcatcagacatcacaaaagagaaatcttctacccatttcctttatttcctcacgtccaattcacttctcagacaggagcacctggcttcttgccccctcaccctatactgaaatgctctctgaagcatcatcacaacttcattgccaaattggaagcctttagagaatggcacttatccagttctcacccaggagccattaatgggagaaatcctggaagaataggggaagaatgccacccaccatcttgatcccatcaaaacccaaatggacatagaaatgcctgayagcctctttcaattaaactgtcatggc

SEQ ID NO: 588811 - DNA, 593 bp, Homo sapiens
ctgaggcaggaggattgcttgaggccaggagctcaaaaccagcctgagcaacacagcaagacttcatctctaaaaagagttttttttttttttttttaacttagccaggcatggtggcatgtgtctgtagtcccagctactaagaaggctggagtgggagcatcacttgagcccaggagttcaaggctccagtaagccatggtcatgccatcacactccggcctgggcaacagagtgagaccccaactccaaaagaaaaagaataaatccaacagaaaatgtgcaacatctctacactaaaaactacaaaacaatgctgagagatattaaagaaacctaaattgatggaawgatagacaatgttgatggattgagtcatggaaaactcaatattgtattagtattaaaaatatttttaagatgtgcattatccaaaattgatgcatagatttaatgcaatccaaatcaaaataccagcaaaattttttaaagaaattgacaacttattttaaaatgtaaattaaaatgaaaagaacctagaagagaaaagcagtcataaaaaaaaaaaagttggaattcttctactgcctgat

SEQ ID NO: 588812 - DNA, 584 bp, Homo sapiens
atcactttcttttttctgtctgtaaatcctctccaaccacgtgacagtactagacttattctggttgtttggagttgaggagggtggctgttcaattcacaaattattctttgcttaaacttcattaaatgtaatttttctaaagttattgtgacagtgtcagatgacaaaaaataaatggtaagatgtagaccaaaaaaattgagtagtatttttattacttcataatcaggcacaaacaaaacatwagtccactccttacaacctataataggttaaaaaatgaaaaacattaccaaaggctttccctcttctagatagacatcatttattaggtcccttttggcatagtttaaaataaatgtggcaataatgttaaatatatccctctgcagcaaaagcagtgttaagaagaaggcttatagcactaaaggcctaccttaaaaagttagaaagatctcacatcaatgatctaacatcacacccagagtaacaagacaaaaatgaccccaaacctagtgtttttcacacctagaaaaagaaaaaactaaccccaaagctagcagaagaaaataaataactaa

SEQ ID NO: 588813 - DNA, 542 bp, Homo sapiens
ggcacatgtatacacatgtaacaaacctgcatgttgtgcacatgtatcctagaagtataataaaaaaaattttattgaaatatatatattttttttctttgtcttttttgagatggagtctcactctgttgctcaggctggaatgcagtggcactaccttggatcactgcaacctctgcttcccaggttcaagcaattctcctgcctcagcctcccgagtagctaggactacaggcacgtgccaccatgcctggctaatttttgtatttttagtagagacggggttcactatattggccaggctgttcttgaactcctgacctcatgatccacctgccttggcytcccaaagtgctgggattacagacatgagccactgcacccagcctattgaaatacatattatccatttaacatatattttgttttttaagctctgttttgtttttgtttttgttttttttctaaaaacagttctgtaatgaagcttgctttgtcaaggactatgttgactgataatgaaagcatcattttataaaaaa

SEQ ID NO: 588814 - DNA, 542 bp, Homo sapiens
ggcacatgtatacacatgtaacaaacctgcatgttgtgcacatgtatcctagaagtataataaaaaaaattttattgaaatatatatattttttttctttgtcttttttgagatggagtctcactctgttgctcaggctggaatgcagtggcactaccttggatcactgcaacctctgcttcccaggttcaagcaattctcctgcctcagcctcccgagtagctaggactacaggcacgtgccaccatgcctggctaatttttgtatttttagtagagacggggttcactatattggccaggctgttcttgaactcctgacctcatgatccacctgccttggcctcccaaagtgctgggattacagacatgagmcactgcacccagcctattgaaatacatattatccatttaacatatattttgttttttaagctctgttttgtttttgtttttgttttttttctaaaaacagttctgtaatgaagcttgctttgtcaaggactatgttgactgataatgaaagcatcattttataaaaaa

SEQ ID NO: 588815 - DNA, 465 bp, Homo sapiens
cagtacaaccactatggaaaacagtatggagattccttaaagaactaaagtagaactaccatttgatccagcaattccactattggktatctacccagaggaaaagtcattatataaaaaagcaaacttgcacatgcatgtttatagcagcgcaatcagcagttgcaaaaatatggagccagcctaaatgcccatctaccgatgagtagataaagaaaatgtgtggccaggcacagctgcacgcctgtaatcccagcactttgggagccaaggcgggcagatcatgaggtcaggagtttgagatcagcctggccaatatggtgaaactccatctctactaaaatacacaaattagttgggcatggtggcgtgcacctgtagtcccagctgctggggaggctaaggcagaggagtcgtttgaacccgaggaagtagaggttgcagtgagcagagatcgcaccactg

SEQ ID NO: 588816 - DNA, 465 bp, Homo sapiens
cagtacaaccactatggaaaacagtatggagattccttaaagaactaaagtagaactaccatttgatccagcaattccactattggttatctacccagaggaaaagtcattatataaaaaagcaaacttgcacatgcatgtttatagcagcgcaatcagcarttgcaaaaatatggagccagcctaaatgcccatctaccgatgagtagataaagaaaatgtgtggccaggcacagctgcacgcctgtaatcccagcactttgggagccaaggcgggcagatcatgaggtcaggagtttgagatcagcctggccaatatggtgaaactccatctctactaaaatacacaaattagttgggcatggtggcgtgcacctgtagtcccagctgctggggaggctaaggcagaggagtcgtttgaacccgaggaagtagaggttgcagtgagcagagatcgcaccactg

SEQ ID NO: 588817 - DNA, 465 bp, Homo sapiens
cagtacaaccactatggaaaacagtatggagattccttaaagaactaaagtagaactaccatttgatccagcaattccactattggttatctacccagaggaaaagtcattatataaaaaagcaaacttgcacatgcatgtttatagcagcgcaatcagcagttgcaaaaatatggagccagcctaaatgcccatctaccratgagtagataaagaaaatgtgtggccaggcacagctgcacgcctgtaatcccagcactttgggagccaaggcgggcagatcatgaggtcaggagtttgagatcagcctggccaatatggtgaaactccatctctactaaaatacacaaattagttgggcatggtggcgtgcacctgtagtcccagctgctggggaggctaaggcagaggagtcgtttgaacccgaggaagtagaggttgcagtgagcagagatcgcaccactg

SEQ ID NO: 588818 - DNA, 465 bp, Homo sapiens
cagtacaaccactatggaaaacagtatggagattccttaaagaactaaagtagaactaccatttgatccagcaattccactattggttatctacccagaggaaaagtcattatataaaaaagcaaacttgcacatgcatgtttatagcagcgcaatcagcagttgcaaaaatatggagccagcctaaatgcccatctaccgatgagtagataaagaaaatgtgtggccaggcacagctgcacgcctgtaatcccagcactttgggagccaaggygggcagatcatgaggtcaggagtttgagatcagcctggccaatatggtgaaactccatctctactaaaatacacaaattagttgggcatggtggcgtgcacctgtagtcccagctgctggggaggctaaggcagaggagtcgtttgaacccgaggaagtagaggttgcagtgagcagagatcgcaccactg

SEQ ID NO: 588819 - DNA, 340 bp, Homo sapiens
tcttgacctcgtggtccacctgcctcagcctcccaaggtggggggattacaggcatgagccactgcgcccagccaaaatcctttactactaatttctttaattacaaaatgaaaaataagaacttcacagtgaagaatcctggcaggctccaccttaaccaagcaatcaaggataatatcatcagtaataagatatatcaatataaggaatcctttcacgtgatgcacagagaaaaagcaacatcatttctatggtatccttgccaaaaaaaaayaataataacttaatcatgaggaaatgtcagaaactcaaactaagggccattctacaaaataactg

SEQ ID NO: 588820 - DNA, 497 bp, Homo sapiens
ggaaaaagactcaatgtttccatgtgaccctccctgcagtcctactgctgctgccccttccagactgatatggtttgaccctgtgtccccacccaaatctcaccttgaattgtactcccatatttcccacatgttgtgggagagacccagtgggagatcattgaatcatggcgacagtttcccccatactgttctagtggtggtaaatataagtctcacgagatctgatrgttttatcaggagtttctgcttttgcatcttcctcattctctctgcctgctaccattcatgtaagatgcagctcgatcctccttgccttccaccataatgagaggcttccccagccatgtggaactgtaagtccaattaaacttctttcttttgtaaattgcccagtctcaggtatgcctttatcagcagctggaaaacagactaatatacagaccttgtattttctgctgtttactgtactgttttccttcatggttcatttatga

SEQ ID NO: 588821 - DNA, 604 bp, Homo sapiens
tggattaaactggacaatttatagccaggcatgctggcatgcacctgtagtcccagccactttggaggctgagatgggaggatcgcttgagcccrggagtttgaggctgcagtgagctatgcactccagcctaggcaacagaatgggattctgtttcttaagtagatcaataaacaaactggacaatttacagcaacagctgcaaggatgctcatctctgcctagcaggttgggtgcagggaagaatccagaggttgggtgcagggaagaatccagaggttgtgtgggagggtatttggtttttggtgatttttaaaaagaaatctttaatcaaagtgtaagtgcagaaaactgcacaaatcctaaatatacaacctgaggattttttagaaagttatcacacctttgtaaccagcacccagattgagaacagaacattactagctccctggaacccagctctttaatatacctggtggcttcctctgcatagcccaggtgctctgctattcatcttgcccttagccagcctggactggggaaagtctaaacttctgtccctgggatctggggagggtcaaagtcataaataagagtaggcagc

SEQ ID NO: 588822 - DNA, 604 bp, Homo sapiens
tggattaaactggacaatttatagccaggcatgctggcatgcacctgtagtcccagccactttggaggctgagatgggaggatcgcttgagcccaggagtttgaggctgcagtgagctatgcactccagcctaggcaacagaatgggattctgtttcttaagtagatcaataaacaaactggacaatttacagcaacagctgcaaggatgctcatctctgcctagcaggttgggtgcagggaagaatccagaggttgggtgcagggaagaatccagaggttgtgtgggagggtatttggtttttggtgatttttaaaaagaaatctttaatcaaagtrtaagtgcagaaaactgcacaaatcctaaatatacaacctgaggattttttagaaagttatcacacctttgtaaccagcacccagattgagaacagaacattactagctccctggaacccagctctttaatatacctggtggcttcctctgcatagcccaggtgctctgctattcatcttgcccttagccagcctggactggggaaagtctaaacttctgtccctgggatctggggagggtcaaagtcataaataagagtaggcagc

SEQ ID NO: 588823 - DNA, 615 bp, Homo sapiens
ggtagaataaatgcttcaatccatgtttccacctccccagttgggctagatgcccttgttctgtgatgtgtatttgtccattcacttgtttgacttccccctcttagacttaactgtgtagtccctgttcacttttaggtcccgataccctttgaggtgccagattcaataagtccttgcctcttcatatgcgaagaaagtactttctactgtcttggctcttatttagctgagtaattgtaatttaatttattgatcatttattgagcacctgtgatgctggcactgtgctatgtgctaggaacataaagatgattaaaattggtacctgaccctaaagaatttatactcaacggtaaagtaaggagagagctatctggggagaactgacaagtaccctgctaagttgcaatgtgtaagcctaagaatgcttatgcactagctacagtggggtcctaaacaagggagtgatccagtttgagacagccctagcggtagcctgaaggggctctggaattgtcttatccagagttcaagcatggagaggtgtcctgcttggaaaattgcatgcagcaaccagacctatactrtactatcccaaatacttggatagga

SEQ ID NO: 588824 - DNA, 610 bp, Homo sapiens
gtaattgtaatttaatttattgatcatttattgagcacctgtgatgctggcactgtgctatgtgctaggaacataaagatgattaaaattggtacctgaccctaaagaatttatactcaacggtaaagtaaggagagagctatctggggagaactgacaagtaccctgctaagttgcaatgtgtaagcctaagaatgcttatgcactagctacagtggggtcctaaacaagggagtgatccagtttgagacagccctagcggtagcctgaaggggctctggaattgtcttatccagagttcaagcatggagaggtgtcctgcttggaaaattgcatgcagcaaccagacctatactgtactatcccaaatacttggataggacaaacttggtcgctttctctgaagactcttagaagagaggttcttctctgctaaccaaatccagaaagccaccctgtggcagcaccaggacataaaccactgggtgccagactagctagaaaggctgattcatagctatctttggacaagaacagcataagtgtttctctattaccccagttgagattgtcaacataaagayctgaactgccctgacttccacctcta

SEQ ID NO: 588825 - DNA, 326 bp, Homo sapiens
tcttgatttgataaggacccaaaaaatcaaaaagacaagttgttttccatatgtatccaggtgcggtggaacaggtgtagaatcagaaaaacactgctacttggaaagaaaaggaatgagagtcactcagcactcactgggctgcagcaattctgatgttctgctgggaatttttggccaggwcctcctaatccaggagttgagaattttccttgcctggccccctgttccacactcagtcctttcttctctgggttcttggctctgccctgtgagaggttttctcttcccatcagccttgatcacttcaaaagagcacatcggag

SEQ ID NO: 588826 - DNA, 468 bp, Homo sapiens
ctgggggctgctttgtcagaggaggacggggagatgcagacatcatatttatggcatatcctttgttaggaatttcagagaagtgaacttagttyggagctaccttgagtatgacactatcctccttaatttgactctgttgggcttgaagtggaggtgggggatcagaggaaggaagacaggagagtttactggatccaagaggtaaagttgtaaaaccacctaggagctgatgtcaccaatacaaggggcagttttgtctcctcagcctgtgttctgcctggcccgtggctgagtgctgaagccaaaatttggtcaaactctttcccggatttccagctgggtctcccctgtcctggattactggcattttctctacttactaaatgtgctttgtgatctcagctagtgcgaagcagaaaacccactgctaaacagggaagcaactgaaaacccaaaatgccagca

SEQ ID NO: 588827 - DNA, 373 bp, Homo sapiens
cccactgcctgtctctcaccatactactacagctgatgctttctggaaagaaccacctcctggcaggaggccaaagagcacaaaaataaatagagcattaaatcaccaaatctaagaaccctcatggagtccattgcacccccctgccacctcctccagaacaggcatttgtatccatggctgagagacccacagatggttcaaatcacaggactctgtgcagacaacccccagtaccagcccagagctgggtagactatctgggtggctacacccwgaagagagacagcaatcactgcagttcagctcacaggaagccacatccataggaaaagggggagagtactatatcaagggaacaccctgtgggaca

SEQ ID NO: 588828 - DNA, 605 bp, Homo sapiens
aatttttttttaagtaagaggaggaagaaaggaagaaaaaattcttgtgatttcaaatataattttttttaaatataaggaagttgcctctggatttattttacaatcctttactctgctttgatcagacactgcactttaagttttgttcttagaaaatatattaatcttttgaaatatgtcacagttattcttcagatcttaatacaaatacttcatagcaattagatacagtgactgcttattcaagttcagaccatttaagacaaactagaatattgcattacagtttatggcaactaattacagcaaaagtttattctagttcctcaaakggggggtaagttttctgctctattttttaagctttttactggagtgccatctgcagccttaaaaaaaaaaaacaaaacagtaaagtactttggaaatccaaggctgtggtccatggccatggtttccatagtaatagtggcctaaatccatacatccctaactagttacacatataattatatgaagtatagcagtaagaaagaaagatgttttgcgtaatatgcaaaatcatcacaccttcattcttttgcctccaagcattctctctg

SEQ ID NO: 588829 - DNA, 593 bp, Homo sapiens
aataaatgtgatacaccacataaacagaattaaaaacaaaaatcacatgatcatctcaatagatgcagaaaaagcattagacaaaatccagcatcgctttatgattaaaactctcagcaaaatcagcatacaagggacataccttaatgtaatagaagccatctatggcaaatccacaaccaacacaatactgaatggggaaaagctgaaagcattccctctgagaactggaataaaacaaggatgcccactcttaccactccctttcaacatagtactggaactcctagccagagcaatcagacaagagaaagaaataaagggcatccaaattggtaaagaggaagtcaaactgacactgtttkctgatgatatgatcatttaccttgaaaactctaaagactcctccagaaagctcccagaactgataaaagaattcagcaaagtttccagatacaaggttaatctacacaaatcaatagctcttctatacaccaacagcaagcagagaatcaaatcaagaactcaactccttttacaatagctgcaaaaaaataaaaaataaaaaaaatttaggaatatacctaaccaag

SEQ ID NO: 588830 - DNA, 598 bp, Homo sapiens
gcactccagcctggtgacagagcaagacttcgtctcaaaaaaaaaaaagaagagtatcattaccatatttgttttgttttctatatgtcttatttgttgcttctttgttcttcctttcttttcctgcctttygatcagcttcttatcaattttatcaccattatttgctccttagctgtatctttgtcttaatgctttaataaatgctctgatgacacaatgcattcttaactcatagtaatctaactttaattaaaatcttatcactttaaatgtaagaagcttgtagtatttttcaacataacctatttcctgttcttgatgccgtctatatatatatgtgtgtgtatatatatatatatatgtgtgtgtgtatatatatatatatatgtgtgtatatatatatatatgcatagatttttttttttaagacagggtcttactctgttgcacaggctggactacagttgctcaatctcagctcactgcaagctctgtctcctgggtgcaagtgattctcctgcctcagcctccctagtaactctgattacaggcgcccaccactacacctggctaatttttgtatttttagtaggga

SEQ ID NO: 588831 - DNA, 504 bp, Homo sapiens
cttcatgtttaaaaccttaaaccctcaataaccctcaaaatgttcctcagggaacatatttgagaataataaccatctatgataaacctacagctaatattatactgaatgactaacagctggaagcatttccataaaaactggcagtgtatgagcatgcccattctcaccactcctattcaacacagtactggaaattctggtcagagtcatcagggaagagaaagaaataaaagccattcaaataggaagaggggatgtcaaactatccctgttggcaaatgacatgattctgkatctataaaaccccataatctctgcccaagagctcatagatttcataaacaacttcagcagtttcaggatacaaaattaacatacaaaaatcattaacgtttctatacaacaacaatgtccaagctggagccaaatcaagaaaacagtcccattcacaataaccacaaataataaaataaaataaataaaataaaacctaggaatata

SEQ ID NO: 588832 - DNA, 581 bp, Homo sapiens
aaagtcagaatggtggtcaacttgtggcaaggtgcagtggctcattcctgtaatctcagcactttgggaggctgagacaggcggatgacctgagatcaggagtttgatccagsctggccaacatggcaaaaccctgtctctactaaaaattaaaaaaaaaaaaaattagccaggaatggctgtaggtgtctataatcccagctacttgggaggctggggcaaggagaattgtttgaatccgggaggcgggggttttagtaagcccgagattgcgccgctgccctccaacctgggtggcagagcgagactctgtccctctcaaaaaaaagaaagaatagaggtgaccatcagaaacagggaattgtggtgggggcttgggacattcaggagacaagatggggtgcaagaaatactctatttttgacctggtttaaagttaatagtttaatttagtctgtgaatactcttgaagctgtatattatgatttgggcatttttaatgttatacttcaataaaaggtacttgaaaaatctaaaaatatatacaaaaacaaaaatatatacaatacaaattatactcc

SEQ ID NO: 588833 - DNA, 536 bp, Homo sapiens
gtctatgctgttctttgtgtgagtaaatataaaatttctgttatatgcaaactaaaaaatctatctaaattttctggaaaaaaatacattgaaagatatatgtacatatgtatacatatatatccatttatacatacatcaactaacaaatctgttttgctgattagaagaaaaaaatcatyttatgtttttcttatggaatatgcttatctattttaaggagctgtattatggtattatctattctattatctattgtgttatcagactgagggtacagactagtgtgtttgtttcatcacataaaacaactggctaaaatttactgcccctgtacactaaactcagaagacagatctgattctgtggctttactcccaaaactgcatcaaggctactcttttagtcaacttgaaaatttatatactatacgctaaccctcctttaatatcctcactctctttcctctgggcatttattgctgttctttctagttcagtaaccagtgagcagaaggttcattaaaactaattgaa

SEQ ID NO: 588834 - DNA, 474 bp, Homo sapiens
atttttgtatttttaatagagacggggttcaccatattggccaggctggtcttgaactcctgacctcaggcaatccacctgcctggccctcccaaaatgctgggattgcaggcatgagccaccactcccagccccctactcatgctctctggtttgcatttgctaacttcttgccaagaggacttgcaagtcaagaagaagaaatggaggagacttctttacagatggcaccctgtgtcttagcctttctttacccctaactagagagtaaatgttttaaggatagagaagttgttttgttcatttctgtattcctattggtttggcgcatatatatgtcgtatcagcaaaaaatacgatatatatatatcgtatcagcaaaaatgtattgaatgaacaagtgacaaaagtgaccacttactgaggacttggcctttgctgggcacratactggtgtttataccagcaagcttt

SEQ ID NO: 588835 - DNA, 642 bp, Homo sapiens
cctactttttacaaatcttatttttaaattttattttactataccttttgtctaaggcaggtgtccaatcttttggcttccctgggccacattggaagaggaagaattgttttgggccacacataaaatacactaagactaatgatagctgataagctaaaagaaaattgcaaaaaaatctcataatgttttaagaaagtttacaaacttgtgttrggccgcttcaaagctgtcctatgttgtgggttggataggctgttttcacaattaaaggaggtaagacataatacgttaacctttccctatccttttacaagtaagtccagttaacttatcacaggaaaacttctgttaattactatgcaaagaaaaaaaacaattatggggtagtttctaaagaggagtaaatttaattgaaagagtgtgttagggctatcaatagcatgaactattgctcataaaatccacctcaaaggttgtaaatcataataatataaaccttatttatttctaaaaggataatgataccagtttactaaaacttttcctgcaatagatgatatgaaggaggtagtcaattgactaagtggacactacgtcacaagtcaacaaatggtacctctaaaatttaaatattcttgg

SEQ ID NO: 588836 - DNA, 642 bp, Homo sapiens
cctactttttacaaatcttatttttaaattttattttactataccttttgtctaaggcaggtgtccaatcttttggcttccctgggccacattggaagaggaagaattgttttgggccacacataaaatacactaagactaatgatagctgataagctaaaagaaaattgcaaaaaaatctcataatgttttaagaaagtttacaaacttgtgttgggccgcttcaaagctgtcctatgttgtgggttggataggctgttttcacaattaaaggaggtaagacataatacgttaacctttccctatccttttacaagtaagtccagttaacttatcacaggaaaacttctgttaattactatgcaaagaaaaaaaacaattatggggtagtttctaaagaggagtaaatttaattgaaagagtgtgttagggctatcaatarcatgaactattgctcataaaatccacctcaaaggttgtaaatcataataatataaaccttatttatttctaaaaggataatgataccagtttactaaaacttttcctgcaatagatgatatgaaggaggtagtcaattgactaagtggacactacgtcacaagtcaacaaatggtacctctaaaatttaaatattcttgg

SEQ ID NO: 588837 - DNA, 596 bp, Homo sapiens
ggggtttcaccatgttagccaggctgatctcaaactccgaccttaggcaatcctcctgcctcggcctcccaaagtgctgggattacaggcatgagcacagcgctgggccagtcactttgtattttacttgtaaacattctaaatgcatgaagaratgtctgggtcagcagtcattgctagtcatacacacctatcttggcaatgttgcatatatacccctcacaaatatttcagactacatgtagacacagaatgcaagaaggcagtatatccacctacagcttgtattgatgtttgtgcaggacgacagtggtgtacacagatggaccacgtcaggagatgtggcttctctctgtggtgccgcaggtccgtagagtcctgggactgggatgctgccaccagaactggctggaaataagaatctttgtataaatgtttcaatcagattatgagtttaagatgaaggaataaaaaaactaacagtgcaacaaatggctgtttttggaaatcaaagctctcttttcaagtgtgcacactgtgtagcaaataatcatcgcacaagggtcttttcagtaaataccccacacagagaataa

SEQ ID NO: 588838 - DNA, 634 bp, Homo sapiens
tgcacttgttggagaatgaatgtaaaaaaggcaaataatagcattcaatttttgttaaagtagcttggacctcttgaacccactgccaaagttgcaagatayccccacccacagtgttctccagaccccaaattaaaaagcagtggtgcatacacttgctgccctagatgtctcactgcaaacctctacccacagtctcatttactgtaaccagaggaaaataattccatttgttttcaaatcaatattcagttcttaggttatgcactctcttgtatgtgtggccctttgactcttttttttttcttttttttctttttgagacaggttctgactctgttatccaagctggagtgcagttgtgatcatagctccctgtaacctctgcctcatgggtcaagtgatcctcccacctcagcctttccagtagctgggactacaaatatgtgtcaccatgcttggctaacttttgtattttttgtagagatgaggttgtgccatgttgcccaggctggtctcaaactctggggctcaagtgaacctcccaccttggcctcccaaaatcctgggattacaggcgtgacgcccatgcctggcccattttgactctggaccacttcttcctggaatgctc

SEQ ID NO: 588839 - DNA, 610 bp, Homo sapiens
aaatctccgtgtccttatttactggtaccctaacaaatgcttgttctgccgtgttagttatgcagctttgcccaagaagagcatgctgtttaggagtagtgagtaaacgacttcggctgaaggactgtaggaagcagccccatttgagatgggaacgttttattgcagccatattgtgaggaggggttagtattaaatgaggtagagattacagaagatgaagaggcaggtttggggtggaagatactaaatttggaattgaacatgttaagtttgaggtcactgtcagaaatccagaaggagaaataaagagaagccatgaattgggcatatgtgtttgccatatttatggatgaagtccagatttatctccatcaaacactaaaaacaaaaatagagaataaaaattaaaacaagagaagtcttgctatgactctttattttaatggtactccaaagaagagcgaygcagagagacaagatagcacgcaggggtaggtggctgacgtccacactttgaaggcaacacagtaccgtgatttttttccataacttagtgaggaaaatgaaacaacagctctggttcctcacacaattctcttagcaaaag

SEQ ID NO: 588840 - DNA, 552 bp, Homo sapiens
gaaaccttaccttatggtcaaactgattaaaattagatagatttgtttataagtttttattaaaattagattgtaaatttttattaaaatacacatgaatctacctctaaataaaggcatggatataactataaatatagctagatcatgatatatatagacaagatgctaatacacaaaaatatgatgcatatgcataaatgtatacacatcacttaaatgaacatattgatatttaaatgtggggtatacacttgtaatctattatacatataagccatttttaatttgattttgttaaaattgaagcacccactacaaatgacctctctcagctcagagtargtctcaacttcctccaattctggagaccctagcacagcatttccctgccttgatatattccatagccccttttcgtttactgtgcctggaatcatataaggtttcaaaaatagtgatttcaaaaataaaactctaaattaacatcagtaaccatgtgcaatcaatggaagattttaaacaatatgcatgcttagaatcagagggact

SEQ ID NO: 588841 - DNA, 514 bp, Homo sapiens
agcttttgtagatacttctatcaaataagaaagtctctttccatctccattttcctatgggggtttattaaaaatatgttttgaatttagaaaatgtgtttcagaacctgttgagtgtttttctctatactctgttaatgtggtgcattgcactgatagatatttttcgtttttttctttcttttcttttcttttcttttyttttttttttttttttttttaacagagtcttgctctgtcacagaggctggagtgcagtggcaaggtctccgttcactatagtctctgcctctcaggttcaagcaattctcctgcctcagcctcccgagaaactgtgattacaggcatgcaccaccatgctcagctaatttttgtatttttagtagagacgggatttcaccatgttagccaggctgttatcaaactcctgacttcaggcaatctgccctccttggcctcccaaagtgctgggattacaggcatgagccaccacgccaggcctgattgattgttt

SEQ ID NO: 588842 - DNA, 514 bp, Homo sapiens
agcttttgtagatacttctatcaaataagaaagtctctttccatctccattttcctatgggggtttattaaaaatatgttttgaatttagaaaatgtgtttcagaacctgttgagtgtttttctctatactctgttaatgtggtgcattgcactgatagatatttttcgtttttttctttcttttcttttcttttcttttcttttttttttttttttttttaacagagtcttgctctgtcacagaggctggagtgcagtggcaaggtctccgttcactatagyctctgcctctcaggttcaagcaattctcctgcctcagcctcccgagaaactgtgattacaggcatgcaccaccatgctcagctaatttttgtatttttagtagagacgggatttcaccatgttagccaggctgttatcaaactcctgacttcaggcaatctgccctccttggcctcccaaagtgctgggattacaggcatgagccaccacgccaggcctgattgattgttt

SEQ ID NO: 588843 - DNA, 573 bp, Homo sapiens
aatagtagaacctcatgtatctcccactctcctatacactgatatgactaaatgttgcaaggttttaatgcattatgccaaagtatattttcaacaggtgaaggaatcttttcatgctccacctactaaggacaattgaacccttcataatctagaacctggatgctggatcttctggaaatggcatcagagaaagattgcccttgccacccatatggcaatgagactttggaacttcaaaacttgggttcataatcttacaaaacagaaggaccytttagactcttggaactgtacactccttcaagaccttaaggtaaagctaaatagggaagtttctcttcaaaagcagatggcatcctagacatacacagctttcccaagatcacagatcaagactcctctgccatcatgaaactcttagctctcttaatcttttacttgcttatgcctctatgaacaatagaacttgaaaatgggccttgtgtccacccacagggtgtactttcttatagaggatttttcagccagtcttatacatgggtaatcttaagccttgatgaatggaagatg

SEQ ID NO: 588844 - DNA, 573 bp, Homo sapiens
aatagtagaacctcatgtatctcccactctcctatacactgatatgactaaatgttgcaaggttttaatgcattatgccaaagtatattttcaacaggtgaaggaatcttttcatgctccacctactaaggacaattgaacccttcataatctagaacctggatgctggatcttctggaaatggcatcagagaaagattgcccttgccacccatatggcaatgagactttggaacttcaaaacttgggttcataatcttacaaaacagaaggaccctttagactcttggaactgtacactccttcaagaccttaaggtaaagctaaatagggaagtttctcttcaaaagcagatggcatcctagacatacacagctttcccaagatcacagatcaagactcctctgccatcatgaaactcttagctctcttaatcttttacttgcttatgcctctatgaacaatagaacttgaaaaygggccttgtgtccacccacagggtgtactttcttatagaggatttttcagccagtcttatacatgggtaatcttaagccttgatgaatggaagatg

SEQ ID NO: 588845 - DNA, 497 bp, Homo sapiens
gtggactggataaagaaaatrtggtacatatacacgaaggaatactacacagccataaaacgaatgaaaataatgtcctttgcagccacaaggatgcagctggagggtattagactaagcaaattaatgcaggaagagaaaaccaaattgcatatgttcttgcttataagggggagttaaacattgagtacatatgaacacaaagattgaaataatagacactgggccctacttgagggtgtatggtgagagaagggtgagggttgaagaaaacacctttggtactatgctcactatctgggtgatgaaatcatttgtacaccaaaccccagtgatatgcaatttacccatgtcacaaatgtgcacacttacttccaaacctaaaacagaagttagaaaataaaaaaaaatttgaaattcatgcatattagtttcctgttgctgttgtaacgaattaccatacatttagcatcttaaaacagcacaaaactataatt

SEQ ID NO: 588846 - DNA, 608 bp, Homo sapiens
ctggggtcaggagttcgagaccagcctggccaacatrgagaaacctcatctctactataaatacaaaattaacagggcatggtggtgcgtgcctgtagtcccagcttctcgggagggtgaggcaggagaatcacttgaacctgcgaggtggagattgcagtgagccaaggtgcaccatcgcactccagcctgggcaacaagagcaaaactctgtctcagaaaaaaaaaagaaagtctatcagaagatgactcaaaactgagctgatgtttctgaaacccaaggttttcttcttaatcctctgatggcctatattgaagcttatatatttatctggtgcattgaaaagaaaatttaaaaattataatgtattttgactataagatggtattttatggactctaaccctatttcaaatactctttttcttagccaggaaactccgaaattaatactatcatagaagttcattttataccaaaaggaagtttttaaaaatataattttcaattagataacctctaactttcggactcgaaagtcaagaaacttttatggagtgccttctatgtgcatggcacactactaggcagaaggcaatgaaataaca

SEQ ID NO: 588847 - DNA, 623 bp, Homo sapiens
atttggcacagtttcctctgattgatccgtctttcacctattttacatatacctatcctttcctaattggtttactttttttttttcaagactgagtttcgctcttattgcccaagctggagtgtaatagcatgatctcggctcgctgcaacctctgcctgctgggtttgagtgattctcctgcctcagcctcctgagtagctgggattacaggtgtgcagcaccacgctcagctaatttttgcctttttagtagagacagggtttcaccatgttggtcaggctggtctcaaactcctgacctcaggtgatccacctacccyggcctcccaaagtgctgggattacaggcatgagccaccatgtccagtctcctaattggttttctacactatcatgcccacctttgagtggtgtcttcactttaaccttttttgcatactcacaaaccaatcagcacacactccctattctgagcccataaaaagccctgggctcagctacacggaggccggaaattaaagaaaaataaaatttaaaagaaagagaaataagttttcctgtattaggctgatttgtcccagaggcagcaacaggcacagccgagacccaggaaaagtcttga

SEQ ID NO: 588848 - DNA, 605 bp, Homo sapiens
tgccccctctttataatcctaactcctggaatcattcccagcctcagggccctcccccaggaagacttcggtgcgagacagaacaatgtaaaaaggatattcaaaacttccctttccccaccacttctaaagagttagctccaactctcttccccttaagggaagtgcccctcagaggaggctaaatgctccattaactagctcagaggtccgaaacctacaaagggagctcaaaccactcttaagtgacccttatatagtggctgaccagattaatcaatttctcagaccccagatatatacttgggctgagctaatgtctatcctaggtattcgctttttaggagaagacaggagcatgattcgcagggctgctatgacaatttgggaacgtgagcatcccccaggtcagaacgtcccagcagctgagcaaaaacttgcggccacagatcctcaatgggatagtaacaacgcagcctactggaggaatatgcaagaccttggagaactgataattaaaggaactcaaaaatctgtaytccgcatccaaaacattcccaaagctttctatatacaacaagggaaggatgaaggacctacagagt

SEQ ID NO: 588849 - DNA, 605 bp, Homo sapiens
tgccccctctttataatcctaactcctggaatcattcccagcctcagggccctcccccaggaagacttcggtgcgagacagaacaatgtaaaaaggatattcaaaacttccctttccccaccacttctaaagagttagctccaactctcttccccttaagggaagtgcccctcagaggaggctaaatgctccattaactagctcagaggtccgaaacctacaaagggagctcaaaccactcttaagtgacccttatatagtggctgaccagattaatcaatttctcagaccccagatatatacttgggctgagctaatgtctatcctaggtattcgctttttaggagaagacaggagcatgattcgcagggctgctatgacaatttgggaacgtgagcatcccccaggtcagaacgtcccagcagctgagcaaaaacttgcggccacagatcctcaatgggatagtaacaacgcagcctactggaggaatatgcaagaccttggagaactgataattaaaggaactcaaaaatctgtattcygcatccaaaacattcccaaagctttctatatacaacaagggaaggatgaaggacctacagagt

SEQ ID NO: 588850 - DNA, 196 bp, Homo sapiens
cttgcactcactctgtcctgcttccctgtgragaaggtgcctgcttctcctttgccttccaccattattgtaagtttcctgagacctcctcagtaatgtagaactgtgaatcaattaaacttctttcctttataaagtatccagttttgggtatttcttcatagcagtgtgagaatggactaatacaaatgctaac

SEQ ID NO: 588851 - DNA, 400 bp, Homo sapiens
agcaaaccaccatggcacacgtttacctatgtaacaaacctgcacatcctgcacctgtacccctgagcttaaaagttgaagaaaaaaatatggttgctttcaggaaaggattctggaaagatggaaaagtaggaaacaggaatatgtctcctcacctagacaacaatagaatctgtccaatataactattttggaactatggagtctgttgaaggcttacaacttccagggaaaggcttgagtagtaaattgcagttaatttcagckattaagacaatagcagctacccagctcctactcctacctctgcagcaagcagctgtgtatgtgcttctggaacaaccttcacacacctttcaggagaccaagtcttccaaaggatgctgtcttctgatactgg

SEQ ID NO: 588852 - DNA, 400 bp, Homo sapiens
agcaaaccaccatggcacacgtttacctatgtaacaaacctgcacatcctgcacctgtacccctgagcttaaaagttgaagaaaaaaatatggttgctttcaggaaaggattctggaaagatggaaaagtaggaaacaggaatatgtctcctcacctagacaacaatagaatctgtccaatataactattttggaactatggagtctgttgaaggcttacaacttccagggaaaggcttgagtagtaaattgcagttaatttcagcgmttaagacaatagcagctacccagctcctactcctacctctgcagcaagcagctgtgtatgtgcttctggaacaaccttcacacacctttcaggagaccaagtcttccaaaggatgctgtcttctgatactgg

SEQ ID NO: 588853 - DNA, 481 bp, Homo sapiens
tgatgttatgggatatatagagacagtgawatggttgctatagtgaagcatattagcatatccatcatctcacatagttattcatttttgtttttgtggcaagagcagctaaaatctactcatttaacaggaatcccaaatatagtacaattttatgacctgtagtctttatgttgtacattagatctctagacttgttcatcttaggtacctgctactttgtatactctgatctacagctcctcattttctcccctcccccacaacccctgatgactactgatttattctctacatctgtatatttcactttttgatttttcttctaatatttcacatgtaagtgagattatgcagtattcctccttatctgtccagcttatttaactgaatataatatcctccaggttcattcatgttgtggcaggatctccttctttgtcaaggctgaatgatattcctataagtatgtgtgtgtgag

SEQ ID NO: 588854 - DNA, 560 bp, Homo sapiens
ttcaatccaactcttagtattgacaagatgaaataccaataatcagaggtatatgaagaaaattgcttaaaattgcgatatagtagaacagaaaccctgaatagtcaggtattcagaagtgacctctagggcacagagaggtgaaaggtgggtgcttaaaacataagagaaatgccagctgaagacaaattggtacctactcatgcctggatgtgacacagaccctttgtaatctagatggcagtttctgatcacatgagcatcaatccccttgtctcactcatatctgttagatgargttaaatactacttgaaatccttaaaatgttttatagatcaactgttttctccacaactcttacagctttattagtatattttattgtatttcccttttatttccattttccaagtaatggaaatactgttgacctacaaaatatgattgacctatgaaatatacatcatattggtacttttgagacagcttaacttacttttttttgttgttgttgttgttttgagacggagtttcactcttgttgcccaggctggagtgt

SEQ ID NO: 588855 - DNA, 195 bp, Homo sapiens
tctcacgccagttagaatggcgatcattaaaaataggagaaaacagaggctgacaaggatgtggagaataggaacagcttttctggttgttggtgggagtgtaaattagttcgaccsccccttaactacctcttccatccactactttgttcctactttcacaatgtgggaccacccttccaacccgctaatcac

SEQ ID NO: 588856 - DNA, 547 bp, Homo sapiens
ataataataaataaaataaataaataatagaaataaaaataaattctagaatggaaagcattatgtcataacggggttcagtggcataaagtcatagactcaaatctcaccaactgagtgatcttgagcaaattatttcaactctctgagtttcaggtgtctttttcttttccagaaagattaaataagaaagtggaataatcatatctcaatacttaacatgtgtatgtgctccataaagattagtttccacccttagcccaatgattgtacatgataaaattcaacaaatgaagataatgacaatgatggtgaagactgtgggggatacagagttaggatgcccggatgccttgcccagaactgaaacactgatcgcccagctgtggatgtgtyggtgaactaggtggtaaatggtggaaggaagtcactggcggcttgagaattaaagaaaaagtaattataaggactacagagtcacatagctattaccgggagttattgatgctttccagaaagtaaatgaaaggctgaaaataattaattg

SEQ ID NO: 588857 - DNA, 589 bp, Homo sapiens
gaatgaccccaacaattgttaaacgaaggggttgttacctatacatttacatccagaattaacgttccagatgggaagaagcaaaatttagaaataaggagaacatagcaggatgtattttaataggcttcaaaactggtagcctagaagcctagaataaggagcacagcaagtgggaaagtattggccattgagggggtaagccaagtgtgaaatgaggcacggggtgaggaaagccaattcagcaagaaatctgcaagtgtgggagctcctctgggaaatttctgaaggacatcagcaggctgtattttttcaagaagtaagatagtagaaactgtgcttacgccttttcctargctttagttcagaacacttttattaatattactattattatactttaagttctagggtacatgtgcacaatgtgcaggtttgttacatatgtgtacatgtgccgtgttgttttgctgcacccattaactcgtcatttacattaggtatttctcctaatgctatccctcccccatccccccaccatgacaggccctggtgtgtgatgttccctgccctgtgtccaagtgttctc

SEQ ID NO: 588858 - DNA, 642 bp, Homo sapiens
ggtcacttgtgtcctagtccccatcccacttttcctactccaggcctttgctccagcagttacgtcttcagatttcccctttccactggaccagcaatggcaggcaatctttagattgcactgagagttgtttagactcgctgcctgtgcttccccaactcattctttcttgaacacactccactcaagtacttatccatgaacaaaactgaaacccatttttcaaggttgccattgattttatcattgtcagaattagtggtcaattatcagccttcatctcccttaatctttaagatgtttttaacatagataaaaccatttgacactttttttgttgtttttgagacagagtctcactctattgcccaggctggagtgcagtggcatgatctcagctcactgcaacmtctgcctcccgggtttaagacattcttgtgcctcagcctcctgagtagctgagactacaggcgcatgcactatgcccagctaagttttgtatttttaatagagacagggtttcgccatgttgcccaaggtggtctcgaactcctggcctaaagtgatccaccatagcctcccaaactgttgggattacaggcatgagcctctgcacctggccttggcatattttttacttga

SEQ ID NO: 588859 - DNA, 579 bp, Homo sapiens
ccagccgttgagaactcccagtggggaagaaagatttttttctccctactcaaattcagtcttcttgtaagtttctaatcatgtgtggccatttccagtgtcatagctgactttctttggtgttagcaaaatcaggcaggaaaataaaaaaaaataaaataaggaaaataagaaccaaataccctatcagagatgttgggttacttgaaacactatagtataaatacagctaaatgccctttagagacaaggatgtgcactctcaccactcttgtttaacttattgctggaagctcttaccagagaaatcaggcaagagaaggaaataaaaggcatctacgttagagaagaggaagcgaaaattttcttttttgcagatgacatgatcttatatatagaaaaacttaagtackccaccaaaaaggtcttagaactaataaatttagcagagtttcaggatacaaaatcagcataaaaaatcagtagcatttttacacaccaataacaaactagctgaaaaagaaatcaagaaagcaatcccatttacgatatctacaaaaaaacctctcagaataaatt

SEQ ID NO: 588860 - DNA, 564 bp, Homo sapiens
atgtataacaagcttaactaattccctggaccccaaaatgcccacaggaaccaaatgatttgatcaagacttccatgatactgacactgtgaaaacttaaggaaaccagggagcaggtagatttccattagggacaccttccaggtacttcaggtgcaaatgatcaacaggcctgcttctgtatctgagatcaggttacaggggagaaaaagctggttggaaatctaccaattgtgaattgcaaccacacactccrtctattatgcttcatctattactatacctgagttaaagacagagggactaaccatctatctcatcatctaaaaatgtcagtcagaatggatagaacacatgtaaatgacaactgagagcccaaatttaaaacactgataacagaacttacaaaataaaaatgtagcacactaacataattgttcacagctgaacaattcagtggatgaactgaagttggagatgacactagtgaaacccgcctcccatccaagtgatcctcagtagtctagaaggtagaatacaagaaaaacatttcaaagtagaggc

SEQ ID NO: 588861 - DNA, 564 bp, Homo sapiens
atgtataacaagcttaactaattccctggaccccaaaatgcccacaggaaccaaatgatttgatcaagacttccatgatactgacactgtgaaaacttaaggaaaccagggagcaggtagatttccattagggacaccttccaggtacttcaggtgcaaatgatcaacaggcctgcttctgtatctgagatcaggttacaggggagaaaaagctggttggaaatctaccaattgtgaattgcaaccacacactccatctattatgcttcatctattactatacytgagttaaagacagagggactaaccatctatctcatcatctaaaaatgtcagtcagaatggatagaacacatgtaaatgacaactgagagcccaaatttaaaacactgataacagaacttacaaaataaaaatgtagcacactaacataattgttcacagctgaacaattcagtggatgaactgaagttggagatgacactagtgaaacccgcctcccatccaagtgatcctcagtagtctagaaggtagaatacaagaaaaacatttcaaagtagaggc

SEQ ID NO: 588862 - DNA, 612 bp, Homo sapiens
atgcagtcaatcaaccatggattgaaatatttgaacaaaaaaaatacacggttgcatctgtaccagatatgtacagactctttaactcttgcccttattctctaaaaaattacagtataaccactatttacatagcatttaccttgttataggtagtataagtaggctaaagatgacttaaaacataaaggagaatgtgcacaggttatatgcaaatattaaaccatcttatataagggacttgagcatctgtgcatctcggtgtctgcagggagtcctcccgttccccaaagataccaggggatggcatataaatcccttacatgagcaaatttatcaactgctgcctggatgttgacacctgaggcaacttccgaagtcatgtgttgatgctaagccttcattattcttggtgtctctgatagagtgtttagacagagctcctctatcccaccacagcggcaagaaataaaatcagttgtgttaagccataggaatttctggtttcatctgcttcattttattttatctttttattataytttaagttctagggtacatgtgcacaatgtgcaggtttgttacataggtatacgtgtgccatgttggtgt

SEQ ID NO: 588863 - DNA, 478 bp, Homo sapiens
gttagaacattcatcttaaagtccctcataatattgacatttattcaagaagctggaatagtttacaaaagagcccaagtgtctcagagtgtctacatagggtgtctaatgaacaatttactctcctctcaatagcaattttaartctcttatgttaacattatatccctatatattaacatgtagtcaacgtgcagaagatactaaactatgtgtcaaaacaaatagtaatgaaatatggggaaaaggggagattaatcgtgagttcttatacctgtaagtgatgtgcttgtgctgccatttctgtcctgtcaatgcatatcgctttcgacgaatatgaaatttggagctacctcttgtctggtcaggtacaccgcatcggggcttcttcatccagctgcaaaaaaaaaaaaaaaaaaaaaaaagcagtattttccagttatttactaacaaccctaatcattaaattcaaaagaaa

SEQ ID NO: 588864 - DNA, 573 bp, Homo sapiens
tttttttttttttttgagtccgagttttgatcttgtcgcccaggctggagtgcaatggcacgatctcggcttaaccacaacctccacctcccgggttcaagcaattctcctgcctcagcctcctgagtagctgggattacaggcatgcgccaccacacctggctaattttgtatttttagtagagacagggtttcttcgtgttggtcaggcyggtctcaaactcccgagctcaggtgatctgcttgcctcggcctcccaaagtgctgggattacaggcatgagccaccgtgcccggcccaaagaacagatattttagggaggaatattagattcctgtgctaaaagacatttctgctgaatcccttatataagtcttgggcttttgcccacttcatatagttgtttgcttgtgttctaactatttgttcatttacccatctcatcctgatttattcatcatatagtatttttgagcttttacaacatgctaagatatataaaagaaagtatggattagaagatgaagaaaaaaagagccccttccttactgagctcatagcacacaggtaaga

SEQ ID NO: 588865 - DNA, 573 bp, Homo sapiens
tttttttttttttttgagtccgagttttgatcttgtcgcccaggctggagtgcaatggcacgatctcggcttaaccacaacctccacctcccgggttcaagcaattctcctgcctcagcctcctgagtagctgggattacaggcatgcgccaccacacctggctaattttgtatttttagtagagacagggtttcttcgtgttggtcaggctggtctcaaactcccgagctcaggtgatctgcttgcctcggcctcccaaagtgctgggattacaggcatgagccaccgtgcccggcccaaagaacagatattttagggaggaatattagattcctgtgctaaaagacatttctgctgaatcccttatataagtcttgggcttttgcccacttcatatagttgtttgcttgtgttctaactatttgttcatttacccatctcatcctgatttattcatcatatagtatttttgagcttttacaacatgctaagatatataaaagaaagtatggattagaagatgaagaaaraaagagccccttccttactgagctcatagcacacaggtaaga

SEQ ID NO: 588866 - DNA, 542 bp, Homo sapiens
caactattaagtaaactttggaacattcttactaggctattgtggagtcaatataattatacttaaaagcaacactttaatagtacaaaaatctttattaaaagcactacaggccgggcatgatggttcatgcctgtaacctcagcactttgggaagccaagatgagatgatcacttgagcccaggagttgaagaccaacctgggcaacatctatgacctcgtctctatgaaaataaaaaaaaaaatgttgggtgtggtagtacacacctgtagtaccagctactcatgagrcagaggtgggaagattgcttgagctcaggaggtcaaggctgcagtgaaacaaactatatggttacaatgatggaaaaatgcaaaggaagaagataaataatagggtcactaatatagaagtgatatgataaaactgttgttactttatttgatattttgtgaatatgctgagttttccagaatatacgtgtatatataactcttttcatattaatgtaactattttcctattaaaaataagaatgcagtt

SEQ ID NO: 588867 - DNA, 500 bp, Homo sapiens
tattgctattaaattaagattgatggtgaggacatagcatgaccagcctgacaagaattgaaatttgttattgtctgtttttctatttaacattctctatttccgtcttaatttttaatggattggttgcttcctcctatcacaatgataggaggacaaaatttgttttcaaataaaaccagaaaaggatagttgaatatttgatggaatatgagcattttattcaagactttcattcaagactcttcatttcatgatacamaaagccaatttgaactaccttaagcaacataaaaagtttattggaaattgctaatgtagttcagagattgttggatggagtgcaccaggaaagtatggggcagttgcagatatcttaaacgtgagaccttgatttggttctctgcttgcctgttggcatatgggaatgctagcaatttttgcacattgattttgtattctgagactttgctgaagttgcttatcagcttaagatgctt

SEQ ID NO: 588868 - DNA, 611 bp, Homo sapiens
tcatttgttttatcctcagtaagcatgacccctgctctccatacaataatgtcttttctcagcctctagtgttttaaattcagtaatttcattctcttaaattttataactagttgtcactttgcatccttttaacagttgttctttgaacacttcataaggctgaacatattgttatttcacttgatctatactgagtctactcatagcaagtcgggtttatatttaaccttaaggacctacatccattcaacaaacatgttgagacagtccttgctcttacagggctcagaatgtcttagcwtgttacctgtgtatacataatagtaaatacatatggacaatgcactttagaacctgtacaaggtagagtagagtagagaaaggagtaaccttccagcagttgggatcatttactagaggtcatacctatgctgatgtttgaagtatgtgcaaaaaatgtagcttctgtggaaacaaagctacaaacaaatgaaaagtcaaatctagtttacaattacttttgccttttgctggcatatgccattctcctagcaaatattcaacttttctagatagattaatgccctctaagggacctaccatttatg

SEQ ID NO: 588869 - DNA, 599 bp, Homo sapiens
tttgcaccattcttccataacttggattatgaaagcaaatgtaggaacttctctaaatttgactctaagattttaaaaaatggtttgttgcagagtatacaagaggaatctatayagaattatttttatataagagcacaatgtgtgactcatatcagtcattgccactcacagatttggattttattttatttatttatttatttatttctgagatggagtctcactctgtcgcccaggctggagtacagtggtgcgatcttggctcactgcaacctccgcctcccgggttcaagcgattctcctgccgcagcctcctgagtagctggaattacatgtatgtgccaacacgttcagctgcagatttggattttagaaaaggttgattctcaaagtttcagataaagtattttagtatgatcccacggacacaaatgctaaaatggaaaagacctcataattgagtcccagttagaaaacattggcttaaatgtgaagtgccaaaatgggcagccacaaaacaaacacatgagaacttggtagataacaggaaagttagtttacgcatgtaaaatttgtacttatcttatgcattatag

SEQ ID NO: 588870 - DNA, 599 bp, Homo sapiens
tttgcaccattcttccataacttggattatgaaagcaaatgtaggaacttctctaaatttgactctaagattttaaaaaatggtttgttgcagagtatacaagaggaatctatatagaattatttttatataagagcacaatgtgtgactcatatcagtcrttgccactcacagatttggattttattttatttatttatttatttatttctgagatggagtctcactctgtcgcccaggctggagtacagtggtgcgatcttggctcactgcaacctccgcctcccgggttcaagcgattctcctgccgcagcctcctgagtagctggaattacatgtatgtgccaacacgttcagctgcagatttggattttagaaaaggttgattctcaaagtttcagataaagtattttagtatgatcccacggacacaaatgctaaaatggaaaagacctcataattgagtcccagttagaaaacattggcttaaatgtgaagtgccaaaatgggcagccacaaaacaaacacatgagaacttggtagataacaggaaagttagtttacgcatgtaaaatttgtacttatcttatgcattatag

SEQ ID NO: 588871 - DNA, 599 bp, Homo sapiens
tttgcaccattcttccataacttggattatgaaagcaaatgtaggaacttctctaaatttgactctaagattttaaaaaatggtttgttgcagagtatacaagaggaatctatatagaattatttttatataagagcacaatgtgtgactcatatcagtcattgccactcacagatttggattttattttatttatttatttayttatttctgagatggagtctcactctgtcgcccaggctggagtacagtggtgcgatcttggctcactgcaacctccgcctcccgggttcaagcgattctcctgccgcagcctcctgagtagctggaattacatgtatgtgccaacacgttcagctgcagatttggattttagaaaaggttgattctcaaagtttcagataaagtattttagtatgatcccacggacacaaatgctaaaatggaaaagacctcataattgagtcccagttagaaaacattggcttaaatgtgaagtgccaaaatgggcagccacaaaacaaacacatgagaacttggtagataacaggaaagttagtttacgcatgtaaaatttgtacttatcttatgcattatag

SEQ ID NO: 588872 - DNA, 599 bp, Homo sapiens
tttgcaccattcttccataacttggattatgaaagcaaatgtaggaacttctctaaatttgactctaagattttaaaaaatggtttgttgcagagtatacaagaggaatctatatagaattatttttatataagagcacaatgtgtgactcatatcagtcattgccactcacagatttggattttattttatttatttatttatttatttctgagatggagtctcactctgtcgcccaggctggagtacagtggtgcgatcttggctcactgcaacctccgcctcccgggttcaagcgattctcctgccgcagcctcctgagtagctggaattacaygtatgtgccaacacgttcagctgcagatttggattttagaaaaggttgattctcaaagtttcagataaagtattttagtatgatcccacggacacaaatgctaaaatggaaaagacctcataattgagtcccagttagaaaacattggcttaaatgtgaagtgccaaaatgggcagccacaaaacaaacacatgagaacttggtagataacaggaaagttagtttacgcatgtaaaatttgtacttatcttatgcattatag

SEQ ID NO: 588873 - DNA, 607 bp, Homo sapiens
acattaaggagtaaataataataaaaagtcaccatagttaaatcaatggttaaccagacattacacttgagagggatagaagtatgattcatttagccttctactaccatctctgaaaaagctatgaggatcaaattgcagctttatcttcccattattttgtgtgaatctaagtaaagattaaaaagactaatagctaataatttacaaatttaaaaagaacatgacagatatacaaaatgaaactaagaatatatggaataaaatattacttattaattgatcaagaattgtggaataagcataaacagttatataatgcctttccttaacatcttttaagattaagataaattacctctgttcttgaaaagggtttgaataaygactttagttccaatatagcttagccatttttttcaggatccctttcatctttttcaggccttgccatatattacttaatattaaaatatcagaattggatctaataaactacatcatggggtggcctgttattaatattcatagttacagtaacaatcccagagaactctgcatacctacattataaataataccattgtgaatatttaaaaaacacata

SEQ ID NO: 588874 - DNA, 543 bp, Homo sapiens
acagcctccagatctacatctccacccaggtgtgctatcaagatgaagctcatctaagcttctgggagatgggagattctaattaagaaaaacacagatgtcttccagagagcagactggaaacaaaacgtgtatcatccttttctcyttctggatcgactatagctgaaactgtgctgccggcagctgtaatggttattttgaaaactaatgtttacccagacttgaaatataacatacaagtgcctttgtaaaccataagggtaattatggttacttaactattactaaaaattaggttatcaagttggttacttttgggatgctgtatttgacaaggaatgaatttttgatctctactaagcctgcactgtgtgtaagaccagtgatgcaaagaataattttagcacacttacttttcatctataagattagctctatatcattgggtctatgcattttcagaagaacttttgagaaactaaataagacaggtctgccctacctcaacagtaggtgttcctcatgcagtaacatttgata

SEQ ID NO: 588875 - DNA, 613 bp, Homo sapiens
ttaaggaggtagctatattattattttcaatgaatgtgytttgttttgttttttaaaaaatagttatgggaattagtttgtcaaatgctttttggcattcttcaatagaatcacatggtctttataatctattaacatagggtattatattactaaatttcttattttaaaacaacatgtgtttcacttggttccacatattattcttttcatatattgtttaagtcaagcttattcaagttttttacatggaaatttttgttggtaatactctatggctttcttttttatatatggcatgttcaacgtgatgtggtattgatatggacttttgatataagggcatttttttcattatctttcattactaaacatctcatgcataatactctggtctggattagtggacaacacattctgggtacaatgaggcatttattaaatgagcatttaataaacagtataaattctcctgttctttaacatagttacattgattccatttaactgtgggacttgcacgataagagataatttatacaaagccattctactcatattcttcattatttggctttcttttctttcttgttttccttttatattaacacaa

SEQ ID NO: 588876 - DNA, 509 bp, Homo sapiens
ctccctggcccatggtaggtatggggaagtgccagagaactcccactccctatggcagatgatgtataagcggtcttctcctcacagtgataatccagagagccacgtctgttgaaagtgtcttagatataagaaggcccaaaatataatttagggcagtaattttgccttactccctgtcaccgagattggtcaaagtgatggkcacatcacccaagcttacaagacattttcaaattggtattggagttggtcagaattgccagttaccctttccatggggatgggccagtatcagcagagaagcaacatgatgagataagaaaacaaagagggctgactctatttgttcctggttttagtattttacaaagtaagctctaatcctacccatcttggattggtaactttgagaaagatatacttatttgcaatccagaaagtcttaattagtacagaaggcgaacaaaatttttgaaaaaatgtaaaaattctaataaacatatata

SEQ ID NO: 588877 - DNA, 577 bp, Homo sapiens
tgtccttttcctcataccttctcattcattagaatgtgtcattaccaaatgatgtgtgtaatctttaagaaatttttagcatatctccatatatatatatatctcctttatgtaattatttaataattatttcttttttagcatacataattcatgtacaaatacaaaatttaaagtgtatgcagcagaagtatccctttcattactggctgtggttattctggaatgctctgcaattcagaagccaccacaaatttgttttaaattatcaggaaaacatttttttttatrtaattttaagttctgggatacatgtgcagaatgtgtaggtttgttacataggtatacatgtgccatggtggtttgcttcatccatcaacccgtcatctgcattaggtatttctcctaatgctatccctcccatagccctcaacctcccaagaggcccccgtgcgtgatgttcccctccctgtgtccatgtgttctcattgttcaactcccacttatgagtgagaacatgtggtgtttagttttctgttcctgtgttagtttgctgagaatgatggtttccagcttc

SEQ ID NO: 588878 - DNA, 558 bp, Homo sapiens
attctagcctgggcaacaagactgaaactccgtctcaaaaaaaaaaagaaaaaaaaaaagaaagttctttgaactaaagatagggatacagaagaacatccttaaattcttcactgctcaagacacagctagagaagccggaggaggaggaggaggttttcagaagcccgtccaaggtctaattagttttgcatttactctggtgctgtgggccaaaaaagagcattcattcatgtaaagacgtattaactcttgaaaagaaaaaaaactcagtcatcttttgcttagattatggcwacagcctccaaaacggtttcctgcctctactcttgccattttattaccatttttccacagagcagctagagtatttatttcaaatttaaatcattagatactattactccttctacttaaaattctccaacggctttccattttactgaatgccctatttaccatccttgcatgtcctttactgtgccactatcttcagcctcttttcttgccacgctcctaacttgctagtcttcccaaaatttatccagagccaaaatc

SEQ ID NO: 588879 - DNA, 614 bp, Homo sapiens
ggcctgaggaagccaaaattactgtattacaaaaatattcacaaagggctgactgatctgttataatactagtcaccacttacccccctccactgaacactggcttgtatccccacccatcacaacactagcaattctaaccaatggtatgaatgtcatacacattagatcaaacaattcaaaggcaaaccaaaagattgccaagcaaaatggcaaacatcgcaaaacttgtaggatttcataaggctaacagtaatgttgaaaaacgtgttggatcacacacacacacacacacacacacacacacacacacacacacacacacgcataagccaaataagctaacagaggtagacctactgaataataaataggaaatcagcaaggatgctgatgtgataggcatggcaaaaaatatatatctatatatgaataaaaaaggattttaaaaggcccttaagggccagtcacggtggctcatgcatgtaattccagcactttgggaggccaaggygggcaaatcacttgaggtcaggagttcgagaccagcccggccaacataatgcaacccagtctctactaaaaatacaaaaattagctaggcatggtggtgc

SEQ ID NO: 588880 - DNA, 526 bp, Homo sapiens
gaaaagtggaaagaggatggggaggagaggcagtttgtttgaagagccaggaattttgtgataaaggaaaacaaaaaaatatggcaggaaactgtgtatggttatgttaaagaaaagacttaaaagataggaaatactacattacagcatgattgtacaataacagtgagatattacccttaagggaaagcagaaataattttaggaacaaagcctttgataagctaagcagtaatgggacccagagcagaagtgaagaaraaatatcctttctgggaggaggaggaacacttcccacattgtggaagaaggagagtttggatgcagatatactaaaatggcaggttttgtggtgggaagatgagtgagttcatttccaatgacttctattttctcaatgaagtatgagtctgggtcatctgtaggaggaggatgtgtgggagatctgaggaaaaaggagttgatatggtacagtcatctcatagaaatgaagaaactttataggattcctgaggagtgctgagtg

SEQ ID NO: 588881 - DNA, 526 bp, Homo sapiens
gaaaagtggaaagaggatggggaggagaggcagtttgtttgaagagccaggaattttgtgataaaggaaaacaaaaaaatatggcaggaaactgtgtatggttatgttaaagaaaagacttaaaagataggaaatactacattacagcatgattgtacaataacagtgagatattacccttaagggaaagcagaaataattttaggaacaaagcctttgataagctaagcagtaatgggacccagagcagaagtgaagaagaaatatcctttctgggaggaggaggaacacttcccacattgtggaagaaggagagtttggatgcasatatactaaaatggcaggttttgtggtgggaagatgagtgagttcatttccaatgacttctattttctcaatgaagtatgagtctgggtcatctgtaggaggaggatgtgtgggagatctgaggaaaaaggagttgatatggtacagtcatctcatagaaatgaagaaactttataggattcctgaggagtgctgagtg

SEQ ID NO: 588882 - DNA, 526 bp, Homo sapiens
gaaaagtggaaagaggatggggaggagaggcagtttgtttgaagagccaggaattttgtgataaaggaaaacaaaaaaatatggcaggaaactgtgtatggttatgttaaagaaaagacttaaaagataggaaatactacattacagcatgattgtacaataacagtgagatattacccttaagggaaagcagaaataattttaggaacaaagcctttgataagctaagcagtaatgggacccagagcagaagtgaagaagaaatatcctttctgggaggaggaggaacacttcccacattgtggaagaaggagagtttggatgcagatatactaaaatggcaggttttgtggtgggaaratgagtgagttcatttccaatgacttctattttctcaatgaagtatgagtctgggtcatctgtaggaggaggatgtgtgggagatctgaggaaaaaggagttgatatggtacagtcatctcatagaaatgaagaaactttataggattcctgaggagtgctgagtg

SEQ ID NO: 588883 - DNA, 623 bp, Homo sapiens
cttgttttgagagttcagaatacctgcaaaacatggcttggccatattcctggaaaggatgtcttcattcagcagacatttaccgagtgccctcagcaaattgtgattctgggtagtatgactacacgtctagcctaaggggataatgggatggttttgcattctgggatgattattaacacaaatagcatattatgataggaagagcatggagctgagacatgaaaattctcttctgagacctgactccaatcttgtacatgaccattgacaattcacttatgcctgcactttgcccaacacatgagggatgtgcacttggatgacctcagagattcctcctaaatctaatgttctatagtcttatgactcaaagaaaaataaattgcctctaatttttaaaagctattgctacttccaggggacccagacatttggcctagttctctgatttgatgttggccctggaatgacattctgagtgggaagacaaagagtgttcctgttagcaaaataacaagaaagtttcaaaaacaaatcctcaacacccyaaaccttgtctccggtgtaactttttgcttttgctcttctacacccaccttgtacttggtgactcacattcc

SEQ ID NO: 588884 - DNA, 554 bp, Homo sapiens
aaactcacccacagtcactcagttatagagagttggggcctggattggaaattacaactatccaacgtgaacgtcttcccctcagccacaaacgtgcraatcctcacccagtaacacacggtgtgcagggtggccaccctcccaggccccctagctccctgacagcatatatggggctgcaatggaaggaagctccactctggttcagagagacatgagttcaagtttggacttgaggggcaacgtgtaaaatacatctttccatcactcattccatacgacttcctggtctgtgactcactttgaaaagagttacctggaatcaagccttatcacaaggaatatctttgcaaaataagttccacacactttcaacagatgcttcatttgtaaaggaacagaggtatattttgttcagagaattatatatttttgagagtgtcgtgccctccagccacgctcccctggggcctttggttgaagagccaggtttcttccaccttgcaatgagggtggacgctccccataggaacttcggggtgagagggtgctgg

SEQ ID NO: 588885 - DNA, 554 bp, Homo sapiens
aaactcacccacagtcactcagttatagagagttggggcctggattggaaattacaactatccaacgtgaacgtcttcccctcagccacaaacgtgcaaatcctcacccagtaacacacggtgtgcagggtggccaccctcccaggccccctagctccctgacagcatatayggggctgcaatggaaggaagctccactctggttcagagagacatgagttcaagtttggacttgaggggcaacgtgtaaaatacatctttccatcactcattccatacgacttcctggtctgtgactcactttgaaaagagttacctggaatcaagccttatcacaaggaatatctttgcaaaataagttccacacactttcaacagatgcttcatttgtaaaggaacagaggtatattttgttcagagaattatatatttttgagagtgtcgtgccctccagccacgctcccctggggcctttggttgaagagccaggtttcttccaccttgcaatgagggtggacgctccccataggaacttcggggtgagagggtgctgg

SEQ ID NO: 588886 - DNA, 531 bp, Homo sapiens
gagcacagccctgtgacacactgactttagcccagtgagacctgtgtcagattcctgacctccagaacagtcagagaatcaacgcctgctgttccaagctgctaaacttgtggtcatatgttatggcagccataggagctgaatgcagtcttaaaaaamggagaatggctgggtgcggtggctcatgctggtaatcccagcactttgggaggcggacgcggaagatcacttgagctcaggagttcaaggccagcctgggcaatacagttagatctcgtctcactatacaaggctacatttacaagaaaatgaaactagccaggcatagtggtgtgccctatactctcagctacttgggaggctgatatggaagaatcccttgagcccaggagttggaggctgcggtgactacgattgcaccagtgcactccagcttgggtgacagagcgagaccctgtctccaaaaaaaaaaaaaaaagagcaggggtatggcaatttctttcaactttagatctccttcaacaaactttg

SEQ ID NO: 588887 - DNA, 466 bp, Homo sapiens
ggctccttggtttctttggatctctgtaattggagctctctctctctctctctctctccctctctctctctgtctcctctctctctctccccccgccccttctctgtctctgcctacccccactaattcgtcttcccactcccaggggcctgtcscatggacatttccagggcagtcctctatgaaggccacagctgatccactatgggacctggctctcctggctcctacagctcagtcctccatgttccccaggagacaggcgtgggccctcagggcatctgcaaggaggtggagagcaggaagccaatggccttgcccacacatcctcctctgtcctcccccgggggtggggagcctcctgacttggagggtgtgcttcttatccagggccactcccctgccagcctggcctgggctccctggtgcaacctacctcagaatgtgcagggggactggctctgcc

SEQ ID NO: 588888 - DNA, 466 bp, Homo sapiens
ggctccttggtttctttggatctctgtaattggagctctctctctctctctctctctccctctctctctctgtctcctctctctctctccccccgccccttctctgtctctgcctacccccactaattcgtcttcccactcccaggggcctgtcccatggacatttccagggcagtcctctatgaaggccacagctgatccactmtgggacctggctctcctggctcctacagctcagtcctccatgttccccaggagacaggcgtgggccctcagggcatctgcaaggaggtggagagcaggaagccaatggccttgcccacacatcctcctctgtcctcccccgggggtggggagcctcctgacttggagggtgtgcttcttatccagggccactcccctgccagcctggcctgggctccctggtgcaacctacctcagaatgtgcagggggactggctctgcc

SEQ ID NO: 588889 - DNA, 466 bp, Homo sapiens
ggctccttggtttctttggatctctgtaattggagctctctctctctctctctctctccctctctctctctgtctcctctctctctctccccccgccccttctctgtctctgcctacccccactaattcgtcttcccactcccaggggcctgtcccatggacatttccagggcagtcctctatgaaggccacagctgatccactatgggacctggctctcctggctcctacagctcagtcctccatgttccccaggagacaggcgtgggccctcagggcatctgcaaggaggtggagagcaggaagccaatggccttkcccacacatcctcctctgtcctcccccgggggtggggagcctcctgacttggagggtgtgcttcttatccagggccactcccctgccagcctggcctgggctccctggtgcaacctacctcagaatgtgcagggggactggctctgcc

SEQ ID NO: 588890 - DNA, 259 bp, Homo sapiens
cagcatctgctcctggtgaggacctcaggaagcttccaatcatggcagaaggtgaagggggatcaggtgcatcacatgacaagaggggagcaagagagagagaggaggaggaagtgccccactcttttaaataaccagattgcatgtgaactcacagtgagaactcacttatcactaargggatggtactaaatcattcatgagggatctgttcccatgatccagtcatctcccaccaggtcccacctaggacaatgac

SEQ ID NO: 588891 - DNA, 579 bp, Homo sapiens
tttacaaagtatttacagtgagctgagaggtagtattagtgaggtgagatccactagttaaaaccccagaccgtgcagccatgccacctatgtataaaacccatcctttggccaggggcratggttcacacctttaattccagcactttaggaggccgaggcaggacgattcgcttgagcctaggagttcgagaccagccttagcaacatagcgagaccctatctctataaaaaattaaaaagttagccaggtgtggttgtgtgcacctgtggtctcagctacttgtgctgagatgggaggagcccatcagcatcagatgctgatgctgaggtgggaggagcctgagagggtccaggctgcaatgagccatgatagcatcactgtactccagcttgggtgacagagtgagatcctgcctcaaaataaataaataaataaataaatagacaaataaattaaacccatccttgctagttactagttatttcatatttgggaaatacatgagtaaatcacttatattgtctctgcagcctcatcttcaaaaattataataataatcatacctaaagaacagg

SEQ ID NO: 588892 - DNA, 579 bp, Homo sapiens
tttacaaagtatttacagtgagctgagaggtagtattagtgaggtgagatccactagttaaaaccccagaccgtgcagccatgccacctatgtataaaacccatcctttggccaggggcaatggttcacacctttaattccagcactttaggaggccgaggcaggacgattcgcttgagcctaggagttcgagaccagccttagcaacatagcgagaccctatctctataaaaaattaaaaagttagccaggtgtggttgtgtgcacctgtggtctcagctacttgtgctgagatgggaggagcccatcagcatcagatgctgatgctgaggtgggaggagcctgagagggtccaggctgcaatragccatgatagcatcactgtactccagcttgggtgacagagtgagatcctgcctcaaaataaataaataaataaataaatagacaaataaattaaacccatccttgctagttactagttatttcatatttgggaaatacatgagtaaatcacttatattgtctctgcagcctcatcttcaaaaattataataataatcatacctaaagaacagg

SEQ ID NO: 588893 - DNA, 579 bp, Homo sapiens
tttacaaagtatttacagtgagctgagaggtagtattagtgaggtgagatccactagttaaaaccccagaccgtgcagccatgccacctatgtataaaacccatcctttggccaggggcaatggttcacacctttaattccagcactttaggaggccgaggcaggacgattcgcttgagcctaggagttcgagaccagccttagcaacatagcgagaccctatctctataaaaaattaaaaagttagccaggtgtggttgtgtgcacctgtggtctcagctacttgtgctgagatgggaggagcccatcagcatcagatgctgatgctgaggtgggaggagcctgagagggtccaggctgcaatgagccatgatagcatcactgtactccagcttggrtgacagagtgagatcctgcctcaaaataaataaataaataaataaatagacaaataaattaaacccatccttgctagttactagttatttcatatttgggaaatacatgagtaaatcacttatattgtctctgcagcctcatcttcaaaaattataataataatcatacctaaagaacagg

SEQ ID NO: 588894 - DNA, 598 bp, Homo sapiens
aagcaatggtttgaaaaggactccctatttaataaatggtgctggggtaagtggctagccatatgcaaaagattgaaatcagaccccttctttatgccatatacaaaaactcaggataaattaaagtaaatcccaaatactaygctggacataaaattaggtaaagatttcatgatgaagatgctaaaagcaattgcaatcaaaacaaaaattgacaaatgggatctaattaaactaaaaagtttctgcacagcagaagaaactatcaccagagtaaacagacaaccaacagaatgggagaaaatttttgcaagctttgcatctgacagaattctaatatccagcatgatatgatttggctgtgtccccatccaaatctcatctttaattcccacgtgttatgggaggagcccagtaggaggtaattgaatcatgggggcaggtctttcccatgctgttctcttagtagtgagtaagtctcacgagatctgatggttatgggaacaggaagtttccctgtgcgggctctcttctcgtttctgccaccatgtgaggcgtgcctttcaccttcctccatgattgtgaggcctccccagcc

SEQ ID NO: 588895 - DNA, 408 bp, Homo sapiens
agttccatgaattcttaccctgtcttatgactggatttcctggctcgtggatgagttgggtaaragcagcaggagagactgactgtagttggggggattttgggggctgagagccctgtgatgaggccagtgcatgaaccggatgcagggcaagtttacaaacctaggcccacctcagtggtcaaaccatcatgagagatgtctcgagagatgtcctgaaagcctcttagtccaacccccagccagaacaggaacccttttgacagcaaccttgatgggggcccaccacctcccagggaagtccagtccagtcttgccaagctccaaggggagcaaaagctactggggccttccctgaccagagctcagctggcaggccgggaggctgggaggctgggaggctgggag

SEQ ID NO: 588896 - DNA, 624 bp, Homo sapiens
gccctggaggtaacacaattatttcatgtgtgaatttatcgtgtctcccagcaaggttgtaagctttggcaaaggaaaaaatgacatatttttttcttcccttatagtacctaaaatagtggaataatacagtaaatacagtataacatagtgttgactatggggtgtaacacaaatgtagtaaatgctcaatacacattctacttgtagttttactactgaccactaygtcttgtcttcccagatcactttatcatgcagaagaactgaatcacttaaagtaagactaagaataaaatgtgcagtaataaagtgtacccacgaaaaggaattattgctagagataatagaggtcaacaacataattatgaattgtgttagttttcatttggttctgtaaccaattaccacatacttagtggtttgaaataacacaaattatcttgctttctataagtcagaagtctggaaaatgggtcttatagggctaaaaccagagtgtcatcagaaccgagttccttctaaagactctgagagaattccttctttgtcttttccagctttagaggctaccttcattttgtgtctggtggccactccagcaatgccacaactcttatctct

SEQ ID NO: 588897 - DNA, 624 bp, Homo sapiens
gccctggaggtaacacaattatttcatgtgtgaatttatcgtgtctcccagcaaggttgtaagctttggcaaaggaaaaaatgacatatttttttcttcccttatagtacctaaaatagtggaataatacagtaaatacagtataacatagtgttgactatggggtgtaacacaaatgtagtaaatgctcaatacacattctacttgtagttttactactgaccactatgtcttgtcttcccagatcactttatcatgcrgaagaactgaatcacttaaagtaagactaagaataaaatgtgcagtaataaagtgtacccacgaaaaggaattattgctagagataatagaggtcaacaacataattatgaattgtgttagttttcatttggttctgtaaccaattaccacatacttagtggtttgaaataacacaaattatcttgctttctataagtcagaagtctggaaaatgggtcttatagggctaaaaccagagtgtcatcagaaccgagttccttctaaagactctgagagaattccttctttgtcttttccagctttagaggctaccttcattttgtgtctggtggccactccagcaatgccacaactcttatctct

SEQ ID NO: 588898 - DNA, 649 bp, Homo sapiens
atgatttattaatactaatatactggtataatgtgctaaaatagtatactacatttttggtaatttgtccaggagtaatagaaacaaatccaaatattaaatatcaaagcatattataattctatgataattaactctgtaatttaaaaagtctaatataggaatataccaaaaaagaaagttttaaaaatatactttatttcctaatatatcaaaatggagccttcacatatgaaattagtaaaatatttttgacctaataatttcatttttagcttttctcttaagaagtcatattgtttgcaaaaatgttatgtaccaaggagtttataacatgcagttgtrgtcaggaaaaattttaaattaaaaatgtgcaataaatatatgtaaaaacagaataatataggcatctaaatagccctatataaaaagacaaacataacattacaaattagcattaaccaaaaatatgctctgaagtacatcccttgattaaatttacttaagtttcttttggaaaaaaataaaaataattgtatttgctagtaagagaaggtagaacattatttgcccatttgttttcagaagtaaaacaagacatttatgttttcagaagtaaaacaaatacaatattttctaagtaataagg

SEQ ID NO: 588899 - DNA, 176 bp, Homo sapiens
cctaacctcagcctctatctatctatctatctatctatctatctatctatctacctatctatcatctatcatctatctacctagacagagatatctatagatatctatggtaaattttgaarcatgttccaaatacactataataaattgtatgttttgctgtttttgagtgcagt

SEQ ID NO: 588900 - DNA, 579 bp, Homo sapiens
attctcctgcctcggcctcccaagcagctgggattacaggcccctgccaccacgctcagctaatttttgtatttttagtagagacggggtttcaccatgttggccaggctgtctcgaactcctgacctcatgatccacccgtctcggcctctcaaagtgctgggatcacaggcatgagccactgtgcccggccaagacttttatattagatgatggccatggatgctactgagttgcaaaactgaaaaaagctatttaggaagattgaataattactaaaaggcctacatattcatgtgctgcatcacaacattttgttcaacaatggatcatgttacgatggcrgtctcataagattataatgtatttttcatgtactttttctatatttagatacagttagatacacaaatactattgtgttatagttgcctacagtaattggtaaaatgtacagatttgtagcctaggagcaataggctataccatatagcctctgtgctataagaacatccaattttgtgtaagtccattacatcctatgattatctcacaacaatgaaaaggtgtatacaatag

SEQ ID NO: 588901 - DNA, 516 bp, Homo sapiens
ggggtacaattgttaaaggaatagagtttttgtatattattaaagttaaactggtataacttcaaattagtgtgttattgctttagtatgttaaatataatccccaagtgctatggtagaacaatttgttccaccttccccaaaattcagaagttgaaaaactawccccaaaggtaatttactgtattaggaggtggcctttgggagataattaggtcatgaaaatggagccctgatgaatgggaatagtgacataataaaagtggcctgagacagctctttcacctcttccattctgtgaagatacagcaaaaatatgatcctcaagataaaagttaattcctgtcctaaaactttatttgataacttgcaagacatcataatggcattaaatcattattaaaagcctagcaacatagacaatgagaaggcagttctgggttacaaaatattgactaacaatgttcctgaacttagaaaaaaacgaacaaacaaacaaacaaaacactagagtta

SEQ ID NO: 588902 - DNA, 516 bp, Homo sapiens
ggggtacaattgttaaaggaatagagtttttgtatattattaaagttaaactggtataacttcaaattagtgtgttattgctttagtatgttaaatataatccccaagtgctatggtagaacaatttgttccaccttccccaaaattcagaagttgaaaaactatccccaaaggtaatttactgtattaggaggtggcctttgggagataattaggtcatgaaaatggagccctgatgaatgggaatagtgacataataaaagtggcctgagacagctctttcacctcttccattstgtgaagatacagcaaaaatatgatcctcaagataaaagttaattcctgtcctaaaactttatttgataacttgcaagacatcataatggcattaaatcattattaaaagcctagcaacatagacaatgagaaggcagttctgggttacaaaatattgactaacaatgttcctgaacttagaaaaaaacgaacaaacaaacaaacaaaacactagagtta

SEQ ID NO: 588903 - DNA, 656 bp, Homo sapiens
caatccctgttgttggtggtggcagtcatagtagctttttgttttatgttttgattgggtagtactagggaccagaacccttagcaatggcattagggctgttgtgcaagttgtgagtatcacgcagaattcaagtggctttttggacagaaggcacggaagagagcttctgacaacaaatttataataaggatgttgataagcacttgtaagatacaatttgggactccagcaggctagttgggagatgtaacggcgtaagaggcagcaatgcaatggcatmataggtagcaagttttggtgaaatttgctaatatgaagagatattcagtttaaacatttttaattttaatttttcacattctaacttaaaatctatttcattcaagcagtatatttcaaaagaccttgatgactttttatcacaaccttttccccattgaatatcatagaatttgtttcatacgtttctcagattgtaatttctgtctacatgactagcccacacaatttgggggatgcagtttatactatttccctattgttgctatagtaagttaccaataaactgatttaaaacaacacaaatatattatcttaagttctatagatcagatgtatcattcggttaaaaccaaggtgtcagtaggactgtc

SEQ ID NO: 588904 - DNA, 530 bp, Homo sapiens
tttatctttcatgactcccgggtgaatgcaggcatacatgaaatgtagggtaagctctgatacctaagtagagagtatgtatgatgaaaactaaaggagaaatgcctgtttaaaatgttagtttgtcctatctgataaaatctcaactattaagtgaagtcattgtcttcaacacttaacatttataatataactcagctcaaaaacttagagagggaccacacgatgcctggttctgtgctatccaagccagattcaataggtcggtgtaagtaataatctaccagagaaagcaaaggtagcctaaagtggtctagggtaaaaattctggaaaaatacagaaaactatggaactgtatgaacaggttgaggataaatatgactcagttagtgaagatattcttttttgaggtatatcagttgtcagttacttgggtattactaatccccgcagtgtggggcatctacatctctgatatttattgaaatttgtttaaaagcrtgataccttatatagtagaaaactaaaa

SEQ ID NO: 588905 - DNA, 508 bp, Homo sapiens
ttgtcagttacttgggtattactaatccccgcagtgtggggcatctacatctctgatatttattgaaatttgtttaaaagcgtgataccttatatagtagaaaactaaaaattattttttctaattttatttatttttttaacttttattttaggttcggggtataagtgcatgtttgttatatagataaaattgtgtcacaggagtttgttgtacagattatttcatcacccaggtactaagccaagtacccartagttatcttatctgctcctctccctcttcccaacctccaccctaaagtaggccccagtgtctgttgttctcttacttgtgtccatgagttatcatcatttagctcctgcttataagtgagaacatgtggaatttggttttctgttcctgtattagtttgctaaagacaatggcctccagctccatctgtgttgctgcaaaatacataatctcggttctttttatggctgcgtagtatttcatgatgtgtatg

SEQ ID NO: 588906 - DNA, 508 bp, Homo sapiens
ttgtcagttacttgggtattactaatccccgcagtgtggggcatctacatctctgatatttattgaaatttgtttaaaagcgtgataccttatatagtagaaaactaaaaattattttttctaattttatttatttttttaacttttattttaggttcggggtataagtgcatgtttgttatatagataaaattgtgtcacaggagtttgttgtacagattatttcatcacccaggtactaagccaagtacccagtagttatcttatctgctcctctccctcttcccaacctccaccctaaagtaggccccagtgtctgttgttctcttacttgtgtccatgagttatcatcatttagctcctgcttayaagtgagaacatgtggaatttggttttctgttcctgtattagtttgctaaagacaatggcctccagctccatctgtgttgctgcaaaatacataatctcggttctttttatggctgcgtagtatttcatgatgtgtatg

SEQ ID NO: 588907 - DNA, 633 bp, Homo sapiens
aatatgactcagttagtgaagatattcttttttgaggtatatcagttgtcagttacttgggtattactaatccccgcagtgtggggcatctacatctctgatatttattgaaatttgtttaaaagcgtgataccttatatagtagaaaactaaaaattattttttctaattttatttatttttttaacttttattttaggttcggggtataagtgcatgtttgttatatagataaaattgtgtcacaggagtttgttgtacagattatttcatcacccaggtactaagccaagtacccagtagttatcttatctgctcctctccctcttcccaacctccaccctaaagtaggccccagtgtctgttgttctcttacttgtgtccatgagttatcatcatttagctcctgcttataagtgagaacatgtggaatttggttttctgttcctgtattagtttgctaaagacaatggcctccagctccatctgtgytgctgcaaaatacataatctcggttctttttatggctgcgtagtatttcatgatgtgtatgtaccacattttatttatccaatctgtcattgatggacatttaggttgattccacatgtttgctattgtgaacagtgctgc

SEQ ID NO: 588908 - DNA, 569 bp, Homo sapiens
tagtatagaaacaaatagaattgtatctcttatttttcccatatctatgatttgacaaatcatttaactacatattattttgtaggagtttctttcataatgagtaggtaagttcttatagctaagcacttatgattatgaaagatgagctgatgctttcaatcaatcattctaatatctctctgatctcacagttatagatgccaaggtgcagccacaaacattagaaggtccctgcctttgaaaggctttatgtgctaaccctagtcttatctgaggactaagacactggtccgtagaggtctagatrtatctctttagcattataggtttatagtcaatctaaagaagtaaagtttcagaaggtgtcactttaacagaacttttccaaagcccttgaggaggccttaaaaatgtgtttacttgttcataatattttagcgctttattcaggaatgattgacatacaatgaattgtgcatatttatgaattatttatttattttgagacaagatctttctctgtcacccaggctggagtgcagtgatgcgatcatggctcactacag

SEQ ID NO: 588909 - DNA, 578 bp, Homo sapiens
tcagctattcaaagaacatggctccaaggaggtttcccagctctatgccttggcacacttctgggtgcttggtggctgcccactggattctccctcagttctggtgcttctgcctgccatcagataatctgtaggttggcctgccagatctggtcctgcccatcttgcagcctacatcccctggaatgagtaggaagttcagacctctgtgcactctacatatcaggccattgcctgagacaacaaagagcttctcctagtaaataaggatcaagtatatacccaaccacactggccacctcttacccataagtggcatatactggcttttagatcaaactgcacagcccaatataaaacctgacaatagacattcataagtctatagaagcaaagccaaaggaccctacctgacattatttagagtcacattctcctagggaggaagggaaagggaaaattaaagaaatatcaaamcagtaatataatagaaaaagaaaaaaaaaagaaaagctactattcacatgaaaatagttttccaacttagaagtgcgagcatctccggatgttagaaaacc

SEQ ID NO: 588910 - DNA, 612 bp, Homo sapiens
caaacatcaacaacactaaaaaaggacaaagaataacattacataatgataaaatattcaatccaaaaagaatgcttaattatcctaactccatacacacccaatgttagagtactcagattcataaaacaaccacttccgaacctgaaaaaaaaatcttagacacacacactgtaatagtgggggacttcaacaacctgttgtcagcattagacagatcactgaggcagaaaactaacaaagaaaatatggacttaagtttgatgyttgaacaaatgtacctaatagacatctacagagtactctgtccatcaatcccagaatacacatttttctcaactgcacaaagaatatactccaggactaaccatatgcttagccaaaaagtgagtctcagaatatttaaaaatattaaaattgttacaacattctcagacttcagtggaataaacatataaatcagtacctcaaattaacgatctaatattatatctagaggaagtaggaaaaaggagcaaactaacctcaaacctagaaaataaagaaataactaaagtcagagcagaacctaatgaaattgagatatagaaattcatacaaagaatcaatgaa

SEQ ID NO: 588911 - DNA, 595 bp, Homo sapiens
aatagatgtgataaaagcttttgataatatccaaaatttctttatgatataaaaacttcaacaaattaggcatagaaagaacggacataaaataataagactcatctctgacaaacccacagccaacattatacccaatggcaaaagctggaagcattcccattgagaactgaaacaagataagkatgcccactctccccactcattttcaacatagtactagaagggatggccagaacattcaggcaagagaaagaaataaaagacatccaaataggaaaagaaaacgtcaaactatctctcaatatgaatgatattaaatttcctaaatttcatatcatttcctgaaattcccaacagaatctaacaaaaagctcctggaaattataaaggattttggtaaaatttcaggatacaaaatcggtgtacaaaaattagtaccatttctatgcacaaatactattcaatctgagagccaaatcaagaattcaattccatttacaataaccacgaacaaaaaataaattatcgaggaatacatctaactcagaatgtgaaatatttctacaaggagaactacaaaacatggctgaaa

SEQ ID NO: 588912 - DNA, 595 bp, Homo sapiens
aatagatgtgataaaagcttttgataatatccaaaatttctttatgatataaaaacttcaacaaattaggcatagaaagaacggacataaaataataagactcatctctgacaaacccacagccaacattatacccaatggcaaaagctggaagcattcccattgagaactgaaacaagataaggatgcccactctccccactcattttcaacatagtactagaagggatggccagaacattcaggcaagagaaagaaataaaagacayccaaataggaaaagaaaacgtcaaactatctctcaatatgaatgatattaaatttcctaaatttcatatcatttcctgaaattcccaacagaatctaacaaaaagctcctggaaattataaaggattttggtaaaatttcaggatacaaaatcggtgtacaaaaattagtaccatttctatgcacaaatactattcaatctgagagccaaatcaagaattcaattccatttacaataaccacgaacaaaaaataaattatcgaggaatacatctaactcagaatgtgaaatatttctacaaggagaactacaaaacatggctgaaa

SEQ ID NO: 588913 - DNA, 439 bp, Homo sapiens
caacaaaggtcaaattcctaatgtccgtaatgaacttagtcaacaagcaataagcaaatagcccatttaaaagtgggcaaaagatgtgaacggaatctctcaaaagaagacatttatgcagccaacacacatgaaaaaaattaaagatcattaatcatcagaacaatggaaatcaaaacctcaatgagataccatctcacaccagtcagaatggctattaaaaagtcagaaaacagtagatcttgccaaggctatggagaaaagagaaggctaatacactattaaggagaagataaatcagttcagccactttgcaaagcagttcagagacttctccaagatgttaaaacagaactactgggtaaatatccgaaaggaaatacatcatctagcaaaaagacmcatgcacttgtggcactatgctatgtgttcatcacag

SEQ ID NO: 588914 - DNA, 524 bp, Homo sapiens
caggtgctcatcaacagtagattgtacaaagaattggaagccattatcctaactgaattaatgctggaactgacagtcacatactgcacattatcacttataagtgggagctaaacactgggtactaatggacataaagatggcaacaatagacaccgggaactactagacgggcgcaggctgggaggtagccggctaaatgttgaaaacctaggtattgaatacaacgttcactacctaggtgacaggatcattcatatcccaaacctcagcattacacaatatacccatgtaacaaactggcagatgtagcccctgcatttaaaataaaagttgaaatgataaaaartacaaaaaaatcaaaatcagagtgtactttggatttatcccagtttgaattcttatactacctcttataagtgatctcattcaatatacttcccacctttcagagtctgttttcttatctgaaaatgaaaataactgacttatctcatttcttatgactattaaatcatatacag

SEQ ID NO: 588915 - DNA, 592 bp, Homo sapiens
aaagttaaaatattcaagaagtaacattttcttattacattggatggggctacagcccttaacaagtgatatgaaccttttttttgtgaaagtgtactgtactaggaaactaaagattacttagctattagtaaatgattgaaaatatattttgagctttcaataacaaggtcatatggacacacatttcaccaaaaggtcaaacttgtaaatgtttccagactgaatattctgtgactatgtatctaaaaactgtaaactttccacagtgtttattcagctaaagcaaaatagactcttaaggaattaggctgttaycattctgctagatttctgagctcgtctactggtgtctgccctgtgcatatgccctttgctgaaagacgctagtaagaatttttttttccatagtgtttgtatgaatacacacatccataattcatcaaaacagccatttggaaaatgaataaaacatcccaaccacgcttctgaatcacagagtttcaggatggcttattaaaataacagttacttctttcaaacaggtgtggatggcagtcctagtataggaattatttgggaaataacttcc

SEQ ID NO: 588916 - DNA, 603 bp, Homo sapiens
tggagtgtggtgaggggactggcggcaagaaagaccctttctgcagaggtgtctactctcaggtaatggcagctctctaaatagagaagtgattgagaaccagtagggagcaatactcacagtatctggagggggaggagggggtgggcatttacagtcccgacaggagatctaggaggaagcactaattttgtktaccacggagcactctctccacttgaatgtcacattaaatatattttattcaccacagaatctggattctagtttgtcatactttctaaaaaaaattaatgagaggagtgtgagtggtatgaactaccaggtcctgctgtgcagttgcttccaaggctctggctattgcttatcttctccttcctcccctacccactctcaaccccttttccccactcccttggctagaacttctagtttccctggcttgcctggtgtagtcacccgggtgctcatctctgaagtgtcaaggacccccattatcatacacgttacattatgttgctacattcaccaattttcacttaaaactgatcatggggataaaaagaggtgtctctgttgataatggtgggaaacatattcctc

SEQ ID NO: 588917 - DNA, 534 bp, Homo sapiens
tcctcttcctttttacctctatctcaaatgcagttcctccaaatgtttcatgaaagcatgctttcctggtagacattctttttgcagccttctcctgagtgaatgcccttaccccaatcctcatctttgccgagcagtggttctttctcaaggacataaaatttgctataaggctctccacagagagtggggtttgaatggggggagaggtcttaattgccattctctagatagcacttctgtgatttttaatttaaaatataaaaagcagagctggagaaagacctgttcaagtcttttgcccatttttaaataggattactttggtttttgctattgagttgtgtgagttccttatatgttgtgaatattaaattctaatctgatayacagtttgaaatattttctaccacttcataggttgccatttcattttaacttttcctttcctgtgcagaagccttttatttttatgcagtcccacttgtcctttttagcttttgttgcctgttaagacacacaaatgatcaacag

SEQ ID NO: 588918 - DNA, 543 bp, Homo sapiens
tcactgttagcgtggtggagttccctatgtaggtaacctacccattctctcaagctgtctgtaatattttttctttagcattgactttagagaatttgatgactatgtgtcttgggattgtcaatcttttatcatatttctcagggattctctgaatttctggaatgtgagagtctacctctcatgaggttagggaaatttctgtggaccatatcttcagatacattttacaagttatttggtctctctccttctctctcagggatgccaatgagttgtatgtttggtctctttatataaycccatatttccaagacattttgttcacttacaaatttttttctctttatttttgtctgattgagttgattcaaagggtcttcaagatctgagattgtttcctcagcttggtccatgctggtgttaataattccagttgtattatgcaatttttgttgtgagtttttcagctctatcagatcagttttgttctttcctaaaaacgctgttttgtctttcatgtctggaactgtgttattaaat

SEQ ID NO: 588919 - DNA, 543 bp, Homo sapiens
tcactgttagcgtggtggagttccctatgtaggtaacctacccattctctcaagctgtctgtaatattttttctttagcattgactttagagaatttgatgactatgtgtcttgggattgtcaatcttttatcatatttctcagggattctctgaatttctggaatgtgagagtctacctctcatgaggttagggaaatttctgtggaccatatcttcagatacattttacaagttatttggtctctctccttctctctcagggatgccaatgagttgtatgtttggtctctttatataatcccatatttccaagacattttgttcayttacaaatttttttctctttatttttgtctgattgagttgattcaaagggtcttcaagatctgagattgtttcctcagcttggtccatgctggtgttaataattccagttgtattatgcaatttttgttgtgagtttttcagctctatcagatcagttttgttctttcctaaaaacgctgttttgtctttcatgtctggaactgtgttattaaat

SEQ ID NO: 588920 - DNA, 578 bp, Homo sapiens
attttaccatcaagaataagataatcaaaataataatcagttttatattagacttatgaagattcttgcacctttgaaattagcagctatctcactagtttatttctcctctctcatattttattayagacatacaagaagacaaccaacaccttcaacagtctgcctgagcatctctttaggtagaccacttaggttaataggtacatttctattctattttccctgtcactgcaggtaacagggtagctaaacattttgtctctgtaggacaagaatctatttccaatagtttctagtacctttttcctcagttttctttaagcttccattgacagcttcctcgagggtcatcaagcttttgctactagtttcttcaaggcccttctaatttttctctgcttccttgtcctaacattacttctacatgtttatgtttttgttatggcattactcctctgtcagatatcaagatattttccagttattattgctgtgtaacataccaccacagaacttagtggcaaaacaaatacgtatttattactcgtcatagttctaagaactggttggtttag

SEQ ID NO: 588921 - DNA, 628 bp, Homo sapiens
gacagcttttggctttggcttcttttacaacatggacccttctatgttattgggaatgaaactaaagcaaacagtggaaggattggtaccatataaaaacattttgagagaaatgaaaaggtaataaatttagacggaaattacgatgcatttctgtaaagttacatcgagtgtgcctgcctcccctgccccccctttcacctcctccatctcttccacctctgccacccctgagagagmaagaccaacctctttcttctcctcttcagcctactcaacataacgatgatgaggatgaagacctttatgatgatctatttccacttactaagtagtaaatacatttctcttcctaatgattttcttaataccacattttttctagcctactttatgtaagaatacagcatataatatgtataacacaaaatatttctcagtggactatttatattattggtaaggcttcctatcaacagtagcctaacagtagtcaaggttttagggactcaaaagctataagtgggttttcaactttggggaaggtgggattggtgcccctaatttttgagttgtccaagggtcaaatttaactcatgtctttgttaaagatcagacaagagaccag

SEQ ID NO: 588922 - DNA, 652 bp, Homo sapiens
cctcctgctatgatctataaccccagatgtgtaataatattaactataacctacattcattctggttccctttctttcttattttctcagttgaagacacctattgtgtctcaaatctttcagcctcacatattttgtatgtagtaaaaactataaatgtgtctttaagagccatttattatgcatggagcttaatcacgactaaaggacaagtataaattcaaggcggtctgcatttcattcttgcatacctctctttgttgatagtatcattctgtggaaaattagcatttaaatacaaaatycctctagcattgcgaggtagatgtgactcacaagaggtgaaataagctaccaggattttgttgctgttgttaccaagcatcccctcatataaaaacacacatttgtacctattttggcctatgtctctaagctgataaaaatgacctgtatgcagagtaaaaagtaatcattaaagtagagacaggagaagtgcttgtcattgtccttgaatagtgaatgaatctagtgttcaagtggcaaggttgcctttagattgaagcatcaaaagttcatctttagcaatgaataggcagagtatgtaggtgtggtaggtaggtggtccatatagaaagcttttcataagagg

SEQ ID NO: 588923 - DNA, 652 bp, Homo sapiens
cctcctgctatgatctataaccccagatgtgtaataatattaactataacctacattcattctggttccctttctttcttattttctcagttgaagacacctattgtgtctcaaatctttcagcctcacatattttgtatgtagtaaaaactataaatgtgtctttaagagccatttattatgcatggagcttaatcacgactaaaggacaagtataaattcaaggcggtctgcatttcattcttgcatacctctctttgttgatagtatcattctgtggaaaattagcatttaaatacaaaatccctctagcattgygaggtagatgtgactcacaagaggtgaaataagctaccaggattttgttgctgttgttaccaagcatcccctcatataaaaacacacatttgtacctattttggcctatgtctctaagctgataaaaatgacctgtatgcagagtaaaaagtaatcattaaagtagagacaggagaagtgcttgtcattgtccttgaatagtgaatgaatctagtgttcaagtggcaaggttgcctttagattgaagcatcaaaagttcatctttagcaatgaataggcagagtatgtaggtgtggtaggtaggtggtccatatagaaagcttttcataagagg

SEQ ID NO: 588924 - DNA, 628 bp, Homo sapiens
gacagcttttggctttggcttcttttacaacatggacccttctatgttattgggaatgaaactaaagcaaacagtggaaggattggtaccatataaaaacattttgagagaaatgaaaaggtaataaatttagacggaaattacgatgcatttctgtaaagttacatcgagtgtgcctgcctcccctgccccccctttcacctcctccatctcttccacctctgccacccctgagagagcaagaccaacctctttcttctcctcttcagcctactcaacataacgatgatgaggatgaagacctttatgatgatctatttccacttactaagtagtaaatacatttctcttcctaatgattttcttaataccacwttttttctagcctactttatgtaagaatacagcatataatatgtataacacaaaatatttctcagtggactatttatattattggtaaggcttcctatcaacagtagcctaacagtagtcaaggttttagggactcaaaagctataagtgggttttcaactttggggaaggtgggattggtgcccctaatttttgagttgtccaagggtcaaatttaactcatgtctttgttaaagatcagacaagagaccag

SEQ ID NO: 588925 - DNA, 544 bp, Homo sapiens
accgcacccggccagcatgtttttatatagcattttattccttacatcaccttttgctatatagttatctataatagtgaattttcaaattactcaactataaaaacaattaccctttttgcttaaacagtcattccatatgasagctgactcaacaggtaaattatggtctcaaatttatttttaccaatatactaatgttcattttaatacatctcagaaaggttctgatttttgtattcttttaagaatttaagtacatgaaaatatttaatgtatttaaagaagaatactctcttaatgaaaacatgtttaccatttagatcatgaactgcattggtaaggcagcaaaaaaggagggggaggaaattactgccaaggtaaagcttcaacatccctaataagcggtgtttatttactccagatagccaaagagtaggaatgaaaaggaaatggtgttgccaaaattaactaatgcaactagtagaattaaaaaggtcaagtatcaagctgtggagctcctcattcttggagctgattcctt

SEQ ID NO: 588926 - DNA, 582 bp, Homo sapiens
agatacaggcccaaatgaaataaacattagtattaaaatatattcacattttaaaacttctcttcatgaacaaataattatgcttatttgcgataactaatatcaatgtaagaaaagtataacttgcagttcttataatcatacttataattacatatggttcttaaaggtgtgatgtccattaaataaaatatcaattgtaatagactttttatttattagacattttaggataatcaatttaattaattttcatgattaattttaaaaattgaaatctaaaagctgtagccaatgtgtaatgactgacttaacggatatcttaagacagtaatttacccaaaatcaaactctgtgaaaatgaagcagttgacatgcaatatattgttaagtaaacaggtaattagtgtagtgagtatatagcrataatagaaaagaaagagaggataatttagactaccaagctaggaaggttttctttgaatatctgtctcatgtaccttatatttcaaaaagtattttattgttttttgtctagtttctcagctactctgggctctagtatgtcctatatatttctcc

SEQ ID NO: 588927 - DNA, 602 bp, Homo sapiens
cctggctgggtttcagatgtactatttctgtcactgcctgagtaaagatcatgggagtgggtgggacaaaacgtatgtgtatgttcatatttggtagataatgcttagaccaatgtataatccaattacaagagcatacgagtcctatatactccaccaaaattcatcaaaaagtcaccatacctggttagccttctaattttagttactgtgattggtgtttaaaggtagtgctttttgtttttattatagttctctgtggttgatcatattctctttggccttttaaataatctgttttgtaatggccttttcatatctcttgactatttttctaattgtattcactatcccttttcactgttttgtaagtgttattgatatattctgaatacaagtcctttgtcatttaattgtgttgcgaaaaatcttctaccaatatgtagcttgccttttcactctcttaaaaatgccttttagtgaayagcagttctcaattttaatttagtgcatcttgtcaattcttttacatccagttattgtactttatcttgtgcttaggaaacatttgcctactcaaaatcataatctcctttaccttt

SEQ ID NO: 588928 - DNA, 598 bp, Homo sapiens
ttagctgtttttaaacacttaaaatatttttacatgcaataaacaaaagtgaatcagttggcagtgttgccaaggagttagatttcattataaacactaaaatcatgtataaatggtagataaagagttgcttttgaaaagtggttaagaactagctcattgagtactattagagagaaacagacctggaatagtcaaaatacaacttaaatttttggtatgtaagggctcttttaaatctaagattcaagctacaataagacttttgaaattttaattggcaagttctaggtaaatgtagtgtcctaaaactctgtatatgcttctgattctaaatctcactaaaatkatagtaaaggaaaattttttagagacaaatccaccaagaaagaaaggataaaaaaaatgacaacagaaacaaaatattggagtacaaagtaataacaaatgatagaaaaaaaaagataagataattagaaatccattttgggagagctagtatctaaataataggtgttcaagggagggggacaaaaaacaaaaatcagaaatcattagtagaataactgtaaagataattgcagactgaagaacttca

SEQ ID NO: 588929 - DNA, 562 bp, Homo sapiens
acttttgtgaccttgagctaagcaaaatgttcttagaaatgatatggaaagcacaatttatacattaaaaatgataatttatatgtatttaaaattaaaacttcagtcatgtataagatatattaagataatattttcccagaacttatgagaatagtttttttttactgctgacaaagaaaatgtatgcagaatataaaaagaactctcaaaaacttaataacaaaaaaataaaaacaatataacattaggattcatgggagacttggagggtagaaaagaaacagtaggcatttttgtarctcacactttttcgccaattgtctgacttacctgcattagcataaagcatcaactgagtttgcaagggcccctgcctgtcccctgatgctcattgacttccatgaatcttcagccagatatatatatttggctttaacaaatggtgccaacttctgcaagatagccttgccaccaagaacacagacaataagtaacatgagttttggtttgttgttgtgggatttcaggtcatgcttatggtttccaacatggccttgat

SEQ ID NO: 588930 - DNA, 612 bp, Homo sapiens
ccaatctactggtaccaatttactgtattagtccattttcatactgctataaaaaagtgcctgagactgagtaattcataaggaaaagaggtttaatggactcacagttccacatggctaaggaagcctcaaaatcttgttggaaggggaaggaggagcaaaggcacgtcttacatggtggcagccaagagagcatgtgcagagaaactgccctttatgaaaccatgagatcccatgagacttattaactatcatgagaacagcatgggaaaaatccacccccacgattaaattacctcccaccccatcactcccatgacacatgcaaattatgggagctataattcaagatgagattagggtgggacacagccaaaccatatcaacagctaaccagggggatgaaagagctctatgagaagaattacaaaacactgctgaaagaaatcagacacaaacaaatcgaaaaaacattccatggtcatggatagaaagaaacagtattttaaaaatrgccatactacccaaagcaatttacaagttcaatactatttctatcaaaatactgtcatttttcacatatgtagaaaaactgttctaaaatttatgttg

SEQ ID NO: 588931 - DNA, 509 bp, Homo sapiens
aaaacagaaagtcaatttttaaaggacttcagctctttctcttcctcagggggaattggcttttcttacacacaagttcttgcttacacatttttaaatttcttttaattcctgttccaacctgtgtccataaactgatgaattaatraagaaaagttggtgcatatacacaatgaaatgttatccagccataaaaattgaaatcctgttatttgcaacaatgtgaatgagactggaagacattatatcaggtgaaataaaccaggcacagaaagacaaatattgcctgttttccctcatatgtgggagataaaaacttaattttatggaggtagagagaattacggttaccagaacctggaaatatagttgggaggtgggatacgaggagttggctaatggatacaaaaagtatagttagatagaaggaatgagatttagtgtttggtagaaaatagagcaactatacttgacaataatttgttgtatatttcaaaattactagaaga

SEQ ID NO: 588932 - DNA, 540 bp, Homo sapiens
gacataagagaaagagaagcaataaactctattcagtattgaaaaatgtggctacatttaagtcttcatgacactaaagtgtgattttttatttattaygtacaaataattataaatattccttttataaccattttaatttttacaaacatctatttaaggtgaagaaaagtatctttattatcgatggtttttatatctatggtctaattgtcatataaactatgacagtaacttttctgttttgcaatatgccatgtcatttccttctgaaagagaatgaattactcagtaaaattatatacaaattgattttttttacagttttattttattttattattattatactttaagttttagggtacatgtgcacaatgtgcaggttagttacatacgtatacatgtgccatgctggtgtgctgcacccattaactcgtcatttagcattaggtatatctcctaatgctagccctcccccctccccccaccccacaacagtccccagagtgtgatgttccccttcctgtgtccatgtgt

SEQ ID NO: 588933 - DNA, 447 bp, Homo sapiens
gaattcaattgaatctttaattattgataatattcaacagggagatggattttgtgatacrtaaaaaaccgaatattttgaatttattgtggaatctcctgaaaatgtctggacataatctttattccagtaggttaaaaaaatattaaaaaggaagattccctattaaatgtaatttatttattctttttcaattaactaatattctggtctcatacagacataaatcaatttctaaaaacaaaacattgaaagtggtttgacttctagggtgttccccctggtcctaggaaggaagagataatagttcaccaaatatctgttcgccaatcagtcaaaaaagtaaggtgctccccctggtactaattaggttaattctaaaatgtgaagggtgagttgtgttctggatttttattttaattctgttgtaaaatattcagaaacttt

SEQ ID NO: 588934 - DNA, 603 bp, Homo sapiens
tgtcaactttctggtcagtgacctttagaaaattgtaagggatactaatttataaaaattgtctatctccagtttaaaaccataacagtgtcctttaacctaattcaacaacccaagaaagtaatagagtaacatttcttggctgaatcaatactgcattaaagaaaggtgctatcattgaaaagttatgaatacaaaacagctcaatgatgtattagtgtcatcgctcgctgtctctttcagttygcttgcattaccgaatataagcagaaaagaacccttcttgtgtttagatttgtcagtgagatcctatttgtattccactctgccctgtattaaggttttacatcttccattcaaagcactgcaggtacaaaagatgcaactcaaatatcagaacaactattgaagcctatttagtgtttgttagtgcattcttgaagagttcatgttttaaaaatcatttagtaacttgtctctaaaagaaggcaaatcattactgccaagatcttctttcctttgtgatacaggaagtctcaaagcaattttttcatggtcatttagcacaaacttcaatataattttcaaaaaatattaagcttt

SEQ ID NO: 588935 - DNA, 470 bp, Homo sapiens
atgtaccacactttctttatccagtctgccattgatgggcattttggttgattccatgtctttgctattgtgaatagtgctgcaatgaacatacatgtgcatgtattttatgatagaacaatttatattcctttgggtatatacccagtaatgagattgttagattaaatgatatttctatttttaggtctttgaagaattgccacactgtcttccacaatggttgaactaatttacacttcaaccaatagtgtataaraatttcttttttatccacaacctcataagcatctgttattttttgactttttagtagaagccattctgactgctgtgagatggtatctcattgcggtattgatttgtactgttttaaagattgtgatattgaactttttttcatatgcttgttggccacatgtatgtcttcctttggaaagtgtctgttcatgtcctttgcccacttttta

SEQ ID NO: 588936 - DNA, 522 bp, Homo sapiens
ctaggtgatgtgactctttccagggtcctcctgtcagtgggtattgtgcccaagatgtaattgtgatgcatcactggtcctagcacmtaactgatgtgactctcctctccttccaaagccctgcatttattgtttattgtgacatattttcaaaacctaggttaggcaactcttttgcatgcgtcctgctaatagggctattatgacatatttttttttcacctaggtgatgtgactctccctttctgcctaaacactgtaaaaaggggagatcgtgacatatcactggacccagcatctaggtgatatggctctcctttttcaccttggcttcttgtattttgggtattatgacatatcactgggtcaaaccaaaggagggggaggctcttgcctaggccctgcccacaggagaccttgagacagatctctgcatccatcactttggaagtgtgactctcctcttctggctgctccatgcccgcacagaagactgtgatatatctccgggttcaccaacca

SEQ ID NO: 588937 - DNA, 633 bp, Homo sapiens
catctttatcctttttgccacaggcactgttgtcatttatgtagataagctcacggtcactacgttcctctggttgcatatccagaacttcaaacagcagcagcatccaccttcccacagtcagctttttcttttctaactccatttatattctacacaaacctcacttccatcattctcactttgcatttctttgctgcatttttatctttattagtcagttccctctttcaattatccatttttgtaaactgtcacatgaatttctcaccagaagacaaagtgcaacacaactacacactrtgctgccagtggatgagctgaataacaggcacatggtgcccagtcaccaatacactttgaaagaagcaatgtggtgggtcactgatcatgcagcatatctgttagtgatgtgtggcctgaagagttagcagtgaaattatactttagcaaggggccaggtgcagtggctcacacttgtaatcccagcactttgggaggccgagggggggacatcacttgaggtcaggagtttgagaccagcctggccaacatggtgaaaccccatctctactaaaaatacaaaaattagccaggtatggtggcatgtgcctgtagtcccagctattcagg

SEQ ID NO: 588938 - DNA, 647 bp, Homo sapiens
tgagaagttttccagccccacagacttctttgaagtcacacactattcatagtttctatttaacaagattttttcaaacttaaaaaataaaataaaaagcttcccaaattcttagaagctatttagagatactgactttgctccaacttaactctacagtggagaggaagtgatgagttcctctaaaggagtggtgctgttcgtccagcctggtgtcattgaggaaggtgtccgtgggggaggtgggggtggagtagggagaaaatgttactggaaaacrgtcccaatccagaccccaagagagggttcttggaccatgtgcaagaaagaatacgaggtgaatccatgaaataaagtgaaagcatgtttactaagaaagtaaaagaataaagaatggctactccataggcagagcagcagcgtgggctgttcgatggagtatgcttatagttatctcttcatcatatactaaacaaggggtggattattcatgacttttccaggaaggggcaggcaattcccggaactgagagttcctcccctttttagatcatatagggtaacttcctcatgttgccatggcgttagtgaacttagtgccagtgggaatgtcttttagcagctaatgcattataattagagtataa

SEQ ID NO: 588939 - DNA, 647 bp, Homo sapiens
tgagaagttttccagccccacagacttctttgaagtcacacactattcatagtttctatttaacaagattttttcaaacttaaaaaataaaataaaaagcttcccaaattcttagaagctatttagagatactgactttgctccaacttaactctacagtggagaggaagtgatgagttcctctaaaggagtggtgctgttcgtccagcctggtgtcattgaggaaggtgtccgtgggggaggtgggggtggagtagggagaaaatgttactggaaaacggtcccaatccagaccccaagagagggttcttggaccatgtgcaagaaagaataygaggtgaatccatgaaataaagtgaaagcatgtttactaagaaagtaaaagaataaagaatggctactccataggcagagcagcagcgtgggctgttcgatggagtatgcttatagttatctcttcatcatatactaaacaaggggtggattattcatgacttttccaggaaggggcaggcaattcccggaactgagagttcctcccctttttagatcatatagggtaacttcctcatgttgccatggcgttagtgaacttagtgccagtgggaatgtcttttagcagctaatgcattataattagagtataa

SEQ ID NO: 588940 - DNA, 576 bp, Homo sapiens
atgcagtggcacaatcttggctcactgcaacctctgcctcctgggatcaagygattctcctgtcttagcctaccaagtaactggtagtacaggcatgtgccaccatgcctggctaattttttatttttagtagagacagggtttcaccatgttggtcaggctggtcttgaacacgtgacctcaggtgatccacccgccttggcctcccaaagtgctgggattataggcgtgacaccgcatccagccccaaagtgttatcatttcaacagataatcaatataaaaattactgatgaggtattttgcagtcttgttttgaattaggtctttgaaatccagtgcatttcttatacttccagcacttgtcaatttatgctagccacatttcaagtacttaatagcaacatgtggctagtggttcccttactgtccagcacaggctaagaggcttctaggattcttagagaagggcgttcaaataaattaaagaagtgtgtagtatcctatgccttaatttaacttccacaaaagtatagtatgaagtatggaatttaatatttaacagcaaataaatcag

SEQ ID NO: 588941 - DNA, 392 bp, Homo sapiens
ggactataaaaactgcattctcaaacctaacagcgttttctcctactaaattcaagtcagacttttacaagttatcatactctggccactctcgaaaaaaagcaatgagttgggygctgtggctcacacttgtaattctacagttttgggataccgaggcgggctgattgcttgagttcaggagtttgagatcagcccgggtaacatggcaaaaccccatttttttttgtctcttcaaaaatccaaaaaagattaaccaggcgtggcggcacgtgctggtagtcccagctatttgggaggctgagacaggaggatcacttgggcccaggagattgaggctgcagtgagccaagatttagccactgcactccagcctgggtgacaaagtgaaa

SEQ ID NO: 588942 - DNA, 492 bp, Homo sapiens
aataattccgggcacccttggacaatgagaaagggtgctgaaatcctgcctaccctgtcacactcagtttcagaaatggtctggaagagcctgcagagggcaggcagcagagaaccggcagagggcatgggaagggccaggcagaaataaagggtagctcttgaagcatagatgacagtgtagaccgtggttcttttctcttgctttctccacctttctcttcaatagtttgtttctcctcattgctgttccaatggcaacctctattctgccctatcattgaaatctagaaaaagaaagtagctcaaatgtgaaatatcacctaatcttttcttctatttctccagagaaaaaatccatatacctgaaagatctgatgaarcccagcgtgtttttaaaagttcgaagacatcttcatgcgacaaaagtgatacatgtttttaattaaagagtaaagcccatacaagtattcattttttctaccctttcctt

SEQ ID NO: 588943 - DNA, 599 bp, Homo sapiens
cattttttctaccctttcctttgtaagttcctgggcaacctttttgatttcttccagaaggcaaaaagacattaccatgagtaataagggggctccaggactccctctaagtggaatagcctccctgtaactccagctctgctccgtatgccaagaggagactttaattctcttactgcttcttttcacttcagagcacacttatgggccaagcccagcttaatggctcatgacctggaaataaaatttaggaccaatacctcctccagatcagattcttctcttaatttcatagattgtgtttttttttaaatagacctctcaatttctggaaaactgccttttatctgcccagaattctaagctggtgccccactgaatyttgtgtacctgtgactaaacaactacctcctcagtctgggtgggacttatgtatttatgaccttatagtgttaatatcttgaaacatagagatctatgtactgtaatagtgtgattactatgctctagagaaaagtctacccctgctaaggagttctcatccctctgtcagggtcagtaaggaaaacggtggcctagggtacaggcaacaatgagca

SEQ ID NO: 588944 - DNA, 551 bp, Homo sapiens
ctacaaacgtaccctcggagcatgagtgtaaagccctgggaaacccccaaagggagccccatccacaaacaygacaaagacatcttccctgacagattcccagagatcccagagtacacacagcctttgaagcccatagatgaaaatgcagttcagttcaacaaatgtgggcaaccatgtgacaggcactgagctccacggggcttcagaagacagccttcaatgagtgagggcagagaggccatgtgcttcacttctagcccttccccaaaatcattcattaagtacatctctccacccatcctgttagaaggcaattgacatacacaaccttcatttcagatgatcctaatctaaccccaattgtatgaatctagaatggtttctgtaccttggtacactattcctgggaagtgggtggtactctgaagtttggctacaagtcataagcagaagtgggaaaggtgtgtaaatgcccagtagatttctccaaactaagtgcttcagcggggacaggtttcactcgtatgtgatcctcccccaggggcatg

SEQ ID NO: 588945 - DNA, 572 bp, Homo sapiens
ataagcacagcagcattcccaaggaacacagaagcaaggtggtaagaataaaccaaaaggagtatttgcgagctccccgtacctcctaaggctccttgtagagagagaaataatgccaggactgacggtagaactcaaatacagaaaggggaactgactagagaaacaacaccacagccagggacagtgctcttgcttggttccaaataacttctgccggcaggtgggcatttccactgatgagaatgactacaaacgtaccctcggagcatgagtgtaaagccctgggaaacccccaaagggagccccatccacaaacatgacaaagacaycttccctgacagattcccagagatcccagagtacacacagcctttgaagcccatagatgaaaatgcagttcagttcaacaaatgtgggcaaccatgtgacaggcactgagctccacggggcttcagaagacagccttcaatgagtgagggcagagaggccatgtgcttcacttctagcccttccccaaaatcattcattaagtacatctctccacccatcctgttagaaggcaattgaca

SEQ ID NO: 588946 - DNA, 551 bp, Homo sapiens
ctacaaacgtaccctcggagcatgagtgtaaagccctgggaaacccccaaagggagccccatccacaaacatgacaaagacatcttccctgacagattcccagagatcccagagtacacacagcctttgaagcccatagatgaaaatgcagttcagttcaacaaatgtgggcaaccatgtgacaggcaytgagctccacggggcttcagaagacagccttcaatgagtgagggcagagaggccatgtgcttcacttctagcccttccccaaaatcattcattaagtacatctctccacccatcctgttagaaggcaattgacatacacaaccttcatttcagatgatcctaatctaaccccaattgtatgaatctagaatggtttctgtaccttggtacactattcctgggaagtgggtggtactctgaagtttggctacaagtcataagcagaagtgggaaaggtgtgtaaatgcccagtagatttctccaaactaagtgcttcagcggggacaggtttcactcgtatgtgatcctcccccaggggcatg

SEQ ID NO: 588947 - DNA, 628 bp, Homo sapiens
  misc_feature 432: n = A,T,C or G
ggggtttcaccatgttggccaggcgggtctcgaactcctgatctaaggtgatctgcctgcctcagcctccaaaagtgctgggattacaggtgtgagccaccacccctggcctaaaagaccttttaattgttagaaaagtctctcttaattccttataccctctcataaccttcattcatagagatgcccttcagagtcataccatcaagctcaatctttgcatcccatggtagctcttcagatatttgaagacagtatctctgttctctccaggccttctttcaggtgaagcatcatcagttacttgagctatttcttaattgactgagttcccagatgctttataaatctggttatgttctatttttgtaaagtttcttcttaaaaataatggtgtttataaaggacatgaatagacaattctgaaaaganaatatacaaatggccaacaaacatgaaaaaaagttcaatatcactaactatcagggaaatgcaaattaaaaccaccatgagatacsaccttactcctgcaagaatggccattattaaaaaatcaaaaaataatagatgttggcatggatgtggtgaaaagggaacatgtttacactgctggtgggaatgtaaacta

SEQ ID NO: 588948 - DNA, 385 bp, Homo sapiens
ttttagggtgatagaaatgctctatgtcctgtggcggttacctaaatctatacaagwtctatacaatcagtagaacagtatatcaaaacaaaaaaaaataattttactgtgtgatagttttaaaaaaatctgtagtggcatttaggccttccaaggtctcgtgaagcagaggagctggtttgtaagtttgtgggttatgtttgttgggtttttttcccttctgtctaccaggctcatggttgtggcagcaaacaactcataagcaacctagaggaggctgaagggaaaacccaaatgtgtcagctgtccgctttgctaggagctccaggcaaagatttagtaggtgaaaaatcttggacccaaggaaaaaatgaatgtaagacat

SEQ ID NO: 588949 - DNA, 459 bp, Homo sapiens
aaccaatgaaataataatctttcaatattgggaaaaatctgaatatggtggacttattgagaaagagtatagtatacataaacttgtgtaatgctaaatgtaatggttaatttaagaaatttttatcggtaattttaacatatgtagtgttctctttacatgctttttagaagctaacttgttgaaagaagctactgctctacacaaaaatcttgagtatgtaattaaataagctaaaaaagcatcagccttagtaaaatcctagtgcttaargagaaggaagttctagcctctataagacccaaactaatttttgtaagtaacaagagtaacttgagattaacaaaaaaggtgaccttcaatcctacaggtggtttaatctaatgttaatttttggtgttattaagaagccttgtatattagcatagcgaagatgataactatataactccctctccc

SEQ ID NO: 588950 - DNA, 459 bp, Homo sapiens
aaccaatgaaataataatctttcaatattgggaaaaatctgaatatggtggacttattgagaaagagtatagtatacataaacttgtgtaatgctaaatgtaatggttaatttaagaaatttttatcggtaattttaacatatgtagtgttctctttacatgctttttagaagctaacttgttgaaagaagctactgctctacacaaaaatcttgagtatgtaattaaataagctaaaaaagcatcagccttagtaaaatcctagtgcttaaggagaargaagttctagcctctataagacccaaactaatttttgtaagtaacaagagtaacttgagattaacaaaaaaggtgaccttcaatcctacaggtggtttaatctaatgttaatttttggtgttattaagaagccttgtatattagcatagcgaagatgataactatataactccctctccc

SEQ ID NO: 588951 - DNA, 566 bp, Homo sapiens
ataccctataaaaataaacaagtttattcttaaaatttaatataaatcaaacaattaccaatcaattaatatatgctccacttaattaaaagtcagtttaaatttcttcaaacaacccctctatcttgtgtgggataatgtaatgtatgaaggtaaaggaattatggaaggcaggtactgaatttggcaaacattttattctggcttatccaaacaaatgacaatttgtaatcactaatcggatttgatggagtttgaaaaaattcagtatttaggctctggctctactaaagaataactgatttatttgagaattaggtaaaacactaacatgctctattgatttgcccataatactatgatgtcattaatatttttcaccactggtgatgaaaggctcacactgacaacccagctaagcagtaatttcatgacactgttagtaagtaacyggatttcactttaacaaaagcttttcctttttttctggataaaggaaatataccaaatatttaaagtaaatagaaattttaaacaacagaatttttcaaacatgaaatttaaaa

SEQ ID NO: 588952 - DNA, 584 bp, Homo sapiens
gacccagacaaaattcagccaacttctttgccaatttataacaatcacctttcctctggttcccaatactttgttcctaatttccatctgaggccacatcaaatggtctttactgtccttatttctatcagcatcctgattacaaccagttagataatcaccaagaaaactgagggtctccctacagtattcctcttcttctgactctcacctttaattttgccttaatgctccatttacaacaatctaggttttttccagcattaatttcaaaactgttccatcctctacccattatccaattycaaaaccatttctacatttttagatatttgctatagcagtattccacttttggtactgatttctttcttagttttctttgtgctagtataacagaatacctgggactgagtaatttataaaaatcaagagacatattttctcatagttctggaggctgagaagttcagaatgaaggcaccagcaaattcagttgtctcgtgattgctgcatcctccagaaaggaggaaggctgtgttatcacatggcagaagatggaagagcaagctagccaaacaccg

SEQ ID NO: 588953 - DNA, 584 bp, Homo sapiens
gacccagacaaaattcagccaacttctttgccaatttataacaatcacctttcctctggttcccaatactttgttcctaatttccatctgaggccacatcaaatggtctttactgtccttatttctatcagcatcctgattacaaccagttagataatcaccaagaaaactgagggtctccctacagtattcctcttcttctgactctcacctttaattttgccttaatgctccatttacaacaatctaggttttttccagcattaatttcaaaactgttccatcctctacccattatccaatttcaaaaccatttctacatttttagatatttgctatagcagtattccactyttggtactgatttctttcttagttttctttgtgctagtataacagaatacctgggactgagtaatttataaaaatcaagagacatattttctcatagttctggaggctgagaagttcagaatgaaggcaccagcaaattcagttgtctcgtgattgctgcatcctccagaaaggaggaaggctgtgttatcacatggcagaagatggaagagcaagctagccaaacaccg

SEQ ID NO: 588954 - DNA, 601 bp, Homo sapiens
taacgcattagcatgctaaaagacactcacaccagcgccatagcagtttacaaatgccatggcaacattgggaagttaccttatatggtctaaaaggaagaggaaccctcttcagggaattgcccacccatttccgaaaaaactcgtgaataatccaccccttgtttagcatgtaatcaagaaataaccatgaaaatagccaaccagcagccctcagggctgctgtgcctatggagtagccattttttattcctttactttcttaataattttgctttcactttactctatggattcaccttgaattatttcttgcccaagatccaagaaccctctcttgggatctagattgggacccctttccagtaacaattagaccagaaaatataattgtgtgaactcaagtttcctaggaattgaatgcaaacccacaatttcaagtagtctaggaaatagccattcaactaataatgataacaggttgctactgatctgagtcgaataggggctcacctaaaacratagggggaaagaaaaatctccctttttagaaacctgcctcatcctcagttactcttaagtgttctttctctctctcttc

SEQ ID NO: 588955 - DNA, 601 bp, Homo sapiens
taacgcattagcatgctaaaagacactcacaccagcgccatagcagtttacaaatgccatggcaacattgggaagttaccttatatggtctaaaaggaagaggaaccctcttcagggaattgcccacccatttccgaaaaaactcgtgaataatccaccccttgtttagcatgtaatcaagaaataaccatgaaaatagccaaccagcagccctcagggctgctgtgcctatggagtagccattttttattcctttactttcttaataattttgctttcactttactctatggattcaccttgaattatttcttgcccaagatccaagaaccctctcttgggatctagattgggacccctttccagtaacaattagaccagaaaatataattgtgtgaactcaagtttcctaggaattgaatgcaaacccacaatttcaagtagtctaggaaatagccattcaactaataatgataacaggttgctactgatctgagtcgaataggggctcacctaaaacartagggggaaagaaaaatctccctttttagaaacctgcctcatcctcagttactcttaagtgttctttctctctctcttc

SEQ ID NO: 588956 - DNA, 354 bp, Homo sapiens
gattcctgactctcagaaaatgtgtgagataataaatgctattattttaagctgctaaattttggggcaatttactacttagcagtagatgcctaacacarggtatattcatgaatagaatgaacgtagataaaaactgaaagaatattaacttgagagaagaagaggcgatttgatatgtttacttttttgttgttgtttgtttgttttgttttttggagactaggtctggctctatgggctggagtgcagtggcacaatctgggctcaatgcaacctctgcctcccaggctcaagtgatactcctgactcagcctcccaagtagcctggactacgggcacataccaccacat

SEQ ID NO: 588957 - DNA, 618 bp, Homo sapiens
tcacgatgttcccatgggttatggcaacaggtctcctagcagggaacccaagatggtgggaaagctggttgaccaactcagtctcaccttttccagtgtagaatctgtgagttgggaaagatgttcctaatgcttgttgtttggcagagaaagtgacgtagggcctcccagatatataagtttgattctcctaccatctgcgtggagtttcttcacctgtctgtggccctgggatctgcctcatctgcatatttgagttctggattgttgctgatgaaaatccccatactatatatttgtttttggttttcagtagggagtggggagtaaagcttgcttctttgccaccttatttatttatttatttatttatttatttatttatttatttttgagatggagtcttgctctgtcgcccaggctggagtgcaatggtatcatcttggctcactgcagcctctgcctcctgagttcaagcaattctgcctcagtctcccaagcagctgggactacaggcgtgcrccaccaagctcggctaatttttgtattattagtagggactgggtttcaccatattgaccaggctagtttcaaactcctgaccttgtgatccacctg

SEQ ID NO: 588958 - DNA, 639 bp, Homo sapiens
aatatatatatataaaaccaacaacatatatatatgatatgtatatatgtatatatgatatgtatatgtatatgtatatatgtatatatgatatgtatatatgtatatatgacatgtatatgtatatatgtatttatgatatgtatatatattggttatatrtgtctgtgtgtgtctgtgtgcatttgtgtgtataaattctaaaaacaaacagctcaattcaccaattctgcttctctctgactaaactttgcttaatgagcactgatgatgatttgcaccattacaaattccaggtcttttgcctccactgagacttcaatgtgcctcagaaatcctgtgtatttcttctggttactttctctttgtcttactctaattctcaacaattactaacagaaactttctttattttctctaaactaccaagatacctcttccgacatcgctttcagaacgtgatctcaatcatcacttccccaaaccttcctcagcctcccaccatgctactttcattttacactccttcgttctttcttccttcttccctgacacaattagtaaggggttgtctctcttaactgaatggaaaatggcttctatctttgtgtttatctctctctgctccaccaaaatcac

SEQ ID NO: 588959 - DNA, 639 bp, Homo sapiens
aatatatatatataaaaccaacaacatatatatatgatatgtatatatgtatatatgatatgtatatgtatatgtatatatgtatatatgatatgtatatatgtatatatgacatgtatatgtatatatgtatttatgatatgtatatatattggttatatatgtctgtgtgtgtctgtgtgcatttgtgtgtataaattctaaaaacaaacagctcaattcaccaattctgcttctctctgactaaactttgcttaatgagcactgatgatgatttgcaccattacaaattccaggtcttttgcctccactgagacttcaatgtgcctcagaaatcctgtgtatttcttctggttactttctctttgtcttactctaattctcaacaattactaacagaaactttctttattttctctaaactaccaagatacctcttccracatcgctttcagaacgtgatctcaatcatcacttccccaaaccttcctcagcctcccaccatgctactttcattttacactccttcgttctttcttccttcttccctgacacaattagtaaggggttgtctctcttaactgaatggaaaatggcttctatctttgtgtttatctctctctgctccaccaaaatcac

SEQ ID NO: 588960 - DNA, 639 bp, Homo sapiens
aatatatatatataaaaccaacaacatatatatatgatatgtatatatgtatatatgatatgtatatgtatatgtatatatgtatatatgatatgtatatatgtatatatgacatgtatatgtatatatgtatttatgatatgtatatatattggttatatatgtctgtgtgtgtctgtgtgcatttgtgtgtataaattctaaaaacaaacagctcaattcaccaattctgcttctctctgactaaactttgcttaatgagcactgatgatgatttgcaccattacaaattccaggtcttttgcctccactgagacttcaatgtgcctcagaaatcctgtgtatttcttctggttactttctctttgtcttactctaattctcaacaattactaacagaaactttctttattttctctaaactaccaagatacctcttccgacatcgctttcagaacgtgatctcaatcatcacttccccaaaccttcctcagcctcccaccatgctactttcattttacactccttcgttctttcttccttcttccctgacacaattagtaaggggttgtctctcttaactraatggaaaatggcttctatctttgtgtttatctctctctgctccaccaaaatcac

SEQ ID NO: 588961 - DNA, 586 bp, Homo sapiens
cataacttttacttgttaatttaaaaaatccattgaacagtttgtgtggatccctggtggaaagtagaacttggatgtaatataaactcagcaactttttagtatgtgatakatgtcttgagacactagattgatatatttaagaatttggagcttccagtttagagtaaatgaaagttggcttgaagtatgataaatacacacacacacacacacacatacgcatgcacacacattaaaaaaattttttaaagacaatctcactctgtcacacaggcaatcacagctcactgcagcctcaatctcttaggctcaagttatcctcccgcctcagcctctcaagtagctgggactacaggcatgcgccaacacacctagctagttttaaaattttttgtagcaacagggtctcgttatgttgcttaggctgatcttgaactcctgggctcatgtgattctcctgccttgacctttatggacacgagccaccacgcctgtctccactcactgtgacctctgcctcccgagttcaagtgattctcctgcctcagcctcttgagtagctgggattacaggtacccaccaa

SEQ ID NO: 588962 - DNA, 586 bp, Homo sapiens
cataacttttacttgttaatttaaaaaatccattgaacagtttgtgtggatccctggtggaaagtagaacttggatgtaatataaactcagcaactttttagtatgtgatagatgtcttgagacactagattgatatatttaagaatttggagcttccagtttagagtaaatgaaagttggcttgaagtatgataaatacacacacacacacacacacataygcatgcacacacattaaaaaaattttttaaagacaatctcactctgtcacacaggcaatcacagctcactgcagcctcaatctcttaggctcaagttatcctcccgcctcagcctctcaagtagctgggactacaggcatgcgccaacacacctagctagttttaaaattttttgtagcaacagggtctcgttatgttgcttaggctgatcttgaactcctgggctcatgtgattctcctgccttgacctttatggacacgagccaccacgcctgtctccactcactgtgacctctgcctcccgagttcaagtgattctcctgcctcagcctcttgagtagctgggattacaggtacccaccaa

SEQ ID NO: 588963 - DNA, 586 bp, Homo sapiens
cataacttttacttgttaatttaaaaaatccattgaacagtttgtgtggatccctggtggaaagtagaacttggatgtaatataaactcagcaactttttagtatgtgatagatgtcttgagacactagattgatatatttaagaatttggagcttccagtttagagtaaatgaaagttggcttgaagtatgataaatacacacacacacacacacacatacgcatgcacacacattaaaaaaatttttwaaagacaatctcactctgtcacacaggcaatcacagctcactgcagcctcaatctcttaggctcaagttatcctcccgcctcagcctctcaagtagctgggactacaggcatgcgccaacacacctagctagttttaaaattttttgtagcaacagggtctcgttatgttgcttaggctgatcttgaactcctgggctcatgtgattctcctgccttgacctttatggacacgagccaccacgcctgtctccactcactgtgacctctgcctcccgagttcaagtgattctcctgcctcagcctcttgagtagctgggattacaggtacccaccaa

SEQ ID NO: 588964 - DNA, 586 bp, Homo sapiens
cataacttttacttgttaatttaaaaaatccattgaacagtttgtgtggatccctggtggaaagtagaacttggatgtaatataaactcagcaactttttagtatgtgatagatgtcttgagacactagattgatatatttaagaatttggagcttccagtttagagtaaatgaaagttggcttgaagtatgataaatacacacacacacacacacacatacgcatgcacacacattaaaaaaattttttaaagacaatctcactctgtcacacaggcaatcacagctcactgcagcctcaatctcttaggctcaagttatcctcccrcctcagcctctcaagtagctgggactacaggcatgcgccaacacacctagctagttttaaaattttttgtagcaacagggtctcgttatgttgcttaggctgatcttgaactcctgggctcatgtgattctcctgccttgacctttatggacacgagccaccacgcctgtctccactcactgtgacctctgcctcccgagttcaagtgattctcctgcctcagcctcttgagtagctgggattacaggtacccaccaa

SEQ ID NO: 588965 - DNA, 592 bp, Homo sapiens
tgaaaaacttgcagaagtaaacagcacattctattttatttcatttcatttatttatttttttgagatggagtcttgctctgtcgcccaggctggggtgcagtggcatgatctcggctcactgcaacctctgcctcccgagttcaattggttctcctgcctcacyctcccaagtagctgggattacaggcacgtgcaccaggcctggctgatttctgtattttctgtagagacagggtttcaccatgttggccagactggtctcaaactcctgacctcaagtgatccacctgcctcagcctcccaaagtggcaccacacccagctgaaatagcatattctaaaaactggccatataagatttgcagcctatgtaccactgctctccaccccactctcatggcagacatcaatagtccatcaccgtacttcttcccactgagttcagatagtgtctcagaatccttcccacaatagagcagccaatcccaatggatcagagttggcacatgaaaggaagaaacccatttgttagattggctgaccatgtagtaatacttgtggaattgccaagttacttagtactaccacttg

SEQ ID NO: 588966 - DNA, 615 bp, Homo sapiens
atgattatttagacaaatacatgttagcatctactatgtgttaggttctctgttctcttccaggggttggaaagcagcagagataaaaatatacctctgtgaagagcatacaatttcccacctgttcccttgtttgaacttcagaccatctgaggcaagtagggcacattagatttccctcttttgcaaaagaggaaaggaaggctgagagaagaaaagtgacttacttcaggtgtccagcttctgtgtggcacagcagggtcaagggtccaggtctcttgactctttatagggagccatgccattctggttggaagcttctgtattatatctgcaagtccatgtgggatcctcttgtcytttcttttctgagcacactgtttgttcagatcttttctgcttgcccctccagctccactctccatcttcctttactctctgcctaggaagctgacccatgcagatgttactgtggacttccttgccctctggcttctaggtttggcttgaccaagggcatcctggtggaggggagttaggaggaagagagattgctcccttgactctctccttgggttaccttggtctggttgtgtccttggactcaaagtcact

SEQ ID NO: 588967 - DNA, 551 bp, Homo sapiens
ttttttttttttttttttgcttggttgtgcagtggtttcaggggaaatcactgtgtaaatttaaaaagtttctgtggtatttatggtttggggtgktttttttttccatttgtatagacaatttagttaaaaattgcatcatagataagaaatgttctgttaagtttcagtagaagtaggaaaagtatactattgattaatcgttgaaccaataaatgttgtaattttcaataattgactaaaataacattttctttcaggtttttagtaaatagcaaactttctaaaagccttataagctataaatcttactgagaattcatggcgcattctcaatatattggaggcattaaagatgtaaaccccaaaatttacagagctacctaaggttagccttgaagtagacagagacctatcttttccatttggtctccagccagcgaaggactagaggaaccttgagaagctgcagagaggatgaattaagggagaaaacagtgcagactttccacttaatgcctgttttttccgtatttacttaagtatatttt

SEQ ID NO: 588968 - DNA, 551 bp, Homo sapiens
ttttttttttttttttttgcttggttgtgcagtggtttcaggggaaatcactgtgtaaatttaaaaagtttctgtggtatttatggtttggggtgttttttttttccatttgtatagacaatttagttaaaaattgcatcatagataagaaatgttctgttaagtttcagtagaagtaggaaaagtatactattgattaatcgttgaaccaataaatgttgtaattttcaataattgactaaaataacattttctttcaggtttttagtaaatagcaaactttctaaaagccttataagctataaatcttactgagaattcatggcgcattctcaatatattggaggcattaaagatgtaaaccccaaaatttacagagctacctaaggttagccttgaagtagacagagacctatcttttccatttggtctccagccagcgaaggactagaggaaccttgagaagctgcagagaggatgaattaagggagaaaacagtgcagactttccacttaatgcctgttttttcygtatttacttaagtatatttt

SEQ ID NO: 588969 - DNA, 243 bp, Homo sapiens
aaacaaagggataataacagaggactttctaaacctagagaaatcaatattcaagtacaagcagtttatagaacaccaagcagatttaacccaaagaagactaccccaaggcatttaataatcaaagttccaaaggtcaaartaaagtaaggatcctaaaagcagcaagagaaaagaaacaaataatataaaatggagctctaatagatctggcagtagacttttcagtggaaaccttacagg

SEQ ID NO: 588970 - DNA, 401 bp, Homo sapiens
ccactcactcaccagcacttttcagctttcctcccttgaccccttttcctctgacaccaacaatacataggtcaacaaattggttttcagtgactttcttttgatgattggtgaattggcttcattccatttttcctatctgaaagacaaaaagaattgaccctgtaagaagtttgtcaggtcatcagaataaaggaacaaggctgtgggtataaatttagaattcatcatcagggagctgatagttcatttgtttgttcattcatttgggacaaatctttatttcaagtgcccattatatgccagtttcagttaggcatggcatgtgtattagtccattgtcacgctgctaataaagatatacacgagaytgggtaatttataaagaaaagagatctaat

SEQ ID NO: 588971 - DNA, 530 bp, Homo sapiens
ccatgttcaaaatattgctcttggtattagcgatactgtaataaacaaaacttcttaccttgtcttttaataaccttgggtaaaatattcccaacaccccaaattcctggtcttagaataattatcttgtggtctgggtattgctaggccctagtgactctctgatgatgacttgtctttgctaccaggctcagagagctacctgtgggcagacaatgtcagtcactcatccttgtgtctccaagtgacaaatagagctctataaggttggtggaatgattatcgaatgtttctctgtgtttcttttccagttcattctgcttttttttccccaacaatttgtcccaagtcaatacaaggattatcatcaatggakgctacttgttaacaaaacattcttttctctgtgcttccaaatataaacaatgtactaaaaataagaactccagatatttatatctatagcaggtttaaaatttcagaaataaaagaagcccttgccgtcttatgtaatgttctccgagacagcc

SEQ ID NO: 588972 - DNA, 609 bp, Homo sapiens
actgcacatgtaccctaaaacataaagtataataataattaaaaaaaaaaaagaaaaaaaattcatggggatggtttccaaatgctgttctcatgatagkgagtgagttctcacaagatctgacggttttataagggatttcctcccccttcatgctgcacttctctctcctgcctccctgcaaagaaggacatgtttgcttccccttccaccatgattgtaagcttcctgaggcctccccagcatgtggaactgtgagtcaactaaacctctttcctttataaattacccattctcagatatgtccttatagcaacatgagagcagattaatacaaccagcatattaaaaacataacagatagggtttattccctaattgcaaagatgcttaattctcagtgattataatattatattaataaatctaaggagaaatattattggaactaatttaaaatctgttcataaaaaatactaaataaaagatgaactgatggataataatataaataatataagtaaatgtacaaccgtaatcatgagacatatatttcagcacaaagcataatgctttaaagtgacacattaagaatttgcactaaactca

SEQ ID NO: 588973 - DNA, 609 bp, Homo sapiens
actgcacatgtaccctaaaacataaagtataataataattaaaaaaaaaaaagaaaaaaaattcatggggatggtttccaaatgctgttctcatgatagtgagtgagttctcacaagatctgayggttttataagggatttcctcccccttcatgctgcacttctctctcctgcctccctgcaaagaaggacatgtttgcttccccttccaccatgattgtaagcttcctgaggcctccccagcatgtggaactgtgagtcaactaaacctctttcctttataaattacccattctcagatatgtccttatagcaacatgagagcagattaatacaaccagcatattaaaaacataacagatagggtttattccctaattgcaaagatgcttaattctcagtgattataatattatattaataaatctaaggagaaatattattggaactaatttaaaatctgttcataaaaaatactaaataaaagatgaactgatggataataatataaataatataagtaaatgtacaaccgtaatcatgagacatatatttcagcacaaagcataatgctttaaagtgacacattaagaatttgcactaaactca

SEQ ID NO: 588974 - DNA, 586 bp, Homo sapiens
gcgcccaccaccacgcccagctatttttttgtatttttcgtagagacatggtttcaccatgttggtcaggcaggtcttgaactcctgacctcaggtgatccacccaccttggcctcccaaagtgctgggattacaggcgtgagccaccgcacccagcctactgttatatttttcagtatctctttctcccattctcttacctctctttttggtataacatttaaagcactattggattttcagactgtatctactatatctttaatcttcttttttgtgttatttatctttttggctcttcaagcttcattttgcctgttacctgagttgatatgacccatctttcccatctatcaatttacaaatgatctcttcagctgtgtaaaattacttatgccatttttaaggttttaatttttataaggttattactttgttttagaatttttttaaaaaaacctcaaattttctgctgaaattcgtaaccctcattttgaattyattgaacaaagtaggacagttttttcatgttgtatggctgatagctctaatatctaaattttgtagagcatttctattgtctgct

SEQ ID NO: 588975 - DNA, 623 bp, Homo sapiens
acttccctcacaatcccccaaaattaaggtaaagtttagggaaaatgttttataagcataacaaaagtagttatcaattaatcattacttccttcattacaagagtacttaataaatgctttaactagttctaagactgttcaaggtagatattggaacacatagagaataaaagcctactttgcaaattcaactgaaagaaatgctactgttgatataatttgtgagtctctgaacccagtttaacgaggttgtggttaaagtgatacagtttttagtgaccaggagcatcttccaaaagaaacagtgaccacttgctgatgatgatcaaaaatactcttggtagaatctttctaacaagtataaaayaatattgctattttattacattgatggaaaatgttaaattaatagaattgtatgcacattcatgataaatatgagtgagtttgactttgtctctgaaaattgggaaggtgaatgcatttagtgatgctcaaataacaatactcttagcatagtgaatgttagaatagtcagtctgcagaggaaatatgtagatgctcattctctaacatgtattatttaaattggcctaaccacaaagagtgaagaaaagctta

SEQ ID NO: 588976 - DNA, 525 bp, Homo sapiens
cagttgggtggggctcagagttttcttatgtgcagctatatgttgtcccactgatgtgtagggctagagtgatagcagtggatgtggagaaagaggatggattgaaaaacgacctaggaggcagagtgtgcagggcttgatggccacagataggagtgaggccacaggtaggagtgagaacagaggagttgaagataacctgtgtatacatatttgttcttagttcatctgcaaaaacaaaaagaatactacttatttcagcaatggaaaattacccaggattgtttcaacaaggcaacactaaaaatattccccaaacaattctttggtatcaaaaaataaataccagatggagtatacactttttgattgactgcaaggaatttattgaaggttgaaagaaagtaaaacttaatgttgcatttagcaaagactttgacttttctcctttgtacattcaacctggggccatagtgaaagtcatattggggataaaatgtcmctatatatttgtaattcagaact

SEQ ID NO: 588977 - DNA, 591 bp, Homo sapiens
acataattcgatgacctatcttgtacctcttaacattttatcgcaagcatacgtccatgtagctacaacttctttgtaatacttccagtgaagtattacaagtattcttgtctctccctcatcagacacagaatctgctagygccttgatcttggactttccagcctccagaactgtaaacaataaatttctgttctttataaatgatccagcctaaggtattttgttaaaacaggccaaacagactactatatgccaaaattgcttaagtcaatctcttaccataaatctttcggggtgtgtgtgtgtgtgtgtgtgtgtgtgtgtgtgtatatatatatgtttatatatgtgtgtatatatacctatttgtacatatatgtttatatatgtgtatatatgcatatttgtacatatatgtatatatacacaaacacatgccaaatatatatacacacatatattatacatattatatacataacatatataatacacatatatacaccaactatatagatttggcatatgtattacatgtatatataccaaatatatacagtttgatatatacaaatatatatgtatata

SEQ ID NO: 588978 - DNA, 591 bp, Homo sapiens
acataattcgatgacctatcttgtacctcttaacattttatcgcaagcatacgtccatgtagctacaacttctttgtaatacttccagtgaagtattacaagtattcttgtctctccctcatcagacacagaatctgctagtgccttgatcttggactttccagcctccagaactgtaaacaataaatttctgttctttataaatgatccagcctaaggtattttgttaaaacaggccaaacagactactatatgcyaaaattgcttaagtcaatctcttaccataaatctttcggggtgtgtgtgtgtgtgtgtgtgtgtgtgtgtgtgtatatatatatgtttatatatgtgtgtatatatacctatttgtacatatatgtttatatatgtgtatatatgcatatttgtacatatatgtatatatacacaaacacatgccaaatatatatacacacatatattatacatattatatacataacatatataatacacatatatacaccaactatatagatttggcatatgtattacatgtatatataccaaatatatacagtttgatatatacaaatatatatgtatata

SEQ ID NO: 588979 - DNA, 442 bp, Homo sapiens
tctccttaatgtccctaaatgtcaccattaatggggagcttattctcttccaagggcatacrttccatagtttttctttacactcattttattattattattattactcccactccctagccatctgggaccacttggacatagcctaactccatcccacaagaaagtctttgggattgttgttagtagtacatatatccagagaggtctattttctaatctaacaagaccctgatgtttgactcttaatcttgagaaatggttttaaaaccctttacgacttagatagatgtgaatttgtcagtgttgtgggaaaacagatgtattcttatctacaaacaaattctaaagttatggtgcaaccagggaagacagaaattatctcctcttttatttttctgaacaaataaagaactgtacttggaaaataaaaaaagatatt

SEQ ID NO: 588980 - DNA, 442 bp, Homo sapiens
tctccttaatgtccctaaatgtcaccattaatggggagcttattctcttccaagggcatacattccatagtttttctttacactcattttwttattattattattactcccactccctagccatctgggaccacttggacatagcctaactccatcccacaagaaagtctttgggattgttgttagtagtacatatatccagagaggtctattttctaatctaacaagaccctgatgtttgactcttaatcttgagaaatggttttaaaaccctttacgacttagatagatgtgaatttgtcagtgttgtgggaaaacagatgtattcttatctacaaacaaattctaaagttatggtgcaaccagggaagacagaaattatctcctcttttatttttctgaacaaataaagaactgtacttggaaaataaaaaaagatatt

SEQ ID NO: 588981 - DNA, 442 bp, Homo sapiens
tctccttaatgtccctaaatgtcaccattaatggggagcttattctcttccaagggcatacattccatagtttttctttacactcattttattattattattattactcccactccctagccatctgggaccacttggacatagcctaactccatcccacaagaaagtctttgggattgttgttagtagtacatatatccagagaggtctattttctaatctaacaagaccctgatgtttgactcttaatcttgagaaatggttttaaaaccctttacgacttagatagatgtgaatttgtcagtgttgtgggaaaacagatgtattcttatctacaaacaaattctaaagttatggtgcaaccagggaagacagaaattatctcctcttttatttttctgaasaaataaagaactgtacttggaaaataaaaaaagatatt

SEQ ID NO: 588982 - DNA, 596 bp, Homo sapiens
ctcattttcaacaaaggtgacaagaacatacattgggaaaaagacagtgtcttcaataaagtgtgctgggaaaaatggatattatgcggaagaaactagacccctatttcttgccatctacaaaaatcaaagtggattaaagacatacatctgagacctcaaactatgaaacttctaaaagagaatattgaggaaaatctccaggacttttgcctgggcaaagatttctggagtaataccacacaagcacaggcaaccaaatcaaacatggacaaacaggatcacatcaagttaaaaagcttytgcacacacacacacacacacaaaatcaacaaaatgaaaagacaacatacagaatgggagaaaatatttgcatactacctgtctgacaagggattaataccagaatatataaggagctcaaacaaatctatagcaaaaaatctaataatctgattagattgctaattaaaaattagcaaagtatctgaatagacatttctcaaaagaacaaatacaaatggcaaacaggcataatgaaaaggcgctcagcatcactgatcatcagagaaatgcaaatcaaaactacaaggaga

SEQ ID NO: 588983 - DNA, 560 bp, Homo sapiens
accttctttttcaatagttgagtgtgttttgaaattccattttaatttatctattagctttttagctataccttgtggttttatttttaaacaattgttctaagaattaaaatatcaattcttaacttttcatattataatattttaccacttataaaatgtaagaacttcagtatatatatgttcatttacatttattgttcttcatgttatagttgtcatattatattgtaaattttccatgacaatattataattatgcttcaaacaatgttgcaatttttaaatcaaatgaaccagtcttttatgtatacttacacatttctatcacattcagtgctcttttcaattcctaaagatctgaattttccctggtattatttcccttcatcagaaagaatctcctttakcatattttgtagtgcaagactggtggtgcatattcttagcttttctttatatgaatatgttttaaatgcactttcattcttgaaggttatcatcattgaatatacacttctgggttgacaggtttttaaaaaaaatctttctttcgttta

SEQ ID NO: 588984 - DNA, 307 bp, Homo sapiens
ggggttttatcatgttgcccaggctggtctcaaactcctgaactcaggcaatctgtccacctaggccctcccaaagtactaggattacaggtgtgagccaatgcacctggccgattttttttttttttgagacagaatcttgttctgtcgcccaggctggagtgcagtggtgtcatcttgactcactgcaacctccacctcccagcttcaagtgattcttctgcctcagtctcccaagtagctggtattacaagtgtgtgccaccacrcacctgtaatcccaggtagagatggggttttgccatgtt

SEQ ID NO: 588985 - DNA, 531 bp, Homo sapiens
taacttcctccttgatattttcacatgattgttttaatggcatctaaaatttacaraagtaatattgcattctataccctcctctcaaacttgctcctttggagattttagtctaagaaaatgtcatctatatttacatagttgctcagatcacaaccctctgagtcttccttaacccacctctttcttcacatccacatcattataagcaagcccagtcggctccacctttaaagtgcatcccaaaccctacctcttcttaaaaccttcgtggcgacctccatggttcaggccatcaccacttttctcttagactctggcatggcatgctcctcctgctttcacccaccagacggtccttttcgcatgcacatcaggtcacaggactcctgcttggacactcccaaagactggtctcttcccacaatgagatatcatctcacgccagttagaatggcgatcattaaaaagtcaggaaacaacagatgctggagaggatgtggagaagtgggaacacttttatactgttgg

SEQ ID NO: 588986 - DNA, 651 bp, Homo sapiens
cctatacaggtgtattttttatgatttatatggtatttttattataccttttctatgtttagatatataaacaccttttttttctttttgcgacggagtttcgctcttgttgcccagactggagtgcaatggcatgatctcagctcaccgcaatctcygcctccctagttcaagcaattctcctgcctcagcctcccgagtagctgggattaaaggcatgcaccaccacgcctgacaaatttttgtatttttagtagaggtggggtttctccatgttggtcagtgtggtctcaaactcccgacctcaggtgatccacccacctcggcctcccaaaatgctgggattacaggtgtgaaccactgcacctggcctatcattgttttacaattgcctgtagtatcagtgcagtaacaagctgtccaggtttgtagcctaagagcaacaggctatatcatatagcttaggcatgtagtaggctacatcctttacattttatgatgtttgcacactgaaaaaattgcctatatgatgttttgcccagcgtgtaaatgtattcctgttgttaagtaacacatgcctacatatatatatttatatgtgtatatatatctgtgtatgtgtgtgtgcatatatgtatacccacagggtta

SEQ ID NO: 588987 - DNA, 651 bp, Homo sapiens
cctatacaggtgtattttttatgatttatatggtatttttattataccttttctatgtttagatatataaacaccttttttttctttttgcgacggagtttcgctcttgttgcccagactggagtgcaatggcatgatctcagctcaccgcaatctctgcctccctagttcaagcaattctcctgcctcagcctcccgagtagctgggattaaaggcatgcaccaccacgcytgacaaatttttgtatttttagtagaggtggggtttctccatgttggtcagtgtggtctcaaactcccgacctcaggtgatccacccacctcggcctcccaaaatgctgggattacaggtgtgaaccactgcacctggcctatcattgttttacaattgcctgtagtatcagtgcagtaacaagctgtccaggtttgtagcctaagagcaacaggctatatcatatagcttaggcatgtagtaggctacatcctttacattttatgatgtttgcacactgaaaaaattgcctatatgatgttttgcccagcgtgtaaatgtattcctgttgttaagtaacacatgcctacatatatatatttatatgtgtatatatatctgtgtatgtgtgtgtgcatatatgtatacccacagggtta

SEQ ID NO: 588988 - DNA, 651 bp, Homo sapiens
cctatacaggtgtattttttatgatttatatggtatttttattataccttttctatgtttagatatataaacaccttttttttctttttgcgacggagtttcgctcttgttgcccagactggagtgcaatggcatgatctcagctcaccgcaatctctgcctccctagttcaagcaattctcctgcctcagcctcccgagtagctgggattaaaggcatgcaccaccacgcctgacaaatttttgtatttttagtagaggtggggtttctccatgttggtcagtgtggtctcaaactccygacctcaggtgatccacccacctcggcctcccaaaatgctgggattacaggtgtgaaccactgcacctggcctatcattgttttacaattgcctgtagtatcagtgcagtaacaagctgtccaggtttgtagcctaagagcaacaggctatatcatatagcttaggcatgtagtaggctacatcctttacattttatgatgtttgcacactgaaaaaattgcctatatgatgttttgcccagcgtgtaaatgtattcctgttgttaagtaacacatgcctacatatatatatttatatgtgtatatatatctgtgtatgtgtgtgtgcatatatgtatacccacagggtta

SEQ ID NO: 588989 - DNA, 655 bp, Homo sapiens
  misc_feature 1, 2, 3, 4, 5, 6, 7, 8, 9, 10, 11, 12, 13, 14, 15, 16, 17,18, 19, 20, 21, 22, 23, 24, 25, 26, 27, 28, 29, 30: n = A,T,C or G
nnnnnnnnnnnnnnnnnnnnnnnnnnnnnngtgcccatctggggctcacatttgatgatgcaaaggacttgatggcttaccccaaaggtatccctttttctcaccaacaggaaaggacctcggaagtcttctaaggagagtcatggcgtattaccaggagccttcagtggagacctccatcatcaagttcaaagaccaggactttaccaccttgcgggatcactgcctgagcatgggccggacgtttaaggatgagacattccctgcagcagattcttccataggccagaagctgctccaggaaaaacgcctctccaatgtgatatggaagcggccacaggtgagtgagccccacasgagcatacccagctccagggtcctcggagtcgcctgccatggcacctccagccaaaaggaggtggagccaaaccaaactggaaggagaatgaaattcaccaggtatctctgctacagtgttgtagctactcagcaggatgggaagatgctatagcaggaaccaggagcccagactcctgagttctaacccagttctaacactaagtacaccactaaattaaaatacctcagtttttcatccaaaaaatgggaaaccacgggtatgaagattgtagttgttgctctttggagtctcctc

SEQ ID NO: 588990 - DNA, 655 bp, Homo sapiens
  misc_feature 1, 2, 3, 4, 5, 6, 7, 8, 9, 10, 11, 12, 13, 14, 15, 16, 17,18, 19, 20, 21, 22, 23, 24, 25, 26, 27, 28, 29, 30: n = A,T,C or G
nnnnnnnnnnnnnnnnnnnnnnnnnnnnnngtgcccatctggggctcacatttgatgatgcaaaggacttgatggcttaccccaaaggtatccctttttctcaccaacaggaaaggacctcggaagtcttctaaggagagtcatggcgtattaccaggagccttcagtggagacctccatcatcaagttcaaagaccaggactttaccaccttgcgggatcactgcctgagcatgggccggacgtttaaggatgagacattccctgcagcagattcttccataggccagaagctgctccaggaaaaacgcctctccaatgtgatatggaagcggccacaggtgagtgagccccacacgagcatacccagctccagggtcctcggagtcgcctgccatggcacctccagccaaaaggaggtggagccaaaccaaactggaaggagaatgaaattcaccrggtatctctgctacagtgttgtagctactcagcaggatgggaagatgctatagcaggaaccaggagcccagactcctgagttctaacccagttctaacactaagtacaccactaaattaaaatacctcagtttttcatccaaaaaatgggaaaccacgggtatgaagattgtagttgttgctctttggagtctcctc

SEQ ID NO: 588991 - DNA, 540 bp, Homo sapiens
tcttttcttctaaggtgttctttcaagagggtaactgaatacaaccaaataactaggggacaagacagggtacctaccaggcacagcagaactccagctctgtcatttgcatctggtataaacttttgcagcaagtcactcaccggtccctcactttttccatctacaaaatgggataatgaactcatgctatatatagcttttgcctattacacagttggtagattattacatttccatcaaccaatctactaataagtaagcctycctacagctgtcactcctccaaccttcaaaataacaacaacaacaacaacaacaacaaaaacccacaatacttatgtcaaggtgggtacaaaggtgagacaattcaagaggataatctgattgaaagtctagttaatgccactcgggggtaaccaaagttgtgtttgtgacccaggacaaatgggacagtcagtagttcatgacccaactgtaactatagagggaaaatatctgcacttattctaatctggttaacttgggtccaagctgagc

SEQ ID NO: 588992 - DNA, 604 bp, Homo sapiens
atttctacatttctcttggcattttgttttgttttcccaaccccaagttccttaaatatctcttagttgatctcctaacttacttttcttctgtattaaatcttattggcgattatttcaaatacaattcccaaaagaatcaaattctccagctcctacctttgtactacacatacccttcaaagctgatctgatctaggatctctcttcccttgcaccaccarttctcccattcctttgccctgacagtaatggactctggagaaaatcgttcatctgcatattaagattgcatcttagtgcacactgtctacattttggtgagtctttagtactttttaccattcctttttgttatgccaatcagttccttctattattccccataagagctctctcagcccttcatcagtctctgtaggtctctcactttagacctttcagtgaaattctttcttgaaagacagacagcccatgaatgatgttcttcctcccaattttacttttgttcctatttactctgcccttcctactttctagctgccttaggaagcaataaataaatcttccttttcaaaactcaatccttatttttgcttttttg

SEQ ID NO: 588993 - DNA, 604 bp, Homo sapiens
atttctacatttctcttggcattttgttttgttttcccaaccccaagttccttaaatatctcttagttgatctcctaacttacttttcttctgtattaaatcttattggcgattatttcaaatacaattcccaaaagaatcaaattctccagctcctacctttgtactacacatacccttcaaagctgatctgatctaggatctctcttcccttgcaccaccagttctcccattcctttgccctgacagtaatggactctggagaaaatcgttcatctgcatattaagattgyatcttagtgcacactgtctacattttggtgagtctttagtactttttaccattcctttttgttatgccaatcagttccttctattattccccataagagctctctcagcccttcatcagtctctgtaggtctctcactttagacctttcagtgaaattctttcttgaaagacagacagcccatgaatgatgttcttcctcccaattttacttttgttcctatttactctgcccttcctactttctagctgccttaggaagcaataaataaatcttccttttcaaaactcaatccttatttttgcttttttg

SEQ ID NO: 588994 - DNA, 584 bp, Homo sapiens
gtaccagtacagggttcattcytgccacattcccccagctcctgtacctgctcacctgcatgctccctctcaggcagggggtttgagcatggtggcagtcaaataagtgggccacacccctttcacaagtcctgcaaaggggtcaagggaactctcccgtctcaatagcaagcagtcagagagtacaggactaggagttaggaaaccagggttctagtttagctccaacaattagcgattatgtaatgtctcagcttccattgtgtggattgcctctgcctcttcagcaggtagttacgaagctcatctgagaacagatgaggaagaaaacgtctggtgtactgtaaaacccaacatgtcatgtgggttttgtgccagggcaatatatacattcattgagtacctactgtgtgtagactctgtgctaagactacatattccaggagtttcaaaagtaatcagaaagcttatgcctacaaaaagacttgcataagaacatgcacagcaattttcttcataatagctgcaaactggaaacagcgcaggtgaccatcgataaggaaatagattaaaaaattgtggta

SEQ ID NO: 588995 - DNA, 589 bp, Homo sapiens
tgagaacagtatggggaaaaccacccccatgattaacttacctcccactgagtccctccacgacacatgggaattatgggagctacaattcaagatgagatttgggtgggcacacagccaaaccatatcaaccactgtagacatgaccaagttcagacttggtcagtagtcaaatgagcctgtgagagaatggtgccacatctttcctgtaagagcacagcattttaacctgcgatggatttgtgagcagycattccaactctgtattatgttttctacagttgctgtaacaaattaccacaagcttaatggcttaaaaccatgtaaatatattatcccacagttctgaagtcagaaatctgaaatagataggctaaaagcaaggggtgacaggctgcattcctttctggaggctctaggggagaatctgtttccttgccttttccaacttctagaggccgctggcattccttggctctttgccccttcccttcttcaaagccagcagcagtagttgagtcctccttaacacagcatcactttttttttttttttttgccttcttcttccacttttaaggactctgtga

SEQ ID NO: 588996 - DNA, 589 bp, Homo sapiens
tgagaacagtatggggaaaaccacccccatgattaacttacctcccactgagtccctccacgacacatgggaattatgggagctacaattcaagatgagatttgggtgggcacacagccaaaccatatcaaccactgtagacatgaccaagttcagacttggtcagtagtcaaatgagcctgtgagagaatggtgccacatctttcctgtaagagcacagcattttaacctgcgatggatttgtgagcagtsattccaactctgtattatgttttctacagttgctgtaacaaattaccacaagcttaatggcttaaaaccatgtaaatatattatcccacagttctgaagtcagaaatctgaaatagataggctaaaagcaaggggtgacaggctgcattcctttctggaggctctaggggagaatctgtttccttgccttttccaacttctagaggccgctggcattccttggctctttgccccttcccttcttcaaagccagcagcagtagttgagtcctccttaacacagcatcactttttttttttttttttgccttcttcttccacttttaaggactctgtga
